United States Patent Application Publication US 2007/0214517 A1 - sequence listing, part 33

SEQ ID NO: 39028 - DNA, 3083 bp, Arabidopsis thaliana
  misc_feature (1)..(3083): Ceres Seq. ID no. 13488125
  misc_feature: MA Experiment ID: 108464 Result: Up-regulated in Transcription
  misc_feature: MA Experiment 108464 PARAMETER Experiment Name: At_Germinating_Seeds_cDNA_P Parameter: Age (day) Value: 4 vs. 0
  misc_feature: MA Experiment 108464 PARAMETER Experiment Name: At_Germinating_Seeds_cDNA_P Parameter: Tissue Value: Germinating Seeds
  misc_feature: MA Experiment ID: 108573 Result: Up-regulated in Transcription
  misc_feature: MA Experiment 108573 PARAMETER Experiment Name: At_Drought_cDNA_P Parameter: Timepoint (hr) Value: 6
  misc_feature: MA Experiment 108573 PARAMETER Experiment Name: At_Drought_cDNA_P Parameter: Tissue Value: Aerial
  misc_feature: MA Experiment 108573 PARAMETER Experiment Name: At_Drought_cDNA_P Parameter: Treatment Value: Drought vs. No Drought
  misc_feature: MA Experiment ID: 108667 Result: Up-regulated in Transcription
  misc_feature: MA Experiment 108667 PARAMETER Experiment Name: At_2mM_SA_cDNA_P Parameter: Plant Line Value: WS
  misc_feature: MA Experiment 108667 PARAMETER Experiment Name: At_2mM_SA_cDNA_P Parameter: Timepoint (hr) Value: 1
  misc_feature: MA Experiment 108667 PARAMETER Experiment Name: At_2mM_SA_cDNA_P Parameter: Treatment Value: 2mM SA vs. No Treatment
  misc_feature: MA Experiment ID: 108668 Result: Up-regulated in Transcription
  misc_feature: MA Experiment 108668 PARAMETER Experiment Name: At_2mM_SA_cDNA_P Parameter: Plant Line Value: WS
  misc_feature: MA Experiment 108668 PARAMETER Experiment Name: At_2mM_SA_cDNA_P Parameter: Timepoint (hr) Value: 6
  misc_feature: MA Experiment 108668 PARAMETER Experiment Name: At_2mM_SA_cDNA_P Parameter: Treatment Value: 2mM SA vs. No Treatment
  misc_feature: MA Experiment ID: 20000111 Result: Up-regulated in Transcription
  misc_feature: MA Experiment 20000111 PARAMETER Experiment Name: At_42deg_Heat_cDNA_P Parameter: Temperature (deg C) Value: 42 vs. 22
  misc_feature: MA Experiment 20000111 PARAMETER Experiment Name: At_42deg_Heat_cDNA_P Parameter: Timepoint (hr) Value: 6
  misc_feature: MA Experiment 20000111 PARAMETER Experiment Name: At_42deg_Heat_cDNA_P Parameter: Tissue Value: Aerial
  misc_feature: MA Experiment ID: 20000185 Result: Up-regulated in Transcription
  misc_feature: MA Experiment 20000185 PARAMETER Experiment Name: At_Roots__P Parameter: Age (day) Value: 7 vs. 21
  misc_feature: MA Experiment 20000185 PARAMETER Experiment Name: At_Roots__P Parameter: Organism Value: A. thaliana
  misc_feature: MA Experiment 20000185 PARAMETER Experiment Name: At_Roots__P Parameter: Tissue Value: Roots vs. Whole Plant
  misc_feature: MA Experiment ID: 20000227 Result: Down-regulated in Transcription
  misc_feature: MA Experiment 20000227 PARAMETER Experiment Name: At_Root-Tips-vs-Tops_P Parameter: Tissue Value: Root Tips vs. Root Tops
  misc_feature: MA Experiment ID: 20000264 Result: Up-regulated in Transcription
  misc_feature: MA Experiment 20000264 PARAMETER Experiment Name: At_Open_Flower_P Parameter: Age (day) Value: 21
  misc_feature: MA Experiment 20000264 PARAMETER Experiment Name: At_Open_Flower_P Parameter: Plant Line Value: WS
  misc_feature: MA Experiment 20000264 PARAMETER Experiment Name: At_Open_Flower_P Parameter: Tissue Value: Open Flower vs. Whole Plant
  misc_feature: MA Experiment ID: 20000265 Result: Up-regulated in Transcription
  misc_feature: MA Experiment 20000265 PARAMETER Experiment Name: At_Open_Flower_P Parameter: Age (day) Value: 21
  misc_feature: MA Experiment 20000265 PARAMETER Experiment Name: At_Open_Flower_P Parameter: Plant Line Value: WS
  misc_feature: MA Experiment 20000265 PARAMETER Experiment Name: At_Open_Flower_P Parameter: Tissue Value: Closed Flower vs. Whole Plant
  misc_feature: MA Experiment ID: 20000286 Result: Up-regulated in Transcription
  misc_feature: MA Experiment 20000286 PARAMETER Experiment Name: At_Open_Flower_P Parameter: Age (day) Value: 21
  misc_feature: MA Experiment 20000286 PARAMETER Experiment Name: At_Open_Flower_P Parameter: Plant Line Value: WS
  misc_feature: MA Experiment 20000286 PARAMETER Experiment Name: At_Open_Flower_P Parameter: Tissue Value: Half Open vs. Whole Plant
  misc_feature: MA Experiment ID: 20000436 Result: Up-regulated in Transcription
  misc_feature: MA Experiment 20000436 PARAMETER Experiment Name: At_Drought_P Parameter: Age (day) Value: 7
  misc_feature: MA Experiment 20000436 PARAMETER Experiment Name: At_Drought_P Parameter: Organism Value: A. thaliana
  misc_feature: MA Experiment 20000436 PARAMETER Experiment Name: At_Drought_P Parameter: Plant Line Value: WS
  misc_feature: MA Experiment 20000436 PARAMETER Experiment Name: At_Drought_P Parameter: Timepoint (hr) Value: 12
  misc_feature: MA Experiment 20000436 PARAMETER Experiment Name: At_Drought_P Parameter: Tissue Value: Whole Plant
  misc_feature: MA Experiment 20000436 PARAMETER Experiment Name: At_Drought_P Parameter: Treatment Value: Drought vs. No Drought
  misc_feature: MA Experiment ID: 20000437 Result: Up-regulated in Transcription
  misc_feature: MA Experiment 20000437 PARAMETER Experiment Name: At_Drought_P Parameter: Age (day) Value: 8
  misc_feature: MA Experiment 20000437 PARAMETER Experiment Name: At_Drought_P Parameter: Organism Value: A. thaliana
  misc_feature: MA Experiment 20000437 PARAMETER Experiment Name: At_Drought_P Parameter: Plant Line Value: WS
  misc_feature: MA Experiment 20000437 PARAMETER Experiment Name: At_Drought_P Parameter: Timepoint (hr) Value: 24
  misc_feature: MA Experiment 20000437 PARAMETER Experiment Name: At_Drought_P Parameter: Tissue Value: Whole Plant
  misc_feature: MA Experiment 20000437 PARAMETER Experiment Name: At_Drought_P Parameter: Treatment Value: Drought vs. No Drought
  misc_feature: MA Experiment ID: 20000439 Result: Up-regulated in Transcription
  misc_feature: MA Experiment 20000439 PARAMETER Experiment Name: At_Roots__P Parameter: Age (day) Value: 14 vs. 21
  misc_feature: MA Experiment 20000439 PARAMETER Experiment Name: At_Roots__P Parameter: Organism Value: A. thaliana
  misc_feature: MA Experiment 20000439 PARAMETER Experiment Name: At_Roots__P Parameter: Tissue Value: Roots vs. Whole Plant
  misc_feature: MA Experiment ID: 20000573 Result: Up-regulated in Transcription
  misc_feature: MA Experiment 20000573 PARAMETER Experiment Name: At_100uM_ABA_Mutants__P Parameter: Organism Value: A. thaliana
  misc_feature: MA Experiment 20000573 PARAMETER Experiment Name: At_100uM_ABA_Mutants__P Parameter: Plant Line Value: CS22 vs. Ler wt
  misc_feature: MA Experiment 20000573 PARAMETER Experiment Name: At_100uM_ABA_Mutants__P Parameter: Timepoint (hr) Value: N/A
  misc_feature: MA Experiment 20000573 PARAMETER Experiment Name: At_100uM_ABA_Mutants__P Parameter: Tissue Value: Whole Plant
  misc_feature: MA Experiment 20000573 PARAMETER Experiment Name: At_100uM_ABA_Mutants__P Parameter: Treatment Value: None
  misc_feature: MA Experiment ID: 20000574 Result: Up-regulated in Transcription
  misc_feature: MA Experiment 20000574 PARAMETER Experiment Name: At_100uM_ABA_Mutants__P Parameter: Organism Value: A. thaliana
  misc_feature: MA Experiment 20000574 PARAMETER Experiment Name: At_100uM_ABA_Mutants__P Parameter: Plant Line Value: CS23 vs. Ler wt
  misc_feature: MA Experiment 20000574 PARAMETER Experiment Name: At_100uM_ABA_Mutants__P Parameter: Timepoint (hr) Value: N/A
  misc_feature: MA Experiment 20000574 PARAMETER Experiment Name: At_100uM_ABA_Mutants__P Parameter: Tissue Value: Whole Plant
  misc_feature: MA Experiment 20000574 PARAMETER Experiment Name: At_100uM_ABA_Mutants__P Parameter: Treatment Value: None
  misc_feature: MA Experiment ID: 20000794 Result: Up-regulated in Transcription
  misc_feature: MA Experiment 20000794 PARAMETER Experiment Name: At_Petals_P Parameter: Age (day) Value: 23-25 days
  misc_feature: MA Experiment 20000794 PARAMETER Experiment Name: At_Petals_P Parameter: Plant Line Value: WS
  misc_feature: MA Experiment 20000794 PARAMETER Experiment Name: At_Petals_P Parameter: Tissue Value: Petals vs. Whole plant
  misc_feature: MA Experiment ID: 20001247 Result: Up-regulated in Transcription
  misc_feature: MA Experiment 20001247 PARAMETER Experiment Name: At_Far-red-induction_P Parameter: Age (day) Value: 7
  misc_feature: MA Experiment 20001247 PARAMETER Experiment Name: At_Far-red-induction_P Parameter: Light Value: Far-red vs. White
  misc_feature: MA Experiment 20001247 PARAMETER Experiment Name: At_Far-red-induction_P Parameter: Organism Value: A. thaliana
  misc_feature: MA Experiment 20001247 PARAMETER Experiment Name: At_Far-red-induction_P Parameter: Plant Line Value: Columbia
  misc_feature: MA Experiment 20001247 PARAMETER Experiment Name: At_Far-red-induction_P Parameter: Timepoint (hr) Value: 1
  misc_feature: MA Experiment 20001247 PARAMETER Experiment Name: At_Far-red-induction_P Parameter: Tissue Value: Whole Plant
  misc_feature: MA Experiment ID: 20001557 Result: Down-regulated in Transcription
  misc_feature: MA Experiment 20001557 PARAMETER Experiment Name: At_Drought_Soil_Dry_P Parameter: Age (day) Value: 27
  misc_feature: MA Experiment 20001557 PARAMETER Experiment Name: At_Drought_Soil_Dry_P Parameter: Organism Value: A. thaliana
  misc_feature: MA Experiment 20001557 PARAMETER Experiment Name: At_Drought_Soil_Dry_P Parameter: Plant Line Value: WS
  misc_feature: MA Experiment 20001557 PARAMETER Experiment Name: At_Drought_Soil_Dry_P Parameter: Post Timepoint (hr) Value: 3
  misc_feature: MA Experiment 20001557 PARAMETER Experiment Name: At_Drought_Soil_Dry_P Parameter: Post-Treatment Value: Re-Water vs. No Drought
  misc_feature: MA Experiment 20001557 PARAMETER Experiment Name: At_Drought_Soil_Dry_P Parameter: Timepoint (day) Value: 13
  misc_feature: MA Experiment 20001557 PARAMETER Experiment Name: At_Drought_Soil_Dry_P Parameter: Treatment Value: Drought vs. No Drought
  misc_feature: MA Experiment ID: 20001558 Result: Down-regulated in Transcription
  misc_feature: MA Experiment 20001558 PARAMETER Experiment Name: At_Drought_Soil_Dry_P Parameter: Age (day) Value: 27
  misc_feature: MA Experiment 20001558 PARAMETER Experiment Name: At_Drought_Soil_Dry_P Parameter: Organism Value: A. thaliana
  misc_feature: MA Experiment 20001558 PARAMETER Experiment Name: At_Drought_Soil_Dry_P Parameter: Plant Line Value: WS
  misc_feature: MA Experiment 20001558 PARAMETER Experiment Name: At_Drought_Soil_Dry_P Parameter: Post Timepoint (hr) Value: 6
  misc_feature: MA Experiment 20001558 PARAMETER Experiment Name: At_Drought_Soil_Dry_P Parameter: Post-Treatment Value: Re-Water vs. No Drought
  misc_feature: MA Experiment 20001558 PARAMETER Experiment Name: At_Drought_Soil_Dry_P Parameter: Timepoint (day) Value: 13
  misc_feature: MA Experiment 20001558 PARAMETER Experiment Name: At_Drought_Soil_Dry_P Parameter: Treatment Value: Drought vs. No Drought
  misc_feature: MA Experiment ID: 20001560 Result: Down-regulated in Transcription
  misc_feature: MA Experiment 20001560 PARAMETER Experiment Name: At_Drought_Soil_Dry_P Parameter: Age (day) Value: 28
  misc_feature: MA Experiment 20001560 PARAMETER Experiment Name: At_Drought_Soil_Dry_P Parameter: Organism Value: A. thaliana
  misc_feature: MA Experiment 20001560 PARAMETER Experiment Name: At_Drought_Soil_Dry_P Parameter: Plant Line Value: WS
  misc_feature: MA Experiment 20001560 PARAMETER Experiment Name: At_Drought_Soil_Dry_P Parameter: Post Timepoint (hr) Value: None
  misc_feature: MA Experiment 20001560 PARAMETER Experiment Name: At_Drought_Soil_Dry_P Parameter: Post-Treatment Value: None
  misc_feature: MA Experiment 20001560 PARAMETER Experiment Name: At_Drought_Soil_Dry_P Parameter: Timepoint (day) Value: 14
  misc_feature: MA Experiment 20001560 PARAMETER Experiment Name: At_Drought_Soil_Dry_P Parameter: Treatment Value: Drought vs. No Drought
acttgacaaaattgaaaaacgcgtctccgagaggaaaatttagagaaaagcttctcgcgatcgcatcgggctcgtagatcgatctcctcctccatccaatcttccgttttcgtattcaccgtccggtaagaccttccggtacttgtgaatcggagaagaggaaggagaaaaattatcgcgttcctggaaattgaatttctagggtttcgtttttttctgaattattctgattctgatttcgtcaagggtgtttttcttaattggttgattgatcgtctttctagttcaattgttgaaaagtaattgaacatctattgaaatctgcttctcgtgatttgattctgggtttcgttgattggtttttttcgaggggtttgtttgttttatccttttttatttctataagatcaatttctcattgagaagaatacgatggcagcagggggtgttgatgtttccagaagttccgttgctgtcaaaaaagactacgacttttacaggaatggttctcgtgatgtgtatgttcgacagagtggtagagatgacgagaggcgtcaaatcaaaaggcctagtgaccatgatctcaggaggaatgatgggcgtcaccgatcacggttggcatatgagaaaggggaactacgggaggaagcagaggttcagagaccctctgagaaaaggaggaagttttcacccatcgtgtggaatgcagaaaaagtgggtagagctccatctagggagaagaccaagtctcctttccctgttccgactacaactgtgatatccaatcaggctgttgctggtaagactacttcaaacgatcaagtgaatgccttgatgtcgccagaacctagttatcttgctccagtgcagccttcagaagccctgctggctgtgaaacatcctgttgatgatttggaggagggtcagttggaggaagaacaggtgatgcaggaggatgtaaaggagggtctgttggaggaagaacaagtgatgcaggaaccaaatataaagacatctaggtgggggacaggtttgacttccccaaaggaggagttaatatctgttaacgtttccaagactaatagatggaacaggagcagtttgacaccggagtgcgaggaagtaatggtgtctgaagaacagcagtgctattcgtctggatctggcagtggacatctcagcgtagagaagcttagtgcagatggaaattctggtcgtgagtattatagttctgatcatgatgagttagaacatgaagatcaagattctttaactccgggagagatgaacatgatgtttgggagcaggtctgtgaatgaatttcagaagctaaacaagataaatgaaggaacatatggaattgtttacaaagcaagggatgagaaaacaaaagagattgttgcgctcaaaaagatcaagatgaaggaagataggttcgaagaagagtatggattccctttgacatcattgagggaaattaacatacttttgtcatgcaatcaccctgcgattgtgaacgtgaaggaggttgtggttggagggaaaaacgataatgatgtttatatggtcatggaacacttagaacacgacctgaggggagtaatggatagaaggaaggaaccttttagcactagcgaagtcaagtgcttgatgatgcagctgttggatggtttgaaatacctccacacaaattggattatccacagggatctgaagccatctaatcttctgatgaacaattgtggggagttaaaaatatgtgattttgggatggcgcgccagtatgggagccctatcaagccttacacccagatggttattacccagtggtacaggccacctgaacttcttctaggagcaaaagagtactctacagcagttgatatgtggtcagtgggttgcattatggctgaactgttgtctcaaaagcctttgttcccgggtaagagtgagcttgaccaacttcagaagatctttgcggtccttggaacaccaaacgaagcaatatggcctgggttctcatcatttccgaatgctaaagccaagtttcctacacagccttacaatatgttacgtaagaagtttccagctatttcatttgtaggtggtcaaattctttctgaacgtggatttgatttgctgaacagtctactaactttggaccctgagaaacgtctaacagtggaagatgctctcaaccatggttggttccatgaagtcccgttaccaaaatccaaagatttcatgccgacatatcctccaaagcggtaactgagaaaaaacgtgctatcatttggacgagaggatgtcaacaaatacacagggaagtcgactggtcgtattttggtattttcctttttactcaaaagacttgctttcatctattcttaactcagttgcgttgctttgttgcctggagattcagggcattctagtgtaccatttattcggattcatgtgtaaatatgagtggtccgtaaaactgaaaggtgtgtttctctcttttcgttaggaccctaatgttattgctatcaagagttgtacacactattgactcacatgctttaatggaagagatctcagtattcactttctctctctagtaattgggttgggatggttattgtttatgtcctcatatttcttctgtgcattgtttttattcacgaggtaaacgcaaagagtttatcacaaacgtgagaatggaagttgacatcagtaagtttattttgattacttatttaccacgctctgttatcaatgttggtttgttgttcgacgtccctttgtctttgaggtgctcgtatttggtctgttggcagtgagaaaaagatgattcatgatgagtttctgtggacataggaggtatggcagtggtttttttcatgttaatccgagaattaagggatttgggataaaaagctatatagaaagaagctaaaataagtttgtcttcaacactataaccctttgtcctcctttctttttaacttctgtaaacagctaagctaaatcaagttcatttcaataacgaataaactagaatcagcattacctttgacgaggccataaacagaaaggag

SEQ ID NO: 39029 - protein, 612 aa, Arabidopsis thaliana
  peptide (1)..(612): Ceres Seq. ID no. 13488126
  misc_feature (297)..(593): Pfam Name: Protein kinase domain Pfam Description: Protein kinase domain
  misc_feature (26)..(611): Homolog of NCBI NO: 16332362 NR Description: cell division cycle 2-like 1 (PITSLRE proteins)
  misc_feature (26)..(611): Homolog of NCBI NO: 16332358 NR Description: cell division cycle 2-like 1 (PITSLRE proteins)
  misc_feature (26)..(611): Homolog of NCBI NO: 3978440 NR Description: PITSLRE protein kinase alpha SV5 isoform [Homo
  misc_feature (26)..(611): Homolog of NCBI NO: 16357492 NR Description: cell division cycle 2-like 2 isoform 1
  misc_feature (26)..(611): Homolog of NCBI NO: 1082285 NR Description: protein kinase (EC 2.7.1.37) cdc2-related PITSLRE
  misc_feature (26)..(611): Homolog of NCBI NO: 507427 NR Description: PITSLRE isoform PBETA21
  misc_feature (25)..(611): Homolog of NCBI NO: 3978441 NR Description: PITSLRE protein kinase alpha SV9 isoform [Homo
  misc_feature (267)..(609): Homolog of NCBI NO: 17064846 NR Description: putative protein kinase [Arabidopsis thaliana]
  misc_feature (267)..(609): Homolog of NCBI NO: 15220477 NR Description: protein kinase family [Arabidopsis thaliana]
  misc_feature (45)..(609): Homolog of NCBI NO: 38344237 NR Description: OJ991113_30.14 [Oryza sativa (japonica
MAAGGVDVSRSSVAVKKDYDFYRNGSRDVYVRQSGRDDERRQIKRPSDHDLRRNDGRHRSRLAYEKGELREEAEVQRPSEKRRKFSPIVWNAEKVGRAPSREKTKSPFPVPTTTVISNQAVAGKTTSNDQVNALMSPEPSYLAPVQPSEALLAVKHPVDDLEEGQLEEEQVMQEDVKEGLLEEEQVMQEPNIKTSRWGTGLTSPKEELISVNVSKTNRWNRSSLTPECEEVMVSEEQQCYSSGSGSGHLSVEKLSADGNSGREYYSSDHDELEHEDQDSLTPGEMNMMFGSRSVNEFQKLNKINEGTYGIVYKARDEKTKEIVALKKIKMKEDRFEEEYGFPLTSLREINILLSCNHPAIVNVKEVVVGGKNDNDVYMVMEHLEHDLRGVMDRRKEPFSTSEVKCLMMQLLDGLKYLHTNWIIHRDLKPSNLLMNNCGELKICDFGMARQYGSPIKPYTQMVITQWYRPPELLLGAKEYSTAVDMWSVGCIMAELLSQKPLFPGKSELDQLQKIFAVLGTPNEAIWPGFSSFPNAKAKFPTQPYNMLRKKFPAISFVGGQILSERGFDLLNSLLTLDPEKRLTVEDALNHGWFHEVPLPKSKDFMPTYPPKR

SEQ ID NO: 39030 - protein, 478 aa, Arabidopsis thaliana
  peptide (1)..(478): Ceres Seq. ID no. 13488127
  misc_feature (163)..(459): Pfam Name: Protein kinase domain Pfam Description: Protein kinase domain
  misc_feature (1)..(477): Homolog of NCBI NO: 16332364 NR Description: cell division cycle 2-like 1 (PITSLRE proteins)
  misc_feature (1)..(477): Homolog of NCBI NO: 16332362 NR Description: cell division cycle 2-like 1 (PITSLRE proteins)
  misc_feature (1)..(477): Homolog of NCBI NO: 3978440 NR Description: PITSLRE protein kinase alpha SV5 isoform [Homo
  misc_feature (1)..(477): Homolog of NCBI NO: 16357492 NR Description: cell division cycle 2-like 2 isoform 1
  misc_feature (1)..(477): Homolog of NCBI NO: 1082285 NR Description: protein kinase (EC 2.7.1.37) cdc2-related PITSLRE
  misc_feature (1)..(477): Homolog of NCBI NO: 507427 NR Description: PITSLRE isoform PBETA21
  misc_feature (1)..(477): Homolog of NCBI NO: 3978441 NR Description: PITSLRE protein kinase alpha SV9 isoform [Homo
  misc_feature (133)..(475): Homolog of NCBI NO: 17064846 NR Description: putative protein kinase [Arabidopsis thaliana]
  misc_feature (133)..(475): Homolog of NCBI NO: 15220477 NR Description: protein kinase family [Arabidopsis thaliana]
  misc_feature (1)..(475): Homolog of NCBI NO: 38344237 NR Description: OJ991113_30.14 [Oryza sativa (japonica
MSPEPSYLAPVQPSEALLAVKHPVDDLEEGQLEEEQVMQEDVKEGLLEEEQVMQEPNIKTSRWGTGLTSPKEELISVNVSKTNRWNRSSLTPECEEVMVSEEQQCYSSGSGSGHLSVEKLSADGNSGREYYSSDHDELEHEDQDSLTPGEMNMMFGSRSVNEFQKLNKINEGTYGIVYKARDEKTKEIVALKKIKMKEDRFEEEYGFPLTSLREINILLSCNHPAIVNVKEVVVGGKNDNDVYMVMEHLEHDLRGVMDRRKEPFSTSEVKCLMMQLLDGLKYLHTNWIIHRDLKPSNLLMNNCGELKICDFGMARQYGSPIKPYTQMVITQWYRPPELLLGAKEYSTAVDMWSVGCIMAELLSQKPLFPGKSELDQLQKIFAVLGTPNEAIWPGFSSFPNAKAKFPTQPYNMLRKKFPAISFVGGQILSERGFDLLNSLLTLDPEKRLTVEDALNHGWFHEVPLPKSKDFMPTYPPKR

SEQ ID NO: 39031 - protein, 441 aa, Arabidopsis thaliana
  peptide (1)..(441): Ceres Seq. ID no. 13488128
  misc_feature (126)..(422): Pfam Name: Protein kinase domain Pfam Description: Protein kinase domain
  misc_feature (1)..(440): Homolog of NCBI NO: 16332362 NR Description: cell division cycle 2-like 1 (PITSLRE proteins)
  misc_feature (1)..(440): Homolog of NCBI NO: 16332358 NR Description: cell division cycle 2-like 1 (PITSLRE proteins)
  misc_feature (1)..(440): Homolog of NCBI NO: 3978440 NR Description: PITSLRE protein kinase alpha SV5 isoform [Homo
  misc_feature (1)..(440): Homolog of NCBI NO: 1082285 NR Description: protein kinase (EC 2.7.1.37) cdc2-related PITSLRE
  misc_feature (1)..(440): Homolog of NCBI NO: 16357492 NR Description: cell division cycle 2-like 2 isoform 1
  misc_feature (1)..(440): Homolog of NCBI NO: 507427 NR Description: PITSLRE isoform PBETA21
  misc_feature (1)..(440): Homolog of NCBI NO: 3978441 NR Description: PITSLRE protein kinase alpha SV9 isoform [Homo
  misc_feature (96)..(438): Homolog of NCBI NO: 17064846 NR Description: putative protein kinase [Arabidopsis thaliana]
  misc_feature (96)..(438): Homolog of NCBI NO: 15220477 NR Description: protein kinase family [Arabidopsis thaliana]
  misc_feature (1)..(438): Homolog of NCBI NO: 38344237 NR Description: OJ991113_30.14 [Oryza sativa (japonica
MQEDVKEGLLEEEQVMQEPNIKTSRWGTGLTSPKEELISVNVSKTNRWNRSSLTPECEEVMVSEEQQCYSSGSGSGHLSVEKLSADGNSGREYYSSDHDELEHEDQDSLTPGEMNMMFGSRSVNEFQKLNKINEGTYGIVYKARDEKTKEIVALKKIKMKEDRFEEEYGFPLTSLREINILLSCNHPAIVNVKEVVVGGKNDNDVYMVMEHLEHDLRGVMDRRKEPFSTSEVKCLMMQLLDGLKYLHTNWIIHRDLKPSNLLMNNCGELKICDFGMARQYGSPIKPYTQMVITQWYRPPELLLGAKEYSTAVDMWSVGCIMAELLSQKPLFPGKSELDQLQKIFAVLGTPNEAIWPGFSSFPNAKAKFPTQPYNMLRKKFPAISFVGGQILSERGFDLLNSLLTLDPEKRLTVEDALNHGWFHEVPLPKSKDFMPTYPPKR

SEQ ID NO: 39032 - DNA, 1418 bp, Arabidopsis thaliana; identical to SEQ ID NO: 25846
  misc_feature (1)..(1418): Ceres Seq. ID no. 12562549
  misc_feature: MA Experiment ID: 108433 Result: Up-regulated in Transcription
  misc_feature: MA Experiment 108433 PARAMETER Experiment Name: At_rhl_Mutant2_cDNA_P Parameter: Age (day) Value: 7
  misc_feature: MA Experiment 108433 PARAMETER Experiment Name: At_rhl_Mutant2_cDNA_P Parameter: Organism Value: A. thaliana
  misc_feature: MA Experiment 108433 PARAMETER Experiment Name: At_rhl_Mutant2_cDNA_P Parameter: Plant Line Value: rhl Mutant vs. wt landsburg
  misc_feature: MA Experiment 108433 PARAMETER Experiment Name: At_rhl_Mutant2_cDNA_P Parameter: Tissue Value: Roots

SEQ ID NO: 39033 - protein, 328 aa, Arabidopsis thaliana; identical to SEQ ID NO: 25847
  peptide (1)..(328): Ceres Seq. ID no. 12562550
  misc_feature (114)..(271): Pfam Name: Hyaluronan / mRNA binding family Pfam Description: Hyaluronan / mRNA binding family
  misc_feature (114)..(271): Pfam Name: Hyaluronan / mRNA binding family Pfam Description: Hyaluronan / mRNA binding family
  misc_feature (29)..(326): Homolog of NCBI NO: 21593013 NR Description: nuclear RNA binding protein A-like protein
  misc_feature (1)..(306): Homolog of NCBI NO: 21537052 NR Description: nuclear antigen homolog [Arabidopsis thaliana]
  misc_feature (1)..(260): Homolog of NCBI NO: 15235894 NR Description: nuclear antigen homolog
  misc_feature (5)..(328): Homolog of NCBI NO: 39725276 NR Description: salt tolerance protein 1 [Beta vulgaris]
  misc_feature (70)..(328): Homolog of NCBI NO: 6492262 NR Description: nuclear RNA binding protein [Nicotiana tabacum]
  misc_feature (29)..(326): Homolog of NCBI NO: 21593013 NR Description: nuclear RNA binding protein A-like protein
  misc_feature (1)..(260): Homolog of NCBI NO: 15235894 NR Description: nuclear antigen homolog
  misc_feature (70)..(328): Homolog of NCBI NO: 6492262 NR Description: nuclear RNA binding protein [Nicotiana tabacum]
  misc_feature (16)..(328): Homolog of NCBI NO: 15235894 NR Description: nuclear antigen homolog
  misc_feature (29)..(328): Homolog of NCBI NO: 21537052 NR Description: nuclear antigen homolog [Arabidopsis thaliana]
  misc_feature (94)..(328): Homolog of NCBI NO: 7488863 NR Description: probable transcription factor - fava bean
  misc_feature (14)..(328): Homolog of NCBI NO: 6492266 NR Description: nuclear RNA binding protein A [Spinacia oleracea]
  misc_feature (62)..(326): Homolog of NCBI NO: 39725278 NR Description: salt tolerance protein 2 [Beta vulgaris]
  misc_feature (5)..(328): Homolog of NCBI NO: 39725276 NR Description: salt tolerance protein 1 [Beta vulgaris]
  misc_feature (1)..(306): Homolog of NCBI NO: 21537052 NR Description: nuclear antigen homolog [Arabidopsis thaliana]
  misc_feature (62)..(326): Homolog of NCBI NO: 39725278 NR Description: salt tolerance protein 2 [Beta vulgaris]
  misc_feature (14)..(328): Homolog of NCBI NO: 6492266 NR Description: nuclear RNA binding protein A [Spinacia oleracea]
  misc_feature (94)..(328): Homolog of NCBI NO: 7488863 NR Description: probable transcription factor - fava bean
  misc_feature (29)..(328): Homolog of NCBI NO: 21537052 NR Description: nuclear antigen homolog [Arabidopsis thaliana]
  misc_feature (16)..(328): Homolog of NCBI NO: 15235894 NR Description: nuclear antigen homolog

SEQ ID NO: 39034 - DNA, 701 bp, Arabidopsis thaliana
  misc_feature (1)..(701): Ceres Seq. ID no. 13488129
  misc_feature: MA Experiment ID: 108434 Result: Down-regulated in Transcription
  misc_feature: MA Experiment 108434 PARAMETER Experiment Name: At_Root_Tips_cDNA_P Parameter: Tissue Value: Root Tips
  misc_feature: MA Experiment ID: 108461 Result: Up-regulated in Transcription
  misc_feature: MA Experiment 108461 PARAMETER Experiment Name: At_Germinating_Seeds_cDNA_P Parameter: Age (day) Value: 1 vs. 0
  misc_feature: MA Experiment 108461 PARAMETER Experiment Name: At_Germinating_Seeds_cDNA_P Parameter: Tissue Value: Germinating Seeds
  misc_feature: MA Experiment ID: 108464 Result: Up-regulated in Transcription
  misc_feature: MA Experiment 108464 PARAMETER Experiment Name: At_Germinating_Seeds_cDNA_P Parameter: Age (day) Value: 4 vs. 0
  misc_feature: MA Experiment 108464 PARAMETER Experiment Name: At_Germinating_Seeds_cDNA_P Parameter: Tissue Value: Germinating Seeds
  misc_feature: MA Experiment ID: 108577 Result: Up-regulated in Transcription
  misc_feature: MA Experiment 108577 PARAMETER Experiment Name: At_42deg_Heat_cDNA_P Parameter: Temperature (deg C) Value: 42 vs. 22
  misc_feature: MA Experiment 108577 PARAMETER Experiment Name: At_42deg_Heat_cDNA_P Parameter: Timepoint (hr) Value: 6
  misc_feature: MA Experiment 108577 PARAMETER Experiment Name: At_42deg_Heat_cDNA_P Parameter: Tissue Value: Aerial
  misc_feature: MA Experiment ID: 20000112 Result: Up-regulated in Transcription
  misc_feature: MA Experiment 20000112 PARAMETER Experiment Name: At_42deg_Heat_cDNA_P Parameter: Temperature (deg C) Value: 42 vs. 22
  misc_feature: MA Experiment 20000112 PARAMETER Experiment Name: At_42deg_Heat_cDNA_P Parameter: Timepoint (hr) Value: 2
  misc_feature: MA Experiment 20000112 PARAMETER Experiment Name: At_42deg_Heat_cDNA_P Parameter: Tissue Value: Aerial
  misc_feature: MA Experiment ID: 20000171 Result: Up-regulated in Transcription
  misc_feature: MA Experiment 20000171 PARAMETER Experiment Name: At_42deg_Heat_P Parameter: Age (day) Value: 14
  misc_feature: MA Experiment 20000171 PARAMETER Experiment Name: At_42deg_Heat_P Parameter: Organism Value: A. thaliana
  misc_feature: MA Experiment 20000171 PARAMETER Experiment Name: At_42deg_Heat_P Parameter: Plant Line Value: WS
  misc_feature: MA Experiment 20000171 PARAMETER Experiment Name: At_42deg_Heat_P Parameter: Temperature (deg C) Value: 42 vs. 22
  misc_feature: MA Experiment 20000171 PARAMETER Experiment Name: At_42deg_Heat_P Parameter: Timepoint (hr) Value: 1
  misc_feature: MA Experiment 20000171 PARAMETER Experiment Name: At_42deg_Heat_P Parameter: Tissue Value: Aerial
  misc_feature: MA Experiment ID: 20000173 Result: Up-regulated in Transcription
  misc_feature: MA Experiment 20000173 PARAMETER Experiment Name: At_42deg_Heat_P Parameter: Age (day) Value: 14
  misc_feature: MA Experiment 20000173 PARAMETER Experiment Name: At_42deg_Heat_P Parameter: Organism Value: A. thaliana
  misc_feature: MA Experiment 20000173 PARAMETER Experiment Name: At_42deg_Heat_P Parameter: Plant Line Value: WS
  misc_feature: MA Experiment 20000173 PARAMETER Experiment Name: At_42deg_Heat_P Parameter: Temperature (deg C) Value: 42 vs. 22
  misc_feature: MA Experiment 20000173 PARAMETER Experiment Name: At_42deg_Heat_P Parameter: Timepoint (hr) Value: 6
  misc_feature: MA Experiment 20000173 PARAMETER Experiment Name: At_42deg_Heat_P Parameter: Tissue Value: Aerial
  misc_feature: MA Experiment ID: 20000180 Result: Up-regulated in Transcription
  misc_feature: MA Experiment 20000180 PARAMETER Experiment Name: At_Germinating_Seeds_P Parameter: Age (hr) Value: 24 vs. 0
  misc_feature: MA Experiment 20000180 PARAMETER Experiment Name: At_Germinating_Seeds_P Parameter: Tissue Value: Germinating Seeds
  misc_feature: MA Experiment ID: 20000185 Result: Down-regulated in Transcription
  misc_feature: MA Experiment 20000185 PARAMETER Experiment Name: At_Roots__P Parameter: Age (day) Value: 7 vs. 21
  misc_feature: MA Experiment 20000185 PARAMETER Experiment Name: At_Roots__P Parameter: Organism Value: A. thaliana
  misc_feature: MA Experiment 20000185 PARAMETER Experiment Name: At_Roots__P Parameter: Tissue Value: Roots vs. Whole Plant
  misc_feature: MA Experiment ID: 20000227 Result: Down-regulated in Transcription
  misc_feature: MA Experiment 20000227 PARAMETER Experiment Name: At_Root-Tips-vs-Tops_P Parameter: Tissue Value: Root Tips vs. Root Tops
  misc_feature: MA Experiment ID: 20000439 Result: Down-regulated in Transcription
  misc_feature: MA Experiment 20000439 PARAMETER Experiment Name: At_Roots__P Parameter: Age (day) Value: 14 vs. 21
  misc_feature: MA Experiment 20000439 PARAMETER Experiment Name: At_Roots__P Parameter: Organism Value: A. thaliana
  misc_feature: MA Experiment 20000439 PARAMETER Experiment Name: At_Roots__P Parameter: Tissue Value: Roots vs. Whole Plant
  misc_feature: MA Experiment ID: 20001248 Result: Down-regulated in Transcription
  misc_feature: MA Experiment 20001248 PARAMETER Experiment Name: At_Far-red-induction_P Parameter: Age (day) Value: 7
  misc_feature: MA Experiment 20001248 PARAMETER Experiment Name: At_Far-red-induction_P Parameter: Light Value: Far-red vs. White
  misc_feature: MA Experiment 20001248 PARAMETER Experiment Name: At_Far-red-induction_P Parameter: Organism Value: A. thaliana
  misc_feature: MA Experiment 20001248 PARAMETER Experiment Name: At_Far-red-induction_P Parameter: Plant Line Value: Columbia
  misc_feature: MA Experiment 20001248 PARAMETER Experiment Name: At_Far-red-induction_P Parameter: Timepoint (hr) Value: 4
  misc_feature: MA Experiment 20001248 PARAMETER Experiment Name: At_Far-red-induction_P Parameter: Tissue Value: Whole Plant
  misc_feature: MA Experiment ID: 20001450 Result: Down-regulated in Transcription
  misc_feature: MA Experiment 20001450 PARAMETER Experiment Name: At_Far-red-induction_P Parameter: Age (day) Value: 7
  misc_feature: MA Experiment 20001450 PARAMETER Experiment Name: At_Far-red-induction_P Parameter: Light Value: Far-red vs. White
  misc_feature: MA Experiment 20001450 PARAMETER Experiment Name: At_Far-red-induction_P Parameter: Organism Value: A. thaliana
  misc_feature: MA Experiment 20001450 PARAMETER Experiment Name: At_Far-red-induction_P Parameter: Plant Line Value: Columbia
  misc_feature: MA Experiment 20001450 PARAMETER Experiment Name: At_Far-red-induction_P Parameter: Timepoint (hr) Value: 8
  misc_feature: MA Experiment 20001450 PARAMETER Experiment Name: At_Far-red-induction_P Parameter: Tissue Value: Whole Plant
  misc_feature: MA Experiment ID: 20001557 Result: Down-regulated in Transcription
  misc_feature: MA Experiment 20001557 PARAMETER Experiment Name: At_Drought_Soil_Dry_P Parameter: Age (day) Value: 27
  misc_feature: MA Experiment 20001557 PARAMETER Experiment Name: At_Drought_Soil_Dry_P Parameter: Organism Value: A. thaliana
  misc_feature: MA Experiment 20001557 PARAMETER Experiment Name: At_Drought_Soil_Dry_P Parameter: Plant Line Value: WS
  misc_feature: MA Experiment 20001557 PARAMETER Experiment Name: At_Drought_Soil_Dry_P Parameter: Post Timepoint (hr) Value: 3
  misc_feature: MA Experiment 20001557 PARAMETER Experiment Name: At_Drought_Soil_Dry_P Parameter: Post-Treatment Value: Re-Water vs. No Drought
  misc_feature: MA Experiment 20001557 PARAMETER Experiment Name: At_Drought_Soil_Dry_P Parameter: Timepoint (day) Value: 13
  misc_feature: MA Experiment 20001557 PARAMETER Experiment Name: At_Drought_Soil_Dry_P Parameter: Treatment Value: Drought vs. No Drought
  misc_feature: MA Experiment ID: 20001558 Result: Down-regulated in Transcription
  misc_feature: MA Experiment 20001558 PARAMETER Experiment Name: At_Drought_Soil_Dry_P Parameter: Age (day) Value: 27
  misc_feature: MA Experiment 20001558 PARAMETER Experiment Name: At_Drought_Soil_Dry_P Parameter: Organism Value: A. thaliana
  misc_feature: MA Experiment 20001558 PARAMETER Experiment Name: At_Drought_Soil_Dry_P Parameter: Plant Line Value: WS
  misc_feature: MA Experiment 20001558 PARAMETER Experiment Name: At_Drought_Soil_Dry_P Parameter: Post Timepoint (hr) Value: 6
  misc_feature: MA Experiment 20001558 PARAMETER Experiment Name: At_Drought_Soil_Dry_P Parameter: Post-Treatment Value: Re-Water vs. No Drought
  misc_feature: MA Experiment 20001558 PARAMETER Experiment Name: At_Drought_Soil_Dry_P Parameter: Timepoint (day) Value: 13
  misc_feature: MA Experiment 20001558 PARAMETER Experiment Name: At_Drought_Soil_Dry_P Parameter: Treatment Value: Drought vs. No Drought
  misc_feature: MA Experiment ID: 20001905 Result: Down-regulated in Transcription
  misc_feature: MA Experiment 20001905 PARAMETER Experiment Name: At_Drought_Reproduction_P Parameter: Age (day) Value: 40
  misc_feature: MA Experiment 20001905 PARAMETER Experiment Name: At_Drought_Reproduction_P Parameter: Organism Value: A. thaliana
  misc_feature: MA Experiment 20001905 PARAMETER Experiment Name: At_Drought_Reproduction_P Parameter: Plant Line Value: WS
  misc_feature: MA Experiment 20001905 PARAMETER Experiment Name: At_Drought_Reproduction_P Parameter: Timepoint (day) Value: 10
  misc_feature: MA Experiment 20001905 PARAMETER Experiment Name: At_Drought_Reproduction_P Parameter: Tissue Value: Rosettes
  misc_feature: MA Experiment 20001905 PARAMETER Experiment Name: At_Drought_Reproduction_P Parameter: Treatment Value: Drought vs. No Drought
atgccattgccacacactcactcactcgtagtttcgacgctatctctagaacattccgataaaccacaaagaagaagcagagcaaaagtaaagaagaagaagaaaacaaacatgtcgtggcagacttacgtcgacgatcacttaatgtgcgatgttgcaggcaaccgcctcaccgccgccgcaattctcggccaagacggtagcgtctgggctcagagcaacaattttcctcaggtgaagcctgaggaaattcagggcatcaaagacgattttactacacctggaacacttgccccaacaggattgttccttggtggtaacaagtacatggtaatccaaggagagcctaatgccgtcattcgaggaaagaagggagctggtggtgttaccatcaagaagaccaccttagctttggtatttggtatctatgatgaaccaatgactcctggacaatgcaatatggttgtggagaatctcggtgagtacctgattgaatcggggctctgaaacttaagctgctactatattcatattgctttatgtaatcttctagttgtgtcgtgagagaaaaactattcgataatccgactgtgtattacctaccttgtgatggatcttggggttgtatgattatttctaaaacaatatagtattgtctacatttgtgtcgagttgaaatatttaatgaatggcagtgtggt

SEQ ID NO: 39035 - protein, 168 aa, Arabidopsis thaliana
  peptide (1)..(168): Ceres Seq. ID no. 13488130
  misc_feature (39)..(163): Pfam Name: Profilin Pfam Description: Profilin
  misc_feature (38)..(168): Homolog of NCBI NO: 15224838 NR Description: profilin 1 [Arabidopsis thaliana]
  misc_feature (38)..(168): Homolog of NCBI NO: 14423875 NR Description: Profilin 3 (GD4-5) (Pollen allergen Mal d 4)
  misc_feature (38)..(168): Homolog of NCBI NO: 34922934 NR Description: Profilin (Allergen Pru p 4.02)
  misc_feature (38)..(168): Homolog of NCBI NO: 31077148 NR Description: profilin [Cucumis melo var. reticulatus]
  misc_feature (38)..(168): Homolog of NCBI NO: 17224229 NR Description: profilin [Lycopersicon esculentum]
  misc_feature (38)..(168): Homolog of NCBI NO: 1346802 NR Description: PROFILIN 1
  misc_feature (38)..(168): Homolog of NCBI NO: 30142164 NR Description: profilin [Cucumis melo var. reticulatus]
  misc_feature (38)..(168): Homolog of NCBI NO: 14423852 NR Description: Profilin 5
  misc_feature (5)..(168): Homolog of NCBI NO: 23397336 NR Description: putative profilin protein [Arabidopsis thaliana]
  misc_feature (1)..(168): Homolog of NCBI NO: 30696765 NR Description: profilin 5 [Arabidopsis thaliana]
MPLPHTHSLVVSTLSLEHSDKPQRRSRAKVKKKKKTNMSWQTYVDDHLMCDVAGNRLTAAAILGQDGSVWAQSNNFPQVKPEEIQGIKDDFTTPGTLAPTGLFLGGNKYMVIQGEPNAVIRGKKGAGGVTIKKTTLALVFGIYDEPMTPGQCNMVVENLGEYLIESGL

SEQ ID NO: 39036 - protein, 131 aa, Arabidopsis thaliana
  peptide (1)..(131): Ceres Seq. ID no. 13488131
  misc_feature (2)..(126): Pfam Name: Profilin Pfam Description: Profilin
  misc_feature (1)..(131): Homolog of NCBI NO: 15224838 NR Description: profilin 1 [Arabidopsis thaliana]
  misc_feature (1)..(131): Homolog of NCBI NO: 14423875 NR Description: Profilin 3 (GD4-5) (Pollen allergen Mal d 4)
  misc_feature (1)..(131): Homolog of NCBI NO: 34922934 NR Description: Profilin (Allergen Pru p 4.02)
  misc_feature (1)..(131): Homolog of NCBI NO: 31077148 NR Description: profilin [Cucumis melo var. reticulatus]
  misc_feature (1)..(131): Homolog of NCBI NO: 17224229 NR Description: profilin [Lycopersicon esculentum]
  misc_feature (1)..(131): Homolog of NCBI NO: 1346802 NR Description: PROFILIN 1
  misc_feature (1)..(131): Homolog of NCBI NO: 30142164 NR Description: profilin [Cucumis melo var. reticulatus]
  misc_feature (1)..(131): Homolog of NCBI NO: 14423852 NR Description: Profilin 5
  misc_feature (1)..(131): Homolog of NCBI NO: 23397336 NR Description: putative profilin protein [Arabidopsis thaliana]
  misc_feature (1)..(131): Homolog of NCBI NO: 30696765 NR Description: profilin 5 [Arabidopsis thaliana]
MSWQTYVDDHLMCDVAGNRLTAAAILGQDGSVWAQSNNFPQVKPEEIQGIKDDFTTPGTLAPTGLFLGGNKYMVIQGEPNAVIRGKKGAGGVTIKKTTLALVFGIYDEPMTPGQCNMVVENLGEYLIESGL

SEQ ID NO: 39037 - protein, 120 aa, Arabidopsis thaliana
  peptide (1)..(120): Ceres Seq. ID no. 13488132
  misc_feature (1)..(115): Pfam Name: Profilin Pfam Description: Profilin
  misc_feature (1)..(120): Homolog of NCBI NO: 15224838 NR Description: profilin 1 [Arabidopsis thaliana]
  misc_feature (1)..(120): Homolog of NCBI NO: 14423875 NR Description: Profilin 3 (GD4-5) (Pollen allergen Mal d 4)
  misc_feature (1)..(120): Homolog of NCBI NO: 34922934 NR Description: Profilin (Allergen Pru p 4.02)
  misc_feature (1)..(120): Homolog of NCBI NO: 31077148 NR Description: profilin [Cucumis melo var. reticulatus]
  misc_feature (1)..(120): Homolog of NCBI NO: 17224229 NR Description: profilin [Lycopersicon esculentum]
  misc_feature (1)..(120): Homolog of NCBI NO: 1346802 NR Description: PROFILIN 1
  misc_feature (1)..(120): Homolog of NCBI NO: 30142164 NR Description: profilin [Cucumis melo var. reticulatus]
  misc_feature (1)..(120): Homolog of NCBI NO: 14423852 NR Description: Profilin 5
  misc_feature (1)..(120): Homolog of NCBI NO: 23397336 NR Description: putative profilin protein [Arabidopsis thaliana]
  misc_feature (1)..(120): Homolog of NCBI NO: 30696765 NR Description: profilin 5 [Arabidopsis thaliana]
MCDVAGNRLTAAAILGQDGSVWAQSNNFPQVKPEEIQGIKDDFTTPGTLAPTGLFLGGNKYMVIQGEPNAVIRGKKGAGGVTIKKTTLALVFGIYDEPMTPGQCNMVVENLGEYLIESGL

SEQ ID NO: 39038 - DNA, 2006 bp, Arabidopsis thaliana
  misc_feature (1)..(2006): Ceres Seq. ID no. 12562143
  misc_feature: MA Experiment ID: 20000166 Result: Down-regulated in Transcription
  misc_feature: MA Experiment 20000166 PARAMETER Experiment Name: At_100uM_ABA_P Parameter: Age (day) Value: 14
  misc_feature: MA Experiment 20000166 PARAMETER Experiment Name: At_100uM_ABA_P Parameter: Organism Value: A. thaliana
  misc_feature: MA Experiment 20000166 PARAMETER Experiment Name: At_100uM_ABA_P Parameter: Plant Line Value: WS
  misc_feature: MA Experiment 20000166 PARAMETER Experiment Name: At_100uM_ABA_P Parameter: Timepoint (hr) Value: 1
  misc_feature: MA Experiment 20000166 PARAMETER Experiment Name: At_100uM_ABA_P Parameter: Tissue Value: Aerial
  misc_feature: MA Experiment 20000166 PARAMETER Experiment Name: At_100uM_ABA_P Parameter: Treatment Value: 100uM ABA vs. No Treatment
  misc_feature: MA Experiment ID: 20000184 Result: Down-regulated in Transcription
  misc_feature: MA Experiment 20000184 PARAMETER Experiment Name: At_Shoots__P Parameter: Age (day) Value: 7
  misc_feature: MA Experiment 20000184 PARAMETER Experiment Name: At_Shoots__P Parameter: Tissue Value: Shoots vs. Whole Plant
  misc_feature: MA Experiment ID: 20000185 Result: Down-regulated in Transcription
  misc_feature: MA Experiment 20000185 PARAMETER Experiment Name: At_Roots__P Parameter: Age (day) Value: 7 vs. 21
  misc_feature: MA Experiment 20000185 PARAMETER Experiment Name: At_Roots__P Parameter: Organism Value: A. thaliana
  misc_feature: MA Experiment 20000185 PARAMETER Experiment Name: At_Roots__P Parameter: Tissue Value: Roots vs. Whole Plant
  misc_feature: MA Experiment ID: 20000234 Result: Down-regulated in Transcription
  misc_feature: MA Experiment 20000234 PARAMETER Experiment Name: At_Siliques_P Parameter: Age (day) Value: 21
  misc_feature: MA Experiment 20000234 PARAMETER Experiment Name: At_Siliques_P Parameter: Organism Value: A. thaliana
  misc_feature: MA Experiment 20000234 PARAMETER Experiment Name: At_Siliques_P Parameter: Plant Line Value: WS
  misc_feature: MA Experiment 20000234 PARAMETER Experiment Name: At_Siliques_P Parameter: Tissue Value: Less Than 5mm Siliques vs. Whole Plant
  misc_feature: MA Experiment ID: 20000235 Result: Down-regulated in Transcription
  misc_feature: MA Experiment 20000235 PARAMETER Experiment Name: At_Siliques_P Parameter: Age (day) Value: 21
  misc_feature: MA Experiment 20000235 PARAMETER Experiment Name: At_Siliques_P Parameter: Organism Value: A. thaliana
  misc_feature: MA Experiment 20000235 PARAMETER Experiment Name: At_Siliques_P Parameter: Plant Line Value: WS
  misc_feature: MA Experiment 20000235 PARAMETER Experiment Name: At_Siliques_P Parameter: Tissue Value: 5-10mm Siliques vs. Whole Plant
  misc_feature: MA Experiment ID: 20000438 Result: Down-regulated in Transcription
  misc_feature: MA Experiment 20000438 PARAMETER Experiment Name: At_Shoots__P Parameter: Age (day) Value: 14
  misc_feature: MA Experiment 20000438 PARAMETER Experiment Name: At_Shoots__P Parameter: Tissue Value: Shoots vs. Whole Plant
  misc_feature: MA Experiment ID: 20000439 Result: Down-regulated in Transcription
  misc_feature: MA Experiment 20000439 PARAMETER Experiment Name: At_Roots__P Parameter: Age (day) Value: 14 vs. 21
  misc_feature: MA Experiment 20000439 PARAMETER Experiment Name: At_Roots__P Parameter: Organism Value: A. thaliana
  misc_feature: MA Experiment 20000439 PARAMETER Experiment Name: At_Roots__P Parameter: Tissue Value: Roots vs. Whole Plant
  misc_feature: MA Experiment ID: 20000495 Result: Up-regulated in Transcription
  misc_feature: MA Experiment 20000495 PARAMETER Experiment Name: At_Guard_Cells_P Parameter: Harvest Date Value: 8/2/2002
  misc_feature: MA Experiment 20000495 PARAMETER Experiment Name: At_Guard_Cells_P Parameter: Organism Value: A. thaliana
  misc_feature: MA Experiment 20000495 PARAMETER Experiment Name: At_Guard_Cells_P Parameter: Tissue Value: Guard Cells vs. Leaves
  misc_feature: MA Experiment ID: 20000573 Result: Up-regulated in Transcription
  misc_feature: MA Experiment 20000573 PARAMETER Experiment Name: At_100uM_ABA_Mutants__P Parameter: Organism Value: A. thaliana
  misc_feature: MA Experiment 20000573 PARAMETER Experiment Name: At_100uM_ABA_Mutants__P Parameter: Plant Line Value: CS22 vs. Ler wt
  misc_feature: MA Experiment 20000573 PARAMETER Experiment Name: At_100uM_ABA_Mutants__P Parameter: Timepoint (hr) Value: N/A
  misc_feature: MA Experiment 20000573 PARAMETER Experiment Name: At_100uM_ABA_Mutants__P Parameter: Tissue Value: Whole Plant
  misc_feature: MA Experiment 20000573 PARAMETER Experiment Name: At_100uM_ABA_Mutants__P Parameter: Treatment Value: None
  misc_feature: MA Experiment ID: 20000574 Result: Up-regulated in Transcription
  misc_feature: MA Experiment 20000574 PARAMETER Experiment Name: At_100uM_ABA_Mutants__P Parameter: Organism Value: A. thaliana
  misc_feature: MA Experiment 20000574 PARAMETER Experiment Name: At_100uM_ABA_Mutants__P Parameter: Plant Line Value: CS23 vs. Ler wt
  misc_feature: MA Experiment 20000574 PARAMETER Experiment Name: At_100uM_ABA_Mutants__P Parameter: Timepoint (hr) Value: N/A
  misc_feature: MA Experiment 20000574 PARAMETER Experiment Name: At_100uM_ABA_Mutants__P Parameter: Tissue Value: Whole Plant
  misc_feature: MA Experiment 20000574 PARAMETER Experiment Name: At_100uM_ABA_Mutants__P Parameter: Treatment Value: None
  misc_feature: MA Experiment ID: 20000576 Result: Down-regulated in Transcription
  misc_feature: MA Experiment 20000576 PARAMETER Experiment Name: At_100uM_ABA_Mutants__P Parameter: Organism Value: A. thaliana
  misc_feature: MA Experiment 20000576 PARAMETER Experiment Name: At_100uM_ABA_Mutants__P Parameter: Plant Line Value: CS23
  misc_feature: MA Experiment 20000576 PARAMETER Experiment Name: At_100uM_ABA_Mutants__P Parameter: Timepoint (hr) Value: 6
  misc_feature: MA Experiment 20000576 PARAMETER Experiment Name: At_100uM_ABA_Mutants__P Parameter: Tissue Value: Whole Plant
  misc_feature: MA Experiment 20000576 PARAMETER Experiment Name: At_100uM_ABA_Mutants__P Parameter: Treatment Value: 1uM ABA vs. No Treatment
  misc_feature: MA Experiment ID: 20000794 Result: Up-regulated in Transcription
  misc_feature: MA Experiment 20000794 PARAMETER Experiment Name: At_Petals_P Parameter: Age (day) Value: 23-25 days
  misc_feature: MA Experiment 20000794 PARAMETER Experiment Name: At_Petals_P Parameter: Plant Line Value: WS
  misc_feature: MA Experiment 20000794 PARAMETER Experiment Name: At_Petals_P Parameter: Tissue Value: Petals vs. Whole plant
  misc_feature: MA Experiment ID: 20001554 Result: Down-regulated in Transcription
  misc_feature: MA Experiment 20001554 PARAMETER Experiment Name: At_Drought_Soil_Dry_P Parameter: Age (day) Value: 21
  misc_feature: MA Experiment 20001554 PARAMETER Experiment Name: At_Drought_Soil_Dry_P Parameter: Organism Value: A. thaliana
  misc_feature: MA Experiment 20001554 PARAMETER Experiment Name: At_Drought_Soil_Dry_P Parameter: Plant Line Value: WS
  misc_feature: MA Experiment 20001554 PARAMETER Experiment Name: At_Drought_Soil_Dry_P Parameter: Post Timepoint (hr) Value: None
  misc_feature: MA Experiment 20001554 PARAMETER Experiment Name: At_Drought_Soil_Dry_P Parameter: Post-Treatment Value: None
  misc_feature: MA Experiment 20001554 PARAMETER Experiment Name: At_Drought_Soil_Dry_P Parameter: Timepoint (day) Value: 7
  misc_feature: MA Experiment 20001554 PARAMETER Experiment Name: At_Drought_Soil_Dry_P Parameter: Treatment Value: Drought vs. No Drought
  misc_feature: MA Experiment ID: 20001555 Result: Down-regulated in Transcription
  misc_feature: MA Experiment 20001555 PARAMETER Experiment Name: At_Drought_Soil_Dry_P Parameter: Age (day) Value: 24
  misc_feature: MA Experiment 20001555 PARAMETER Experiment Name: At_Drought_Soil_Dry_P Parameter: Organism Value: A. thaliana
  misc_feature: MA Experiment 20001555 PARAMETER Experiment Name: At_Drought_Soil_Dry_P Parameter: Plant Line Value: WS
  misc_feature: MA Experiment 20001555 PARAMETER Experiment Name: At_Drought_Soil_Dry_P Parameter: Post Timepoint (hr) Value: None
  misc_feature: MA Experiment 20001555 PARAMETER Experiment Name: At_Drought_Soil_Dry_P Parameter: Post-Treatment Value: None
  misc_feature: MA Experiment 20001555 PARAMETER Experiment Name: At_Drought_Soil_Dry_P Parameter: Timepoint (day) Value: 10
  misc_feature: MA Experiment 20001555 PARAMETER Experiment Name: At_Drought_Soil_Dry_P Parameter: Treatment Value: Drought vs. No Drought
  misc_feature: MA Experiment ID: 20001556 Result: Down-regulated in Transcription
  misc_feature: MA Experiment 20001556 PARAMETER Experiment Name: At_Drought_Soil_Dry_P Parameter: Age (day) Value: 26
  misc_feature: MA Experiment 20001556 PARAMETER Experiment Name: At_Drought_Soil_Dry_P Parameter: Organism Value: A. thaliana
  misc_feature: MA Experiment 20001556 PARAMETER Experiment Name: At_Drought_Soil_Dry_P Parameter: Plant Line Value: WS
  misc_feature: MA Experiment 20001556 PARAMETER Experiment Name: At_Drought_Soil_Dry_P Parameter: Post Timepoint (hr) Value: None
  misc_feature: MA Experiment 20001556 PARAMETER Experiment Name: At_Drought_Soil_Dry_P Parameter: Post-Treatment Value: None
  misc_feature: MA Experiment 20001556 PARAMETER Experiment Name: At_Drought_Soil_Dry_P Parameter: Timepoint (day) Value: 12
  misc_feature: MA Experiment 20001556 PARAMETER Experiment Name: At_Drought_Soil_Dry_P Parameter: Treatment Value: Drought vs. No Drought
  misc_feature: MA Experiment ID: 20001911 Result: Down-regulated in Transcription
  misc_feature: MA Experiment 20001911 PARAMETER Experiment Name: At_Drought_Reproduction_P Parameter: Age (day) Value: 40
  misc_feature: MA Experiment 20001911 PARAMETER Experiment Name: At_Drought_Reproduction_P Parameter: Organism Value: A. thaliana
  misc_feature: MA Experiment 20001911 PARAMETER Experiment Name: At_Drought_Reproduction_P Parameter: Plant Line Value: WS
  misc_feature: MA Experiment 20001911 PARAMETER Experiment Name: At_Drought_Reproduction_P Parameter: Timepoint (day) Value: 10
  misc_feature: MA Experiment 20001911 PARAMETER Experiment Name: At_Drought_Reproduction_P Parameter: Tissue Value: Flowers
  misc_feature: MA Experiment 20001911 PARAMETER Experiment Name: At_Drought_Reproduction_P Parameter: Treatment Value: Drought vs. No Drought
ataaaatgtaaagaccgacccgaaataatactcatgtttaaattatcagcaaagagccaagagaggaaacatcacacattggtgacaaaaattcttaggaaaaccaattaatggaggtgcacaaggtggttgctccgccgcataagagcacggtggcaaagctaaagacaaaactgaaggagactttcttcccggacgatcccttaagacagttcagaggacaaccaaaccgtaccaagctcatacgcgccgctcaatacatttttccaatcctccaatggtgtcctgagtacagcttcagcctactcaaatccgacgtcgtttcaggtcttaccatcgctagtttagctattcctcaggggattagttacgcgaagctagcaaatttgccaccaatcgttggtctatactcgagcttcgtgccaccgttggtttatgcggtcttgggaagctcaagagatctagcagtgggaccagtctccatagcgtcgttaatcttaggatccatgctaaggcaacaagtatctcccgtagacgatcctgttctctttctacagctagccttctcttctaccttctttgctggtctctttcaagcctctcttggaatcctcaggctgggatttataatagactttctatcaaaagcgacgctaatagggtttatgggtggagcagccataattgtatcactccaacagctaaagggtctgcttgggataactcatttcacaaagcatatgagtgtagtccctgttctctcctctgttttccaacacaccaacgagtggtcatggcaaacaattgtgatgggagtttgcttcttgctcttcttgctctcgacacgtcacctcagcatgaagaagccgaagctgttttgggtctcagccggagcaccacttctttccgttatcgtctctacacttcttgtctttgttttcagagccgagcgtcacggaatcagcgtcatcgggaaattaccagaaggtttgaatccaccgtcttggaacatgcttcagtttcacggtagtcatctcgcactcgtcgccaaaaccggactcgtcaccggaatcgtctccctcacggaaggaatcgcagtgggaagaacatttgcagcgctaaagaactaccacgtagatggaaacaaagagatgatcgccattggtctgatgaacgtagtaggctctgccacatcttgctacgtcacaaccggagcattctctagatcagcggtcaacaacaacgcgggagctaaaaccgcagtttcaaacattgttatgtcggtcactgttatggttacgcttctcttcctaatgccgcttttcgaatacactcccaatgtggtcctcggtgccatcattgtgaccgcggtcattggtctcatcgaccttcccgcggcctgtcacatatggaagatcgataaatttgatttcttggtgatgctttgcgcgttctttggtgtcattttcctatccgttcaaaacggtctagccattgcggtggggctatcgttgttcaagatattgatgcaagtaacaaggccgaaaatggttataatgggtaatattcctggaacggatatataccgagatcttcatcattacaaagaagcacaaaggatcccgggatttcttgttttaagcatcgaatctcctgtcaatttcgccaattctaactacctcactgaaagaacatctcgttggattgaagaatgcgaagaagaggaagctcaagagaagcattctagcctacagttcttgattcttgaaatgtcagccgtgagcggtgtagacacaaacggagtgtccttttttaaggaacttaagaaaacaaccgccaagaaggacatcgagcttgtgtttgtgaaccctctaagcgaagtggtggagaagcttcaaagagctgacgaacaaaaagagttcatgaggcccgagtttctcttcttaaccgtcgctgaggccgttgcgtcgctctctcttaaagggccatctctcagtaacgtttaa

SEQ ID NO: 39039 - protein, 631 aa, Arabidopsis thaliana
  peptide (1)..(631): Ceres Seq. ID no. 12562144
  misc_feature (165)..(475): Pfam Name: Sulfate transporter family Pfam Description: Sulfate transporter family
  misc_feature (52)..(618): Homolog of NCBI NO: 18411773 NR Description: sulfate transporter, putative
  misc_feature (1)..(624): Homolog of NCBI NO: 24421087 NR Description: sulphate transporter [Triticum aestivum]
  misc_feature (1)..(626): Homolog of NCBI NO: 13487717 NR Description: sulfate transporter 2 [Lycopersicon esculentum]
  misc_feature (4)..(622): Homolog of NCBI NO: 11279066 NR Description: sulfate transporter AST12 [imported] -
  misc_feature (9)..(619): Homolog of NCBI NO: 34902632 NR Description: Putative sulfate transporter ATST1
  misc_feature (4)..(622): Homolog of NCBI NO: 15231069 NR Description: sulfate transporter ATST1
  misc_feature (4)..(622): Homolog of NCBI NO: 11279064 NR Description: hypothetical protein [imported] - Arabidopsis
  misc_feature (4)..(622): Homolog of NCBI NO: 11279065 NR Description: sulfate transporter ATST1 [imported] -
  misc_feature (1)..(622): Homolog of NCBI NO: 15233255 NR Description: putative sulfate transporter
  misc_feature (1)..(622): Homolog of NCBI NO: 1907270 NR Description: sulphate transporter protein [Sporobolus
MEVHKVVAPPHKSTVAKLKTKLKETFFPDDPLRQFRGQPNRTKLIRAAQYIFPILQWCPEYSFSLLKSDVVSGLTIASLAIPQGISYAKLANLPPIVGLYSSFVPPLVYAVLGSSRDLAVGPVSIASLILGSMLRQQVSPVDDPVLFLQLAFSSTFFAGLFQASLGILRLGFIIDFLSKATLIGFMGGAAIIVSLQQLKGLLGITHFTKHMSVVPVLSSVFQHTNEWSWQTIVMGVCFLLFLLSTRHLSMKKPKLFWVSAGAPLLSVIVSTLLVFVFRAERHGISVIGKLPEGLNPPSWNMLQFHGSHLALVAKTGLVTGIVSLTEGIAVGRTFAALKNYHVDGNKEMIAIGLMNVVGSATSCYVTTGAFSRSAVNNNAGAKTAVSNIVMSVTVMVTLLFLMPLFEYTPNVVLGAIIVTAVIGLIDLPAACHIWKIDKFDFLVMLCAFFGVIFLSVQNGLAIAVGLSLFKILMQVTRPKMVIMGNIPGTDIYRDLHHYKEAQRIPGFLVLSIESPVNFANSNYLTERTSRWIEECEEEEAQEKHSSLQFLILEMSAVSGVDTNGVSFFKELKKTTAKKDIELVFVNPLSEVVEKLQRADEQKEFMRPEFLFLTVAEAVASLSLKGPSLSNV

SEQ ID NO: 39040 - protein, 499 aa, Arabidopsis thaliana
  peptide (1)..(499): Ceres Seq. ID no. 12562145
  misc_feature (33)..(343): Pfam Name: Sulfate transporter family Pfam Description: Sulfate transporter family
  misc_feature (1)..(486): Homolog of NCBI NO: 18411773 NR Description: sulfate transporter, putative
  misc_feature (1)..(492): Homolog of NCBI NO: 24421087 NR Description: sulphate transporter [Triticum aestivum]
  misc_feature (1)..(494): Homolog of NCBI NO: 13487717 NR Description: sulfate transporter 2 [Lycopersicon esculentum]
  misc_feature (1)..(490): Homolog of NCBI NO: 11279066 NR Description: sulfate transporter AST12 [imported] -
  misc_feature (1)..(487): Homolog of NCBI NO: 34902632 NR Description: Putative sulfate transporter ATST1
  misc_feature (1)..(490): Homolog of NCBI NO: 15231069 NR Description: sulfate transporter ATST1
  misc_feature (1)..(490): Homolog of NCBI NO: 11279064 NR Description: hypothetical protein [imported] - Arabidopsis
  misc_feature (1)..(490): Homolog of NCBI NO: 11279065 NR Description: sulfate transporter ATST1 [imported] -
  misc_feature (1)..(490): Homolog of NCBI NO: 15233255 NR Description: putative sulfate transporter
  misc_feature (1)..(490): Homolog of NCBI NO: 1907270 NR Description: sulphate transporter protein [Sporobolus
MLRQQVSPVDDPVLFLQLAFSSTFFAGLFQASLGILRLGFIIDFLSKATLIGFMGGAAIIVSLQQLKGLLGITHFTKHMSVVPVLSSVFQHTNEWSWQTIVMGVCFLLFLLSTRHLSMKKPKLFWVSAGAPLLSVIVSTLLVFVFRAERHGISVIGKLPEGLNPPSWNMLQFHGSHLALVAKTGLVTGIVSLTEGIAVGRTFAALKNYHVDGNKEMIAIGLMNVVGSATSCYVTTGAFSRSAVNNNAGAKTAVSNIVMSVTVMVTLLFLMPLFEYTPNVVLGAIIVTAVIGLIDLPAACHIWKIDKFDFLVMLCAFFGVIFLSVQNGLAIAVGLSLFKILMQVTRPKMVIMGNIPGTDIYRDLHHYKEAQRIPGFLVLSIESPVNFANSNYLTERTSRWIEECEEEEAQEKHSSLQFLILEMSAVSGVDTNGVSFFKELKKTTAKKDIELVFVNPLSEVVEKLQRADEQKEFMRPEFLFLTVAEAVASLSLKGPSLSNV

SEQ ID NO: 39041 - protein, 446 aa, Arabidopsis thaliana
  peptide (1)..(446): Ceres Seq. ID no. 12562146
  misc_feature (1)..(290): Pfam Name: Sulfate transporter family Pfam Description: Sulfate transporter family
  misc_feature (1)..(433): Homolog of NCBI NO: 18411773 NR Description: sulfate transporter, putative
  misc_feature (1)..(439): Homolog of NCBI NO: 24421087 NR Description: sulphate transporter [Triticum aestivum]
  misc_feature (1)..(441): Homolog of NCBI NO: 13487717 NR Description: sulfate transporter 2 [Lycopersicon esculentum]
  misc_feature (1)..(437): Homolog of NCBI NO: 11279066 NR Description: sulfate transporter AST12 [imported] -
  misc_feature (1)..(434): Homolog of NCBI NO: 34902632 NR Description: Putative sulfate transporter ATST1
  misc_feature (1)..(437): Homolog of NCBI NO: 15231069 NR Description: sulfate transporter ATST1
  misc_feature (1)..(437): Homolog of NCBI NO: 11279064 NR Description: hypothetical protein [imported] - Arabidopsis
  misc_feature (1)..(437): Homolog of NCBI NO: 11279065 NR Description: sulfate transporter ATST1 [imported] -
  misc_feature (1)..(437): Homolog of NCBI NO: 15233255 NR Description: putative sulfate transporter
  misc_feature (1)..(437): Homolog of NCBI NO: 1907270 NR Description: sulphate transporter protein [Sporobolus
MGGAAIIVSLQQLKGLLGITHFTKHMSVVPVLSSVFQHTNEWSWQTIVMGVCFLLFLLSTRHLSMKKPKLFWVSAGAPLLSVIVSTLLVFVFRAERHGISVIGKLPEGLNPPSWNMLQFHGSHLALVAKTGLVTGIVSLTEGIAVGRTFAALKNYHVDGNKEMIAIGLMNVVGSATSCYVTTGAFSRSAVNNNAGAKTAVSNIVMSVTVMVTLLFLMPLFEYTPNVVLGAIIVTAVIGLIDLPAACHIWKIDKFDFLVMLCAFFGVIFLSVQNGLAIAVGLSLFKILMQVTRPKMVIMGNIPGTDIYRDLHHYKEAQRIPGFLVLSIESPVNFANSNYLTERTSRWIEECEEEEAQEKHSSLQFLILEMSAVSGVDTNGVSFFKELKKTTAKKDIELVFVNPLSEVVEKLQRADEQKEFMRPEFLFLTVAEAVASLSLKGPSLSNV

SEQ ID NO: 39042 - DNA, 1795 bp, Arabidopsis thaliana
  misc_feature (1)..(1795): Ceres Seq. ID no. 12579714
  misc_feature: MA Experiment ID: 20000169 Result: Up-regulated in Transcription
  misc_feature: MA Experiment 20000169 PARAMETER Experiment Name: At_100uM_ABA_P Parameter: Age (day) Value: 14
  misc_feature: MA Experiment 20000169 PARAMETER Experiment Name: At_100uM_ABA_P Parameter: Organism Value: A. thaliana
  misc_feature: MA Experiment 20000169 PARAMETER Experiment Name: At_100uM_ABA_P Parameter: Plant Line Value: WS
  misc_feature: MA Experiment 20000169 PARAMETER Experiment Name: At_100uM_ABA_P Parameter: Timepoint (hr) Value: 6
  misc_feature: MA Experiment 20000169 PARAMETER Experiment Name: At_100uM_ABA_P Parameter: Tissue Value: Aerial
  misc_feature: MA Experiment 20000169 PARAMETER Experiment Name: At_100uM_ABA_P Parameter: Treatment Value: 100uM ABA vs. No Treatment
  misc_feature: MA Experiment ID: 20000173 Result: Down-regulated in Transcription
  misc_feature: MA Experiment 20000173 PARAMETER Experiment Name: At_42deg_Heat_P Parameter: Age (day) Value: 14
  misc_feature: MA Experiment 20000173 PARAMETER Experiment Name: At_42deg_Heat_P Parameter: Organism Value: A. thaliana
  misc_feature: MA Experiment 20000173 PARAMETER Experiment Name: At_42deg_Heat_P Parameter: Plant Line Value: WS
  misc_feature: MA Experiment 20000173 PARAMETER Experiment Name: At_42deg_Heat_P Parameter: Temperature (deg C) Value: 42 vs. 22
  misc_feature: MA Experiment 20000173 PARAMETER Experiment Name: At_42deg_Heat_P Parameter: Timepoint (hr) Value: 6
  misc_feature: MA Experiment 20000173 PARAMETER Experiment Name: At_42deg_Heat_P Parameter: Tissue Value: Aerial
  misc_feature: MA Experiment ID: 20000180 Result: Up-regulated in Transcription
  misc_feature: MA Experiment 20000180 PARAMETER Experiment Name: At_Germinating_Seeds_P Parameter: Age (hr) Value: 24 vs. 0
  misc_feature: MA Experiment 20000180 PARAMETER Experiment Name: At_Germinating_Seeds_P Parameter: Tissue Value: Germinating Seeds
  misc_feature: MA Experiment ID: 20000184 Result: Down-regulated in Transcription
  misc_feature: MA Experiment 20000184 PARAMETER Experiment Name: At_Shoots__P Parameter: Age (day) Value: 7
  misc_feature: MA Experiment 20000184 PARAMETER Experiment Name: At_Shoots__P Parameter: Tissue Value: Shoots vs. Whole Plant
  misc_feature: MA Experiment ID: 20000185 Result: Down-regulated in Transcription
  misc_feature: MA Experiment 20000185 PARAMETER Experiment Name: At_Roots__P Parameter: Age (day) Value: 7 vs. 21
  misc_feature: MA Experiment 20000185 PARAMETER Experiment Name: At_Roots__P Parameter: Organism Value: A. thaliana
  misc_feature: MA Experiment 20000185 PARAMETER Experiment Name: At_Roots__P Parameter: Tissue Value: Roots vs. Whole Plant
  misc_feature: MA Experiment ID: 20000234 Result: Down-regulated in Transcription
  misc_feature: MA Experiment 20000234 PARAMETER Experiment Name: At_Siliques_P Parameter: Age (day) Value: 21
  misc_feature: MA Experiment 20000234 PARAMETER Experiment Name: At_Siliques_P Parameter: Organism Value: A. thaliana
  misc_feature: MA Experiment 20000234 PARAMETER Experiment Name: At_Siliques_P Parameter: Plant Line Value: WS
  misc_feature: MA Experiment 20000234 PARAMETER Experiment Name: At_Siliques_P Parameter: Tissue Value: Less Than 5mm Siliques vs. Whole Plant
  misc_feature: MA Experiment ID: 20000264 Result: Up-regulated in Transcription
  misc_feature: MA Experiment 20000264 PARAMETER Experiment Name: At_Open_Flower_P Parameter: Age (day) Value: 21
  misc_feature: MA Experiment 20000264 PARAMETER Experiment Name: At_Open_Flower_P Parameter: Plant Line Value: WS
  misc_feature: MA Experiment 20000264 PARAMETER Experiment Name: At_Open_Flower_P Parameter: Tissue Value: Open Flower vs. Whole Plant
  misc_feature: MA Experiment ID: 20000438 Result: Down-regulated in Transcription
  misc_feature: MA Experiment 20000438 PARAMETER Experiment Name: At_Shoots__P Parameter: Age (day) Value: 14
  misc_feature: MA Experiment 20000438 PARAMETER Experiment Name: At_Shoots__P Parameter: Tissue Value: Shoots vs. Whole Plant
  misc_feature: MA Experiment ID: 20000439 Result: Down-regulated in Transcription
  misc_feature: MA Experiment 20000439 PARAMETER Experiment Name: At_Roots__P Parameter: Age (day) Value: 14 vs. 21
  misc_feature: MA Experiment 20000439 PARAMETER Experiment Name: At_Roots__P Parameter: Organism Value: A. thaliana
  misc_feature: MA Experiment 20000439 PARAMETER Experiment Name: At_Roots__P Parameter: Tissue Value: Roots vs. Whole Plant
  misc_feature: MA Experiment ID: 20000453 Result: Up-regulated in Transcription
  misc_feature: MA Experiment 20000453 PARAMETER Experiment Name: At_100uM_ABA_P Parameter: Age (day) Value: 15
  misc_feature: MA Experiment 20000453 PARAMETER Experiment Name: At_100uM_ABA_P Parameter: Organism Value: A. thaliana
  misc_feature: MA Experiment 20000453 PARAMETER Experiment Name: At_100uM_ABA_P Parameter: Plant Line Value: WS
  misc_feature: MA Experiment 20000453 PARAMETER Experiment Name: At_100uM_ABA_P Parameter: Timepoint (hr) Value: 24
  misc_feature: MA Experiment 20000453 PARAMETER Experiment Name: At_100uM_ABA_P Parameter: Tissue Value: Aerial
  misc_feature: MA Experiment 20000453 PARAMETER Experiment Name: At_100uM_ABA_P Parameter: Treatment Value: 100uM ABA vs. No Treatment
  misc_feature: MA Experiment ID: 20000455 Result: Up-regulated in Transcription
  misc_feature: MA Experiment 20000455 PARAMETER Experiment Name: At_100uM_ABA_P Parameter: Age (day) Value: 16
  misc_feature: MA Experiment 20000455 PARAMETER Experiment Name: At_100uM_ABA_P Parameter: Organism Value: A. thaliana
  misc_feature: MA Experiment 20000455 PARAMETER Experiment Name: At_100uM_ABA_P Parameter: Plant Line Value: WS
  misc_feature: MA Experiment 20000455 PARAMETER Experiment Name: At_100uM_ABA_P Parameter: Timepoint (hr) Value: 48
  misc_feature: MA Experiment 20000455 PARAMETER Experiment Name: At_100uM_ABA_P Parameter: Tissue Value: Aerial
  misc_feature: MA Experiment 20000455 PARAMETER Experiment Name: At_100uM_ABA_P Parameter: Treatment Value: 100uM ABA vs. No Treatment
  misc_feature: MA Experiment ID: 20000456 Result: Down-regulated in Transcription
  misc_feature: MA Experiment 20000456 PARAMETER Experiment Name: At_100uM_BA_P Parameter: Age (day) Value: 14
  misc_feature: MA Experiment 20000456 PARAMETER Experiment Name: At_100uM_BA_P Parameter: Organism Value: A. thaliana
  misc_feature: MA Experiment 20000456 PARAMETER Experiment Name: At_100uM_BA_P Parameter: Plant Line Value: WS
  misc_feature: MA Experiment 20000456 PARAMETER Experiment Name: At_100uM_BA_P Parameter: Timepoint (hr) Value: 6
  misc_feature: MA Experiment 20000456 PARAMETER Experiment Name: At_100uM_BA_P Parameter: Tissue Value: Aerial
  misc_feature: MA Experiment 20000456 PARAMETER Experiment Name: At_100uM_BA_P Parameter: Treatment Value: 100uM BA vs. No Treatment
  misc_feature: MA Experiment ID: 20000460 Result: Down-regulated in Transcription
  misc_feature: MA Experiment 20000460 PARAMETER Experiment Name: At_10percent_PEG_P Parameter: Age (day) Value: 12
  misc_feature: MA Experiment 20000460 PARAMETER Experiment Name: At_10percent_PEG_P Parameter: Organism Value: A. thaliana
  misc_feature: MA Experiment 20000460 PARAMETER Experiment Name: At_10percent_PEG_P Parameter: Plant Line Value: WS
  misc_feature: MA Experiment 20000460 PARAMETER Experiment Name: At_10percent_PEG_P Parameter: Timepoint (day) Value: 12
  misc_feature: MA Experiment 20000460 PARAMETER Experiment Name: At_10percent_PEG_P Parameter: Tissue Value: Whole Plant
  misc_feature: MA Experiment 20000460 PARAMETER Experiment Name: At_10percent_PEG_P Parameter: Treatment Value: 10percent PEG vs. No Treatment
  misc_feature: MA Experiment ID: 20000527 Result: Down-regulated in Transcription
  misc_feature: MA Experiment 20000527 PARAMETER Experiment Name: At_10percent_PEG_P Parameter: Age (day) Value: 20
  misc_feature: MA Experiment 20000527 PARAMETER Experiment Name: At_10percent_PEG_P Parameter: Organism Value: A. thaliana
  misc_feature: MA Experiment 20000527 PARAMETER Experiment Name: At_10percent_PEG_P Parameter: Plant Line Value: WS
  misc_feature: MA Experiment 20000527 PARAMETER Experiment Name: At_10percent_PEG_P Parameter: Timepoint (day) Value: 20
  misc_feature: MA Experiment 20000527 PARAMETER Experiment Name: At_10percent_PEG_P Parameter: Tissue Value: Whole Plant
  misc_feature: MA Experiment 20000527 PARAMETER Experiment Name: At_10percent_PEG_P Parameter: Treatment Value: 10percent PEG vs. No Treatment
  misc_feature: MA Experiment ID: 20000794 Result: Up-regulated in Transcription
  misc_feature: MA Experiment 20000794 PARAMETER Experiment Name: At_Petals_P Parameter: Age (day) Value: 23-25 days
  misc_feature: MA Experiment 20000794 PARAMETER Experiment Name: At_Petals_P Parameter: Plant Line Value: WS
  misc_feature: MA Experiment 20000794 PARAMETER Experiment Name: At_Petals_P Parameter: Tissue Value: Petals vs. Whole plant
  misc_feature: MA Experiment ID: 20001247 Result: Down-regulated in Transcription
  misc_feature: MA Experiment 20001247 PARAMETER Experiment Name: At_Far-red-induction_P Parameter: Age (day) Value: 7
  misc_feature: MA Experiment 20001247 PARAMETER Experiment Name: At_Far-red-induction_P Parameter: Light Value: Far-red vs. White
  misc_feature: MA Experiment 20001247 PARAMETER Experiment Name: At_Far-red-induction_P Parameter: Organism Value: A. thaliana
  misc_feature: MA Experiment 20001247 PARAMETER Experiment Name: At_Far-red-induction_P Parameter: Plant Line Value: Columbia
  misc_feature: MA Experiment 20001247 PARAMETER Experiment Name: At_Far-red-induction_P Parameter: Timepoint (hr) Value: 1
  misc_feature: MA Experiment 20001247 PARAMETER Experiment Name: At_Far-red-induction_P Parameter: Tissue Value: Whole Plant
  misc_feature: MA Experiment ID: 20001904 Result: Up-regulated in Transcription
  misc_feature: MA Experiment 20001904 PARAMETER Experiment Name: At_Drought_Reproduction_P Parameter: Age (day) Value: 37
  misc_feature: MA Experiment 20001904 PARAMETER Experiment Name: At_Drought_Reproduction_P Parameter: Organism Value: A. thaliana
  misc_feature: MA Experiment 20001904 PARAMETER Experiment Name: At_Drought_Reproduction_P Parameter: Plant Line Value: WS
  misc_feature: MA Experiment 20001904 PARAMETER Experiment Name: At_Drought_Reproduction_P Parameter: Timepoint (day) Value: 7
  misc_feature: MA Experiment 20001904 PARAMETER Experiment Name: At_Drought_Reproduction_P Parameter: Tissue Value: Rosettes
  misc_feature: MA Experiment 20001904 PARAMETER Experiment Name: At_Drought_Reproduction_P Parameter: Treatment Value: Drought vs. No Drought
  misc_feature: MA Experiment ID: 20001905 Result: Up-regulated in Transcription
  misc_feature: MA Experiment 20001905 PARAMETER Experiment Name: At_Drought_Reproduction_P Parameter: Age (day) Value: 40
  misc_feature: MA Experiment 20001905 PARAMETER Experiment Name: At_Drought_Reproduction_P Parameter: Organism Value: A. thaliana
  misc_feature: MA Experiment 20001905 PARAMETER Experiment Name: At_Drought_Reproduction_P Parameter: Plant Line Value: WS
  misc_feature: MA Experiment 20001905 PARAMETER Experiment Name: At_Drought_Reproduction_P Parameter: Timepoint (day) Value: 10
  misc_feature: MA Experiment 20001905 PARAMETER Experiment Name: At_Drought_Reproduction_P Parameter: Tissue Value: Rosettes
  misc_feature: MA Experiment 20001905 PARAMETER Experiment Name: At_Drought_Reproduction_P Parameter: Treatment Value: Drought vs. No Drought
aacatcctaatcgaaaaaacaatctatcttttgggtccctaaaaaagctccttcgtttatcttgttttctaagttatctttttgtatgagtttcaaagcttatcattatctcactcttcttccatagctatgactactttaacgaagattcaagtgtacccacaagtcttggagcaccgtctcttcttcagagatccgatacgggtcgggtcaagattgacttgtagagaacgtagtaatagggtttatgtgcatcggtgtgagaaaaaagttgaaagaaagagaaaagttgagaaatttaagggaaatgggtcgtgggattctttgaaatctgggtttttagggtttagtaaattagggttcttgtctaaagatgagtataatcagaaagttgaaaacttggagatggttttctcttcggttgctgttcaaattgcgagatacattgtgacgatgacaagtactggagctattcttttgattgggtttcaattatcaggtggagatagttcgatgaactcattggtttggtatagttggcttggtggaattatcattggaaccatgactggtgctaacatggttttggaagatcattatcgagccggtccacggaatgttgttataaccggaagcactaggggactagggaaagctcttgctagagagtttcttctctctggagacagagtcattgtcacatctcgcagttctgaatctgttgatatgactgtcaaagagctagagcaaaatctcaaagagattatgagtaacgctagcgagtcagctagaaagaaactgagtgatgctaaggtagttggtattgcctgtgatgtttgcaaacccgaagacgttgagaagctgtcgaatttcgctgtaaaagagcttggttccatcaacatatggataaacaatgctggtactaacaaaggttttagaccgctactcgagttcacggaagaagatatcacacagattgtctccacaaatttgattggatcaattctatgtacacgaggggctatggatgtgatgagcagacagcacagtggtggacacatctttaacatggatggtgctggctctggaggttcaagtactcctctcactgccgtatatggttcaacaaaatgtggacttaggcagtttcatgggtctatagtgaaagaaagccaaaaaacaaacgttggccttcacactgcatcccctggcatggttctgacagaacttcttctcagtggttcgagcattaaaaacaagcagatgtttaacataatctgtgagcttcctgagacagtagctagaactttggtaccacgaatgcgagttgtgaaaggttcgggaaaagccgtcaattacctaactcctcctcggatattgttagctattgtcacttcctggctaaggagaggccgatggtttgatgaccaaggacgggcgttatatgcagcagaagcagatagactaaggaactgggcagagaacaggacgaggttgtcgttaacagacgcgatggagatgtatacagagaatacttgggtctctgttttctctctttctgttgtttgcgctttcatcatcttacaaagcacaacacctagctcttttccaggcacataacaaacatcttcctcggatgtgttttaagaaaattgtaaacgtacatgttatgtataaaaaacatatatataacagaaccgatttgttcatgtaaacacttcttatagttgtagaatgtgtcgttgttgaaaacaatgaaaaaatagattgtaataaacttttatcagattgtagt

SEQ ID NO: 39043 - protein, 496 aa, Arabidopsis thaliana
  peptide (1)..(496): Ceres Seq. ID no. 12579715
  misc_feature (162)..(227): Homolog of NCBI NO: 15672756 NR Description: 3-oxoacyl-acyl carrier protein reductase (EC
  misc_feature (228)..(391): Homolog of NCBI NO: 15672756 NR Description: 3-oxoacyl-acyl carrier protein reductase (EC
  misc_feature (164)..(436): Homolog of NCBI NO: 21673969 NR Description: oxidoreductase, short-chain
  misc_feature (140)..(401): Homolog of NCBI NO: 29244639 NR Description: putative oxidoreductase protein
  misc_feature (161)..(405): Homolog of NCBI NO: 18414726 NR Description: putative protein
  misc_feature (161)..(405): Homolog of NCBI NO: 10178029 NR Description: gene_id:MUG13.25~pir||T07705~similar to unknown
  misc_feature (83)..(169): Homolog of NCBI NO: 34904226 NR Description: P0443E07.30 [Oryza sativa (japonica
  misc_feature (165)..(488): Homolog of NCBI NO: 34904226 NR Description: P0443E07.30 [Oryza sativa (japonica
  misc_feature (70)..(496): Homolog of NCBI NO: 7485669 NR Description: hypothetical protein F17N18.140 - Arabidopsis
  misc_feature (1)..(496): Homolog of NCBI NO: 18413962 NR Description: putative protein
MTTLTKIQVYPQVLEHRLFFRDPIRVGSRLTCRERSNRVYVHRCEKKVERKRKVEKFKGNGSWDSLKSGFLGFSKLGFLSKDEYNQKVENLEMVFSSVAVQIARYIVTMTSTGAILLIGFQLSGGDSSMNSLVWYSWLGGIIIGTMTGANMVLEDHYRAGPRNVVITGSTRGLGKALAREFLLSGDRVIVTSRSSESVDMTVKELEQNLKEIMSNASESARKKLSDAKVVGIACDVCKPEDVEKLSNFAVKELGSINIWINNAGTNKGFRPLLEFTEEDITQIVSTNLIGSILCTRGAMDVMSRQHSGGHIFNMDGAGSGGSSTPLTAVYGSTKCGLRQFHGSIVKESQKTNVGLHTASPGMVLTELLLSGSSIKNKQMFNIICELPETVARTLVPRMRVVKGSGKAVNYLTPPRILLAIVTSWLRRGRWFDDQGRALYAAEADRLRNWAENRTRLSLTDAMEMYTENTWVSVFSLSVVCAFIILQSTTPSSFPGT

SEQ ID NO: 39044 - protein, 404 aa, Arabidopsis thaliana
  peptide (1)..(404): Ceres Seq. ID no. 12579716
  misc_feature (70)..(135): Homolog of NCBI NO: 15672756 NR Description: 3-oxoacyl-acyl carrier protein reductase (EC
  misc_feature (136)..(299): Homolog of NCBI NO: 15672756 NR Description: 3-oxoacyl-acyl carrier protein reductase (EC
  misc_feature (72)..(344): Homolog of NCBI NO: 21673969 NR Description: oxidoreductase, short-chain
  misc_feature (48)..(309): Homolog of NCBI NO: 29244639 NR Description: putative oxidoreductase protein
  misc_feature (69)..(313): Homolog of NCBI NO: 18414726 NR Description: putative protein
  misc_feature (69)..(313): Homolog of NCBI NO: 10178029 NR Description: gene_id:MUG13.25~pir||T07705~similar to unknown
  misc_feature (1)..(77): Homolog of NCBI NO: 34904226 NR Description: P0443E07.30 [Oryza sativa (japonica
  misc_feature (73)..(396): Homolog of NCBI NO: 34904226 NR Description: P0443E07.30 [Oryza sativa (japonica
  misc_feature (1)..(404): Homolog of NCBI NO: 7485669 NR Description: hypothetical protein F17N18.140 - Arabidopsis
  misc_feature (1)..(404): Homolog of NCBI NO: 18413962 NR Description: putative protein
MVFSSVAVQIARYIVTMTSTGAILLIGFQLSGGDSSMNSLVWYSWLGGIIIGTMTGANMVLEDHYRAGPRNVVITGSTRGLGKALAREFLLSGDRVIVTSRSSESVDMTVKELEQNLKEIMSNASESARKKLSDAKVVGIACDVCKPEDVEKLSNFAVKELGSINIWINNAGTNKGFRPLLEFTEEDITQIVSTNLIGSILCTRGAMDVMSRQHSGGHIFNMDGAGSGGSSTPLTAVYGSTKCGLRQFHGSIVKESQKTNVGLHTASPGMVLTELLLSGSSIKNKQMFNIICELPETVARTLVPRMRVVKGSGKAVNYLTPPRILLAIVTSWLRRGRWFDDQGRALYAAEADRLRNWAENRTRLSLTDAMEMYTENTWVSVFSLSVVCAFIILQSTTPSSFPGT

SEQ ID NO: 39045 - protein, 388 aa, Arabidopsis thaliana
  peptide (1)..(388): Ceres Seq. ID no. 12579717
  misc_feature (54)..(119): Homolog of NCBI NO: 15672756 NR Description: 3-oxoacyl-acyl carrier protein reductase (EC
  misc_feature (120)..(283): Homolog of NCBI NO: 15672756 NR Description: 3-oxoacyl-acyl carrier protein reductase (EC
  misc_feature (56)..(328): Homolog of NCBI NO: 21673969 NR Description: oxidoreductase, short-chain
  misc_feature (32)..(293): Homolog of NCBI NO: 29244639 NR Description: putative oxidoreductase protein
  misc_feature (53)..(297): Homolog of NCBI NO: 18414726 NR Description: putative protein
  misc_feature (53)..(297): Homolog of NCBI NO: 10178029 NR Description: gene_id:MUG13.25~pir||T07705~similar to unknown
  misc_feature (1)..(61): Homolog of NCBI NO: 34904226 NR Description: P0443E07.30 [Oryza sativa (japonica
  misc_feature (57)..(380): Homolog of NCBI NO: 34904226 NR Description: P0443E07.30 [Oryza sativa (japonica
  misc_feature (1)..(388): Homolog of NCBI NO: 7485669 NR Description: hypothetical protein F17N18.140 - Arabidopsis
  misc_feature (1)..(388): Homolog of NCBI NO: 18413962 NR Description: putative protein
MTSTGAILLIGFQLSGGDSSMNSLVWYSWLGGIIIGTMTGANMVLEDHYRAGPRNVVITGSTRGLGKALAREFLLSGDRVIVTSRSSESVDMTVKELEQNLKEIMSNASESARKKLSDAKVVGIACDVCKPEDVEKLSNFAVKELGSINIWINNAGTNKGFRPLLEFTEEDITQIVSTNLIGSILCTRGAMDVMSRQHSGGHIFNMDGAGSGGSSTPLTAVYGSTKCGLRQFHGSIVKESQKTNVGLHTASPGMVLTELLLSGSSIKNKQMFNIICELPETVARTLVPRMRVVKGSGKAVNYLTPPRILLAIVTSWLRRGRWFDDQGRALYAAEADRLRNWAENRTRLSLTDAMEMYTENTWVSVFSLSVVCAFIILQSTTPSSFPGT

SEQ ID NO: 39046 - DNA, 1399 bp, Arabidopsis thaliana
  misc_feature (1)..(1399): Ceres Seq. ID no. 12423140
  misc_feature: MA Experiment ID: 108462 Result: Up-regulated in Transcription
  misc_feature: MA Experiment 108462 PARAMETER Experiment Name: At_Germinating_Seeds_cDNA_P Parameter: Age (day) Value: 2 vs. 0
  misc_feature: MA Experiment 108462 PARAMETER Experiment Name: At_Germinating_Seeds_cDNA_P Parameter: Tissue Value: Germinating Seeds
  misc_feature: MA Experiment ID: 108464 Result: Up-regulated in Transcription
  misc_feature: MA Experiment 108464 PARAMETER Experiment Name: At_Germinating_Seeds_cDNA_P Parameter: Age (day) Value: 4 vs. 0
  misc_feature: MA Experiment 108464 PARAMETER Experiment Name: At_Germinating_Seeds_cDNA_P Parameter: Tissue Value: Germinating Seeds
  misc_feature: MA Experiment ID: 108572 Result: Up-regulated in Transcription
  misc_feature: MA Experiment 108572 PARAMETER Experiment Name: At_Drought_cDNA_P Parameter: Timepoint (hr) Value: 1
  misc_feature: MA Experiment 108572 PARAMETER Experiment Name: At_Drought_cDNA_P Parameter: Tissue Value: Aerial
  misc_feature: MA Experiment 108572 PARAMETER Experiment Name: At_Drought_cDNA_P Parameter: Treatment Value: Drought vs. No Drought
  misc_feature: MA Experiment ID: 108573 Result: Up-regulated in Transcription
  misc_feature: MA Experiment 108573 PARAMETER Experiment Name: At_Drought_cDNA_P Parameter: Timepoint (hr) Value: 6
  misc_feature: MA Experiment 108573 PARAMETER Experiment Name: At_Drought_cDNA_P Parameter: Tissue Value: Aerial
  misc_feature: MA Experiment 108573 PARAMETER Experiment Name: At_Drought_cDNA_P Parameter: Treatment Value: Drought vs. No Drought
  misc_feature: MA Experiment ID: 108594 Result: Up-regulated in Transcription
  misc_feature: MA Experiment 108594 PARAMETER Experiment Name: At_Ler-rhl_Root_cDNA_P Parameter: Plant Line Value: null
  misc_feature: MA Experiment ID: 20001451 Result: Up-regulated in Transcription
  misc_feature: MA Experiment 20001451 PARAMETER Experiment Name: At_Far-red-induction_P Parameter: Age (day) Value: 7
  misc_feature: MA Experiment 20001451 PARAMETER Experiment Name: At_Far-red-induction_P Parameter: Light Value: Far-red vs. White
  misc_feature: MA Experiment 20001451 PARAMETER Experiment Name: At_Far-red-induction_P Parameter: Organism Value: A. thaliana
  misc_feature: MA Experiment 20001451 PARAMETER Experiment Name: At_Far-red-induction_P Parameter: Plant Line Value: Columbia
  misc_feature: MA Experiment 20001451 PARAMETER Experiment Name: At_Far-red-induction_P Parameter: Timepoint (hr) Value: 24
  misc_feature: MA Experiment 20001451 PARAMETER Experiment Name: At_Far-red-induction_P Parameter: Tissue Value: Whole Plant
agataaactgatattattgtctttcttccgctcctttgtctctctatctctttctcacaattagattctgtgcttcttctgcgatcaactaagatccgatccgcgagcgtttcagacttcgatcagatccgattaagagaagcaaatcgggtcgggtatgactcgtcgatgttctcactgcaatcacaatggccacaactctcggacttgtcccaatcgcggcgtgaagctctttggtgttcggctcaccgaaggttcgatccggaaaagtgcaagtatgggtaatcttagccattacacgggttctggatcgggtgggcatggaaccgggtccaacactccgggttctccgggtgatgtccctgaccatgtcgctggtgatggttacgcttctgaggatttcgttgctggctcttcctctagccgcgagagaaagaaaggaactccatggacagaggaagaacacaggatgttcttattaggtttacagaagctgggtaaaggtgattggagaggtatctcaagaaactatgtgaccactaggacacctacacaagttgctagccatgctcagaagtatttcatcagacaatccaatgtctctcgtcgcaaaagacgttctagtctctttgatatggttcctgatgaggttggagatattcccatggatttgcaagaaccagaggaagataatattcctgtggaaactgaaatgcaaggtgctgactctattcatcagacacttgctcctagctcacttcacgcaccgtcaatcttggaaatcgaagaatgtgaatcaatggactccacaaactctaccaccggggaaccaaccgcaactgccgctgctgcttcttcttcttccagactagaagaaaccacacaactgcaatcacaactgcaaccgcagccgcaactacctggctcattccccatactatatccgacctacttttcaccatattacccgtttccattcccaatatggcctgctggttatgttcctgaaccacccaagaaagaggaaactcatgaaattctcagaccaactgctgtgcactcgaaagctcctatcaatgttgacgagcttcttggtatgtctaagctcagccttgcagagtccaacaaacatggagaatccgatcagtctctttcattgaagctaggtggcgggtcatcttcaagacaatcagcatttcacccgaatcctagctctgatagttcagacatcaaaagcgtgatacacgctttataaaagacctgaggaagtgatggtctaaaatgggatctggtttggggtttacaggttagttgttggtcacagtaacttaaataagtttttctttgttaggttgtttaacttgggtaggatgttttagttcagctttgatcattaggg

SEQ ID NO: 39047 - protein, 365 aa, Arabidopsis thaliana
  peptide (1)..(365): Ceres Seq. ID no. 12423141
  misc_feature (95)..(142): Pfam Name: Myb-like DNA-binding domain Pfam Description: Myb-like DNA-binding domain
  misc_feature (1)..(205): Homolog of NCBI NO: 34906364 NR Description: unnamed protein product [Oryza sativa (japonica
  misc_feature (1)..(265): Homolog of NCBI NO: 1076660 NR Description: D13F(MYBST1) protein - potato
  misc_feature (1)..(265): Homolog of NCBI NO: 7705206 NR Description: MybSt1 [Solanum tuberosum]
  misc_feature (233)..(353): Homolog of NCBI NO: 28848628 NR Description: ZmMybst1 [Zea mays]
  misc_feature (1)..(200): Homolog of NCBI NO: 28848628 NR Description: ZmMybst1 [Zea mays]
  misc_feature (201)..(351): Homolog of NCBI NO: 37536856 NR Description: putative Myb-related protein
  misc_feature (1)..(230): Homolog of NCBI NO: 37536856 NR Description: putative Myb-related protein
  misc_feature (201)..(351): Homolog of NCBI NO: 24850307 NR Description: transcription factor MYBS3
  misc_feature (1)..(230): Homolog of NCBI NO: 24850307 NR Description: transcription factor MYBS3
  misc_feature (1)..(365): Homolog of NCBI NO: 15238083 NR Description: Myb-related transcription activator-like
MTRRCSHCNHNGHNSRTCPNRGVKLFGVRLTEGSIRKSASMGNLSHYTGSGSGGHGTGSNTPGSPGDVPDHVAGDGYASEDFVAGSSSSRERKKGTPWTEEEHRMFLLGLQKLGKGDWRGISRNYVTTRTPTQVASHAQKYFIRQSNVSRRKRRSSLFDMVPDEVGDIPMDLQEPEEDNIPVETEMQGADSIHQTLAPSSLHAPSILEIEECESMDSTNSTTGEPTATAAAASSSSRLEETTQLQSQLQPQPQLPGSFPILYPTYFSPYYPFPFPIWPAGYVPEPPKKEETHEILRPTAVHSKAPINVDELLGMSKLSLAESNKHGESDQSLSLKLGGGSSSRQSAFHPNPSSDSSDIKSVIHAL

SEQ ID NO: 39048 - protein, 325 aa, Arabidopsis thaliana
  peptide (1)..(325): Ceres Seq. ID no. 12423142
  misc_feature (55)..(102): Pfam Name: Myb-like DNA-binding domain Pfam Description: Myb-like DNA-binding domain
  misc_feature (1)..(165): Homolog of NCBI NO: 34906364 NR Description: unnamed protein product [Oryza sativa (japonica
  misc_feature (1)..(225): Homolog of NCBI NO: 1076660 NR Description: D13F(MYBST1) protein - potato
  misc_feature (1)..(225): Homolog of NCBI NO: 7705206 NR Description: MybSt1 [Solanum tuberosum]
  misc_feature (193)..(313): Homolog of NCBI NO: 28848628 NR Description: ZmMybst1 [Zea mays]
  misc_feature (1)..(160): Homolog of NCBI NO: 28848628 NR Description: ZmMybst1 [Zea mays]
  misc_feature (161)..(311): Homolog of NCBI NO: 37536856 NR Description: putative Myb-related protein
  misc_feature (1)..(190): Homolog of NCBI NO: 37536856 NR Description: putative Myb-related protein
  misc_feature (161)..(311): Homolog of NCBI NO: 24850307 NR Description: transcription factor MYBS3
  misc_feature (1)..(190): Homolog of NCBI NO: 24850307 NR Description: transcription factor MYBS3
  misc_feature (1)..(325): Homolog of NCBI NO: 15238083 NR Description: Myb-related transcription activator-like
MGNLSHYTGSGSGGHGTGSNTPGSPGDVPDHVAGDGYASEDFVAGSSSSRERKKGTPWTEEEHRMFLLGLQKLGKGDWRGISRNYVTTRTPTQVASHAQKYFIRQSNVSRRKRRSSLFDMVPDEVGDIPMDLQEPEEDNIPVETEMQGADSIHQTLAPSSLHAPSILEIEECESMDSTNSTTGEPTATAAAASSSSRLEETTQLQSQLQPQPQLPGSFPILYPTYFSPYYPFPFPIWPAGYVPEPPKKEETHEILRPTAVHSKAPINVDELLGMSKLSLAESNKHGESDQSLSLKLGGGSSSRQSAFHPNPSSDSSDIKSVIHAL

SEQ ID NO: 39049 - protein, 261 aa, Arabidopsis thaliana
  peptide (1)..(261): Ceres Seq. ID no. 12423143
  misc_feature (1)..(38): Pfam Name: Myb-like DNA-binding domain Pfam Description: Myb-like DNA-binding domain
  misc_feature (1)..(101): Homolog of NCBI NO: 34906364 NR Description: unnamed protein product [Oryza sativa (japonica
  misc_feature (1)..(161): Homolog of NCBI NO: 1076660 NR Description: D13F(MYBST1) protein - potato
  misc_feature (1)..(161): Homolog of NCBI NO: 7705206 NR Description: MybSt1 [Solanum tuberosum]
  misc_feature (129)..(249): Homolog of NCBI NO: 28848628 NR Description: ZmMybst1 [Zea mays]
  misc_feature (1)..(96): Homolog of NCBI NO: 28848628 NR Description: ZmMybst1 [Zea mays]
  misc_feature (97)..(247): Homolog of NCBI NO: 37536856 NR Description: putative Myb-related protein
  misc_feature (1)..(126): Homolog of NCBI NO: 37536856 NR Description: putative Myb-related protein
  misc_feature (97)..(247): Homolog of NCBI NO: 24850307 NR Description: transcription factor MYBS3
  misc_feature (1)..(126): Homolog of NCBI NO: 24850307 NR Description: transcription factor MYBS3
  misc_feature (1)..(261): Homolog of NCBI NO: 15238083 NR Description: Myb-related transcription activator-like
MFLLGLQKLGKGDWRGISRNYVTTRTPTQVASHAQKYFIRQSNVSRRKRRSSLFDMVPDEVGDIPMDLQEPEEDNIPVETEMQGADSIHQTLAPSSLHAPSILEIEECESMDSTNSTTGEPTATAAAASSSSRLEETTQLQSQLQPQPQLPGSFPILYPTYFSPYYPFPFPIWPAGYVPEPPKKEETHEILRPTAVHSKAPINVDELLGMSKLSLAESNKHGESDQSLSLKLGGGSSSRQSAFHPNPSSDSSDIKSVIHAL

SEQ ID NO: 39050 - DNA, 2727 bp, Arabidopsis thaliana
  misc_feature (1)..(2727): Ceres Seq. ID no. 13574992
  misc_feature: MA Experiment ID: 20000171 Result: Down-regulated in Transcription
  misc_feature: MA Experiment 20000171 PARAMETER Experiment Name: At_42deg_Heat_P Parameter: Age (day) Value: 14
  misc_feature: MA Experiment 20000171 PARAMETER Experiment Name: At_42deg_Heat_P Parameter: Organism Value: A. thaliana
  misc_feature: MA Experiment 20000171 PARAMETER Experiment Name: At_42deg_Heat_P Parameter: Plant Line Value: WS
  misc_feature: MA Experiment 20000171 PARAMETER Experiment Name: At_42deg_Heat_P Parameter: Temperature (deg C) Value: 42 vs. 22
  misc_feature: MA Experiment 20000171 PARAMETER Experiment Name: At_42deg_Heat_P Parameter: Timepoint (hr) Value: 1
  misc_feature: MA Experiment 20000171 PARAMETER Experiment Name: At_42deg_Heat_P Parameter: Tissue Value: Aerial
  misc_feature: MA Experiment ID: 20000184 Result: Up-regulated in Transcription
  misc_feature: MA Experiment 20000184 PARAMETER Experiment Name: At_Shoots__P Parameter: Age (day) Value: 7
  misc_feature: MA Experiment 20000184 PARAMETER Experiment Name: At_Shoots__P Parameter: Tissue Value: Shoots vs. Whole Plant
  misc_feature: MA Experiment ID: 20000185 Result: Down-regulated in Transcription
  misc_feature: MA Experiment 20000185 PARAMETER Experiment Name: At_Roots__P Parameter: Age (day) Value: 7 vs. 21
  misc_feature: MA Experiment 20000185 PARAMETER Experiment Name: At_Roots__P Parameter: Organism Value: A. thaliana
  misc_feature: MA Experiment 20000185 PARAMETER Experiment Name: At_Roots__P Parameter: Tissue Value: Roots vs. Whole Plant
  misc_feature: MA Experiment ID: 20000234 Result: Up-regulated in Transcription
  misc_feature: MA Experiment 20000234 PARAMETER Experiment Name: At_Siliques_P Parameter: Age (day) Value: 21
  misc_feature: MA Experiment 20000234 PARAMETER Experiment Name: At_Siliques_P Parameter: Organism Value: A. thaliana
  misc_feature: MA Experiment 20000234 PARAMETER Experiment Name: At_Siliques_P Parameter: Plant Line Value: WS
  misc_feature: MA Experiment 20000234 PARAMETER Experiment Name: At_Siliques_P Parameter: Tissue Value: Less Than 5mm Siliques vs. Whole Plant
  misc_feature: MA Experiment ID: 20000286 Result: Up-regulated in Transcription
  misc_feature: MA Experiment 20000286 PARAMETER Experiment Name: At_Open_Flower_P Parameter: Age (day) Value: 21
  misc_feature: MA Experiment 20000286 PARAMETER Experiment Name: At_Open_Flower_P Parameter: Plant Line Value: WS
  misc_feature: MA Experiment 20000286 PARAMETER Experiment Name: At_Open_Flower_P Parameter: Tissue Value: Half Open vs. Whole Plant
  misc_feature: MA Experiment ID: 20000437 Result: Down-regulated in Transcription
  misc_feature: MA Experiment 20000437 PARAMETER Experiment Name: At_Drought_P Parameter: Age (day) Value: 8
  misc_feature: MA Experiment 20000437 PARAMETER Experiment Name: At_Drought_P Parameter: Organism Value: A. thaliana
  misc_feature: MA Experiment 20000437 PARAMETER Experiment Name: At_Drought_P Parameter: Plant Line Value: WS
  misc_feature: MA Experiment 20000437 PARAMETER Experiment Name: At_Drought_P Parameter: Timepoint (hr) Value: 24
  misc_feature: MA Experiment 20000437 PARAMETER Experiment Name: At_Drought_P Parameter: Tissue Value: Whole Plant
  misc_feature: MA Experiment 20000437 PARAMETER Experiment Name: At_Drought_P Parameter: Treatment Value: Drought vs. No Drought
  misc_feature: MA Experiment ID: 20000527 Result: Down-regulated in Transcription
  misc_feature: MA Experiment 20000527 PARAMETER Experiment Name: At_10percent_PEG_P Parameter: Age (day) Value: 20
  misc_feature: MA Experiment 20000527 PARAMETER Experiment Name: At_10percent_PEG_P Parameter: Organism Value: A. thaliana
  misc_feature: MA Experiment 20000527 PARAMETER Experiment Name: At_10percent_PEG_P Parameter: Plant Line Value: WS
  misc_feature: MA Experiment 20000527 PARAMETER Experiment Name: At_10percent_PEG_P Parameter: Timepoint (day) Value: 20
  misc_feature: MA Experiment 20000527 PARAMETER Experiment Name: At_10percent_PEG_P Parameter: Tissue Value: Whole Plant
  misc_feature: MA Experiment 20000527 PARAMETER Experiment Name: At_10percent_PEG_P Parameter: Treatment Value: 10percent PEG vs. No Treatment
  misc_feature: MA Experiment ID: 20000794 Result: Down-regulated in Transcription
  misc_feature: MA Experiment 20000794 PARAMETER Experiment Name: At_Petals_P Parameter: Age (day) Value: 23-25 days
  misc_feature: MA Experiment 20000794 PARAMETER Experiment Name: At_Petals_P Parameter: Plant Line Value: WS
  misc_feature: MA Experiment 20000794 PARAMETER Experiment Name: At_Petals_P Parameter: Tissue Value: Petals vs. Whole plant
  misc_feature: MA Experiment ID: 20001560 Result: Down-regulated in Transcription
  misc_feature: MA Experiment 20001560 PARAMETER Experiment Name: At_Drought_Soil_Dry_P Parameter: Age (day) Value: 28
  misc_feature: MA Experiment 20001560 PARAMETER Experiment Name: At_Drought_Soil_Dry_P Parameter: Organism Value: A. thaliana
  misc_feature: MA Experiment 20001560 PARAMETER Experiment Name: At_Drought_Soil_Dry_P Parameter: Plant Line Value: WS
  misc_feature: MA Experiment 20001560 PARAMETER Experiment Name: At_Drought_Soil_Dry_P Parameter: Post Timepoint (hr) Value: None
  misc_feature: MA Experiment 20001560 PARAMETER Experiment Name: At_Drought_Soil_Dry_P Parameter: Post-Treatment Value: None
  misc_feature: MA Experiment 20001560 PARAMETER Experiment Name: At_Drought_Soil_Dry_P Parameter: Timepoint (day) Value: 14
  misc_feature: MA Experiment 20001560 PARAMETER Experiment Name: At_Drought_Soil_Dry_P Parameter: Treatment Value: Drought vs. No Drought
atagtactaggaatattttcgcagaagaaatatccaaagttgatgatttatctgagtaaactaacaattataaaagttattaatcaaaaatgaaaaaaagaagtaaagaatgatattttcctttataattatgagagcaccaatgtcatgtcggtaaaactccccccactcacttcactcgctccactccttcaatggcttcctccaccatcgttcttcttctcttcctctcttttccgtttatctctttcgcagcttctcaggccgcgaagactttcattttccgtatcgatggtggatctatgccttctattttcccgacgcactaccattggtatagcaccgagttcgccgaagaatctcgaatcgtccatgtttaccacacagtcttccatggtttctccgccgttgttactccagatgaagcagataatctccgtaaccacccagcagttcttgctgttttcgaagaccgacgtcgagagcttcacaccacacgttctcctcaatttcttggtttacaaaaccaaaaaggactatggtcagaatctgattacggatcagacgtaatcattggcgtttttgacaccggaatttggccggagcggaggagtttctcagatcttaacctcggtccaattccaaaaaggtggagaggcgtttgcgaatccggagccagattcagtcctcggaactgtaaccgtaaaattatcggagcaagattcttcgctaagggacaacaagccgctgtaatcggaggaatcaacaaaaccgttgagtttctatctcctcgtgacgccgatggacacggtactcacacttcctcaaccgccgctggccgtcacgcttttaaagcgagtatgtccggttacgcctccggtgtagccaaaggtgttgctccaaaagctcgtatcgccgcctacaaagtctgttggaaagattccggttgtctcgattccgatattctcgccgcctttgatgccgctgttagagacggtgtcgacgttatatcgatctcaatcggtggtggagacgggattacttcgccgtattacctcgatccaatcgctataggctcgtacggcgccgcgtcgaaaggaatcttcgtctcttcctctgccggaaacgaaggacctaacggtatgtcagttacgaacctcgcgccgtgggtaaccaccgttggtgctagtacaatcgatcggaatttcccagcggatgctattctcggcgacggacatcgtctcagaggagtgtctctttacgctggagtacctttaaacggtcgtatgtttccggtggtttatcccggtaaatcgggaatgtcatcagcgtctctatgtatggagaacacgcttgatccgaagcaagtgaggggtaaaatagtaatctgcgatagaggaagcagtccacgcgtagccaaaggattggttgtgaagaaagcaggtggtgtcggaatgattctcgctaatggagcatctaacggtgaaggattagtcggagatgctcatcttattccagcctgtgccgttggatcaaacgaaggagatagaatcaaagcatatgcttcttcacatccgaatccaattgcttcaattgatttcagaggaactatagttgggattaaaccggctccggttattgcttctttctccggtagaggaccaaacggtttaagcccggagattcttaaaccggatttgattgctcccggagttaacatcctcgccgcatggacagacgctgttggacctacaggtttgccgtcagatccaaggaaaacggaattcaacattctctccggtacttcaatggcatgtcctcacgttagtggtgcggcggcgcttctcaaatccgctcatccagattggagccctgccgtgatacgatcggcaatgatgacaacgactaacctcgtcgataactctaaccgctcgttgatcgatgaatccaccgggaaatcggctacgccttatgattacgggtcgggtcatttaaatttgggccgggctatgaatccgggtcttgtctacgatataactaatgatgattacattacgtttctttgctccatcgggtacggaccaaagacgatccaagtgataacaagaacaccggtgagatgtccgacgaccaggaaaccgtctcccgggaatttgaattatccttcgatcacggcggtgtttcctactaatagaagaggattggtgagtaaaactgttataaggacggcgacgaatgtcgggcaggctgaggcggtttatcgggcgaggatagagtcgccgagaggagtgacggtgacagtgaaaccacctaggcttgtgtttacttcggccgttaagagacggagctatgcggttacagtgacggttaatacaaggaatgttgtgttgggagaaacaggtgctgtgtttgggtcagtcacgtggtttgatggtgggaaacacgtggttcggagccccatcgtggtgacccaaatggatacgttgtgattccgggtcgggtttgggatgatcatgcggtcatgactcatgatcgtaaaccctttatgtggtgtagcaataactgtagaattttgagttagttggcttttatttataatcttaattatgttctgtgtttttcttattcctaatgagattttatcctatcttttatctatagttaagcaaaatgagaggaaacaatgtttaatacttgtattcattataaaaaagaaattatgaaggc

SEQ ID NO: 39051 - protein, 764 aa, Arabidopsis thaliana
  peptide (1)..(764): Ceres Seq. ID no. 13574993
  misc_feature (359)..(457): Pfam Name: PA domain Pfam Description: PA domain
  misc_feature (1)..(759): Homolog of NCBI NO: 30678198 NR Description: subtilisin-like serine protease, putative
  misc_feature (26)..(759): Homolog of NCBI NO: 14488360 NR Description: putative serine protease [Oryza sativa (japonica
  misc_feature (26)..(764): Homolog of NCBI NO: 18423316 NR Description: subtilisin-like serine protease [Arabidopsis
  misc_feature (8)..(759): Homolog of NCBI NO: 1076414 NR Description: subtilisin-like proteinase (EC 3.4.21.-),
  misc_feature (1)..(756): Homolog of NCBI NO: 18396193 NR Description: subtilisin-like serine protease, putative
  misc_feature (1)..(759): Homolog of NCBI NO: 20147211 NR Description: AT5g67360/K8K14_8 [Arabidopsis thaliana]
  misc_feature (1)..(759): Homolog of NCBI NO: 18425181 NR Description: subtilisin-like serine protease ARA12
  misc_feature (9)..(764): Homolog of NCBI NO: 21536632 NR Description: subtilisin-like serine protease [Arabidopsis
  misc_feature (9)..(764): Homolog of NCBI NO: 18400323 NR Description: subtilisin-like serine protease [Arabidopsis
  misc_feature (4)..(764): Homolog of NCBI NO: 13430434 NR Description: putative subtilisin serine protease [Arabidopsis
MASSTIVLLLFLSFPFISFAASQAAKTFIFRIDGGSMPSIFPTHYHWYSTEFAEESRIVHVYHTVFHGFSAVVTPDEADNLRNHPAVLAVFEDRRRELHTTRSPQFLGLQNQKGLWSESDYGSDVIIGVFDTGIWPERRSFSDLNLGPIPKRWRGVCESGARFSPRNCNRKIIGARFFAKGQQAAVIGGINKTVEFLSPRDADGHGTHTSSTAAGRHAFKASMSGYASGVAKGVAPKARIAAYKVCWKDSGCLDSDILAAFDAAVRDGVDVISISIGGGDGITSPYYLDPIAIGSYGAASKGIFVSSSAGNEGPNGMSVTNLAPWVTTVGASTIDRNFPADAILGDGHRLRGVSLYAGVPLNGRMFPVVYPGKSGMSSASLCMENTLDPKQVRGKIVICDRGSSPRVAKGLVVKKAGGVGMILANGASNGEGLVGDAHLIPACAVGSNEGDRIKAYASSHPNPIASIDFRGTIVGIKPAPVIASFSGRGPNGLSPEILKPDLIAPGVNILAAWTDAVGPTGLPSDPRKTEFNILSGTSMACPHVSGAAALLKSAHPDWSPAVIRSAMMTTTNLVDNSNRSLIDESTGKSATPYDYGSGHLNLGRAMNPGLVYDITNDDYITFLCSIGYGPKTIQVITRTPVRCPTTRKPSPGNLNYPSITAVFPTNRRGLVSKTVIRTATNVGQAEAVYRARIESPRGVTVTVKPPRLVFTSAVKRRSYAVTVTVNTRNVVLGETGAVFGSVTWFDGGKHVVRSPIVVTQMDTL

SEQ ID NO: 39052 - protein, 728 aa, Arabidopsis thaliana
  peptide (1)..(728): Ceres Seq. ID no. 13574994
  misc_feature (323)..(421): Pfam Name: PA domain Pfam Description: PA domain
  misc_feature (1)..(723): Homolog of NCBI NO: 30678198 NR Description: subtilisin-like serine protease, putative
  misc_feature (1)..(723): Homolog of NCBI NO: 14488360 NR Description: putative serine protease [Oryza sativa (japonica
  misc_feature (1)..(728): Homolog of NCBI NO: 18423316 NR Description: subtilisin-like serine protease [Arabidopsis
  misc_feature (1)..(723): Homolog of NCBI NO: 1076414 NR Description: subtilisin-like proteinase (EC 3.4.21.-),
  misc_feature (1)..(720): Homolog of NCBI NO: 18396193 NR Description: subtilisin-like serine protease, putative
  misc_feature (1)..(723): Homolog of NCBI NO: 20147211 NR Description: AT5g67360/K8K14_8 [Arabidopsis thaliana]
  misc_feature (1)..(723): Homolog of NCBI NO: 18425181 NR Description: subtilisin-like serine protease ARA12
  misc_feature (1)..(728): Homolog of NCBI NO: 21536632 NR Description: subtilisin-like serine protease [Arabidopsis
  misc_feature (1)..(728): Homolog of NCBI NO: 18400323 NR Description: subtilisin-like serine protease [Arabidopsis
  misc_feature (1)..(728): Homolog of NCBI NO: 13430434 NR Description: putative subtilisin serine protease [Arabidopsis
MPSIFPTHYHWYSTEFAEESRIVHVYHTVFHGFSAVVTPDEADNLRNHPAVLAVFEDRRRELHTTRSPQFLGLQNQKGLWSESDYGSDVIIGVFDTGIWPERRSFSDLNLGPIPKRWRGVCESGARFSPRNCNRKIIGARFFAKGQQAAVIGGINKTVEFLSPRDADGHGTHTSSTAAGRHAFKASMSGYASGVAKGVAPKARIAAYKVCWKDSGCLDSDILAAFDAAVRDGVDVISISIGGGDGITSPYYLDPIAIGSYGAASKGIFVSSSAGNEGPNGMSVTNLAPWVTTVGASTIDRNFPADAILGDGHRLRGVSLYAGVPLNGRMFPVVYPGKSGMSSASLCMENTLDPKQVRGKIVICDRGSSPRVAKGLVVKKAGGVGMILANGASNGEGLVGDAHLIPACAVGSNEGDRIKAYASSHPNPIASIDFRGTIVGIKPAPVIASFSGRGPNGLSPEILKPDLIAPGVNILAAWTDAVGPTGLPSDPRKTEFNILSGTSMACPHVSGAAALLKSAHPDWSPAVIRSAMMTTTNLVDNSNRSLIDESTGKSATPYDYGSGHLNLGRAMNPGLVYDITNDDYITFLCSIGYGPKTIQVITRTPVRCPTTRKPSPGNLNYPSITAVFPTNRRGLVSKTVIRTATNVGQAEAVYRARIESPRGVTVTVKPPRLVFTSAVKRRSYAVTVTVNTRNVVLGETGAVFGSVTWFDGGKHVVRSPIVVTQMDTL

SEQ ID NO: 39053 - protein, 542 aa, Arabidopsis thaliana
  peptide (1)..(542): Ceres Seq. ID no. 13574995
  misc_feature (137)..(235): Pfam Name: PA domain Pfam Description: PA domain
  misc_feature (1)..(537): Homolog of NCBI NO: 30678198 NR Description: subtilisin-like serine protease, putative
  misc_feature (1)..(537): Homolog of NCBI NO: 14488360 NR Description: putative serine protease [Oryza sativa (japonica
  misc_feature (1)..(542): Homolog of NCBI NO: 18423316 NR Description: subtilisin-like serine protease [Arabidopsis
  misc_feature (1)..(537): Homolog of NCBI NO: 1076414 NR Description: subtilisin-like proteinase (EC 3.4.21.-),
  misc_feature (1)..(534): Homolog of NCBI NO: 18396193 NR Description: subtilisin-like serine protease, putative
  misc_feature (1)..(537): Homolog of NCBI NO: 20147211 NR Description: AT5g67360/K8K14_8 [Arabidopsis thaliana]
  misc_feature (1)..(537): Homolog of NCBI NO: 18425181 NR Description: subtilisin-like serine protease ARA12
  misc_feature (1)..(542): Homolog of NCBI NO: 21536632 NR Description: subtilisin-like serine protease [Arabidopsis
  misc_feature (1)..(542): Homolog of NCBI NO: 18400323 NR Description: subtilisin-like serine protease [Arabidopsis
  misc_feature (1)..(542): Homolog of NCBI NO: 13430434 NR Description: putative subtilisin serine protease [Arabidopsis
MSGYASGVAKGVAPKARIAAYKVCWKDSGCLDSDILAAFDAAVRDGVDVISISIGGGDGITSPYYLDPIAIGSYGAASKGIFVSSSAGNEGPNGMSVTNLAPWVTTVGASTIDRNFPADAILGDGHRLRGVSLYAGVPLNGRMFPVVYPGKSGMSSASLCMENTLDPKQVRGKIVICDRGSSPRVAKGLVVKKAGGVGMILANGASNGEGLVGDAHLIPACAVGSNEGDRIKAYASSHPNPIASIDFRGTIVGIKPAPVIASFSGRGPNGLSPEILKPDLIAPGVNILAAWTDAVGPTGLPSDPRKTEFNILSGTSMACPHVSGAAALLKSAHPDWSPAVIRSAMMTTTNLVDNSNRSLIDESTGKSATPYDYGSGHLNLGRAMNPGLVYDITNDDYITFLCSIGYGPKTIQVITRTPVRCPTTRKPSPGNLNYPSITAVFPTNRRGLVSKTVIRTATNVGQAEAVYRARIESPRGVTVTVKPPRLVFTSAVKRRSYAVTVTVNTRNVVLGETGAVFGSVTWFDGGKHVVRSPIVVTQMDTL

SEQ ID NO: 39054 - DNA, 739 bp, Arabidopsis thaliana
  misc_feature (1)..(739): Ceres Seq. ID no. 12482372
  misc_feature: MA Experiment ID: 108434 Result: Down-regulated in Transcription
  misc_feature: MA Experiment 108434 PARAMETER Experiment Name: At_Root_Tips_cDNA_P Parameter: Tissue Value: Root Tips
  misc_feature: MA Experiment ID: 20000224 Result: Down-regulated in Transcription
  misc_feature: MA Experiment ID: 20000227 Result: Down-regulated in Transcription
  misc_feature: MA Experiment 20000227 PARAMETER Experiment Name: At_Root-Tips-vs-Tops_P Parameter: Tissue Value: Root Tips vs. Root Tops
  misc_feature: MA Experiment ID: 20000437 Result: Up-regulated in Transcription
  misc_feature: MA Experiment 20000437 PARAMETER Experiment Name: At_Drought_P Parameter: Age (day) Value: 8
  misc_feature: MA Experiment 20000437 PARAMETER Experiment Name: At_Drought_P Parameter: Organism Value: A. thaliana
  misc_feature: MA Experiment 20000437 PARAMETER Experiment Name: At_Drought_P Parameter: Plant Line Value: WS
  misc_feature: MA Experiment 20000437 PARAMETER Experiment Name: At_Drought_P Parameter: Timepoint (hr) Value: 24
  misc_feature: MA Experiment 20000437 PARAMETER Experiment Name: At_Drought_P Parameter: Tissue Value: Whole Plant
  misc_feature: MA Experiment 20000437 PARAMETER Experiment Name: At_Drought_P Parameter: Treatment Value: Drought vs. No Drought
  misc_feature: MA Experiment ID: 20000495 Result: Down-regulated in Transcription
  misc_feature: MA Experiment 20000495 PARAMETER Experiment Name: At_Guard_Cells_P Parameter: Harvest Date Value: 8/2/2002
  misc_feature: MA Experiment 20000495 PARAMETER Experiment Name: At_Guard_Cells_P Parameter: Organism Value: A. thaliana
  misc_feature: MA Experiment 20000495 PARAMETER Experiment Name: At_Guard_Cells_P Parameter: Tissue Value: Guard Cells vs. Leaves
acataatcatcgctattctctctctctctctctctctctctctctctcgctctcatatttgcagttgacaattcgttctctttgggaaattagagatgcaggcatcaagagcgcgactgtttaaagaatacaaagaggtacagcgagagaaagtagcagatcctgatattcaattgatctgtgacgataccaacatattcaaatggaccgctcttatcaaaggaccttcggagactccttacgaaggcggtgtttttcagcttgctttttctgttcctgaaccttatcctttgcaacctcctcaagttcgattcttgaccaagatattccatcctaatgttcatttcaagacaggagaaatatgtctcgacattttgaagaatgcttggagtcctgcttggacgcttcagtctgtgtgtagagctatcatagcattgatggctcatcctgagccggacagtcctcttaactgcgactcagggaatcttctaagatctggtgatgtgagagggttcaattcaatggcacaaatgtatacacgcctcgccgctatgcctaagaaaggatgatgatgatgatgatcctcttgctttttttttgtttttttttttgaaatttgtaatgatattgatttgcgagagtgaatacattattaacgagaagaagatgattcttctttattagttcacaatattacaatctgtcaagttgtcatatcttcttgtttaaggaatttgtc

SEQ ID NO: 39055 - protein, 157 aa, Arabidopsis thaliana
  peptide (1)..(157): Ceres Seq. ID no. 12482373
  misc_feature (7)..(156): Homolog of NCBI NO: 23487093 NR Description: ubiquitin conjugating enzyme [Plasmodium yoelii
  misc_feature (76)..(147): Homolog of NCBI NO: 3915186 NR Description: Ubiquitin-conjugating enzyme E2-21 kDa
  misc_feature (1)..(74): Homolog of NCBI NO: 3915186 NR Description: Ubiquitin-conjugating enzyme E2-21 kDa
  misc_feature (1)..(155): Homolog of NCBI NO: 19111870 NR Description: putative ubiquitin conjugating enzyme, e2
  misc_feature (3)..(145): Homolog of NCBI NO: 13812330 NR Description: ubiquitin-conjugating enzyme E2-21 KD [Guillardia
  misc_feature (31)..(153): Homolog of NCBI NO: 23491070 NR Description: probable ubiquitin-conjugating enzyme e2-17 kDa
  misc_feature (4)..(153): Homolog of NCBI NO: 23612144 NR Description: ubiquitin-conjugating enzyme E2, putative
  misc_feature (6)..(150): Homolog of NCBI NO: 28829309 NR Description: similar to Arabidopsis thaliana (Mouse-ear
  misc_feature (7)..(153): Homolog of NCBI NO: 34391431 NR Description: ubiquitin-conjugating enzyme E2 [Pavlova lutheri]
  misc_feature (1)..(157): Homolog of NCBI NO: 18420949 NR Description: E2, ubiquitin-conjugating enzyme, putative
MQASRARLFKEYKEVQREKVADPDIQLICDDTNIFKWTALIKGPSETPYEGGVFQLAFSVPEPYPLQPPQVRFLTKIFHPNVHFKTGEICLDILKNAWSPAWTLQSVCRAIIALMAHPEPDSPLNCDSGNLLRSGDVRGFNSMAQMYTRLAAMPKKG

SEQ ID NO: 39056 - DNA, 894 bp, Arabidopsis thaliana
  misc_feature (1)..(894): Ceres Seq. ID no. 12423070
  misc_feature: MA Experiment ID: 108462 Result: Down-regulated in Transcription
  misc_feature: MA Experiment 108462 PARAMETER Experiment Name: At_Germinating_Seeds_cDNA_P Parameter: Age (day) Value: 2 vs. 0
  misc_feature: MA Experiment 108462 PARAMETER Experiment Name: At_Germinating_Seeds_cDNA_P Parameter: Tissue Value: Germinating Seeds
  misc_feature: MA Experiment ID: 108463 Result: Down-regulated in Transcription
  misc_feature: MA Experiment 108463 PARAMETER Experiment Name: At_Germinating_Seeds_cDNA_P Parameter: Age (day) Value: 3 vs. 0
  misc_feature: MA Experiment 108463 PARAMETER Experiment Name: At_Germinating_Seeds_cDNA_P Parameter: Tissue Value: Germinating Seeds
  misc_feature: MA Experiment ID: 108464 Result: Down-regulated in Transcription
  misc_feature: MA Experiment 108464 PARAMETER Experiment Name: At_Germinating_Seeds_cDNA_P Parameter: Age (day) Value: 4 vs. 0
  misc_feature: MA Experiment 108464 PARAMETER Experiment Name: At_Germinating_Seeds_cDNA_P Parameter: Tissue Value: Germinating Seeds
  misc_feature: MA Experiment ID: 108576 Result: Down-regulated in Transcription
  misc_feature: MA Experiment 108576 PARAMETER Experiment Name: At_42deg_Heat_cDNA_P Parameter: Temperature (deg C) Value: 42 vs. 22
  misc_feature: MA Experiment 108576 PARAMETER Experiment Name: At_42deg_Heat_cDNA_P Parameter: Timepoint (hr) Value: 1
  misc_feature: MA Experiment 108576 PARAMETER Experiment Name: At_42deg_Heat_cDNA_P Parameter: Tissue Value: Aerial
  misc_feature: MA Experiment ID: 108595 Result: Down-regulated in Transcription
  misc_feature: MA Experiment 108595 PARAMETER Experiment Name: At_Ler-pi_Ovule_cDNA_P Parameter: Plant Line Value: null
  misc_feature: MA Experiment ID: 20000113 Result: Down-regulated in Transcription
  misc_feature: MA Experiment 20000113 PARAMETER Experiment Name: At_42deg_Heat_cDNA_P Parameter: Temperature (deg C) Value: 42 vs. 22
  misc_feature: MA Experiment 20000113 PARAMETER Experiment Name: At_42deg_Heat_cDNA_P Parameter: Timepoint (hr) Value: 8
  misc_feature: MA Experiment 20000113 PARAMETER Experiment Name: At_42deg_Heat_cDNA_P Parameter: Tissue Value: Aerial
  misc_feature: MA Experiment ID: 20000184 Result: Up-regulated in Transcription
  misc_feature: MA Experiment 20000184 PARAMETER Experiment Name: At_Shoots__P Parameter: Age (day) Value: 7
  misc_feature: MA Experiment 20000184 PARAMETER Experiment Name: At_Shoots__P Parameter: Tissue Value: Shoots vs. Whole Plant
  misc_feature: MA Experiment ID: 20000185 Result: Down-regulated in Transcription
  misc_feature: MA Experiment 20000185 PARAMETER Experiment Name: At_Roots__P Parameter: Age (day) Value: 7 vs. 21
  misc_feature: MA Experiment 20000185 PARAMETER Experiment Name: At_Roots__P Parameter: Organism Value: A. thaliana
  misc_feature: MA Experiment 20000185 PARAMETER Experiment Name: At_Roots__P Parameter: Tissue Value: Roots vs. Whole Plant
  misc_feature: MA Experiment ID: 20000234 Result: Down-regulated in Transcription
  misc_feature: MA Experiment 20000234 PARAMETER Experiment Name: At_Siliques_P Parameter: Age (day) Value: 21
  misc_feature: MA Experiment 20000234 PARAMETER Experiment Name: At_Siliques_P Parameter: Organism Value: A. thaliana
  misc_feature: MA Experiment 20000234 PARAMETER Experiment Name: At_Siliques_P Parameter: Plant Line Value: WS
  misc_feature: MA Experiment 20000234 PARAMETER Experiment Name: At_Siliques_P Parameter: Tissue Value: Less Than 5mm Siliques vs. Whole Plant
  misc_feature: MA Experiment ID: 20000235 Result: Down-regulated in Transcription
  misc_feature: MA Experiment 20000235 PARAMETER Experiment Name: At_Siliques_P Parameter: Age (day) Value: 21
  misc_feature: MA Experiment 20000235 PARAMETER Experiment Name: At_Siliques_P Parameter: Organism Value: A. thaliana
  misc_feature: MA Experiment 20000235 PARAMETER Experiment Name: At_Siliques_P Parameter: Plant Line Value: WS
  misc_feature: MA Experiment 20000235 PARAMETER Experiment Name: At_Siliques_P Parameter: Tissue Value: 5-10mm Siliques vs. Whole Plant
  misc_feature: MA Experiment ID: 20000265 Result: Up-regulated in Transcription
  misc_feature: MA Experiment 20000265 PARAMETER Experiment Name: At_Open_Flower_P Parameter: Age (day) Value: 21
  misc_feature: MA Experiment 20000265 PARAMETER Experiment Name: At_Open_Flower_P Parameter: Plant Line Value: WS
  misc_feature: MA Experiment 20000265 PARAMETER Experiment Name: At_Open_Flower_P Parameter: Tissue Value: Closed Flower vs. Whole Plant
  misc_feature: MA Experiment ID: 20000438 Result: Up-regulated in Transcription
  misc_feature: MA Experiment 20000438 PARAMETER Experiment Name: At_Shoots__P Parameter: Age (day) Value: 14
  misc_feature: MA Experiment 20000438 PARAMETER Experiment Name: At_Shoots__P Parameter: Tissue Value: Shoots vs. Whole Plant
  misc_feature: MA Experiment ID: 20000439 Result: Down-regulated in Transcription
  misc_feature: MA Experiment 20000439 PARAMETER Experiment Name: At_Roots__P Parameter: Age (day) Value: 14 vs. 21
  misc_feature: MA Experiment 20000439 PARAMETER Experiment Name: At_Roots__P Parameter: Organism Value: A. thaliana
  misc_feature: MA Experiment 20000439 PARAMETER Experiment Name: At_Roots__P Parameter: Tissue Value: Roots vs. Whole Plant
  misc_feature: MA Experiment ID: 20001451 Result: Up-regulated in Transcription
  misc_feature: MA Experiment 20001451 PARAMETER Experiment Name: At_Far-red-induction_P Parameter: Age (day) Value: 7
  misc_feature: MA Experiment 20001451 PARAMETER Experiment Name: At_Far-red-induction_P Parameter: Light Value: Far-red vs. White
  misc_feature: MA Experiment 20001451 PARAMETER Experiment Name: At_Far-red-induction_P Parameter: Organism Value: A. thaliana
  misc_feature: MA Experiment 20001451 PARAMETER Experiment Name: At_Far-red-induction_P Parameter: Plant Line Value: Columbia
  misc_feature: MA Experiment 20001451 PARAMETER Experiment Name: At_Far-red-induction_P Parameter: Timepoint (hr) Value: 24
  misc_feature: MA Experiment 20001451 PARAMETER Experiment Name: At_Far-red-induction_P Parameter: Tissue Value: Whole Plant
  misc_feature: MA Experiment ID: 20001904 Result: Down-regulated in Transcription
  misc_feature: MA Experiment 20001904 PARAMETER Experiment Name: At_Drought_Reproduction_P Parameter: Age (day) Value: 37
  misc_feature: MA Experiment 20001904 PARAMETER Experiment Name: At_Drought_Reproduction_P Parameter: Organism Value: A. thaliana
  misc_feature: MA Experiment 20001904 PARAMETER Experiment Name: At_Drought_Reproduction_P Parameter: Plant Line Value: WS
  misc_feature: MA Experiment 20001904 PARAMETER Experiment Name: At_Drought_Reproduction_P Parameter: Timepoint (day) Value: 7
  misc_feature: MA Experiment 20001904 PARAMETER Experiment Name: At_Drought_Reproduction_P Parameter: Tissue Value: Rosettes
  misc_feature: MA Experiment 20001904 PARAMETER Experiment Name: At_Drought_Reproduction_P Parameter: Treatment Value: Drought vs. No Drought
  misc_feature: MA Experiment ID: 20001905 Result: Down-regulated in Transcription
  misc_feature: MA Experiment 20001905 PARAMETER Experiment Name: At_Drought_Reproduction_P Parameter: Age (day) Value: 40
  misc_feature: MA Experiment 20001905 PARAMETER Experiment Name: At_Drought_Reproduction_P Parameter: Organism Value: A. thaliana
  misc_feature: MA Experiment 20001905 PARAMETER Experiment Name: At_Drought_Reproduction_P Parameter: Plant Line Value: WS
  misc_feature: MA Experiment 20001905 PARAMETER Experiment Name: At_Drought_Reproduction_P Parameter: Timepoint (day) Value: 10
  misc_feature: MA Experiment 20001905 PARAMETER Experiment Name: At_Drought_Reproduction_P Parameter: Tissue Value: Rosettes
  misc_feature: MA Experiment 20001905 PARAMETER Experiment Name: At_Drought_Reproduction_P Parameter: Treatment Value: Drought vs. No Drought
actagttaattaatgtgtgatattaattggcaggtgagtgttcctccgagtagtttgttcaagacggtgacggtcagatgcggccactgttcgaaccttttgtcggtgaccgtgagcatgagagctcttcttcttccatccgtttccaaccttggccattcctttttacctccccctcctcctcctcctcctccaaatcttttggaggaaatgcgaagcggagggcagaatataaacatgaacatgatgatgagccatcacgcttcagctcaccacccgaacgagcatttggttatggcgactcgcaacggaagatcagtggatcatctacaagagatgcctcggccaccaccagccaatagacccccagagaagcgacaaagagtaccatctgcatacaaccgattcatcaaagaggagatccaacgtataaaggcaggcaaccctgatatcagccacagagaagccttcagtgctgctgccaaaaactgggctcatttccctcacatacactttggactcatggctgaccatcctcccacgaagaaggctaacgtgcgccaacaggaaggagaggatgggatgatgggaagagaagggttttacggttcagctgccaacgttggggtggcccataactagctacgaagactttcccaatcttttgtaatcttcaaaatgtggttactttcagctcaaacttaactttcttattactattttatgatatttgataatcgatcaggagaccttttttttttttcttaaagaaattttcggaactactagaattttctcttggaattgaaaatatattgttttctcagttgccgtgttatatatttaatatcaaaagcatgcagtagctaagctagctaggctttaccatacgtt

SEQ ID NO: 39057 - protein, 209 aa, Arabidopsis thaliana
  peptide (1)..(209): Ceres Seq. ID no. 12423071
  misc_feature (2)..(170): Pfam Name: YABBY protein Pfam Description: YABBY protein
  misc_feature (2)..(207): Homolog of NCBI NO: 38605890 NR Description: OSJNBb0020O11.2 [Oryza sativa (japonica
  misc_feature (2)..(45): Homolog of NCBI NO: 37551421 NR Description: FIL-like protein [Triticum aestivum]
  misc_feature (110)..(207): Homolog of NCBI NO: 37551421 NR Description: FIL-like protein [Triticum aestivum]
  misc_feature (185)..(209): Homolog of NCBI NO: 7486543 NR Description: hypothetical protein F6N15.22 - Arabidopsis
  misc_feature (119)..(186): Homolog of NCBI NO: 7486543 NR Description: hypothetical protein F6N15.22 - Arabidopsis
  misc_feature (2)..(207): Homolog of NCBI NO: 27804377 NR Description: MADS-box transcription factor CDM51
  misc_feature (2)..(61): Homolog of NCBI NO: 37535908 NR Description: hypothetical protein [Oryza sativa (japonica
  misc_feature (42)..(209): Homolog of NCBI NO: 37535908 NR Description: hypothetical protein [Oryza sativa (japonica
  misc_feature (2)..(206): Homolog of NCBI NO: 18406725 NR Description: expressed protein
  misc_feature (2)..(209): Homolog of NCBI NO: 18411242 NR Description: putative YABBY3 axial regulator
MCDINWQVSVPPSSLFKTVTVRCGHCSNLLSVTVSMRALLLPSVSNLGHSFLPPPPPPPPPNLLEEMRSGGQNINMNMMMSHHASAHHPNEHLVMATRNGRSVDHLQEMPRPPPANRPPEKRQRVPSAYNRFIKEEIQRIKAGNPDISHREAFSAAAKNWAHFPHIHFGLMADHPPTKKANVRQQEGEDGMMGREGFYGSAANVGVAHN

SEQ ID NO: 39058 - protein, 174 aa, Arabidopsis thaliana
  peptide (1)..(174): Ceres Seq. ID no. 12423072
  misc_feature (1)..(135): Pfam Name: YABBY protein Pfam Description: YABBY protein
  misc_feature (81)..(147): Homolog of NCBI NO: 30683176 NR Description: expressed protein [Arabidopsis thaliana]
  misc_feature (1)..(172): Homolog of NCBI NO: 38605890 NR Description: OSJNBb0020O11.2 [Oryza sativa (japonica
  misc_feature (75)..(172): Homolog of NCBI NO: 37551421 NR Description: FIL-like protein [Triticum aestivum]
  misc_feature (150)..(174): Homolog of NCBI NO: 7486543 NR Description: hypothetical protein F6N15.22 - Arabidopsis
  misc_feature (84)..(151): Homolog of NCBI NO: 7486543 NR Description: hypothetical protein F6N15.22 - Arabidopsis
  misc_feature (1)..(172): Homolog of NCBI NO: 27804377 NR Description: MADS-box transcription factor CDM51
  misc_feature (1)..(26): Homolog of NCBI NO: 37535908 NR Description: hypothetical protein [Oryza sativa (japonica
  misc_feature (7)..(174): Homolog of NCBI NO: 37535908 NR Description: hypothetical protein [Oryza sativa (japonica
  misc_feature (1)..(171): Homolog of NCBI NO: 18406725 NR Description: expressed protein
  misc_feature (1)..(174): Homolog of NCBI NO: 18411242 NR Description: putative YABBY3 axial regulator
MRALLLPSVSNLGHSFLPPPPPPPPPNLLEEMRSGGQNINMNMMMSHHASAHHPNEHLVMATRNGRSVDHLQEMPRPPPANRPPEKRQRVPSAYNRFIKEEIQRIKAGNPDISHREAFSAAAKNWAHFPHIHFGLMADHPPTKKANVRQQEGEDGMMGREGFYGSAANVGVAHN

SEQ ID NO: 39059 - protein, 143 aa, Arabidopsis thaliana
  peptide (1)..(143): Ceres Seq. ID no. 12423073
  misc_feature (1)..(104): Pfam Name: YABBY protein Pfam Description: YABBY protein
  misc_feature (29)..(107): Homolog of NCBI NO: 11280863 NR Description: hypothetical protein [imported] - rice
  misc_feature (50)..(116): Homolog of NCBI NO: 30683176 NR Description: expressed protein [Arabidopsis thaliana]
  misc_feature (1)..(141): Homolog of NCBI NO: 38605890 NR Description: OSJNBb0020O11.2 [Oryza sativa (japonica
  misc_feature (44)..(141): Homolog of NCBI NO: 37551421 NR Description: FIL-like protein [Triticum aestivum]
  misc_feature (119)..(143): Homolog of NCBI NO: 7486543 NR Description: hypothetical protein F6N15.22 - Arabidopsis
  misc_feature (53)..(120): Homolog of NCBI NO: 7486543 NR Description: hypothetical protein F6N15.22 - Arabidopsis
  misc_feature (1)..(141): Homolog of NCBI NO: 27804377 NR Description: MADS-box transcription factor CDM51
  misc_feature (1)..(143): Homolog of NCBI NO: 37535908 NR Description: hypothetical protein [Oryza sativa (japonica
  misc_feature (1)..(140): Homolog of NCBI NO: 18406725 NR Description: expressed protein
  misc_feature (1)..(143): Homolog of NCBI NO: 18411242 NR Description: putative YABBY3 axial regulator
MRSGGQNINMNMMMSHHASAHHPNEHLVMATRNGRSVDHLQEMPRPPPANRPPEKRQRVPSAYNRFIKEEIQRIKAGNPDISHREAFSAAAKNWAHFPHIHFGLMADHPPTKKANVRQQEGEDGMMGREGFYGSAANVGVAHN

SEQ ID NO: 39060 - DNA, 1112 bp, Arabidopsis thaliana
  misc_feature (1)..(1112): Ceres Seq. ID no. 12328337
  misc_feature: MA Experiment ID: 108434 Result: Up-regulated in Transcription
  misc_feature: MA Experiment 108434 PARAMETER Experiment Name: At_Root_Tips_cDNA_P Parameter: Tissue Value: Root Tips
  misc_feature: MA Experiment ID: 108463 Result: Down-regulated in Transcription
  misc_feature: MA Experiment 108463 PARAMETER Experiment Name: At_Germinating_Seeds_cDNA_P Parameter: Age (day) Value: 3 vs. 0
  misc_feature: MA Experiment 108463 PARAMETER Experiment Name: At_Germinating_Seeds_cDNA_P Parameter: Tissue Value: Germinating Seeds
  misc_feature: MA Experiment ID: 108573 Result: Down-regulated in Transcription
  misc_feature: MA Experiment 108573 PARAMETER Experiment Name: At_Drought_cDNA_P Parameter: Timepoint (hr) Value: 6
  misc_feature: MA Experiment 108573 PARAMETER Experiment Name: At_Drought_cDNA_P Parameter: Tissue Value: Aerial
  misc_feature: MA Experiment 108573 PARAMETER Experiment Name: At_Drought_cDNA_P Parameter: Treatment Value: Drought vs. No Drought
  misc_feature: MA Experiment ID: 20000086 Result: Up-regulated in Transcription
  misc_feature: MA Experiment 20000086 PARAMETER Experiment Name: At_100uM_ABA_Mutants_cDNA_P Parameter: Plant Line Value: CS22
  misc_feature: MA Experiment 20000086 PARAMETER Experiment Name: At_100uM_ABA_Mutants_cDNA_P Parameter: Timepoint (hr) Value: 6
  misc_feature: MA Experiment 20000086 PARAMETER Experiment Name: At_100uM_ABA_Mutants_cDNA_P Parameter: Tissue Value: Aerial
  misc_feature: MA Experiment 20000086 PARAMETER Experiment Name: At_100uM_ABA_Mutants_cDNA_P Parameter: Treatment Value: 100uM ABA vs. No Treatment
  misc_feature: MA Experiment ID: 20000088 Result: Up-regulated in Transcription
  misc_feature: MA Experiment 20000088 PARAMETER Experiment Name: At_100uM_ABA_Mutants_cDNA_P Parameter: Plant Line Value: Landsberg
  misc_feature: MA Experiment 20000088 PARAMETER Experiment Name: At_100uM_ABA_Mutants_cDNA_P Parameter: Timepoint (hr) Value: 6
  misc_feature: MA Experiment 20000088 PARAMETER Experiment Name: At_100uM_ABA_Mutants_cDNA_P Parameter: Tissue Value: Aerial
  misc_feature: MA Experiment 20000088 PARAMETER Experiment Name: At_100uM_ABA_Mutants_cDNA_P Parameter: Treatment Value: 100uM ABA vs. No Treatment
  misc_feature: MA Experiment ID: 20000089 Result: Up-regulated in Transcription
  misc_feature: MA Experiment ID: 20000090 Result: Up-regulated in Transcription
  misc_feature: MA Experiment ID: 20000227 Result: Up-regulated in Transcription
  misc_feature: MA Experiment 20000227 PARAMETER Experiment Name: At_Root-Tips-vs-Tops_P Parameter: Tissue Value: Root Tips vs. Root Tops
  misc_feature: MA Experiment ID: 20001905 Result: Down-regulated in Transcription
  misc_feature: MA Experiment 20001905 PARAMETER Experiment Name: At_Drought_Reproduction_P Parameter: Age (day) Value: 40
  misc_feature: MA Experiment 20001905 PARAMETER Experiment Name: At_Drought_Reproduction_P Parameter: Organism Value: A. thaliana
  misc_feature: MA Experiment 20001905 PARAMETER Experiment Name: At_Drought_Reproduction_P Parameter: Plant Line Value: WS
  misc_feature: MA Experiment 20001905 PARAMETER Experiment Name: At_Drought_Reproduction_P Parameter: Timepoint (day) Value: 10
  misc_feature: MA Experiment 20001905 PARAMETER Experiment Name: At_Drought_Reproduction_P Parameter: Tissue Value: Rosettes
  misc_feature: MA Experiment 20001905 PARAMETER Experiment Name: At_Drought_Reproduction_P Parameter: Treatment Value: Drought vs. No Drought
aaacaatggatgagttataggtttggttaagacttgaaaagtcattgatcacggcttttgtccattattccgtgtttaaagtaatttacattctcttttaagatctctcagtccaaagacaatgcaaacaataataatttctccacttgtttctcatcgtctctgtcttgctcgtgctgttccttgcaaccgtcttctcaacaaccaccaccgtgctcctccttcgatccgcctctcaaaccaccgttcaaccacctcactccgcctcttctcctccgccgcagccagtcgggacagtgaaatggcgactgaagatgtgcaagatcccagaatcgctaagattgcctcttccattagagtcatccccgacttccctaaaccaggaatcatgtttcaggacataacgacgcttcttctcgacactgaggcctttaaggatactattgctttgtttgttgatagatacaaagataaaggcatatctgttgttgcaggtgttgaagctagaggtttcatttttggccctcctattgcgttggctattggtgccaaatttgttcccatgaggaagcccaagaagctacctgggaaggttatttcggaggagtattcgttggagtatggaacagatacgattgagatgcacgtaggtgcagtagagcctggtgagcgtgctattattattgatgacctcattgccacgggtgggactctcgctgctgcaatccgactacttgaacgagtaggagtgaagattgttgaatgtgcttgcgtaattgagttaccagagcttaagggaaaggagaaactaggagagacgtcgctatttgttcttgtaaagtcggctgcttaacaagaaactggaagagaaggttattggatcgagtgttgatgctatttttcatgtatggtgagacattttgcgtgggatttgatccttgttgtttcaacttatcataattggttcagactagaaaatggcatttgaatgtcaggattcgattgcagtttcctattgttccacttaaaatccccgattaataaggtgttatgggttttatttatagaatcaagttgtaatagtagactccaacaggggctaaagtcttggt

SEQ ID NO: 39061 - protein, 243 aa, Arabidopsis thaliana
  peptide (1)..(243): Ceres Seq. ID no. 12328338
  misc_feature (61)..(240): Homolog of NCBI NO: 15234553 NR Description: putative adenine phosphoribosyltransferase
  misc_feature (64)..(240): Homolog of NCBI NO: 15235709 NR Description: adenine phosphoribosyltransferase (EC 2.4.2.7) -
  misc_feature (64)..(241): Homolog of NCBI NO: 33354190 NR Description: putative adenine phosphoribosyl transferase
  misc_feature (68)..(241): Homolog of NCBI NO: 2499932 NR Description: Adenine phosphoribosyltransferase 1 (APRT)
  misc_feature (68)..(241): Homolog of NCBI NO: 9711921 NR Description: Adenine phosphoribosyltransferase [Hordeum
  misc_feature (52)..(243): Homolog of NCBI NO: 32492063 NR Description: adenine phosphoribosyltransferase [Brassica napus]
  misc_feature (154)..(243): Homolog of NCBI NO: 25286872 NR Description: protein F17L21.24 [imported] - Arabidopsis
  misc_feature (61)..(155): Homolog of NCBI NO: 25286872 NR Description: protein F17L21.24 [imported] - Arabidopsis
  misc_feature (61)..(243): Homolog of NCBI NO: 30689934 NR Description: adenine phosphoribosyltransferase 1, APRT
  misc_feature (1)..(243): Homolog of NCBI NO: 18396344 NR Description: adenine phosphoribosyltransferase 1, APRT
MQTIIISPLVSHRLCLARAVPCNRLLNNHHRAPPSIRLSNHRSTTSLRLFSSAAASRDSEMATEDVQDPRIAKIASSIRVIPDFPKPGIMFQDITTLLLDTEAFKDTIALFVDRYKDKGISVVAGVEARGFIFGPPIALAIGAKFVPMRKPKKLPGKVISEEYSLEYGTDTIEMHVGAVEPGERAIIIDDLIATGGTLAAAIRLLERVGVKIVECACVIELPELKGKEKLGETSLFVLVKSAA

SEQ ID NO: 39062 - protein, 183 aa, Arabidopsis thaliana; identical to SEQ ID NO: 26647
  peptide (1)..(183): Ceres Seq. ID no. 12328339
  misc_feature (1)..(180): Homolog of NCBI NO: 15234553 NR Description: putative adenine phosphoribosyltransferase
  misc_feature (4)..(180): Homolog of NCBI NO: 15235709 NR Description: adenine phosphoribosyltransferase (EC 2.4.2.7) -
  misc_feature (4)..(181): Homolog of NCBI NO: 33354190 NR Description: putative adenine phosphoribosyl transferase
  misc_feature (8)..(181): Homolog of NCBI NO: 2499932 NR Description: Adenine phosphoribosyltransferase 1 (APRT)
  misc_feature (8)..(181): Homolog of NCBI NO: 9711921 NR Description: Adenine phosphoribosyltransferase [Hordeum
  misc_feature (1)..(183): Homolog of NCBI NO: 32492063 NR Description: adenine phosphoribosyltransferase [Brassica napus]
  misc_feature (94)..(183): Homolog of NCBI NO: 25286872 NR Description: protein F17L21.24 [imported] - Arabidopsis
  misc_feature (1)..(95): Homolog of NCBI NO: 25286872 NR Description: protein F17L21.24 [imported] - Arabidopsis
  misc_feature (1)..(183): Homolog of NCBI NO: 30689934 NR Description: adenine phosphoribosyltransferase 1, APRT
  misc_feature (1)..(183): Homolog of NCBI NO: 18396344 NR Description: adenine phosphoribosyltransferase 1, APRT

SEQ ID NO: 39063 - protein, 154 aa, Arabidopsis thaliana; identical to SEQ ID NO: 26648
  peptide (1)..(154): Ceres Seq. ID no. 12328340
  misc_feature (1)..(151): Homolog of NCBI NO: 15234553 NR Description: putative adenine phosphoribosyltransferase
  misc_feature (1)..(151): Homolog of NCBI NO: 15235709 NR Description: adenine phosphoribosyltransferase (EC 2.4.2.7) -
  misc_feature (1)..(152): Homolog of NCBI NO: 33354190 NR Description: putative adenine phosphoribosyl transferase
  misc_feature (1)..(152): Homolog of NCBI NO: 2499932 NR Description: Adenine phosphoribosyltransferase 1 (APRT)
  misc_feature (1)..(152): Homolog of NCBI NO: 9711921 NR Description: Adenine phosphoribosyltransferase [Hordeum
  misc_feature (1)..(154): Homolog of NCBI NO: 32492063 NR Description: adenine phosphoribosyltransferase [Brassica napus]
  misc_feature (65)..(154): Homolog of NCBI NO: 25286872 NR Description: protein F17L21.24 [imported] - Arabidopsis
  misc_feature (1)..(66): Homolog of NCBI NO: 25286872 NR Description: protein F17L21.24 [imported] - Arabidopsis
  misc_feature (1)..(154): Homolog of NCBI NO: 30689934 NR Description: adenine phosphoribosyltransferase 1, APRT
  misc_feature (1)..(154): Homolog of NCBI NO: 18396344 NR Description: adenine phosphoribosyltransferase 1, APRT

SEQ ID NO: 39064 - DNA, 807 bp, Arabidopsis thaliana
  misc_feature (1)..(807): Ceres Seq. ID no. 12338926
  misc_feature: MA Experiment ID: 108595 Result: Up-regulated in Transcription
  misc_feature: MA Experiment 108595 PARAMETER Experiment Name: At_Ler-pi_Ovule_cDNA_P Parameter: Plant Line Value: null
  misc_feature: MA Experiment ID: 20000090 Result: Up-regulated in Transcription
  misc_feature: MA Experiment ID: 20000184 Result: Down-regulated in Transcription
  misc_feature: MA Experiment 20000184 PARAMETER Experiment Name: At_Shoots__P Parameter: Age (day) Value: 7
  misc_feature: MA Experiment 20000184 PARAMETER Experiment Name: At_Shoots__P Parameter: Tissue Value: Shoots vs. Whole Plant
actgcaaacgcttttgagacaaagttcgtcacttcgatctgaattataacacttcgtgcgagaatcgaaataatcgaaggttcaagatgggttggatcggagaaactgtagattctatcaaatctattcagattcgtcagcttttcactcaggccatcagtctagggatgattgtcacatctgctttgatcatatggaaagctttgatgtgtgtcactggaagcgaatctccggtggtggttgttctctctggaagcatggaacccggttttaagaggggggatatattgttcttgcacatgagtaaagacccgattcgagcaggtgaaattgttgttttcaatgttgatggtcgtgatattcccattgtccatcgtgtcattaaggttcacgaaagggaaaatacaggagaagttgatgttctaacgaaaggtgacaataactatggagatgacagacttctgtatgctgaaggacagctttggcttcatcgacatcatataatgggtcgtgctgtcgggttcttgccttatgttggatgggtgactattatcatgacagaaaagcctatcatcaagtatattctcataggtgcattgggtttactcgttataacgtcaaaggattgagtcttttggaaaggagtggactctgcagagtgcaaacccttaaagtcttgttatttcaatggaaaaaaagaaaaagacaaacaatttaaatactcgtttttgtggttagataattttaaagagtagaatcttctttttcctgtcaaactaaattataaacagtggaaagttaattttt

SEQ ID NO: 39065 - protein, 180 aa, Arabidopsis thaliana
  peptide (1)..(180): Ceres Seq. ID no. 12338927
  misc_feature (1)..(157): Pfam Name: Signal peptidase I Pfam Description: Signal peptidase I
  misc_feature (11)..(180): Homolog of NCBI NO: 31195617 NR Description: ENSANGP00000013674 [Anopheles gambiae]
  misc_feature (11)..(180): Homolog of NCBI NO: 21313554 NR Description: RIKEN cDNA 1810029G24 [Mus musculus]
  misc_feature (11)..(180): Homolog of NCBI NO: 134792 NR Description: Microsomal signal peptidase 21 kDa subunit (SPase
  misc_feature (11)..(180): Homolog of NCBI NO: 24025634 NR Description: signal peptidase 21kDa subunit [Rattus
  misc_feature (11)..(180): Homolog of NCBI NO: 15150809 NR Description: similar to signal peptidase complex (18kD) [Homo
  misc_feature (1)..(180): Homolog of NCBI NO: 18400874 NR Description: putative signal peptidase 21kDa subunit
  misc_feature (1)..(27): Homolog of NCBI NO: 34898642 NR Description: putative signal peptidase subunit
  misc_feature (116)..(180): Homolog of NCBI NO: 34898642 NR Description: putative signal peptidase subunit
  misc_feature (27)..(120): Homolog of NCBI NO: 34898642 NR Description: putative signal peptidase subunit
  misc_feature (1)..(180): Homolog of NCBI NO: 15219044 NR Description: signal peptidase subunit, putative
MGWIGETVDSIKSIQIRQLFTQAISLGMIVTSALIIWKALMCVTGSESPVVVVLSGSMEPGFKRGDILFLHMSKDPIRAGEIVVFNVDGRDIPIVHRVIKVHERENTGEVDVLTKGDNNYGDDRLLYAEGQLWLHRHHIMGRAVGFLPYVGWVTIIMTEKPIIKYILIGALGLLVITSKD

SEQ ID NO: 39066 - protein, 153 aa, Arabidopsis thaliana
  peptide (1)..(153): Ceres Seq. ID no. 12338929
  misc_feature (1)..(130): Pfam Name: Signal peptidase I Pfam Description: Signal peptidase I
  misc_feature (1)..(153): Homolog of NCBI NO: 31207577 NR Description: ENSANGP00000020448 [Anopheles gambiae]
  misc_feature (1)..(153): Homolog of NCBI NO: 31195617 NR Description: ENSANGP00000013674 [Anopheles gambiae]
  misc_feature (1)..(153): Homolog of NCBI NO: 21313554 NR Description: RIKEN cDNA 1810029G24 [Mus musculus]
  misc_feature (1)..(153): Homolog of NCBI NO: 134792 NR Description: Microsomal signal peptidase 21 kDa subunit (SPase
  misc_feature (1)..(153): Homolog of NCBI NO: 24025634 NR Description: signal peptidase 21kDa subunit [Rattus
  misc_feature (1)..(153): Homolog of NCBI NO: 15150809 NR Description: similar to signal peptidase complex (18kD) [Homo
  misc_feature (1)..(153): Homolog of NCBI NO: 18400874 NR Description: putative signal peptidase 21kDa subunit
  misc_feature (89)..(153): Homolog of NCBI NO: 34898642 NR Description: putative signal peptidase subunit
  misc_feature (1)..(93): Homolog of NCBI NO: 34898642 NR Description: putative signal peptidase subunit
  misc_feature (1)..(153): Homolog of NCBI NO: 15219044 NR Description: signal peptidase subunit, putative
MIVTSALIIWKALMCVTGSESPVVVVLSGSMEPGFKRGDILFLHMSKDPIRAGEIVVFNVDGRDIPIVHRVIKVHERENTGEVDVLTKGDNNYGDDRLLYAEGQLWLHRHHIMGRAVGFLPYVGWVTIIMTEKPIIKYILIGALGLLVITSKD

SEQ ID NO: 39067 - protein, 140 aa, Arabidopsis thaliana
  peptide (1)..(140): Ceres Seq. ID no. 12338930
  misc_feature (1)..(117): Pfam Name: Signal peptidase I Pfam Description: Signal peptidase I
  misc_feature (1)..(140): Homolog of NCBI NO: 31207577 NR Description: ENSANGP00000020448 [Anopheles gambiae]
  misc_feature (1)..(140): Homolog of NCBI NO: 31195617 NR Description: ENSANGP00000013674 [Anopheles gambiae]
  misc_feature (1)..(140): Homolog of NCBI NO: 21313554 NR Description: RIKEN cDNA 1810029G24 [Mus musculus]
  misc_feature (1)..(140): Homolog of NCBI NO: 134792 NR Description: Microsomal signal peptidase 21 kDa subunit (SPase
  misc_feature (1)..(140): Homolog of NCBI NO: 24025634 NR Description: signal peptidase 21kDa subunit [Rattus
  misc_feature (1)..(140): Homolog of NCBI NO: 15150809 NR Description: similar to signal peptidase complex (18kD) [Homo
  misc_feature (1)..(140): Homolog of NCBI NO: 18400874 NR Description: putative signal peptidase 21kDa subunit
  misc_feature (76)..(140): Homolog of NCBI NO: 34898642 NR Description: putative signal peptidase subunit
  misc_feature (1)..(80): Homolog of NCBI NO: 34898642 NR Description: putative signal peptidase subunit
  misc_feature (1)..(140): Homolog of NCBI NO: 15219044 NR Description: signal peptidase subunit, putative
MCVTGSESPVVVVLSGSMEPGFKRGDILFLHMSKDPIRAGEIVVFNVDGRDIPIVHRVIKVHERENTGEVDVLTKGDNNYGDDRLLYAEGQLWLHRHHIMGRAVGFLPYVGWVTIIMTEKPIIKYILIGALGLLVITSKD

SEQ ID NO: 39068 - DNA, 928 bp, Arabidopsis thaliana
  misc_feature (1)..(928): Ceres Seq. ID no. 13487201
  misc_feature: MA Experiment ID: 108434 Result: Down-regulated in Transcription
  misc_feature: MA Experiment 108434 PARAMETER Experiment Name: At_Root_Tips_cDNA_P Parameter: Tissue Value: Root Tips
  misc_feature: MA Experiment ID: 108461 Result: Up-regulated in Transcription
  misc_feature: MA Experiment 108461 PARAMETER Experiment Name: At_Germinating_Seeds_cDNA_P Parameter: Age (day) Value: 1 vs. 0
  misc_feature: MA Experiment 108461 PARAMETER Experiment Name: At_Germinating_Seeds_cDNA_P Parameter: Tissue Value: Germinating Seeds
  misc_feature: MA Experiment ID: 108462 Result: Up-regulated in Transcription
  misc_feature: MA Experiment 108462 PARAMETER Experiment Name: At_Germinating_Seeds_cDNA_P Parameter: Age (day) Value: 2 vs. 0
  misc_feature: MA Experiment 108462 PARAMETER Experiment Name: At_Germinating_Seeds_cDNA_P Parameter: Tissue Value: Germinating Seeds
  misc_feature: MA Experiment ID: 108463 Result: Up-regulated in Transcription
  misc_feature: MA Experiment 108463 PARAMETER Experiment Name: At_Germinating_Seeds_cDNA_P Parameter: Age (day) Value: 3 vs. 0
  misc_feature: MA Experiment 108463 PARAMETER Experiment Name: At_Germinating_Seeds_cDNA_P Parameter: Tissue Value: Germinating Seeds
  misc_feature: MA Experiment ID: 108464 Result: Up-regulated in Transcription
  misc_feature: MA Experiment 108464 PARAMETER Experiment Name: At_Germinating_Seeds_cDNA_P Parameter: Age (day) Value: 4 vs. 0
  misc_feature: MA Experiment 108464 PARAMETER Experiment Name: At_Germinating_Seeds_cDNA_P Parameter: Tissue Value: Germinating Seeds
  misc_feature: MA Experiment ID: 108573 Result: Down-regulated in Transcription
  misc_feature: MA Experiment 108573 PARAMETER Experiment Name: At_Drought_cDNA_P Parameter: Timepoint (hr) Value: 6
  misc_feature: MA Experiment 108573 PARAMETER Experiment Name: At_Drought_cDNA_P Parameter: Tissue Value: Aerial
  misc_feature: MA Experiment 108573 PARAMETER Experiment Name: At_Drought_cDNA_P Parameter: Treatment Value: Drought vs. No Drought
  misc_feature: MA Experiment ID: 108577 Result: Down-regulated in Transcription
  misc_feature: MA Experiment 108577 PARAMETER Experiment Name: At_42deg_Heat_cDNA_P Parameter: Temperature (deg C) Value: 42 vs. 22
  misc_feature: MA Experiment 108577 PARAMETER Experiment Name: At_42deg_Heat_cDNA_P Parameter: Timepoint (hr) Value: 6
  misc_feature: MA Experiment 108577 PARAMETER Experiment Name: At_42deg_Heat_cDNA_P Parameter: Tissue Value: Aerial
  misc_feature: MA Experiment ID: 108585 Result: Up-regulated in Transcription
  misc_feature: MA Experiment 108585 PARAMETER Experiment Name: At_5mM_NaNP_cDNA_P Parameter: Timepoint (hr) Value: 6
  misc_feature: MA Experiment 108585 PARAMETER Experiment Name: At_5mM_NaNP_cDNA_P Parameter: Tissue Value: Aerial
  misc_feature: MA Experiment 108585 PARAMETER Experiment Name: At_5mM_NaNP_cDNA_P Parameter: Treatment Value: null
  misc_feature: MA Experiment ID: 20000069 Result: Up-regulated in Transcription
  misc_feature: MA Experiment 20000069 PARAMETER Experiment Name: At_100uM_ABA_Mutants_cDNA_P Parameter: Plant Line Value: CS23
  misc_feature: MA Experiment 20000069 PARAMETER Experiment Name: At_100uM_ABA_Mutants_cDNA_P Parameter: Timepoint (hr) Value: 6
  misc_feature: MA Experiment 20000069 PARAMETER Experiment Name: At_100uM_ABA_Mutants_cDNA_P Parameter: Tissue Value: Aerial
  misc_feature: MA Experiment 20000069 PARAMETER Experiment Name: At_100uM_ABA_Mutants_cDNA_P Parameter: Treatment Value: 100uM ABA vs. No Treatment
  misc_feature: MA Experiment ID: 20000070 Result: Up-regulated in Transcription
  misc_feature: MA Experiment 20000070 PARAMETER Experiment Name: At_100uM_ABA_Mutants_cDNA_P Parameter: Plant Line Value: CS24
  misc_feature: MA Experiment 20000070 PARAMETER Experiment Name: At_100uM_ABA_Mutants_cDNA_P Parameter: Timepoint (hr) Value: 6
  misc_feature: MA Experiment 20000070 PARAMETER Experiment Name: At_100uM_ABA_Mutants_cDNA_P Parameter: Tissue Value: Aerial
  misc_feature: MA Experiment 20000070 PARAMETER Experiment Name: At_100uM_ABA_Mutants_cDNA_P Parameter: Treatment Value: 100uM ABA vs. No Treatment
  misc_feature: MA Experiment ID: 20000087 Result: Up-regulated in Transcription
  misc_feature: MA Experiment 20000087 PARAMETER Experiment Name: At_100uM_ABA_Mutants_cDNA_P Parameter: Plant Line Value: WS
  misc_feature: MA Experiment 20000087 PARAMETER Experiment Name: At_100uM_ABA_Mutants_cDNA_P Parameter: Timepoint (hr) Value: 6
  misc_feature: MA Experiment 20000087 PARAMETER Experiment Name: At_100uM_ABA_Mutants_cDNA_P Parameter: Tissue Value: Aerial
  misc_feature: MA Experiment 20000087 PARAMETER Experiment Name: At_100uM_ABA_Mutants_cDNA_P Parameter: Treatment Value: 100uM ABA vs. No Treatment
  misc_feature: MA Experiment ID: 20000089 Result: Up-regulated in Transcription
  misc_feature: MA Experiment ID: 20000090 Result: Up-regulated in Transcription
  misc_feature: MA Experiment ID: 20000111 Result: Down-regulated in Transcription
  misc_feature: MA Experiment 20000111 PARAMETER Experiment Name: At_42deg_Heat_cDNA_P Parameter: Temperature (deg C) Value: 42 vs. 22
  misc_feature: MA Experiment 20000111 PARAMETER Experiment Name: At_42deg_Heat_cDNA_P Parameter: Timepoint (hr) Value: 6
  misc_feature: MA Experiment 20000111 PARAMETER Experiment Name: At_42deg_Heat_cDNA_P Parameter: Tissue Value: Aerial
  misc_feature: MA Experiment ID: 20000112 Result: Down-regulated in Transcription
  misc_feature: MA Experiment 20000112 PARAMETER Experiment Name: At_42deg_Heat_cDNA_P Parameter: Temperature (deg C) Value: 42 vs. 22
  misc_feature: MA Experiment 20000112 PARAMETER Experiment Name: At_42deg_Heat_cDNA_P Parameter: Timepoint (hr) Value: 2
  misc_feature: MA Experiment 20000112 PARAMETER Experiment Name: At_42deg_Heat_cDNA_P Parameter: Tissue Value: Aerial
  misc_feature: MA Experiment ID: 20000113 Result: Down-regulated in Transcription
  misc_feature: MA Experiment 20000113 PARAMETER Experiment Name: At_42deg_Heat_cDNA_P Parameter: Temperature (deg C) Value: 42 vs. 22
  misc_feature: MA Experiment 20000113 PARAMETER Experiment Name: At_42deg_Heat_cDNA_P Parameter: Timepoint (hr) Value: 8
  misc_feature: MA Experiment 20000113 PARAMETER Experiment Name: At_42deg_Heat_cDNA_P Parameter: Tissue Value: Aerial
  misc_feature: MA Experiment ID: 20000117 Result: Up-regulated in Transcription
  misc_feature: MA Experiment 20000117 PARAMETER Experiment Name: At_100uM_ABA_Mutants_cDNA_P Parameter: Plant Line Value: Columbia
  misc_feature: MA Experiment 20000117 PARAMETER Experiment Name: At_100uM_ABA_Mutants_cDNA_P Parameter: Timepoint (hr) Value: 6
  misc_feature: MA Experiment 20000117 PARAMETER Experiment Name: At_100uM_ABA_Mutants_cDNA_P Parameter: Tissue Value: Aerial
  misc_feature: MA Experiment 20000117 PARAMETER Experiment Name: At_100uM_ABA_Mutants_cDNA_P Parameter: Treatment Value: 100uM ABA vs. No Treatment
  misc_feature: MA Experiment ID: 20000144 Result: Down-regulated in Transcription
  misc_feature: MA Experiment 20000144 PARAMETER Experiment Name: At_42deg_Heat_cDNA_P Parameter: Temperature (deg C) Value: 42 vs. 22
  misc_feature: MA Experiment 20000144 PARAMETER Experiment Name: At_42deg_Heat_cDNA_P Parameter: Timepoint (hr) Value: 1
  misc_feature: MA Experiment 20000144 PARAMETER Experiment Name: At_42deg_Heat_cDNA_P Parameter: Tissue Value: Aerial
  misc_feature: MA Experiment ID: 20000307 Result: Up-regulated in Transcription
  misc_feature: MA Experiment 20000307 PARAMETER Experiment Name: At_Germinating_Seeds_Sub_P Parameter: Age (hr) Value: 24 vs. 0
  misc_feature: MA Experiment 20000307 PARAMETER Experiment Name: At_Germinating_Seeds_Sub_P Parameter: Organism Value: A. thaliana
  misc_feature: MA Experiment 20000307 PARAMETER Experiment Name: At_Germinating_Seeds_Sub_P Parameter: Plant Line Value: WS
  misc_feature: MA Experiment 20000307 PARAMETER Experiment Name: At_Germinating_Seeds_Sub_P Parameter: Tissue Value: Germinating Seeds
  misc_feature: MA Experiment ID: 20000327 Result: Down-regulated in Transcription
  misc_feature: MA Experiment 20000327 PARAMETER Experiment Name: At_42deg_Heat_Sub_P Parameter: Age (day) Value: 14
  misc_feature: MA Experiment 20000327 PARAMETER Experiment Name: At_42deg_Heat_Sub_P Parameter: Organism Value: A. thaliana
  misc_feature: MA Experiment 20000327 PARAMETER Experiment Name: At_42deg_Heat_Sub_P Parameter: Plant Line Value: WS
  misc_feature: MA Experiment 20000327 PARAMETER Experiment Name: At_42deg_Heat_Sub_P Parameter: Temperature (deg C) Value: 42 vs. 22
  misc_feature: MA Experiment 20000327 PARAMETER Experiment Name: At_42deg_Heat_Sub_P Parameter: Timepoint (hr) Value: 1
  misc_feature: MA Experiment 20000327 PARAMETER Experiment Name: At_42deg_Heat_Sub_P Parameter: Tissue Value: Aerial
  misc_feature: MA Experiment ID: 20000328 Result: Down-regulated in Transcription
  misc_feature: MA Experiment 20000328 PARAMETER Experiment Name: At_42deg_Heat_Sub_P Parameter: Age (day) Value: 14
  misc_feature: MA Experiment 20000328 PARAMETER Experiment Name: At_42deg_Heat_Sub_P Parameter: Organism Value: A. thaliana
  misc_feature: MA Experiment 20000328 PARAMETER Experiment Name: At_42deg_Heat_Sub_P Parameter: Plant Line Value: WS
  misc_feature: MA Experiment 20000328 PARAMETER Experiment Name: At_42deg_Heat_Sub_P Parameter: Temperature (deg C) Value: 42 vs. 22
  misc_feature: MA Experiment 20000328 PARAMETER Experiment Name: At_42deg_Heat_Sub_P Parameter: Timepoint (hr) Value: 6
  misc_feature: MA Experiment 20000328 PARAMETER Experiment Name: At_42deg_Heat_Sub_P Parameter: Tissue Value: Aerial
  misc_feature: MA Experiment ID: 20000355 Result: Down-regulated in Transcription
  misc_feature: MA Experiment 20000355 PARAMETER Experiment Name: At_Siliques_Sub_P Parameter: Age (day) Value: 21
  misc_feature: MA Experiment 20000355 PARAMETER Experiment Name: At_Siliques_Sub_P Parameter: Organism Value: A. thaliana
  misc_feature: MA Experiment 20000355 PARAMETER Experiment Name: At_Siliques_Sub_P Parameter: Plant Line Value: WS
  misc_feature: MA Experiment 20000355 PARAMETER Experiment Name: At_Siliques_Sub_P Parameter: Tissue Value: Less Than 5mm Siliques vs. Whole Plant
  misc_feature: MA Experiment ID: 20000440 Result: Down-regulated in Transcription
  misc_feature: MA Experiment 20000440 PARAMETER Experiment Name: At_Closed-Flower__Sub_P Parameter: Tissue Value: Closed Flower vs. Whole Plant
ataaatacgctttctacattttcggatcgttgaacaacatctctctctctctctctctaaacccattagagtaatttagctcctcatagattctcgagaagaacacttccatggcgactaaagtatatatcgtgtactactctatgtatggtcatgttgagaaattggctgaagaaataaggaaaggagctgcttctgttgaaggtgttgaagctaaactatggcaggtaccagagacgcttcacgaagaggcactctctaagatgagcgcaccaccaaagagtgaatccccaatcataaccccgaatgagctagctgaagctgatgggtttgtctttggtttcccaacaagatttggtatgatggctgctcagttcaaagcctttttggatgcaaccggtggactctggagggctcaggcactcgccggtaaaccagctggtatcttctacagcactggctctcaaggtggtggccaagaaaccacagcattgacggcaataactcagctggttcaccacgggatgttatttgtcccaatcggttacacatttggcgcgggaatgttcgaaatggagaatgtgaaaggtggaagcccatatggagctggaacatttgcaggagacggttcaaggcagccaacagagctggagctacagcaagcatttcaccaaggccagtacattgccagcatcaccaagaagctcaagggatctactgcttagagcttaaaaagattatggtatcaataagaaaaaaagaaaaaaacagtttggttctgcttttttttatattctttctctttgaatttgggggcttttgtgatttttcgggtttaattatcttaaaatacatgatattatttcacagcaataattcttatcttggttttacgtatagatgataatgtatgatttgtacttgtgtc

SEQ ID NO: 39069 - protein, 204 aa, Arabidopsis thaliana [sequence omitted]

SEQ ID NO: 39070 - protein, 193 aa, Arabidopsis thaliana
  peptide (1)..(193): Ceres Seq. ID no. 13487203
  misc_feature (1)..(189): Homolog of NCBI NO: 2564066 NR Description: LEDI-3 protein [Lithospermum erythrorhizon]
  misc_feature (27)..(189): Homolog of NCBI NO: 37724581 NR Description: putative quinone reductase [Vitis vinifera]
  misc_feature (1)..(191): Homolog of NCBI NO: 34910128 NR Description: putative 1,4-benzoquinone reductase
  misc_feature (1)..(193): Homolog of NCBI NO: 12484052 NR Description: quinone-oxidoreductase QR2 [Triphysaria
  misc_feature (1)..(191): Homolog of NCBI NO: 38636776 NR Description: putative quinone-oxidoreductase QR2
  misc_feature (1)..(191): Homolog of NCBI NO: 21068664 NR Description: putative quinone oxidoreductase [Cicer arietinum]
  misc_feature (1)..(193): Homolog of NCBI NO: 7445353 NR Description: hypothetical protein M4I22.80 - Arabidopsis
  misc_feature (1)..(192): Homolog of NCBI NO: 5031275 NR Description: unknown [Prunus armeniaca]
  misc_feature (1)..(193): Homolog of NCBI NO: 30687535 NR Description: quinone reductase family [Arabidopsis thaliana]
  misc_feature (1)..(193): Homolog of NCBI NO: 15239652 NR Description: quinone reductase, putative [Arabidopsis
MYGHVEKLAEEIRKGAASVEGVEAKLWQVPETLHEEALSKMSAPPKSESPIITPNELAEADGFVFGFPTRFGMMAAQFKAFLDATGGLWRAQALAGKPAGIFYSTGSQGGGQETTALTAITQLVHHGMLFVPIGYTFGAGMFEMENVKGGSPYGAGTFAGDGSRQPTELELQQAFHQGQYIASITKKLKGSTA

SEQ ID NO: 39071 - protein, 153 aa, Arabidopsis thaliana
  peptide (1)..(153): Ceres Seq. ID no. 13487204
  misc_feature (1)..(149): Homolog of NCBI NO: 2564066 NR Description: LEDI-3 protein [Lithospermum erythrorhizon]
  misc_feature (1)..(149): Homolog of NCBI NO: 37724581 NR Description: putative quinone reductase [Vitis vinifera]
  misc_feature (1)..(151): Homolog of NCBI NO: 34910128 NR Description: putative 1,4-benzoquinone reductase
  misc_feature (1)..(153): Homolog of NCBI NO: 12484052 NR Description: quinone-oxidoreductase QR2 [Triphysaria
  misc_feature (1)..(151): Homolog of NCBI NO: 38636776 NR Description: putative quinone-oxidoreductase QR2
  misc_feature (1)..(151): Homolog of NCBI NO: 21068664 NR Description: putative quinone oxidoreductase [Cicer arietinum]
  misc_feature (1)..(153): Homolog of NCBI NO: 7445353 NR Description: hypothetical protein M4I22.80 - Arabidopsis
  misc_feature (1)..(152): Homolog of NCBI NO: 5031275 NR Description: unknown [Prunus armeniaca]
  misc_feature (1)..(153): Homolog of NCBI NO: 30687535 NR Description: quinone reductase family [Arabidopsis thaliana]
  misc_feature (1)..(153): Homolog of NCBI NO: 15239652 NR Description: quinone reductase, putative [Arabidopsis
MSAPPKSESPIITPNELAEADGFVFGFPTRFGMMAAQFKAFLDATGGLWRAQALAGKPAGIFYSTGSQGGGQETTALTAITQLVHHGMLFVPIGYTFGAGMFEMENVKGGSPYGAGTFAGDGSRQPTELELQQAFHQGQYIASITKKLKGSTA

SEQ ID NO: 39072 - DNA, 1761 bp, Arabidopsis thaliana
  misc_feature (1)..(1761): Ceres Seq. ID no. 12328341
  misc_feature: MA Experiment ID: 108461 Result: Up-regulated in Transcription
  misc_feature: MA Experiment 108461 PARAMETER Experiment Name: At_Germinating_Seeds_cDNA_P Parameter: Age (day) Value: 1 vs. 0
  misc_feature: MA Experiment 108461 PARAMETER Experiment Name: At_Germinating_Seeds_cDNA_P Parameter: Tissue Value: Germinating Seeds
  misc_feature: MA Experiment ID: 108607 Result: Up-regulated in Transcription
  misc_feature: MA Experiment 108607 PARAMETER Experiment Name: At_100uM_ABA_cDNA_P Parameter: Timepoint (hr) Value: 4
  misc_feature: MA Experiment 108607 PARAMETER Experiment Name: At_100uM_ABA_cDNA_P Parameter: Tissue Value: Aerial
  misc_feature: MA Experiment 108607 PARAMETER Experiment Name: At_100uM_ABA_cDNA_P Parameter: Treatment Value: 100uM ABA vs. No Treatment
  misc_feature: MA Experiment ID: 20000069 Result: Up-regulated in Transcription
  misc_feature: MA Experiment 20000069 PARAMETER Experiment Name: At_100uM_ABA_Mutants_cDNA_P Parameter: Plant Line Value: CS23
  misc_feature: MA Experiment 20000069 PARAMETER Experiment Name: At_100uM_ABA_Mutants_cDNA_P Parameter: Timepoint (hr) Value: 6
  misc_feature: MA Experiment 20000069 PARAMETER Experiment Name: At_100uM_ABA_Mutants_cDNA_P Parameter: Tissue Value: Aerial
  misc_feature: MA Experiment 20000069 PARAMETER Experiment Name: At_100uM_ABA_Mutants_cDNA_P Parameter: Treatment Value: 100uM ABA vs. No Treatment
  misc_feature: MA Experiment ID: 20000070 Result: Up-regulated in Transcription
  misc_feature: MA Experiment 20000070 PARAMETER Experiment Name: At_100uM_ABA_Mutants_cDNA_P Parameter: Plant Line Value: CS24
  misc_feature: MA Experiment 20000070 PARAMETER Experiment Name: At_100uM_ABA_Mutants_cDNA_P Parameter: Timepoint (hr) Value: 6
  misc_feature: MA Experiment 20000070 PARAMETER Experiment Name: At_100uM_ABA_Mutants_cDNA_P Parameter: Tissue Value: Aerial
  misc_feature: MA Experiment 20000070 PARAMETER Experiment Name: At_100uM_ABA_Mutants_cDNA_P Parameter: Treatment Value: 100uM ABA vs. No Treatment
  misc_feature: MA Experiment ID: 20000071 Result: Up-regulated in Transcription
  misc_feature: MA Experiment 20000071 PARAMETER Experiment Name: At_100uM_ABA_Mutants_cDNA_P Parameter: Plant Line Value: CS8104
  misc_feature: MA Experiment 20000071 PARAMETER Experiment Name: At_100uM_ABA_Mutants_cDNA_P Parameter: Timepoint (hr) Value: 6
  misc_feature: MA Experiment 20000071 PARAMETER Experiment Name: At_100uM_ABA_Mutants_cDNA_P Parameter: Tissue Value: Aerial
  misc_feature: MA Experiment 20000071 PARAMETER Experiment Name: At_100uM_ABA_Mutants_cDNA_P Parameter: Treatment Value: 100uM ABA vs. No Treatment
  misc_feature: MA Experiment ID: 20000072 Result: Up-regulated in Transcription
  misc_feature: MA Experiment 20000072 PARAMETER Experiment Name: At_100uM_ABA_Mutants_cDNA_P Parameter: Plant Line Value: CS8105
  misc_feature: MA Experiment 20000072 PARAMETER Experiment Name: At_100uM_ABA_Mutants_cDNA_P Parameter: Timepoint (hr) Value: 6
  misc_feature: MA Experiment 20000072 PARAMETER Experiment Name: At_100uM_ABA_Mutants_cDNA_P Parameter: Tissue Value: Aerial
  misc_feature: MA Experiment 20000072 PARAMETER Experiment Name: At_100uM_ABA_Mutants_cDNA_P Parameter: Treatment Value: 100uM ABA vs. No Treatment
  misc_feature: MA Experiment ID: 20000086 Result: Up-regulated in Transcription
  misc_feature: MA Experiment 20000086 PARAMETER Experiment Name: At_100uM_ABA_Mutants_cDNA_P Parameter: Plant Line Value: CS22
  misc_feature: MA Experiment 20000086 PARAMETER Experiment Name: At_100uM_ABA_Mutants_cDNA_P Parameter: Timepoint (hr) Value: 6
  misc_feature: MA Experiment 20000086 PARAMETER Experiment Name: At_100uM_ABA_Mutants_cDNA_P Parameter: Tissue Value: Aerial
  misc_feature: MA Experiment 20000086 PARAMETER Experiment Name: At_100uM_ABA_Mutants_cDNA_P Parameter: Treatment Value: 100uM ABA vs. No Treatment
  misc_feature: MA Experiment ID: 20000117 Result: Up-regulated in Transcription
  misc_feature: MA Experiment 20000117 PARAMETER Experiment Name: At_100uM_ABA_Mutants_cDNA_P Parameter: Plant Line Value: Columbia
  misc_feature: MA Experiment 20000117 PARAMETER Experiment Name: At_100uM_ABA_Mutants_cDNA_P Parameter: Timepoint (hr) Value: 6
  misc_feature: MA Experiment 20000117 PARAMETER Experiment Name: At_100uM_ABA_Mutants_cDNA_P Parameter: Tissue Value: Aerial
  misc_feature: MA Experiment 20000117 PARAMETER Experiment Name: At_100uM_ABA_Mutants_cDNA_P Parameter: Treatment Value: 100uM ABA vs. No Treatment
  misc_feature: MA Experiment ID: 20000171 Result: Down-regulated in Transcription
  misc_feature: MA Experiment 20000171 PARAMETER Experiment Name: At_42deg_Heat_P Parameter: Age (day) Value: 14
  misc_feature: MA Experiment 20000171 PARAMETER Experiment Name: At_42deg_Heat_P Parameter: Organism Value: A. thaliana
  misc_feature: MA Experiment 20000171 PARAMETER Experiment Name: At_42deg_Heat_P Parameter: Plant Line Value: WS
  misc_feature: MA Experiment 20000171 PARAMETER Experiment Name: At_42deg_Heat_P Parameter: Temperature (deg C) Value: 42 vs. 22
  misc_feature: MA Experiment 20000171 PARAMETER Experiment Name: At_42deg_Heat_P Parameter: Timepoint (hr) Value: 1
  misc_feature: MA Experiment 20000171 PARAMETER Experiment Name: At_42deg_Heat_P Parameter: Tissue Value: Aerial
  misc_feature: MA Experiment ID: 20000173 Result: Down-regulated in Transcription
  misc_feature: MA Experiment 20000173 PARAMETER Experiment Name: At_42deg_Heat_P Parameter: Age (day) Value: 14
  misc_feature: MA Experiment 20000173 PARAMETER Experiment Name: At_42deg_Heat_P Parameter: Organism Value: A. thaliana
  misc_feature: MA Experiment 20000173 PARAMETER Experiment Name: At_42deg_Heat_P Parameter: Plant Line Value: WS
  misc_feature: MA Experiment 20000173 PARAMETER Experiment Name: At_42deg_Heat_P Parameter: Temperature (deg C) Value: 42 vs. 22
  misc_feature: MA Experiment 20000173 PARAMETER Experiment Name: At_42deg_Heat_P Parameter: Timepoint (hr) Value: 6
  misc_feature: MA Experiment 20000173 PARAMETER Experiment Name: At_42deg_Heat_P Parameter: Tissue Value: Aerial
  misc_feature: MA Experiment ID: 20000184 Result: Down-regulated in Transcription
  misc_feature: MA Experiment 20000184 PARAMETER Experiment Name: At_Shoots__P Parameter: Age (day) Value: 7
  misc_feature: MA Experiment 20000184 PARAMETER Experiment Name: At_Shoots__P Parameter: Tissue Value: Shoots vs. Whole Plant
  misc_feature: MA Experiment ID: 20000436 Result: Up-regulated in Transcription
  misc_feature: MA Experiment 20000436 PARAMETER Experiment Name: At_Drought_P Parameter: Age (day) Value: 7
  misc_feature: MA Experiment 20000436 PARAMETER Experiment Name: At_Drought_P Parameter: Organism Value: A. thaliana
  misc_feature: MA Experiment 20000436 PARAMETER Experiment Name: At_Drought_P Parameter: Plant Line Value: WS
  misc_feature: MA Experiment 20000436 PARAMETER Experiment Name: At_Drought_P Parameter: Timepoint (hr) Value: 12
  misc_feature: MA Experiment 20000436 PARAMETER Experiment Name: At_Drought_P Parameter: Tissue Value: Whole Plant
  misc_feature: MA Experiment 20000436 PARAMETER Experiment Name: At_Drought_P Parameter: Treatment Value: Drought vs. No Drought
  misc_feature: MA Experiment ID: 20000437 Result: Up-regulated in Transcription
  misc_feature: MA Experiment 20000437 PARAMETER Experiment Name: At_Drought_P Parameter: Age (day) Value: 8
  misc_feature: MA Experiment 20000437 PARAMETER Experiment Name: At_Drought_P Parameter: Organism Value: A. thaliana
  misc_feature: MA Experiment 20000437 PARAMETER Experiment Name: At_Drought_P Parameter: Plant Line Value: WS
  misc_feature: MA Experiment 20000437 PARAMETER Experiment Name: At_Drought_P Parameter: Timepoint (hr) Value: 24
  misc_feature: MA Experiment 20000437 PARAMETER Experiment Name: At_Drought_P Parameter: Tissue Value: Whole Plant
  misc_feature: MA Experiment 20000437 PARAMETER Experiment Name: At_Drought_P Parameter: Treatment Value: Drought vs. No Drought
  misc_feature: MA Experiment ID: 20000453 Result: Up-regulated in Transcription
  misc_feature: MA Experiment 20000453 PARAMETER Experiment Name: At_100uM_ABA_P Parameter: Age (day) Value: 15
  misc_feature: MA Experiment 20000453 PARAMETER Experiment Name: At_100uM_ABA_P Parameter: Organism Value: A. thaliana
  misc_feature: MA Experiment 20000453 PARAMETER Experiment Name: At_100uM_ABA_P Parameter: Plant Line Value: WS
  misc_feature: MA Experiment 20000453 PARAMETER Experiment Name: At_100uM_ABA_P Parameter: Timepoint (hr) Value: 24
  misc_feature: MA Experiment 20000453 PARAMETER Experiment Name: At_100uM_ABA_P Parameter: Tissue Value: Aerial
  misc_feature: MA Experiment 20000453 PARAMETER Experiment Name: At_100uM_ABA_P Parameter: Treatment Value: 100uM ABA vs. No Treatment
  misc_feature: MA Experiment ID: 20000495 Result: Up-regulated in Transcription
  misc_feature: MA Experiment 20000495 PARAMETER Experiment Name: At_Guard_Cells_P Parameter: Harvest Date Value: 8/2/2002
  misc_feature: MA Experiment 20000495 PARAMETER Experiment Name: At_Guard_Cells_P Parameter: Organism Value: A. thaliana
  misc_feature: MA Experiment 20000495 PARAMETER Experiment Name: At_Guard_Cells_P Parameter: Tissue Value: Guard Cells vs. Leaves
  misc_feature: MA Experiment ID: 20000794 Result: Up-regulated in Transcription
  misc_feature: MA Experiment 20000794 PARAMETER Experiment Name: At_Petals_P Parameter: Age (day) Value: 23-25 days
  misc_feature: MA Experiment 20000794 PARAMETER Experiment Name: At_Petals_P Parameter: Plant Line Value: WS
  misc_feature: MA Experiment 20000794 PARAMETER Experiment Name: At_Petals_P Parameter: Tissue Value: Petals vs. Whole plant
  misc_feature: MA Experiment ID: 20001554 Result: Up-regulated in Transcription
  misc_feature: MA Experiment 20001554 PARAMETER Experiment Name: At_Drought_Soil_Dry_P Parameter: Age (day) Value: 21
  misc_feature: MA Experiment 20001554 PARAMETER Experiment Name: At_Drought_Soil_Dry_P Parameter: Organism Value: A. thaliana
  misc_feature: MA Experiment 20001554 PARAMETER Experiment Name: At_Drought_Soil_Dry_P Parameter: Plant Line Value: WS
  misc_feature: MA Experiment 20001554 PARAMETER Experiment Name: At_Drought_Soil_Dry_P Parameter: Post Timepoint (hr) Value: None
  misc_feature: MA Experiment 20001554 PARAMETER Experiment Name: At_Drought_Soil_Dry_P Parameter: Post-Treatment Value: None
  misc_feature: MA Experiment 20001554 PARAMETER Experiment Name: At_Drought_Soil_Dry_P Parameter: Timepoint (day) Value: 7
  misc_feature: MA Experiment 20001554 PARAMETER Experiment Name: At_Drought_Soil_Dry_P Parameter: Treatment Value: Drought vs. No Drought
  misc_feature: MA Experiment ID: 20001555 Result: Up-regulated in Transcription
  misc_feature: MA Experiment 20001555 PARAMETER Experiment Name: At_Drought_Soil_Dry_P Parameter: Age (day) Value: 24
  misc_feature: MA Experiment 20001555 PARAMETER Experiment Name: At_Drought_Soil_Dry_P Parameter: Organism Value: A. thaliana
  misc_feature: MA Experiment 20001555 PARAMETER Experiment Name: At_Drought_Soil_Dry_P Parameter: Plant Line Value: WS
  misc_feature: MA Experiment 20001555 PARAMETER Experiment Name: At_Drought_Soil_Dry_P Parameter: Post Timepoint (hr) Value: None
  misc_feature: MA Experiment 20001555 PARAMETER Experiment Name: At_Drought_Soil_Dry_P Parameter: Post-Treatment Value: None
  misc_feature: MA Experiment 20001555 PARAMETER Experiment Name: At_Drought_Soil_Dry_P Parameter: Timepoint (day) Value: 10
  misc_feature: MA Experiment 20001555 PARAMETER Experiment Name: At_Drought_Soil_Dry_P Parameter: Treatment Value: Drought vs. No Drought
  misc_feature: MA Experiment ID: 20001904 Result: Up-regulated in Transcription
  misc_feature: MA Experiment 20001904 PARAMETER Experiment Name: At_Drought_Reproduction_P Parameter: Age (day) Value: 37
  misc_feature: MA Experiment 20001904 PARAMETER Experiment Name: At_Drought_Reproduction_P Parameter: Organism Value: A. thaliana
  misc_feature: MA Experiment 20001904 PARAMETER Experiment Name: At_Drought_Reproduction_P Parameter: Plant Line Value: WS
  misc_feature: MA Experiment 20001904 PARAMETER Experiment Name: At_Drought_Reproduction_P Parameter: Timepoint (day) Value: 7
  misc_feature: MA Experiment 20001904 PARAMETER Experiment Name: At_Drought_Reproduction_P Parameter: Tissue Value: Rosettes
  misc_feature: MA Experiment 20001904 PARAMETER Experiment Name: At_Drought_Reproduction_P Parameter: Treatment Value: Drought vs. No Drought
  misc_feature: MA Experiment ID: 20001905 Result: Up-regulated in Transcription
  misc_feature: MA Experiment 20001905 PARAMETER Experiment Name: At_Drought_Reproduction_P Parameter: Age (day) Value: 40
  misc_feature: MA Experiment 20001905 PARAMETER Experiment Name: At_Drought_Reproduction_P Parameter: Organism Value: A. thaliana
  misc_feature: MA Experiment 20001905 PARAMETER Experiment Name: At_Drought_Reproduction_P Parameter: Plant Line Value: WS
  misc_feature: MA Experiment 20001905 PARAMETER Experiment Name: At_Drought_Reproduction_P Parameter: Timepoint (day) Value: 10
  misc_feature: MA Experiment 20001905 PARAMETER Experiment Name: At_Drought_Reproduction_P Parameter: Tissue Value: Rosettes
  misc_feature: MA Experiment 20001905 PARAMETER Experiment Name: At_Drought_Reproduction_P Parameter: Treatment Value: Drought vs. No Drought
  misc_feature: MA Experiment ID: 20001911 Result: Up-regulated in Transcription
  misc_feature: MA Experiment 20001911 PARAMETER Experiment Name: At_Drought_Reproduction_P Parameter: Age (day) Value: 40
  misc_feature: MA Experiment 20001911 PARAMETER Experiment Name: At_Drought_Reproduction_P Parameter: Organism Value: A. thaliana
  misc_feature: MA Experiment 20001911 PARAMETER Experiment Name: At_Drought_Reproduction_P Parameter: Plant Line Value: WS
  misc_feature: MA Experiment 20001911 PARAMETER Experiment Name: At_Drought_Reproduction_P Parameter: Timepoint (day) Value: 10
  misc_feature: MA Experiment 20001911 PARAMETER Experiment Name: At_Drought_Reproduction_P Parameter: Tissue Value: Flowers
  misc_feature: MA Experiment 20001911 PARAMETER Experiment Name: At_Drought_Reproduction_P Parameter: Treatment Value: Drought vs. No Drought
caacataatgtccattacaaacaacaacagcatcataaatctcatcacgacgaactttcttctctttctccgtcgattcaatcctccacttcccgattccttcctccgccgccggagaaaccttcacaacctccgtctcaaacctaaccatctcctcaatcccaaactccttagcgaaatctttcaaatacgccaaaacttcgccatgactcggaaacctcctcggatctctagacacaccggaacgaaccacgaacgggaaatctctgtatccggtactctctcgtgtaccgttgattcgtagagatctatagacgcttgaatgaacaacggatcgggtcgggtcaacacttaacggatccgattcgacttcatcggtgtagatccaggttcctccgacttgtttttgtttctcgaaaacgaccaccgagtgaccttctcgtcgaagctctcgtgccgctactagacctgcaggtccagcaccgataaccgccacgtggtgtgatctggttggtgataatgcaggtgccatttgtgtgttctttgattagaatctatgaatcacaatcacacacacttgttacaatttatgattacaatgtttttaataatcaatttggtgtgttagaaacttacacgaatctgttattacagacgtagattgccacgttttggttgatagagagaaatgcttttattatataacttgtgtcattgtatttcttctccaccgagacagtgaaacatcaatcaatatgagcaatcatcaaactgtgagatttcttttctctcatttaccattttgcccttccactttcttgatgattgtttgttttttttgtggacagaagcaggtattgaagcaattggagccatggtgtgaacttaaagataaagtggttcttgtgacaggtgcttcatctggtatagggagagagatctgtcttgatctatgcaaagctggttgtaagattgtagcagcagctcgtcgtgttgatcgtctcaactctctctgttctgaaatcaacagctttggtgcaatcggagtccaagccgcagctcttgagctagacgtttcatcagacgcagacactattcgaaaagcggttaaagaagcttgggaaatctttggaacgatcgatgttttgattaacaatgctggaatcagaggcaatgtcaagtctagtttggatttatcagaagaagaatgggacaaagtctttagaaccaacttgaccggatcttggttaatatccaaatacgtctgccttttgatgcgtgacgctaagcgcgggggctcggtgattaacgtctcgtcaatctctgggcttcatcgcggtttgttgcgcggtggactagcgtatgcttgttccaaaggtggtgttgacaccatgacaaggatgatggctattgagttagcggtttataatatcagagtgaactcgatcgcaccggggattttcaggtcagagatcacacaaggtcttttccagaaagagtggctcgagaaggttacggaaaagattgtaccattaaagatgcaacagactgtggatccggggcttacatctctcgttcgctatctcattcacgattcttctcaatatgtcaccgggaatacatacattgtcgattccggaactacactgcccggtgtgcccattttttcttctctttgaaaatcttagtcaaaatcttctgtgcttgtacatacaccgtgataagaatgatgtctttccaataaatggcagtactggcatt

SEQ ID NO: 39073 - protein, 307 aa, Arabidopsis thaliana
  peptide (1)..(307): Ceres Seq. ID no. 12328342
  misc_feature (40)..(307): Homolog of NCBI NO: 28411870 NR Description: putative 3-ketoacyl-acyl carrier protein
  misc_feature (35)..(307): Homolog of NCBI NO: 23451057 NR Description: putative short-chain type alcohol dehydrogenase
  misc_feature (35)..(307): Homolog of NCBI NO: 13549123 NR Description: putative short-chain type alcohol dehydrogenase
  misc_feature (32)..(307): Homolog of NCBI NO: 18398539 NR Description: similar to oxidoreductase -like protein; protein
  misc_feature (27)..(307): Homolog of NCBI NO: 15231362 NR Description: dehydrogenase -like protein; protein id:
  misc_feature (21)..(307): Homolog of NCBI NO: 15233243 NR Description: beta-ketoacyl-ACP reductase - like protein
  misc_feature (34)..(307): Homolog of NCBI NO: 11250516 NR Description: oxidoreductase-like protein - Arabidopsis
  misc_feature (31)..(307): Homolog of NCBI NO: 18410245 NR Description: oxidoreductase -like protein
  misc_feature (23)..(307): Homolog of NCBI NO: 15222406 NR Description: reductase, putative; protein id: At1g63380.1
  misc_feature (1)..(307): Homolog of NCBI NO: 15221517 NR Description: similar to glucose 1-dehydrogenase (AB000617)
MSNHQTVRFLFSHLPFCPSTFLMIVCFFCGQKQVLKQLEPWCELKDKVVLVTGASSGIGREICLDLCKAGCKIVAAARRVDRLNSLCSEINSFGAIGVQAAALELDVSSDADTIRKAVKEAWEIFGTIDVLINNAGIRGNVKSSLDLSEEEWDKVFRTNLTGSWLISKYVCLLMRDAKRGGSVINVSSISGLHRGLLRGGLAYACSKGGVDTMTRMMAIELAVYNIRVNSIAPGIFRSEITQGLFQKEWLEKVTEKIVPLKMQQTVDPGLTSLVRYLIHDSSQYVTGNTYIVDSGTTLPGVPIFSSL

SEQ ID NO: 39074 - protein, 285 aa, Arabidopsis thaliana
  peptide (1)..(285): Ceres Seq. ID no. 12328343
  misc_feature (18)..(285): Homolog of NCBI NO: 28411870 NR Description: putative 3-ketoacyl-acyl carrier protein
  misc_feature (13)..(285): Homolog of NCBI NO: 23451057 NR Description: putative short-chain type alcohol dehydrogenase
  misc_feature (13)..(285): Homolog of NCBI NO: 13549123 NR Description: putative short-chain type alcohol dehydrogenase
  misc_feature (10)..(285): Homolog of NCBI NO: 18398539 NR Description: similar to oxidoreductase -like protein; protein
  misc_feature (5)..(285): Homolog of NCBI NO: 15231362 NR Description: dehydrogenase -like protein; protein id:
  misc_feature (1)..(285): Homolog of NCBI NO: 15233243 NR Description: beta-ketoacyl-ACP reductase - like protein
  misc_feature (12)..(285): Homolog of NCBI NO: 11250516 NR Description: oxidoreductase-like protein - Arabidopsis
  misc_feature (9)..(285): Homolog of NCBI NO: 18410245 NR Description: oxidoreductase -like protein
  misc_feature (1)..(285): Homolog of NCBI NO: 15222406 NR Description: reductase, putative; protein id: At1g63380.1
  misc_feature (1)..(285): Homolog of NCBI NO: 15221517 NR Description: similar to glucose 1-dehydrogenase (AB000617)
MIVCFFCGQKQVLKQLEPWCELKDKVVLVTGASSGIGREICLDLCKAGCKIVAAARRVDRLNSLCSEINSFGAIGVQAAALELDVSSDADTIRKAVKEAWEIFGTIDVLINNAGIRGNVKSSLDLSEEEWDKVFRTNLTGSWLISKYVCLLMRDAKRGGSVINVSSISGLHRGLLRGGLAYACSKGGVDTMTRMMAIELAVYNIRVNSIAPGIFRSEITQGLFQKEWLEKVTEKIVPLKMQQTVDPGLTSLVRYLIHDSSQYVTGNTYIVDSGTTLPGVPIFSSL

SEQ ID NO: 39075 - DNA, 1216 bp, Arabidopsis thaliana
  misc_feature (1)..(1216): Ceres Seq. ID no. 13487632
  misc_feature: MA Experiment ID: 108434 Result: Down-regulated in Transcription
  misc_feature: MA Experiment 108434 PARAMETER Experiment Name: At_Root_Tips_cDNA_P Parameter: Tissue Value: Root Tips
  misc_feature: MA Experiment ID: 108464 Result: Up-regulated in Transcription
  misc_feature: MA Experiment 108464 PARAMETER Experiment Name: At_Germinating_Seeds_cDNA_P Parameter: Age (day) Value: 4 vs. 0
  misc_feature: MA Experiment 108464 PARAMETER Experiment Name: At_Germinating_Seeds_cDNA_P Parameter: Tissue Value: Germinating Seeds
  misc_feature: MA Experiment ID: 20000180 Result: Up-regulated in Transcription
  misc_feature: MA Experiment 20000180 PARAMETER Experiment Name: At_Germinating_Seeds_P Parameter: Age (hr) Value: 24 vs. 0
  misc_feature: MA Experiment 20000180 PARAMETER Experiment Name: At_Germinating_Seeds_P Parameter: Tissue Value: Germinating Seeds
  misc_feature: MA Experiment ID: 20000182 Result: Up-regulated in Transcription
  misc_feature: MA Experiment 20000182 PARAMETER Experiment Name: At_2mM_SA_P Parameter: Age (day) Value: 14
  misc_feature: MA Experiment 20000182 PARAMETER Experiment Name: At_2mM_SA_P Parameter: Organism Value: A. thaliana
  misc_feature: MA Experiment 20000182 PARAMETER Experiment Name: At_2mM_SA_P Parameter: Plant Line Value: WS
  misc_feature: MA Experiment 20000182 PARAMETER Experiment Name: At_2mM_SA_P Parameter: Timepoint (hr) Value: 6
  misc_feature: MA Experiment 20000182 PARAMETER Experiment Name: At_2mM_SA_P Parameter: Tissue Value: Aerial
  misc_feature: MA Experiment 20000182 PARAMETER Experiment Name: At_2mM_SA_P Parameter: Treatment Value: 2mM SA vs. No Treatment
  misc_feature: MA Experiment ID: 20000184 Result: Down-regulated in Transcription
  misc_feature: MA Experiment 20000184 PARAMETER Experiment Name: At_Shoots__P Parameter: Age (day) Value: 7
  misc_feature: MA Experiment 20000184 PARAMETER Experiment Name: At_Shoots__P Parameter: Tissue Value: Shoots vs. Whole Plant
  misc_feature: MA Experiment ID: 20000224 Result: Up-regulated in Transcription
  misc_feature: MA Experiment ID: 20000234 Result: Down-regulated in Transcription
  misc_feature: MA Experiment 20000234 PARAMETER Experiment Name: At_Siliques_P Parameter: Age (day) Value: 21
  misc_feature: MA Experiment 20000234 PARAMETER Experiment Name: At_Siliques_P Parameter: Organism Value: A. thaliana
  misc_feature: MA Experiment 20000234 PARAMETER Experiment Name: At_Siliques_P Parameter: Plant Line Value: WS
  misc_feature: MA Experiment 20000234 PARAMETER Experiment Name: At_Siliques_P Parameter: Tissue Value: Less Than 5mm Siliques vs. Whole Plant
  misc_feature: MA Experiment ID: 20000438 Result: Down-regulated in Transcription
  misc_feature: MA Experiment 20000438 PARAMETER Experiment Name: At_Shoots__P Parameter: Age (day) Value: 14
  misc_feature: MA Experiment 20000438 PARAMETER Experiment Name: At_Shoots__P Parameter: Tissue Value: Shoots vs. Whole Plant
  misc_feature: MA Experiment ID: 20000527 Result: Down-regulated in Transcription
  misc_feature: MA Experiment 20000527 PARAMETER Experiment Name: At_10percent_PEG_P Parameter: Age (day) Value: 20
  misc_feature: MA Experiment 20000527 PARAMETER Experiment Name: At_10percent_PEG_P Parameter: Organism Value: A. thaliana
  misc_feature: MA Experiment 20000527 PARAMETER Experiment Name: At_10percent_PEG_P Parameter: Plant Line Value: WS
  misc_feature: MA Experiment 20000527 PARAMETER Experiment Name: At_10percent_PEG_P Parameter: Timepoint (day) Value: 20
  misc_feature: MA Experiment 20000527 PARAMETER Experiment Name: At_10percent_PEG_P Parameter: Tissue Value: Whole Plant
  misc_feature: MA Experiment 20000527 PARAMETER Experiment Name: At_10percent_PEG_P Parameter: Treatment Value: 10percent PEG vs. No Treatment
  misc_feature: MA Experiment ID: 20001555 Result: Down-regulated in Transcription
  misc_feature: MA Experiment 20001555 PARAMETER Experiment Name: At_Drought_Soil_Dry_P Parameter: Age (day) Value: 24
  misc_feature: MA Experiment 20001555 PARAMETER Experiment Name: At_Drought_Soil_Dry_P Parameter: Organism Value: A. thaliana
  misc_feature: MA Experiment 20001555 PARAMETER Experiment Name: At_Drought_Soil_Dry_P Parameter: Plant Line Value: WS
  misc_feature: MA Experiment 20001555 PARAMETER Experiment Name: At_Drought_Soil_Dry_P Parameter: Post Timepoint (hr) Value: None
  misc_feature: MA Experiment 20001555 PARAMETER Experiment Name: At_Drought_Soil_Dry_P Parameter: Post-Treatment Value: None
  misc_feature: MA Experiment 20001555 PARAMETER Experiment Name: At_Drought_Soil_Dry_P Parameter: Timepoint (day) Value: 10
  misc_feature: MA Experiment 20001555 PARAMETER Experiment Name: At_Drought_Soil_Dry_P Parameter: Treatment Value: Drought vs. No Drought
  misc_feature: MA Experiment ID: 20001556 Result: Down-regulated in Transcription
  misc_feature: MA Experiment 20001556 PARAMETER Experiment Name: At_Drought_Soil_Dry_P Parameter: Age (day) Value: 26
  misc_feature: MA Experiment 20001556 PARAMETER Experiment Name: At_Drought_Soil_Dry_P Parameter: Organism Value: A. thaliana
  misc_feature: MA Experiment 20001556 PARAMETER Experiment Name: At_Drought_Soil_Dry_P Parameter: Plant Line Value: WS
  misc_feature: MA Experiment 20001556 PARAMETER Experiment Name: At_Drought_Soil_Dry_P Parameter: Post Timepoint (hr) Value: None
  misc_feature: MA Experiment 20001556 PARAMETER Experiment Name: At_Drought_Soil_Dry_P Parameter: Post-Treatment Value: None
  misc_feature: MA Experiment 20001556 PARAMETER Experiment Name: At_Drought_Soil_Dry_P Parameter: Timepoint (day) Value: 12
  misc_feature: MA Experiment 20001556 PARAMETER Experiment Name: At_Drought_Soil_Dry_P Parameter: Treatment Value: Drought vs. No Drought
  misc_feature: MA Experiment ID: 20001557 Result: Down-regulated in Transcription
  misc_feature: MA Experiment 20001557 PARAMETER Experiment Name: At_Drought_Soil_Dry_P Parameter: Age (day) Value: 27
  misc_feature: MA Experiment 20001557 PARAMETER Experiment Name: At_Drought_Soil_Dry_P Parameter: Organism Value: A. thaliana
  misc_feature: MA Experiment 20001557 PARAMETER Experiment Name: At_Drought_Soil_Dry_P Parameter: Plant Line Value: WS
  misc_feature: MA Experiment 20001557 PARAMETER Experiment Name: At_Drought_Soil_Dry_P Parameter: Post Timepoint (hr) Value: 3
  misc_feature: MA Experiment 20001557 PARAMETER Experiment Name: At_Drought_Soil_Dry_P Parameter: Post-Treatment Value: Re-Water vs. No Drought
  misc_feature: MA Experiment 20001557 PARAMETER Experiment Name: At_Drought_Soil_Dry_P Parameter: Timepoint (day) Value: 13
  misc_feature: MA Experiment 20001557 PARAMETER Experiment Name: At_Drought_Soil_Dry_P Parameter: Treatment Value: Drought vs. No Drought
  misc_feature: MA Experiment ID: 20001559 Result: Down-regulated in Transcription
  misc_feature: MA Experiment 20001559 PARAMETER Experiment Name: At_Drought_Soil_Dry_P Parameter: Age (day) Value: 28
  misc_feature: MA Experiment 20001559 PARAMETER Experiment Name: At_Drought_Soil_Dry_P Parameter: Organism Value: A. thaliana
  misc_feature: MA Experiment 20001559 PARAMETER Experiment Name: At_Drought_Soil_Dry_P Parameter: Plant Line Value: WS
  misc_feature: MA Experiment 20001559 PARAMETER Experiment Name: At_Drought_Soil_Dry_P Parameter: Post Timepoint (hr) Value: 29
  misc_feature: MA Experiment 20001559 PARAMETER Experiment Name: At_Drought_Soil_Dry_P Parameter: Post-Treatment Value: Re-Water vs. No Drought
  misc_feature: MA Experiment 20001559 PARAMETER Experiment Name: At_Drought_Soil_Dry_P Parameter: Timepoint (day) Value: 14
  misc_feature: MA Experiment 20001559 PARAMETER Experiment Name: At_Drought_Soil_Dry_P Parameter: Treatment Value: Drought vs. No Drought
aattttcaacaagcaaagttcatgatggggaataagcgaaatctcggatttgtgatcttcttctgggctctggtggttgcagtagtagccacggccatcgagcatcgtcgcaatgagaggactaaaggcgtcaatggtcttgacaagatcatcatccgcgaccgtcgtggccgatctgctgaggtttacttgtatggaggtcaagtcagttcttggaaaaatgagaatggagaggagttacttgttatgagtagcaaggctatattccagcctccaacaccgattcgtggaggaattccagtattgtttccgcaatacagtaacaccggtccacttccctcacatggatttgtaagacagaggttctgggaggttgagactaaaccacctcctttgccatcactttctactgctcatgttgacctgatcgtaagatcatccaatgaggatttgaagatctggccgcataagtttgagtatagactgagagtagcattgggacatgatggagatttgacgttaacatctcgtgttaagaatactgatacaaaaccatttaacttcacatttgctcttcacccctacttcgctgtttccaatatcagtgaaatccatgtcgaaggattacacaacttggattaccttgaccaacaaaagaacagaacacgtttcactgatcatgagaaggttataactttcaatgctcaacttgacaggttgtacctaagcactccagatcaactaagaatcgtggaccataagaaaaagaagactattgttgtacacaaggagggacaagttgatgccgtggtgtggaatccatgggataagaaagtatccgatttgggagttgaagactataagcgttttgtaacggtggaaagcgcggctgtcgcgaaaccgatcacagtgaaccccggcaaagaatggaaaggaatactccatgtttctgtggttccatcaaatcggaaagcttgaccctataaaagtcttgcattcatcatcctcatcctttaaaaaaaaaacttaaaactgtctttattaaagtatacttaatgttcccgagagacatcacatggtgaacacaaagttagttgggttccaaactggactcttgaccagttttattgttttgtaactttagcattcatgaataaaaaaagtgcgttaattacaataattgttaaatgtaattaaataaaagtgcgttaactac

SEQ ID NO: 39076 - protein, 325 aa, Arabidopsis thaliana
  peptide (1)..(325): Ceres Seq. ID no. 13487633
  misc_feature (48)..(317): Pfam Name: Aldose 1-epimerase Pfam Description: Aldose 1-epimerase
  misc_feature (42)..(321): Homolog of NCBI NO: 15236591 NR Description: aldose 1-epimerase family [Arabidopsis thaliana]
  misc_feature (39)..(322): Homolog of NCBI NO: 40253263 NR Description: putative Aldose 1-epimerase
  misc_feature (39)..(322): Homolog of NCBI NO: 2501555 NR Description: POSSIBLE APOSPORY-ASSOCIATED PROTEIN C
  misc_feature (39)..(322): Homolog of NCBI NO: 38344152 NR Description: OSJNBa0041A02.19 [Oryza sativa (japonica
  misc_feature (42)..(322): Homolog of NCBI NO: 19387263 NR Description: putative apospory-associated protein C
  misc_feature (32)..(322): Homolog of NCBI NO: 15242099 NR Description: aldose 1-epimerase family [Arabidopsis thaliana]
  misc_feature (105)..(325): Homolog of NCBI NO: 4538919 NR Description: possible apospory-associated like
  misc_feature (9)..(325): Homolog of NCBI NO: 7485483 NR Description: hypothetical protein F14M19.180 - Arabidopsis
  misc_feature (9)..(325): Homolog of NCBI NO: 21593295 NR Description: possible apospory-associated like protein
  misc_feature (8)..(325): Homolog of NCBI NO: 18416643 NR Description: aldose 1-epimerase family [Arabidopsis thaliana]
NFQQAKFMMGNKRNLGFVIFFWALVVAVVATAIEHRRNERTKGVNGLDKIIIRDRRGRSAEVYLYGGQVSSWKNENGEELLVMSSKAIFQPPTPIRGGIPVLFPQYSNTGPLPSHGFVRQRFWEVETKPPPLPSLSTAHVDLIVRSSNEDLKIWPHKFEYRLRVALGHDGDLTLTSRVKNTDTKPFNFTFALHPYFAVSNISEIHVEGLHNLDYLDQQKNRTRFTDHEKVITFNAQLDRLYLSTPDQLRIVDHKKKKTIVVHKEGQVDAVVWNPWDKKVSDLGVEDYKRFVTVESAAVAKPITVNPGKEWKGILHVSVVPSNRKA

SEQ ID NO: 39077 - protein, 318 aa, Arabidopsis thaliana
  peptide (1)..(318): Ceres Seq. ID no. 13487634
  misc_feature (41)..(310): Pfam Name: Aldose 1-epimerase Pfam Description: Aldose 1-epimerase
  misc_feature (35)..(314): Homolog of NCBI NO: 15236591 NR Description: aldose 1-epimerase family [Arabidopsis thaliana]
  misc_feature (32)..(315): Homolog of NCBI NO: 40253263 NR Description: putative Aldose 1-epimerase
  misc_feature (32)..(315): Homolog of NCBI NO: 2501555 NR Description: POSSIBLE APOSPORY-ASSOCIATED PROTEIN C
  misc_feature (32)..(315): Homolog of NCBI NO: 38344152 NR Description: OSJNBa0041A02.19 [Oryza sativa (japonica
  misc_feature (35)..(315): Homolog of NCBI NO: 19387263 NR Description: putative apospory-associated protein C
  misc_feature (25)..(315): Homolog of NCBI NO: 15242099 NR Description: aldose 1-epimerase family [Arabidopsis thaliana]
  misc_feature (98)..(318): Homolog of NCBI NO: 4538919 NR Description: possible apospory-associated like
  misc_feature (2)..(318): Homolog of NCBI NO: 7485483 NR Description: hypothetical protein F14M19.180 - Arabidopsis
  misc_feature (2)..(318): Homolog of NCBI NO: 21593295 NR Description: possible apospory-associated like protein
  misc_feature (1)..(318): Homolog of NCBI NO: 18416643 NR Description: aldose 1-epimerase family [Arabidopsis thaliana]
MMGNKRNLGFVIFFWALVVAVVATAIEHRRNERTKGVNGLDKIIIRDRRGRSAEVYLYGGQVSSWKNENGEELLVMSSKAIFQPPTPIRGGIPVLFPQYSNTGPLPSHGFVRQRFWEVETKPPPLPSLSTAHVDLIVRSSNEDLKIWPHKFEYRLRVALGHDGDLTLTSRVKNTDTKPFNFTFALHPYFAVSNISEIHVEGLHNLDYLDQQKNRTRFTDHEKVITFNAQLDRLYLSTPDQLRIVDHKKKKTIVVHKEGQVDAVVWNPWDKKVSDLGVEDYKRFVTVESAAVAKPITVNPGKEWKGILHVSVVPSNRKA

SEQ ID NO: 39078 - protein, 317 aa, Arabidopsis thaliana
  peptide (1)..(317): Ceres Seq. ID no. 13487635
  misc_feature (40)..(309): Pfam Name: Aldose 1-epimerase Pfam Description: Aldose 1-epimerase
  misc_feature (34)..(313): Homolog of NCBI NO: 15236591 NR Description: aldose 1-epimerase family [Arabidopsis thaliana]
  misc_feature (31)..(314): Homolog of NCBI NO: 40253263 NR Description: putative Aldose 1-epimerase
  misc_feature (31)..(314): Homolog of NCBI NO: 2501555 NR Description: POSSIBLE APOSPORY-ASSOCIATED PROTEIN C
  misc_feature (31)..(314): Homolog of NCBI NO: 38344152 NR Description: OSJNBa0041A02.19 [Oryza sativa (japonica
  misc_feature (34)..(314): Homolog of NCBI NO: 19387263 NR Description: putative apospory-associated protein C
  misc_feature (24)..(314): Homolog of NCBI NO: 15242099 NR Description: aldose 1-epimerase family [Arabidopsis thaliana]
  misc_feature (97)..(317): Homolog of NCBI NO: 4538919 NR Description: possible apospory-associated like
  misc_feature (1)..(317): Homolog of NCBI NO: 7485483 NR Description: hypothetical protein F14M19.180 - Arabidopsis
  misc_feature (1)..(317): Homolog of NCBI NO: 21593295 NR Description: possible apospory-associated like protein
  misc_feature (1)..(317): Homolog of NCBI NO: 18416643 NR Description: aldose 1-epimerase family [Arabidopsis thaliana]
MGNKRNLGFVIFFWALVVAVVATAIEHRRNERTKGVNGLDKIIIRDRRGRSAEVYLYGGQVSSWKNENGEELLVMSSKAIFQPPTPIRGGIPVLFPQYSNTGPLPSHGFVRQRFWEVETKPPPLPSLSTAHVDLIVRSSNEDLKIWPHKFEYRLRVALGHDGDLTLTSRVKNTDTKPFNFTFALHPYFAVSNISEIHVEGLHNLDYLDQQKNRTRFTDHEKVITFNAQLDRLYLSTPDQLRIVDHKKKKTIVVHKEGQVDAVVWNPWDKKVSDLGVEDYKRFVTVESAAVAKPITVNPGKEWKGILHVSVVPSNRKA

SEQ ID NO: 39079 - DNA, 1355 bp, Arabidopsis thaliana
  misc_feature (1)..(1355): Ceres Seq. ID no. 13491947
  misc_feature: MA Experiment ID: 108433 Result: Up-regulated in Transcription
  misc_feature: MA Experiment 108433 PARAMETER Experiment Name: At_rhl_Mutant2_cDNA_P Parameter: Age (day) Value: 7
  misc_feature: MA Experiment 108433 PARAMETER Experiment Name: At_rhl_Mutant2_cDNA_P Parameter: Organism Value: A. thaliana
  misc_feature: MA Experiment 108433 PARAMETER Experiment Name: At_rhl_Mutant2_cDNA_P Parameter: Plant Line Value: rhl Mutant vs. wt landsburg
  misc_feature: MA Experiment 108433 PARAMETER Experiment Name: At_rhl_Mutant2_cDNA_P Parameter: Tissue Value: Roots
  misc_feature: MA Experiment ID: 108434 Result: Down-regulated in Transcription
  misc_feature: MA Experiment 108434 PARAMETER Experiment Name: At_Root_Tips_cDNA_P Parameter: Tissue Value: Root Tips
  misc_feature: MA Experiment ID: 108435 Result: Up-regulated in Transcription
  misc_feature: MA Experiment 108435 PARAMETER Experiment Name: At_stm_Mutants_cDNA_P Parameter: Plant Line Value: wt Landsburg vs stm
  misc_feature: MA Experiment 108435 PARAMETER Experiment Name: At_stm_Mutants_cDNA_P Parameter: Tissue Value: Shoot Apical Meristem Region
  misc_feature: MA Experiment ID: 108461 Result: Up-regulated in Transcription
  misc_feature: MA Experiment 108461 PARAMETER Experiment Name: At_Germinating_Seeds_cDNA_P Parameter: Age (day) Value: 1 vs. 0
  misc_feature: MA Experiment 108461 PARAMETER Experiment Name: At_Germinating_Seeds_cDNA_P Parameter: Tissue Value: Germinating Seeds
  misc_feature: MA Experiment ID: 108463 Result: Up-regulated in Transcription
  misc_feature: MA Experiment 108463 PARAMETER Experiment Name: At_Germinating_Seeds_cDNA_P Parameter: Age (day) Value: 3 vs. 0
  misc_feature: MA Experiment 108463 PARAMETER Experiment Name: At_Germinating_Seeds_cDNA_P Parameter: Tissue Value: Germinating Seeds
  misc_feature: MA Experiment ID: 108464 Result: Up-regulated in Transcription
  misc_feature: MA Experiment 108464 PARAMETER Experiment Name: At_Germinating_Seeds_cDNA_P Parameter: Age (day) Value: 4 vs. 0
  misc_feature: MA Experiment 108464 PARAMETER Experiment Name: At_Germinating_Seeds_cDNA_P Parameter: Tissue Value: Germinating Seeds
  misc_feature: MA Experiment ID: 108488 Result: Down-regulated in Transcription
  misc_feature: MA Experiment ID: 108574 Result: Up-regulated in Transcription
  misc_feature: MA Experiment 108574 PARAMETER Experiment Name: At_Wounding__cDNA_P Parameter: Timepoint (hr) Value: 1
  misc_feature: MA Experiment 108574 PARAMETER Experiment Name: At_Wounding__cDNA_P Parameter: Tissue Value: Aerial
  misc_feature: MA Experiment 108574 PARAMETER Experiment Name: At_Wounding__cDNA_P Parameter: Treatment Value: Wounding vs. No Wounding
  misc_feature: MA Experiment ID: 108577 Result: Down-regulated in Transcription
  misc_feature: MA Experiment 108577 PARAMETER Experiment Name: At_42deg_Heat_cDNA_P Parameter: Temperature (deg C) Value: 42 vs. 22
  misc_feature: MA Experiment 108577 PARAMETER Experiment Name: At_42deg_Heat_cDNA_P Parameter: Timepoint (hr) Value: 6
  misc_feature: MA Experiment 108577 PARAMETER Experiment Name: At_42deg_Heat_cDNA_P Parameter: Tissue Value: Aerial
  misc_feature: MA Experiment ID: 108585 Result: Up-regulated in Transcription
  misc_feature: MA Experiment 108585 PARAMETER Experiment Name: At_5mM_NaNP_cDNA_P Parameter: Timepoint (hr) Value: 6
  misc_feature: MA Experiment 108585 PARAMETER Experiment Name: At_5mM_NaNP_cDNA_P Parameter: Tissue Value: Aerial
  misc_feature: MA Experiment 108585 PARAMETER Experiment Name: At_5mM_NaNP_cDNA_P Parameter: Treatment Value: null
  misc_feature: MA Experiment ID: 108595 Result: Up-regulated in Transcription
  misc_feature: MA Experiment 108595 PARAMETER Experiment Name: At_Ler-pi_Ovule_cDNA_P Parameter: Plant Line Value: null
  misc_feature: MA Experiment ID: 108667 Result: Up-regulated in Transcription
  misc_feature: MA Experiment 108667 PARAMETER Experiment Name: At_2mM_SA_cDNA_P Parameter: Plant Line Value: WS
  misc_feature: MA Experiment 108667 PARAMETER Experiment Name: At_2mM_SA_cDNA_P Parameter: Timepoint (hr) Value: 1
  misc_feature: MA Experiment 108667 PARAMETER Experiment Name: At_2mM_SA_cDNA_P Parameter: Treatment Value: 2mM SA vs. No Treatment
  misc_feature: MA Experiment ID: 108668 Result: Up-regulated in Transcription
  misc_feature: MA Experiment 108668 PARAMETER Experiment Name: At_2mM_SA_cDNA_P Parameter: Plant Line Value: WS
  misc_feature: MA Experiment 108668 PARAMETER Experiment Name: At_2mM_SA_cDNA_P Parameter: Timepoint (hr) Value: 6
  misc_feature: MA Experiment 108668 PARAMETER Experiment Name: At_2mM_SA_cDNA_P Parameter: Treatment Value: 2mM SA vs. No Treatment
  misc_feature: MA Experiment ID: 20000069 Result: Up-regulated in Transcription
  misc_feature: MA Experiment 20000069 PARAMETER Experiment Name: At_100uM_ABA_Mutants_cDNA_P Parameter: Plant Line Value: CS23
  misc_feature: MA Experiment 20000069 PARAMETER Experiment Name: At_100uM_ABA_Mutants_cDNA_P Parameter: Timepoint (hr) Value: 6
  misc_feature: MA Experiment 20000069 PARAMETER Experiment Name: At_100uM_ABA_Mutants_cDNA_P Parameter: Tissue Value: Aerial
  misc_feature: MA Experiment 20000069 PARAMETER Experiment Name: At_100uM_ABA_Mutants_cDNA_P Parameter: Treatment Value: 100uM ABA vs. No Treatment
  misc_feature: MA Experiment ID: 20000072 Result: Up-regulated in Transcription
  misc_feature: MA Experiment 20000072 PARAMETER Experiment Name: At_100uM_ABA_Mutants_cDNA_P Parameter: Plant Line Value: CS8105
  misc_feature: MA Experiment 20000072 PARAMETER Experiment Name: At_100uM_ABA_Mutants_cDNA_P Parameter: Timepoint (hr) Value: 6
  misc_feature: MA Experiment 20000072 PARAMETER Experiment Name: At_100uM_ABA_Mutants_cDNA_P Parameter: Tissue Value: Aerial
  misc_feature: MA Experiment 20000072 PARAMETER Experiment Name: At_100uM_ABA_Mutants_cDNA_P Parameter: Treatment Value: 100uM ABA vs. No Treatment
  misc_feature: MA Experiment ID: 20000086 Result: Up-regulated in Transcription
  misc_feature: MA Experiment 20000086 PARAMETER Experiment Name: At_100uM_ABA_Mutants_cDNA_P Parameter: Plant Line Value: CS22
  misc_feature: MA Experiment 20000086 PARAMETER Experiment Name: At_100uM_ABA_Mutants_cDNA_P Parameter: Timepoint (hr) Value: 6
  misc_feature: MA Experiment 20000086 PARAMETER Experiment Name: At_100uM_ABA_Mutants_cDNA_P Parameter: Tissue Value: Aerial
  misc_feature: MA Experiment 20000086 PARAMETER Experiment Name: At_100uM_ABA_Mutants_cDNA_P Parameter: Treatment Value: 100uM ABA vs. No Treatment
  misc_feature: MA Experiment ID: 20000111 Result: Down-regulated in Transcription
  misc_feature: MA Experiment 20000111 PARAMETER Experiment Name: At_42deg_Heat_cDNA_P Parameter: Temperature (deg C) Value: 42 vs. 22
  misc_feature: MA Experiment 20000111 PARAMETER Experiment Name: At_42deg_Heat_cDNA_P Parameter: Timepoint (hr) Value: 6
  misc_feature: MA Experiment 20000111 PARAMETER Experiment Name: At_42deg_Heat_cDNA_P Parameter: Tissue Value: Aerial
  misc_feature: MA Experiment ID: 20000112 Result: Down-regulated in Transcription
  misc_feature: MA Experiment 20000112 PARAMETER Experiment Name: At_42deg_Heat_cDNA_P Parameter: Temperature (deg C) Value: 42 vs. 22
  misc_feature: MA Experiment 20000112 PARAMETER Experiment Name: At_42deg_Heat_cDNA_P Parameter: Timepoint (hr) Value: 2
  misc_feature: MA Experiment 20000112 PARAMETER Experiment Name: At_42deg_Heat_cDNA_P Parameter: Tissue Value: Aerial
gacacaacaacaacacatccactcgaattttctatttccgaataacaaaaccgatcggcggagacatgacggcggcacaagggaactctaacgagactctgttttcttcttacaagatgggaagattcgatctctctcatcgagtggttctggcgccgatgacgcggtgcagggcgttgaacggagtaccaaacgcggcgttggcagagtattatgctcaacggaccactcccggcggttttctcatctccgaaggcaccatggtctctcccggatccgcagggttcccacatgtgcctggaatctattcagatgaacaagtagaagcatggaagcaagttgtggaagcagttcacgctaagggaggtttcatcttttgtcaattatggcatgttggacgtgcttctcatgcagtgtatcaacctaatggaggatcaccaatatcgtcaacgaacaaaccaatctcggaaaacaggtggcgagttttgttgcccgatggttcccacgtgaagtacccgaaacctcgggctttagaagcttccgagatacctcgggtggtggaggattattgcctttctgctttgaatgcgattcgagctggtttcgatgggattgagatccacggggcgcatggttacctcattgatcagtttttgaaagacgggatcaatgaccgtactgaccaatacggaggatccattgcaaaccgttgtagattcttgaaacaagtagtggaaggtgtagtttcagccataggagctagtaaagttggtgtgagggtatctccagctatagatcacttggacgcaactgattctaacccattatcactcgggctagccgtggttgatatgctcaataagttacaagatgttaatggcttgaagctcgcttaccttcacgttacacaacctcgctaccacgcctatgggcaaacagagtcgggaaggcaagggagtgatgaggaagaagctaagctaatgaagagcttgagaatggcttataaaggaacctttatgtctagtggaggattcaataaggaactaggcatgcaagctgttcaacaaggtgatgctgatttggtttcatatggcaggctttttatcgcaaacccggatttggtttcgcggttcaagattgatggagagttgaataaatataatcggaagacgttttacactcaagatccagttgttggctacacggattatcctttcttggctccttcttcccgcctctgagtttgataatcggaggagaaaatgtattgatgttgtataaagacaatatattaatatgtaaaatgacaatgttattgttatccacttaatgaatagtcatgtatcttattgttt

SEQ ID NO: 39080 - protein, 412 aa, Arabidopsis thaliana
  peptide (1)..(412): Ceres Seq. ID no. 13491948
  misc_feature (32)..(384): Pfam Name: NADH:flavin oxidoreductase / NADH oxidase family Pfam Description: NADH:flavin oxidoreductase / NADH oxidase family
  misc_feature (33)..(406): Homolog of NCBI NO: 23495288 NR Description: 12-oxophytodienoic acid reductase [Oryza sativa]
  misc_feature (284)..(410): Homolog of NCBI NO: 7449902 NR Description: probable 12-oxophytodienoate reductase (EC
  misc_feature (24)..(310): Homolog of NCBI NO: 7449902 NR Description: probable 12-oxophytodienoate reductase (EC
  misc_feature (29)..(412): Homolog of NCBI NO: 5701740 NR Description: LEDI-5a protein [Lithospermum erythrorhizon]
  misc_feature (22)..(406): Homolog of NCBI NO: 12056507 NR Description: 12-oxophytodienoate reductase 3 [Lycopersicon
  misc_feature (22)..(412): Homolog of NCBI NO: 15225045 NR Description: 12-oxophytodienoate reductase (OPR3)(DDE1)
  misc_feature (22)..(412): Homolog of NCBI NO: 7688991 NR Description: 12-oxo-phytodienoate reductase [Arabidopsis
  misc_feature (22)..(412): Homolog of NCBI NO: 10242314 NR Description: 12-oxo-phytodienoate reductase [Arabidopsis
  misc_feature (22)..(412): Homolog of NCBI NO: 5059115 NR Description: OPDA-reductase homolog [Arabidopsis thaliana]
  misc_feature (22)..(412): Homolog of NCBI NO: 6707797 NR Description: 12-oxo-phytodienoate reductase [Arabidopsis
HNNNTSTRIFYFRITKPIGGDMTAAQGNSNETLFSSYKMGRFDLSHRVVLAPMTRCRALNGVPNAALAEYYAQRTTPGGFLISEGTMVSPGSAGFPHVPGIYSDEQVEAWKQVVEAVHAKGGFIFCQLWHVGRASHAVYQPNGGSPISSTNKPISENRWRVLLPDGSHVKYPKPRALEASEIPRVVEDYCLSALNAIRAGFDGIEIHGAHGYLIDQFLKDGINDRTDQYGGSIANRCRFLKQVVEGVVSAIGASKVGVRVSPAIDHLDATDSNPLSLGLAVVDMLNKLQDVNGLKLAYLHVTQPRYHAYGQTESGRQGSDEEEAKLMKSLRMAYKGTFMSSGGFNKELGMQAVQQGDADLVSYGRLFIANPDLVSRFKIDGELNKYNRKTFYTQDPVVGYTDYPFLAPSSRL

SEQ ID NO: 39081 - protein, 391 aa, Arabidopsis thaliana
  peptide (1)..(391): Ceres Seq. ID no. 13491949
  misc_feature (11)..(363): Pfam Name: NADH:flavin oxidoreductase / NADH oxidase family Pfam Description: NADH:flavin oxidoreductase / NADH oxidase family
  misc_feature (12)..(385): Homolog of NCBI NO: 23495288 NR Description: 12-oxophytodienoic acid reductase [Oryza sativa]
  misc_feature (263)..(389): Homolog of NCBI NO: 7449902 NR Description: probable 12-oxophytodienoate reductase (EC
  misc_feature (3)..(289): Homolog of NCBI NO: 7449902 NR Description: probable 12-oxophytodienoate reductase (EC
  misc_feature (8)..(391): Homolog of NCBI NO: 5701740 NR Description: LEDI-5a protein [Lithospermum erythrorhizon]
  misc_feature (1)..(385): Homolog of NCBI NO: 12056507 NR Description: 12-oxophytodienoate reductase 3 [Lycopersicon
  misc_feature (1)..(391): Homolog of NCBI NO: 15225045 NR Description: 12-oxophytodienoate reductase (OPR3)(DDE1)
  misc_feature (1)..(391): Homolog of NCBI NO: 7688991 NR Description: 12-oxo-phytodienoate reductase [Arabidopsis
  misc_feature (1)..(391): Homolog of NCBI NO: 10242314 NR Description: 12-oxo-phytodienoate reductase [Arabidopsis
  misc_feature (1)..(391): Homolog of NCBI NO: 5059115 NR Description: OPDA-reductase homolog [Arabidopsis thaliana]
  misc_feature (1)..(391): Homolog of NCBI NO: 6707797 NR Description: 12-oxo-phytodienoate reductase [Arabidopsis
MTAAQGNSNETLFSSYKMGRFDLSHRVVLAPMTRCRALNGVPNAALAEYYAQRTTPGGFLISEGTMVSPGSAGFPHVPGIYSDEQVEAWKQVVEAVHAKGGFIFCQLWHVGRASHAVYQPNGGSPISSTNKPISENRWRVLLPDGSHVKYPKPRALEASEIPRVVEDYCLSALNAIRAGFDGIEIHGAHGYLIDQFLKDGINDRTDQYGGSIANRCRFLKQVVEGVVSAIGASKVGVRVSPAIDHLDATDSNPLSLGLAVVDMLNKLQDVNGLKLAYLHVTQPRYHAYGQTESGRQGSDEEEAKLMKSLRMAYKGTFMSSGGFNKELGMQAVQQGDADLVSYGRLFIANPDLVSRFKIDGELNKYNRKTFYTQDPVVGYTDYPFLAPSSRL

SEQ ID NO: 39082 - protein, 374 aa, Arabidopsis thaliana
  peptide (1)..(374): Ceres Seq. ID no. 13491950
  misc_feature (1)..(346): Pfam Name: NADH:flavin oxidoreductase / NADH oxidase family Pfam Description: NADH:flavin oxidoreductase / NADH oxidase family
  misc_feature (1)..(368): Homolog of NCBI NO: 23495288 NR Description: 12-oxophytodienoic acid reductase [Oryza sativa]
  misc_feature (246)..(372): Homolog of NCBI NO: 7449902 NR Description: probable 12-oxophytodienoate reductase (EC
  misc_feature (1)..(272): Homolog of NCBI NO: 7449902 NR Description: probable 12-oxophytodienoate reductase (EC
  misc_feature (1)..(374): Homolog of NCBI NO: 5701740 NR Description: LEDI-5a protein [Lithospermum erythrorhizon]
  misc_feature (1)..(368): Homolog of NCBI NO: 12056507 NR Description: 12-oxophytodienoate reductase 3 [Lycopersicon
  misc_feature (1)..(374): Homolog of NCBI NO: 15225045 NR Description: 12-oxophytodienoate reductase (OPR3)(DDE1)
  misc_feature (1)..(374): Homolog of NCBI NO: 7688991 NR Description: 12-oxo-phytodienoate reductase [Arabidopsis
  misc_feature (1)..(374): Homolog of NCBI NO: 10242314 NR Description: 12-oxo-phytodienoate reductase [Arabidopsis
  misc_feature (1)..(374): Homolog of NCBI NO: 5059115 NR Description: OPDA-reductase homolog [Arabidopsis thaliana]
  misc_feature (1)..(374): Homolog of NCBI NO: 6707797 NR Description: 12-oxo-phytodienoate reductase [Arabidopsis
MGRFDLSHRVVLAPMTRCRALNGVPNAALAEYYAQRTTPGGFLISEGTMVSPGSAGFPHVPGIYSDEQVEAWKQVVEAVHAKGGFIFCQLWHVGRASHAVYQPNGGSPISSTNKPISENRWRVLLPDGSHVKYPKPRALEASEIPRVVEDYCLSALNAIRAGFDGIEIHGAHGYLIDQFLKDGINDRTDQYGGSIANRCRFLKQVVEGVVSAIGASKVGVRVSPAIDHLDATDSNPLSLGLAVVDMLNKLQDVNGLKLAYLHVTQPRYHAYGQTESGRQGSDEEEAKLMKSLRMAYKGTFMSSGGFNKELGMQAVQQGDADLVSYGRLFIANPDLVSRFKIDGELNKYNRKTFYTQDPVVGYTDYPFLAPSSRL

SEQ ID NO: 39083 - DNA, 1297 bp, Arabidopsis thaliana
  misc_feature (1)..(1297): Ceres Seq. ID no. 13488371
  misc_feature: MA Experiment ID: 108434 Result: Up-regulated in Transcription
  misc_feature: MA Experiment 108434 PARAMETER Experiment Name: At_Root_Tips_cDNA_P Parameter: Tissue Value: Root Tips
  misc_feature: MA Experiment ID: 20000437 Result: Down-regulated in Transcription
  misc_feature: MA Experiment 20000437 PARAMETER Experiment Name: At_Drought_P Parameter: Age (day) Value: 8
  misc_feature: MA Experiment 20000437 PARAMETER Experiment Name: At_Drought_P Parameter: Organism Value: A. thaliana
  misc_feature: MA Experiment 20000437 PARAMETER Experiment Name: At_Drought_P Parameter: Plant Line Value: WS
  misc_feature: MA Experiment 20000437 PARAMETER Experiment Name: At_Drought_P Parameter: Timepoint (hr) Value: 24
  misc_feature: MA Experiment 20000437 PARAMETER Experiment Name: At_Drought_P Parameter: Tissue Value: Whole Plant
  misc_feature: MA Experiment 20000437 PARAMETER Experiment Name: At_Drought_P Parameter: Treatment Value: Drought vs. No Drought
  misc_feature: MA Experiment ID: 20000451 Result: Up-regulated in Transcription
  misc_feature: MA Experiment 20000451 PARAMETER Experiment Name: At_CS6879_Shoots-Roots_P Parameter: Age (day) Value: 14
  misc_feature: MA Experiment 20000451 PARAMETER Experiment Name: At_CS6879_Shoots-Roots_P Parameter: Organism Value: A. thaliana
  misc_feature: MA Experiment 20000451 PARAMETER Experiment Name: At_CS6879_Shoots-Roots_P Parameter: Plant Line Value: CS6879 vs. WS
  misc_feature: MA Experiment 20000451 PARAMETER Experiment Name: At_CS6879_Shoots-Roots_P Parameter: Tissue Value: Roots
  misc_feature: MA Experiment ID: 20000573 Result: Down-regulated in Transcription
  misc_feature: MA Experiment 20000573 PARAMETER Experiment Name: At_100uM_ABA_Mutants__P Parameter: Organism Value: A. thaliana
  misc_feature: MA Experiment 20000573 PARAMETER Experiment Name: At_100uM_ABA_Mutants__P Parameter: Plant Line Value: CS22 vs. Ler wt
  misc_feature: MA Experiment 20000573 PARAMETER Experiment Name: At_100uM_ABA_Mutants__P Parameter: Timepoint (hr) Value: N/A
  misc_feature: MA Experiment 20000573 PARAMETER Experiment Name: At_100uM_ABA_Mutants__P Parameter: Tissue Value: Whole Plant
  misc_feature: MA Experiment 20000573 PARAMETER Experiment Name: At_100uM_ABA_Mutants__P Parameter: Treatment Value: None
  misc_feature: MA Experiment ID: 20000574 Result: Down-regulated in Transcription
  misc_feature: MA Experiment 20000574 PARAMETER Experiment Name: At_100uM_ABA_Mutants__P Parameter: Organism Value: A. thaliana
  misc_feature: MA Experiment 20000574 PARAMETER Experiment Name: At_100uM_ABA_Mutants__P Parameter: Plant Line Value: CS23 vs. Ler wt
  misc_feature: MA Experiment 20000574 PARAMETER Experiment Name: At_100uM_ABA_Mutants__P Parameter: Timepoint (hr) Value: N/A
  misc_feature: MA Experiment 20000574 PARAMETER Experiment Name: At_100uM_ABA_Mutants__P Parameter: Tissue Value: Whole Plant
  misc_feature: MA Experiment 20000574 PARAMETER Experiment Name: At_100uM_ABA_Mutants__P Parameter: Treatment Value: None
  misc_feature: MA Experiment ID: 20000794 Result: Down-regulated in Transcription
  misc_feature: MA Experiment 20000794 PARAMETER Experiment Name: At_Petals_P Parameter: Age (day) Value: 23-25 days
  misc_feature: MA Experiment 20000794 PARAMETER Experiment Name: At_Petals_P Parameter: Plant Line Value: WS
  misc_feature: MA Experiment 20000794 PARAMETER Experiment Name: At_Petals_P Parameter: Tissue Value: Petals vs. Whole plant
  misc_feature: MA Experiment ID: 20001558 Result: Up-regulated in Transcription
  misc_feature: MA Experiment 20001558 PARAMETER Experiment Name: At_Drought_Soil_Dry_P Parameter: Age (day) Value: 27
  misc_feature: MA Experiment 20001558 PARAMETER Experiment Name: At_Drought_Soil_Dry_P Parameter: Organism Value: A. thaliana
  misc_feature: MA Experiment 20001558 PARAMETER Experiment Name: At_Drought_Soil_Dry_P Parameter: Plant Line Value: WS
  misc_feature: MA Experiment 20001558 PARAMETER Experiment Name: At_Drought_Soil_Dry_P Parameter: Post Timepoint (hr) Value: 6
  misc_feature: MA Experiment 20001558 PARAMETER Experiment Name: At_Drought_Soil_Dry_P Parameter: Post-Treatment Value: Re-Water vs. No Drought
  misc_feature: MA Experiment 20001558 PARAMETER Experiment Name: At_Drought_Soil_Dry_P Parameter: Timepoint (day) Value: 13
  misc_feature: MA Experiment 20001558 PARAMETER Experiment Name: At_Drought_Soil_Dry_P Parameter: Treatment Value: Drought vs. No Drought
gagagagcttgtgtgaagtgacgaagaagacgaagaagacgaagaagaagaacattaatggcggctactccgtggtactttgtcgcagtacttctcaccattcttaccagctctcaggggattctaacaactctttctcaaagtgatggaggttataagtatgattatgctactgttccctttcttgctgaagtttttaagctgatcatttctggtttatttctctggagagagatgcggacatcttcctcaacaacttcaaggattactacggattggaagagtgtgcgattatttgttattccgtctcttatttatctgatacataacaatgtgcagtttgctacattgacttatgtggatacgtccacttatcagataatgggtaatttgaagattgtgaccactggcatactgtttaggttatttttgaaaaggaaactatctaaacttcagtggatggcaattggtcttttagctgttggaacaactaccagccaggttaagggttgtggagaagcttcttgtgattctttattcacggcaccaatacaaggttatttgctgggcatcctctcagctggtttgtccgcgctagctggaatctacacagagtttctgatgaagagaaacaatgacaccttatactggcaaaacttgcagttatatacgtttggttcacttttcaacgtagctcgacttatagcagatgatttcagacacgggtttgaaaagggtccttggtggcaacgtatctttgatgggtacagcatcaccacttggctggtagttctgaatctcggatccactggcttactggtctcgtggttaatgaagtatgcagacaacatcgtcaaggtttattctacatcaatggcgatgctacttactatggttgcatccatatacctttttagcttcaaaccgacactgcagcttttcttgggtattgtcatatgcatcatgtcactccatatgtactttgctcctccacacacgctcgtggacttgcccgtgacaaacgaagcacatgccaagaccttaaagcaagttgtcgtagaagaaaagacagattcttgaattaaattggacgaaaaggttagttgaacttatagaaaacaatttgctaagtaaatgaacacaatgatcttcttctagcttcatttctattagagaatgagaaacttggatgtgagttcttttgaagaaatgatctgatagtttgtttattcacgtaccgattctattctttgtaaatgtacatcgaggtgcctagaaatagtaaattcgattgttg

SEQ ID NO: 39084 - protein, 340 aa, Arabidopsis thaliana
  peptide (1)..(340): Ceres Seq. ID no. 13488372
  misc_feature (61)..(299): Pfam Name: Nucleotide-sugar transporter Pfam Description: Nucleotide-sugar transporter
  misc_feature (1)..(312): Homolog of NCBI NO: 3218521 NR Description: /prediction=(method:''genefinder'', score:''73.05'')~/match=(desc:''UDP-GALACTOSE TRANSLOCATOR TRANSPORTER) (UGT) (UDP-GAL- TR)'', species:''Homo sapiens
  misc_feature (31)..(311): Homolog of NCBI NO: 22204205 NR Description: SI:bZ30I22.3 (novel protein similar to vertebrate
  misc_feature (7)..(311): Homolog of NCBI NO: 6755558 NR Description: solute carrier family 35 (CMP-sialic acid
  misc_feature (15)..(311): Homolog of NCBI NO: 38345234 NR Description: OSJNBa0084K20.12 [Oryza sativa (japonica
  misc_feature (15)..(311): Homolog of NCBI NO: 18411150 NR Description: transporter-related protein [Arabidopsis
  misc_feature (8)..(311): Homolog of NCBI NO: 26450627 NR Description: unknown protein [Arabidopsis thaliana]
  misc_feature (22)..(340): Homolog of NCBI NO: 34907666 NR Description: putative transporter-like protein
  misc_feature (9)..(308): Homolog of NCBI NO: 34393556 NR Description: putative CMP-sialic acid transporter
  misc_feature (20)..(340): Homolog of NCBI NO: 10177360 NR Description: CMP-sialic acid transporter-like protein
  misc_feature (1)..(340): Homolog of NCBI NO: 18422134 NR Description: CMP-sialic acid transporter-related protein
MAATPWYFVAVLLTILTSSQGILTTLSQSDGGYKYDYATVPFLAEVFKLIISGLFLWREMRTSSSTTSRITTDWKSVRLFVIPSLIYLIHNNVQFATLTYVDTSTYQIMGNLKIVTTGILFRLFLKRKLSKLQWMAIGLLAVGTTTSQVKGCGEASCDSLFTAPIQGYLLGILSAGLSALAGIYTEFLMKRNNDTLYWQNLQLYTFGSLFNVARLIADDFRHGFEKGPWWQRIFDGYSITTWLVVLNLGSTGLLVSWLMKYADNIVKVYSTSMAMLLTMVASIYLFSFKPTLQLFLGIVICIMSLHMYFAPPHTLVDLPVTNEAHAKTLKQVVVEEKTDS

SEQ ID NO: 39085 - protein, 281 aa, Arabidopsis thaliana
  peptide (1)..(281): Ceres Seq. ID no. 13488373
  misc_feature (2)..(240): Pfam Name: Nucleotide-sugar transporter Pfam Description: Nucleotide-sugar transporter
  misc_feature (1)..(253): Homolog of NCBI NO: 3218521 NR Description: /prediction=(method:''genefinder'', score:''73.05'')~/match=(desc:''UDP-GALACTOSE TRANSLOCATOR TRANSPORTER) (UGT) (UDP-GAL- TR)'', species:''Homo sapiens
  misc_feature (1)..(252): Homolog of NCBI NO: 22204205 NR Description: SI:bZ30I22.3 (novel protein similar to vertebrate
  misc_feature (1)..(252): Homolog of NCBI NO: 6755558 NR Description: solute carrier family 35 (CMP-sialic acid
  misc_feature (1)..(252): Homolog of NCBI NO: 38345234 NR Description: OSJNBa0084K20.12 [Oryza sativa (japonica
  misc_feature (1)..(252): Homolog of NCBI NO: 18411150 NR Description: transporter-related protein [Arabidopsis
  misc_feature (1)..(252): Homolog of NCBI NO: 26450627 NR Description: unknown protein [Arabidopsis thaliana]
  misc_feature (1)..(281): Homolog of NCBI NO: 34907666 NR Description: putative transporter-like protein
  misc_feature (1)..(249): Homolog of NCBI NO: 34393556 NR Description: putative CMP-sialic acid transporter
  misc_feature (1)..(281): Homolog of NCBI NO: 10177360 NR Description: CMP-sialic acid transporter-like protein
  misc_feature (1)..(281): Homolog of NCBI NO: 18422134 NR Description: CMP-sialic acid transporter-related protein
MRTSSSTTSRITTDWKSVRLFVIPSLIYLIHNNVQFATLTYVDTSTYQIMGNLKIVTTGILFRLFLKRKLSKLQWMAIGLLAVGTTTSQVKGCGEASCDSLFTAPIQGYLLGILSAGLSALAGIYTEFLMKRNNDTLYWQNLQLYTFGSLFNVARLIADDFRHGFEKGPWWQRIFDGYSITTWLVVLNLGSTGLLVSWLMKYADNIVKVYSTSMAMLLTMVASIYLFSFKPTLQLFLGIVICIMSLHMYFAPPHTLVDLPVTNEAHAKTLKQVVVEEKTDS

SEQ ID NO: 39086 - protein, 232 aa, Arabidopsis thaliana
  peptide (1)..(232): Ceres Seq. ID no. 13488374
  misc_feature (1)..(191): Pfam Name: Nucleotide-sugar transporter Pfam Description: Nucleotide-sugar transporter
  misc_feature (1)..(204): Homolog of NCBI NO: 3218521 NR Description: /prediction=(method:''genefinder'', score:''73.05'')~/match=(desc:''UDP-GALACTOSE TRANSLOCATOR TRANSPORTER) (UGT) (UDP-GAL- TR)'', species:''Homo sapiens
  misc_feature (1)..(203): Homolog of NCBI NO: 22204205 NR Description: SI:bZ30I22.3 (novel protein similar to vertebrate
  misc_feature (1)..(203): Homolog of NCBI NO: 6755558 NR Description: solute carrier family 35 (CMP-sialic acid
  misc_feature (1)..(203): Homolog of NCBI NO: 38345234 NR Description: OSJNBa0084K20.12 [Oryza sativa (japonica
  misc_feature (1)..(203): Homolog of NCBI NO: 18411150 NR Description: transporter-related protein [Arabidopsis
  misc_feature (1)..(203): Homolog of NCBI NO: 26450627 NR Description: unknown protein [Arabidopsis thaliana]
  misc_feature (1)..(232): Homolog of NCBI NO: 34907666 NR Description: putative transporter-like protein
  misc_feature (1)..(200): Homolog of NCBI NO: 34393556 NR Description: putative CMP-sialic acid transporter
  misc_feature (1)..(232): Homolog of NCBI NO: 10177360 NR Description: CMP-sialic acid transporter-like protein
  misc_feature (1)..(232): Homolog of NCBI NO: 18422134 NR Description: CMP-sialic acid transporter-related protein
MGNLKIVTTGILFRLFLKRKLSKLQWMAIGLLAVGTTTSQVKGCGEASCDSLFTAPIQGYLLGILSAGLSALAGIYTEFLMKRNNDTLYWQNLQLYTFGSLFNVARLIADDFRHGFEKGPWWQRIFDGYSITTWLVVLNLGSTGLLVSWLMKYADNIVKVYSTSMAMLLTMVASIYLFSFKPTLQLFLGIVICIMSLHMYFAPPHTLVDLPVTNEAHAKTLKQVVVEEKTDS

SEQ ID NO: 39087 - DNA, 1132 bp, Arabidopsis thaliana
  misc_feature (1)..(1132): Ceres Seq. ID no. 13503082
  misc_feature: MA Experiment ID: 108434 Result: Down-regulated in Transcription
  misc_feature: MA Experiment 108434 PARAMETER Experiment Name: At_Root_Tips_cDNA_P Parameter: Tissue Value: Root Tips
  misc_feature: MA Experiment ID: 108435 Result: Down-regulated in Transcription
  misc_feature: MA Experiment 108435 PARAMETER Experiment Name: At_stm_Mutants_cDNA_P Parameter: Plant Line Value: wt Landsburg vs stm
  misc_feature: MA Experiment 108435 PARAMETER Experiment Name: At_stm_Mutants_cDNA_P Parameter: Tissue Value: Shoot Apical Meristem Region
  misc_feature: MA Experiment ID: 108461 Result: Up-regulated in Transcription
  misc_feature: MA Experiment 108461 PARAMETER Experiment Name: At_Germinating_Seeds_cDNA_P Parameter: Age (day) Value: 1 vs. 0
  misc_feature: MA Experiment 108461 PARAMETER Experiment Name: At_Germinating_Seeds_cDNA_P Parameter: Tissue Value: Germinating Seeds
  misc_feature: MA Experiment ID: 108462 Result: Up-regulated in Transcription
  misc_feature: MA Experiment 108462 PARAMETER Experiment Name: At_Germinating_Seeds_cDNA_P Parameter: Age (day) Value: 2 vs. 0
  misc_feature: MA Experiment 108462 PARAMETER Experiment Name: At_Germinating_Seeds_cDNA_P Parameter: Tissue Value: Germinating Seeds
  misc_feature: MA Experiment ID: 108463 Result: Up-regulated in Transcription
  misc_feature: MA Experiment 108463 PARAMETER Experiment Name: At_Germinating_Seeds_cDNA_P Parameter: Age (day) Value: 3 vs. 0
  misc_feature: MA Experiment 108463 PARAMETER Experiment Name: At_Germinating_Seeds_cDNA_P Parameter: Tissue Value: Germinating Seeds
  misc_feature: MA Experiment ID: 108464 Result: Up-regulated in Transcription
  misc_feature: MA Experiment 108464 PARAMETER Experiment Name: At_Germinating_Seeds_cDNA_P Parameter: Age (day) Value: 4 vs. 0
  misc_feature: MA Experiment 108464 PARAMETER Experiment Name: At_Germinating_Seeds_cDNA_P Parameter: Tissue Value: Germinating Seeds
  misc_feature: MA Experiment ID: 108473 Result: Down-regulated in Transcription
  misc_feature: MA Experiment 108473 PARAMETER Experiment Name: At_Drought_Flowers_cDNA_P Parameter: Timepoint (hr) Value: 7 d
  misc_feature: MA Experiment 108473 PARAMETER Experiment Name: At_Drought_Flowers_cDNA_P Parameter: Tissue Value: Flower
  misc_feature: MA Experiment 108473 PARAMETER Experiment Name: At_Drought_Flowers_cDNA_P Parameter: Treatment Value: Drought vs. No Drought
  misc_feature: MA Experiment ID: 108561 Result: Down-regulated in Transcription
  misc_feature: MA Experiment 108561 PARAMETER Experiment Name: At_100uM_ABA_cDNA_P Parameter: Timepoint (hr) Value: 6
  misc_feature: MA Experiment 108561 PARAMETER Experiment Name: At_100uM_ABA_cDNA_P Parameter: Tissue Value: Aerial
  misc_feature: MA Experiment 108561 PARAMETER Experiment Name: At_100uM_ABA_cDNA_P Parameter: Treatment Value: 100uM ABA vs. No Treatment
  misc_feature: MA Experiment ID: 108572 Result: Down-regulated in Transcription
  misc_feature: MA Experiment 108572 PARAMETER Experiment Name: At_Drought_cDNA_P Parameter: Timepoint (hr) Value: 1
  misc_feature: MA Experiment 108572 PARAMETER Experiment Name: At_Drought_cDNA_P Parameter: Tissue Value: Aerial
  misc_feature: MA Experiment 108572 PARAMETER Experiment Name: At_Drought_cDNA_P Parameter: Treatment Value: Drought vs. No Drought
  misc_feature: MA Experiment ID: 108573 Result: Down-regulated in Transcription
  misc_feature: MA Experiment 108573 PARAMETER Experiment Name: At_Drought_cDNA_P Parameter: Timepoint (hr) Value: 6
  misc_feature: MA Experiment 108573 PARAMETER Experiment Name: At_Drought_cDNA_P Parameter: Tissue Value: Aerial
  misc_feature: MA Experiment 108573 PARAMETER Experiment Name: At_Drought_cDNA_P Parameter: Treatment Value: Drought vs. No Drought
  misc_feature: MA Experiment ID: 108577 Result: Down-regulated in Transcription
  misc_feature: MA Experiment 108577 PARAMETER Experiment Name: At_42deg_Heat_cDNA_P Parameter: Temperature (deg C) Value: 42 vs. 22
  misc_feature: MA Experiment 108577 PARAMETER Experiment Name: At_42deg_Heat_cDNA_P Parameter: Timepoint (hr) Value: 6
  misc_feature: MA Experiment 108577 PARAMETER Experiment Name: At_42deg_Heat_cDNA_P Parameter: Tissue Value: Aerial
  misc_feature: MA Experiment ID: 108579 Result: Up-regulated in Transcription
  misc_feature: MA Experiment 108579 PARAMETER Experiment Name: At_4deg_Cold_cDNA_P Parameter: Temperature (deg C) Value: 4 vs. 22
  misc_feature: MA Experiment 108579 PARAMETER Experiment Name: At_4deg_Cold_cDNA_P Parameter: Timepoint (hr) Value: 6
  misc_feature: MA Experiment 108579 PARAMETER Experiment Name: At_4deg_Cold_cDNA_P Parameter: Tissue Value: Aerial
  misc_feature: MA Experiment ID: 108595 Result: Down-regulated in Transcription
  misc_feature: MA Experiment 108595 PARAMETER Experiment Name: At_Ler-pi_Ovule_cDNA_P Parameter: Plant Line Value: null
  misc_feature: MA Experiment ID: 108668 Result: Down-regulated in Transcription
  misc_feature: MA Experiment 108668 PARAMETER Experiment Name: At_2mM_SA_cDNA_P Parameter: Plant Line Value: WS
  misc_feature: MA Experiment 108668 PARAMETER Experiment Name: At_2mM_SA_cDNA_P Parameter: Timepoint (hr) Value: 6
  misc_feature: MA Experiment 108668 PARAMETER Experiment Name: At_2mM_SA_cDNA_P Parameter: Treatment Value: 2mM SA vs. No Treatment
  misc_feature: MA Experiment ID: 20000069 Result: Down-regulated in Transcription
  misc_feature: MA Experiment 20000069 PARAMETER Experiment Name: At_100uM_ABA_Mutants_cDNA_P Parameter: Plant Line Value: CS23
  misc_feature: MA Experiment 20000069 PARAMETER Experiment Name: At_100uM_ABA_Mutants_cDNA_P Parameter: Timepoint (hr) Value: 6
  misc_feature: MA Experiment 20000069 PARAMETER Experiment Name: At_100uM_ABA_Mutants_cDNA_P Parameter: Tissue Value: Aerial
  misc_feature: MA Experiment 20000069 PARAMETER Experiment Name: At_100uM_ABA_Mutants_cDNA_P Parameter: Treatment Value: 100uM ABA vs. No Treatment
  misc_feature: MA Experiment ID: 20000070 Result: Down-regulated in Transcription
  misc_feature: MA Experiment 20000070 PARAMETER Experiment Name: At_100uM_ABA_Mutants_cDNA_P Parameter: Plant Line Value: CS24
  misc_feature: MA Experiment 20000070 PARAMETER Experiment Name: At_100uM_ABA_Mutants_cDNA_P Parameter: Timepoint (hr) Value: 6
  misc_feature: MA Experiment 20000070 PARAMETER Experiment Name: At_100uM_ABA_Mutants_cDNA_P Parameter: Tissue Value: Aerial
  misc_feature: MA Experiment 20000070 PARAMETER Experiment Name: At_100uM_ABA_Mutants_cDNA_P Parameter: Treatment Value: 100uM ABA vs. No Treatment
  misc_feature: MA Experiment ID: 20000071 Result: Down-regulated in Transcription
  misc_feature: MA Experiment 20000071 PARAMETER Experiment Name: At_100uM_ABA_Mutants_cDNA_P Parameter: Plant Line Value: CS8104
  misc_feature: MA Experiment 20000071 PARAMETER Experiment Name: At_100uM_ABA_Mutants_cDNA_P Parameter: Timepoint (hr) Value: 6
  misc_feature: MA Experiment 20000071 PARAMETER Experiment Name: At_100uM_ABA_Mutants_cDNA_P Parameter: Tissue Value: Aerial
  misc_feature: MA Experiment 20000071 PARAMETER Experiment Name: At_100uM_ABA_Mutants_cDNA_P Parameter: Treatment Value: 100uM ABA vs. No Treatment
  misc_feature: MA Experiment ID: 20000072 Result: Down-regulated in Transcription
  misc_feature: MA Experiment 20000072 PARAMETER Experiment Name: At_100uM_ABA_Mutants_cDNA_P Parameter: Plant Line Value: CS8105
  misc_feature: MA Experiment 20000072 PARAMETER Experiment Name: At_100uM_ABA_Mutants_cDNA_P Parameter: Timepoint (hr) Value: 6
  misc_feature: MA Experiment 20000072 PARAMETER Experiment Name: At_100uM_ABA_Mutants_cDNA_P Parameter: Tissue Value: Aerial
  misc_feature: MA Experiment 20000072 PARAMETER Experiment Name: At_100uM_ABA_Mutants_cDNA_P Parameter: Treatment Value: 100uM ABA vs. No Treatment
  misc_feature: MA Experiment ID: 20000086 Result: Down-regulated in Transcription
  misc_feature: MA Experiment 20000086 PARAMETER Experiment Name: At_100uM_ABA_Mutants_cDNA_P Parameter: Plant Line Value: CS22
  misc_feature: MA Experiment 20000086 PARAMETER Experiment Name: At_100uM_ABA_Mutants_cDNA_P Parameter: Timepoint (hr) Value: 6
  misc_feature: MA Experiment 20000086 PARAMETER Experiment Name: At_100uM_ABA_Mutants_cDNA_P Parameter: Tissue Value: Aerial
  misc_feature: MA Experiment 20000086 PARAMETER Experiment Name: At_100uM_ABA_Mutants_cDNA_P Parameter: Treatment Value: 100uM ABA vs. No Treatment
  misc_feature: MA Experiment ID: 20000087 Result: Down-regulated in Transcription
  misc_feature: MA Experiment 20000087 PARAMETER Experiment Name: At_100uM_ABA_Mutants_cDNA_P Parameter: Plant Line Value: WS
  misc_feature: MA Experiment 20000087 PARAMETER Experiment Name: At_100uM_ABA_Mutants_cDNA_P Parameter: Timepoint (hr) Value: 6
  misc_feature: MA Experiment 20000087 PARAMETER Experiment Name: At_100uM_ABA_Mutants_cDNA_P Parameter: Tissue Value: Aerial
  misc_feature: MA Experiment 20000087 PARAMETER Experiment Name: At_100uM_ABA_Mutants_cDNA_P Parameter: Treatment Value: 100uM ABA vs. No Treatment
  misc_feature: MA Experiment ID: 20000088 Result: Down-regulated in Transcription
  misc_feature: MA Experiment 20000088 PARAMETER Experiment Name: At_100uM_ABA_Mutants_cDNA_P Parameter: Plant Line Value: Landsberg
  misc_feature: MA Experiment 20000088 PARAMETER Experiment Name: At_100uM_ABA_Mutants_cDNA_P Parameter: Timepoint (hr) Value: 6
  misc_feature: MA Experiment 20000088 PARAMETER Experiment Name: At_100uM_ABA_Mutants_cDNA_P Parameter: Tissue Value: Aerial
  misc_feature: MA Experiment 20000088 PARAMETER Experiment Name: At_100uM_ABA_Mutants_cDNA_P Parameter: Treatment Value: 100uM ABA vs. No Treatment
  misc_feature: MA Experiment ID: 20000090 Result: Down-regulated in Transcription
  misc_feature: MA Experiment ID: 20000111 Result: Down-regulated in Transcription
  misc_feature: MA Experiment 20000111 PARAMETER Experiment Name: At_42deg_Heat_cDNA_P Parameter: Temperature (deg C) Value: 42 vs. 22
  misc_feature: MA Experiment 20000111 PARAMETER Experiment Name: At_42deg_Heat_cDNA_P Parameter: Timepoint (hr) Value: 6
  misc_feature: MA Experiment 20000111 PARAMETER Experiment Name: At_42deg_Heat_cDNA_P Parameter: Tissue Value: Aerial
  misc_feature: MA Experiment ID: 20000113 Result: Down-regulated in Transcription
  misc_feature: MA Experiment 20000113 PARAMETER Experiment Name: At_42deg_Heat_cDNA_P Parameter: Temperature (deg C) Value: 42 vs. 22
  misc_feature: MA Experiment 20000113 PARAMETER Experiment Name: At_42deg_Heat_cDNA_P Parameter: Timepoint (hr) Value: 8
  misc_feature: MA Experiment 20000113 PARAMETER Experiment Name: At_42deg_Heat_cDNA_P Parameter: Tissue Value: Aerial
  misc_feature: MA Experiment ID: 20000117 Result: Down-regulated in Transcription
  misc_feature: MA Experiment 20000117 PARAMETER Experiment Name: At_100uM_ABA_Mutants_cDNA_P Parameter: Plant Line Value: Columbia
  misc_feature: MA Experiment 20000117 PARAMETER Experiment Name: At_100uM_ABA_Mutants_cDNA_P Parameter: Timepoint (hr) Value: 6
  misc_feature: MA Experiment 20000117 PARAMETER Experiment Name: At_100uM_ABA_Mutants_cDNA_P Parameter: Tissue Value: Aerial
  misc_feature: MA Experiment 20000117 PARAMETER Experiment Name: At_100uM_ABA_Mutants_cDNA_P Parameter: Treatment Value: 100uM ABA vs. No Treatment
  misc_feature: MA Experiment ID: 20000144 Result: Down-regulated in Transcription
  misc_feature: MA Experiment 20000144 PARAMETER Experiment Name: At_42deg_Heat_cDNA_P Parameter: Temperature (deg C) Value: 42 vs. 22
  misc_feature: MA Experiment 20000144 PARAMETER Experiment Name: At_42deg_Heat_cDNA_P Parameter: Timepoint (hr) Value: 1
  misc_feature: MA Experiment 20000144 PARAMETER Experiment Name: At_42deg_Heat_cDNA_P Parameter: Tissue Value: Aerial
  misc_feature: MA Experiment ID: 20000169 Result: Down-regulated in Transcription
  misc_feature: MA Experiment 20000169 PARAMETER Experiment Name: At_100uM_ABA_P Parameter: Age (day) Value: 14
  misc_feature: MA Experiment 20000169 PARAMETER Experiment Name: At_100uM_ABA_P Parameter: Organism Value: A. thaliana
  misc_feature: MA Experiment 20000169 PARAMETER Experiment Name: At_100uM_ABA_P Parameter: Plant Line Value: WS
  misc_feature: MA Experiment 20000169 PARAMETER Experiment Name: At_100uM_ABA_P Parameter: Timepoint (hr) Value: 6
  misc_feature: MA Experiment 20000169 PARAMETER Experiment Name: At_100uM_ABA_P Parameter: Tissue Value: Aerial
  misc_feature: MA Experiment 20000169 PARAMETER Experiment Name: At_100uM_ABA_P Parameter: Treatment Value: 100uM ABA vs. No Treatment
  misc_feature: MA Experiment ID: 20000180 Result: Up-regulated in Transcription
  misc_feature: MA Experiment 20000180 PARAMETER Experiment Name: At_Germinating_Seeds_P Parameter: Age (hr) Value: 24 vs. 0
  misc_feature: MA Experiment 20000180 PARAMETER Experiment Name: At_Germinating_Seeds_P Parameter: Tissue Value: Germinating Seeds
  misc_feature: MA Experiment ID: 20000182 Result: Down-regulated in Transcription
  misc_feature: MA Experiment 20000182 PARAMETER Experiment Name: At_2mM_SA_P Parameter: Age (day) Value: 14
  misc_feature: MA Experiment 20000182 PARAMETER Experiment Name: At_2mM_SA_P Parameter: Organism Value: A. thaliana
  misc_feature: MA Experiment 20000182 PARAMETER Experiment Name: At_2mM_SA_P Parameter: Plant Line Value: WS
  misc_feature: MA Experiment 20000182 PARAMETER Experiment Name: At_2mM_SA_P Parameter: Timepoint (hr) Value: 6
  misc_feature: MA Experiment 20000182 PARAMETER Experiment Name: At_2mM_SA_P Parameter: Tissue Value: Aerial
  misc_feature: MA Experiment 20000182 PARAMETER Experiment Name: At_2mM_SA_P Parameter: Treatment Value: 2mM SA vs. No Treatment
  misc_feature: MA Experiment ID: 20000184 Result: Up-regulated in Transcription
  misc_feature: MA Experiment 20000184 PARAMETER Experiment Name: At_Shoots__P Parameter: Age (day) Value: 7
  misc_feature: MA Experiment 20000184 PARAMETER Experiment Name: At_Shoots__P Parameter: Tissue Value: Shoots vs. Whole Plant
  misc_feature: MA Experiment ID: 20000185 Result: Down-regulated in Transcription
  misc_feature: MA Experiment 20000185 PARAMETER Experiment Name: At_Roots__P Parameter: Age (day) Value: 7 vs. 21
  misc_feature: MA Experiment 20000185 PARAMETER Experiment Name: At_Roots__P Parameter: Organism Value: A. thaliana
  misc_feature: MA Experiment 20000185 PARAMETER Experiment Name: At_Roots__P Parameter: Tissue Value: Roots vs. Whole Plant
  misc_feature: MA Experiment ID: 20000214 Result: Up-regulated in Transcription
  misc_feature: MA Experiment 20000214 PARAMETER Experiment Name: At_4deg_Cold_P Parameter: Timepoint (hr) Value: 6
  misc_feature: MA Experiment ID: 20000234 Result: Up-regulated in Transcription
  misc_feature: MA Experiment 20000234 PARAMETER Experiment Name: At_Siliques_P Parameter: Age (day) Value: 21
  misc_feature: MA Experiment 20000234 PARAMETER Experiment Name: At_Siliques_P Parameter: Organism Value: A. thaliana
  misc_feature: MA Experiment 20000234 PARAMETER Experiment Name: At_Siliques_P Parameter: Plant Line Value: WS
  misc_feature: MA Experiment 20000234 PARAMETER Experiment Name: At_Siliques_P Parameter: Tissue Value: Less Than 5mm Siliques vs. Whole Plant
  misc_feature: MA Experiment ID: 20000267 Result: Down-regulated in Transcription
  misc_feature: MA Experiment 20000267 PARAMETER Experiment Name: At_Drought_P Parameter: Age (day) Value: 7
  misc_feature: MA Experiment 20000267 PARAMETER Experiment Name: At_Drought_P Parameter: Organism Value: A. thaliana
  misc_feature: MA Experiment 20000267 PARAMETER Experiment Name: At_Drought_P Parameter: Plant Line Value: WS
  misc_feature: MA Experiment 20000267 PARAMETER Experiment Name: At_Drought_P Parameter: Timepoint (hr) Value: 6
  misc_feature: MA Experiment 20000267 PARAMETER Experiment Name: At_Drought_P Parameter: Tissue Value: Whole Plant
  misc_feature: MA Experiment 20000267 PARAMETER Experiment Name: At_Drought_P Parameter: Treatment Value: Drought vs. No Drought
  misc_feature: MA Experiment ID: 20000268 Result: Down-regulated in Transcription
  misc_feature: MA Experiment 20000268 PARAMETER Experiment Name: At_100mM_NaCl__P Parameter: Age (day) Value: 14
  misc_feature: MA Experiment 20000268 PARAMETER Experiment Name: At_100mM_NaCl__P Parameter: Organism Value: A. thaliana
  misc_feature: MA Experiment 20000268 PARAMETER Experiment Name: At_100mM_NaCl__P Parameter: Plant Line Value: WS
  misc_feature: MA Experiment 20000268 PARAMETER Experiment Name: At_100mM_NaCl__P Parameter: Timepoint (hr) Value: 6
  misc_feature: MA Experiment 20000268 PARAMETER Experiment Name: At_100mM_NaCl__P Parameter: Tissue Value: Whole Plant
  misc_feature: MA Experiment 20000268 PARAMETER Experiment Name: At_100mM_NaCl__P Parameter: Treatment Value: 100mM NaCl vs. No Treatment
  misc_feature: MA Experiment ID: 20000286 Result: Up-regulated in Transcription
  misc_feature: MA Experiment 20000286 PARAMETER Experiment Name: At_Open_Flower_P Parameter: Age (day) Value: 21
  misc_feature: MA Experiment 20000286 PARAMETER Experiment Name: At_Open_Flower_P Parameter: Plant Line Value: WS
  misc_feature: MA Experiment 20000286 PARAMETER Experiment Name: At_Open_Flower_P Parameter: Tissue Value: Half Open vs. Whole Plant
  misc_feature: MA Experiment ID: 20000436 Result: Down-regulated in Transcription
  misc_feature: MA Experiment 20000436 PARAMETER Experiment Name: At_Drought_P Parameter: Age (day) Value: 7
  misc_feature: MA Experiment 20000436 PARAMETER Experiment Name: At_Drought_P Parameter: Organism Value: A. thaliana
  misc_feature: MA Experiment 20000436 PARAMETER Experiment Name: At_Drought_P Parameter: Plant Line Value: WS
  misc_feature: MA Experiment 20000436 PARAMETER Experiment Name: At_Drought_P Parameter: Timepoint (hr) Value: 12
  misc_feature: MA Experiment 20000436 PARAMETER Experiment Name: At_Drought_P Parameter: Tissue Value: Whole Plant
  misc_feature: MA Experiment 20000436 PARAMETER Experiment Name: At_Drought_P Parameter: Treatment Value: Drought vs. No Drought
  misc_feature: MA Experiment ID: 20000438 Result: Up-regulated in Transcription
  misc_feature: MA Experiment 20000438 PARAMETER Experiment Name: At_Shoots__P Parameter: Age (day) Value: 14
  misc_feature: MA Experiment 20000438 PARAMETER Experiment Name: At_Shoots__P Parameter: Tissue Value: Shoots vs. Whole Plant
  misc_feature: MA Experiment ID: 20000439 Result: Down-regulated in Transcription
  misc_feature: MA Experiment 20000439 PARAMETER Experiment Name: At_Roots__P Parameter: Age (day) Value: 14 vs. 21
  misc_feature: MA Experiment 20000439 PARAMETER Experiment Name: At_Roots__P Parameter: Organism Value: A. thaliana
  misc_feature: MA Experiment 20000439 PARAMETER Experiment Name: At_Roots__P Parameter: Tissue Value: Roots vs. Whole Plant
  misc_feature: MA Experiment ID: 20000451 Result: Up-regulated in Transcription
  misc_feature: MA Experiment 20000451 PARAMETER Experiment Name: At_CS6879_Shoots-Roots_P Parameter: Age (day) Value: 14
  misc_feature: MA Experiment 20000451 PARAMETER Experiment Name: At_CS6879_Shoots-Roots_P Parameter: Organism Value: A. thaliana
  misc_feature: MA Experiment 20000451 PARAMETER Experiment Name: At_CS6879_Shoots-Roots_P Parameter: Plant Line Value: CS6879 vs. WS
  misc_feature: MA Experiment 20000451 PARAMETER Experiment Name: At_CS6879_Shoots-Roots_P Parameter: Tissue Value: Roots
  misc_feature: MA Experiment ID: 20001247 Result: Up-regulated in Transcription
  misc_feature: MA Experiment 20001247 PARAMETER Experiment Name: At_Far-red-induction_P Parameter: Age (day) Value: 7
  misc_feature: MA Experiment 20001247 PARAMETER Experiment Name: At_Far-red-induction_P Parameter: Light Value: Far-red vs. White
  misc_feature: MA Experiment 20001247 PARAMETER Experiment Name: At_Far-red-induction_P Parameter: Organism Value: A. thaliana
  misc_feature: MA Experiment 20001247 PARAMETER Experiment Name: At_Far-red-induction_P Parameter: Plant Line Value: Columbia
  misc_feature: MA Experiment 20001247 PARAMETER Experiment Name: At_Far-red-induction_P Parameter: Timepoint (hr) Value: 1
  misc_feature: MA Experiment 20001247 PARAMETER Experiment Name: At_Far-red-induction_P Parameter: Tissue Value: Whole Plant
  misc_feature: MA Experiment ID: 20001554 Result: Down-regulated in Transcription
  misc_feature: MA Experiment 20001554 PARAMETER Experiment Name: At_Drought_Soil_Dry_P Parameter: Age (day) Value: 21
  misc_feature: MA Experiment 20001554 PARAMETER Experiment Name: At_Drought_Soil_Dry_P Parameter: Organism Value: A. thaliana
  misc_feature: MA Experiment 20001554 PARAMETER Experiment Name: At_Drought_Soil_Dry_P Parameter: Plant Line Value: WS
  misc_feature: MA Experiment 20001554 PARAMETER Experiment Name: At_Drought_Soil_Dry_P Parameter: Post Timepoint (hr) Value: None
  misc_feature: MA Experiment 20001554 PARAMETER Experiment Name: At_Drought_Soil_Dry_P Parameter: Post-Treatment Value: None
  misc_feature: MA Experiment 20001554 PARAMETER Experiment Name: At_Drought_Soil_Dry_P Parameter: Timepoint (day) Value: 7
  misc_feature: MA Experiment 20001554 PARAMETER Experiment Name: At_Drought_Soil_Dry_P Parameter: Treatment Value: Drought vs. No Drought
  misc_feature: MA Experiment ID: 20001555 Result: Down-regulated in Transcription
  misc_feature: MA Experiment 20001555 PARAMETER Experiment Name: At_Drought_Soil_Dry_P Parameter: Age (day) Value: 24
  misc_feature: MA Experiment 20001555 PARAMETER Experiment Name: At_Drought_Soil_Dry_P Parameter: Organism Value: A. thaliana
  misc_feature: MA Experiment 20001555 PARAMETER Experiment Name: At_Drought_Soil_Dry_P Parameter: Plant Line Value: WS
  misc_feature: MA Experiment 20001555 PARAMETER Experiment Name: At_Drought_Soil_Dry_P Parameter: Post Timepoint (hr) Value: None
  misc_feature: MA Experiment 20001555 PARAMETER Experiment Name: At_Drought_Soil_Dry_P Parameter: Post-Treatment Value: None
  misc_feature: MA Experiment 20001555 PARAMETER Experiment Name: At_Drought_Soil_Dry_P Parameter: Timepoint (day) Value: 10
  misc_feature: MA Experiment 20001555 PARAMETER Experiment Name: At_Drought_Soil_Dry_P Parameter: Treatment Value: Drought vs. No Drought
  misc_feature: MA Experiment ID: 20001556 Result: Down-regulated in Transcription
  misc_feature: MA Experiment 20001556 PARAMETER Experiment Name: At_Drought_Soil_Dry_P Parameter: Age (day) Value: 26
  misc_feature: MA Experiment 20001556 PARAMETER Experiment Name: At_Drought_Soil_Dry_P Parameter: Organism Value: A. thaliana
  misc_feature: MA Experiment 20001556 PARAMETER Experiment Name: At_Drought_Soil_Dry_P Parameter: Plant Line Value: WS
  misc_feature: MA Experiment 20001556 PARAMETER Experiment Name: At_Drought_Soil_Dry_P Parameter: Post Timepoint (hr) Value: None
  misc_feature: MA Experiment 20001556 PARAMETER Experiment Name: At_Drought_Soil_Dry_P Parameter: Post-Treatment Value: None
  misc_feature: MA Experiment 20001556 PARAMETER Experiment Name: At_Drought_Soil_Dry_P Parameter: Timepoint (day) Value: 12
  misc_feature: MA Experiment 20001556 PARAMETER Experiment Name: At_Drought_Soil_Dry_P Parameter: Treatment Value: Drought vs. No Drought
  misc_feature: MA Experiment ID: 20001557 Result: Up-regulated in Transcription
  misc_feature: MA Experiment 20001557 PARAMETER Experiment Name: At_Drought_Soil_Dry_P Parameter: Age (day) Value: 27
  misc_feature: MA Experiment 20001557 PARAMETER Experiment Name: At_Drought_Soil_Dry_P Parameter: Organism Value: A. thaliana
  misc_feature: MA Experiment 20001557 PARAMETER Experiment Name: At_Drought_Soil_Dry_P Parameter: Plant Line Value: WS
  misc_feature: MA Experiment 20001557 PARAMETER Experiment Name: At_Drought_Soil_Dry_P Parameter: Post Timepoint (hr) Value: 3
  misc_feature: MA Experiment 20001557 PARAMETER Experiment Name: At_Drought_Soil_Dry_P Parameter: Post-Treatment Value: Re-Water vs. No Drought
  misc_feature: MA Experiment 20001557 PARAMETER Experiment Name: At_Drought_Soil_Dry_P Parameter: Timepoint (day) Value: 13
  misc_feature: MA Experiment 20001557 PARAMETER Experiment Name: At_Drought_Soil_Dry_P Parameter: Treatment Value: Drought vs. No Drought
  misc_feature: MA Experiment ID: 20001558 Result: Up-regulated in Transcription
  misc_feature: MA Experiment 20001558 PARAMETER Experiment Name: At_Drought_Soil_Dry_P Parameter: Age (day) Value: 27
  misc_feature: MA Experiment 20001558 PARAMETER Experiment Name: At_Drought_Soil_Dry_P Parameter: Organism Value: A. thaliana
  misc_feature: MA Experiment 20001558 PARAMETER Experiment Name: At_Drought_Soil_Dry_P Parameter: Plant Line Value: WS
  misc_feature: MA Experiment 20001558 PARAMETER Experiment Name: At_Drought_Soil_Dry_P Parameter: Post Timepoint (hr) Value: 6
  misc_feature: MA Experiment 20001558 PARAMETER Experiment Name: At_Drought_Soil_Dry_P Parameter: Post-Treatment Value: Re-Water vs. No Drought
  misc_feature: MA Experiment 20001558 PARAMETER Experiment Name: At_Drought_Soil_Dry_P Parameter: Timepoint (day) Value: 13
  misc_feature: MA Experiment 20001558 PARAMETER Experiment Name: At_Drought_Soil_Dry_P Parameter: Treatment Value: Drought vs. No Drought
  misc_feature: MA Experiment ID: 20001560 Result: Up-regulated in Transcription
  misc_feature: MA Experiment 20001560 PARAMETER Experiment Name: At_Drought_Soil_Dry_P Parameter: Age (day) Value: 28
  misc_feature: MA Experiment 20001560 PARAMETER Experiment Name: At_Drought_Soil_Dry_P Parameter: Organism Value: A. thaliana
  misc_feature: MA Experiment 20001560 PARAMETER Experiment Name: At_Drought_Soil_Dry_P Parameter: Plant Line Value: WS
  misc_feature: MA Experiment 20001560 PARAMETER Experiment Name: At_Drought_Soil_Dry_P Parameter: Post Timepoint (hr) Value: None
  misc_feature: MA Experiment 20001560 PARAMETER Experiment Name: At_Drought_Soil_Dry_P Parameter: Post-Treatment Value: None
  misc_feature: MA Experiment 20001560 PARAMETER Experiment Name: At_Drought_Soil_Dry_P Parameter: Timepoint (day) Value: 14
  misc_feature: MA Experiment 20001560 PARAMETER Experiment Name: At_Drought_Soil_Dry_P Parameter: Treatment Value: Drought vs. No Drought
  misc_feature: MA Experiment ID: 20001904 Result: Down-regulated in Transcription
  misc_feature: MA Experiment 20001904 PARAMETER Experiment Name: At_Drought_Reproduction_P Parameter: Age (day) Value: 37
  misc_feature: MA Experiment 20001904 PARAMETER Experiment Name: At_Drought_Reproduction_P Parameter: Organism Value: A. thaliana
  misc_feature: MA Experiment 20001904 PARAMETER Experiment Name: At_Drought_Reproduction_P Parameter: Plant Line Value: WS
  misc_feature: MA Experiment 20001904 PARAMETER Experiment Name: At_Drought_Reproduction_P Parameter: Timepoint (day) Value: 7
  misc_feature: MA Experiment 20001904 PARAMETER Experiment Name: At_Drought_Reproduction_P Parameter: Tissue Value: Rosettes
  misc_feature: MA Experiment 20001904 PARAMETER Experiment Name: At_Drought_Reproduction_P Parameter: Treatment Value: Drought vs. No Drought
  misc_feature: MA Experiment ID: 20001906 Result: Down-regulated in Transcription
  misc_feature: MA Experiment 20001906 PARAMETER Experiment Name: At_Drought_Reproduction_P Parameter: Age (day) Value: 35
  misc_feature: MA Experiment 20001906 PARAMETER Experiment Name: At_Drought_Reproduction_P Parameter: Organism Value: A. thaliana
  misc_feature: MA Experiment 20001906 PARAMETER Experiment Name: At_Drought_Reproduction_P Parameter: Plant Line Value: WS
  misc_feature: MA Experiment 20001906 PARAMETER Experiment Name: At_Drought_Reproduction_P Parameter: Timepoint (day) Value: 5
  misc_feature: MA Experiment 20001906 PARAMETER Experiment Name: At_Drought_Reproduction_P Parameter: Tissue Value: Siliques
  misc_feature: MA Experiment 20001906 PARAMETER Experiment Name: At_Drought_Reproduction_P Parameter: Treatment Value: Drought vs. No Drought
  misc_feature: MA Experiment ID: 20001907 Result: Down-regulated in Transcription
  misc_feature: MA Experiment 20001907 PARAMETER Experiment Name: At_Drought_Reproduction_P Parameter: Age (day) Value: 37
  misc_feature: MA Experiment 20001907 PARAMETER Experiment Name: At_Drought_Reproduction_P Parameter: Organism Value: A. thaliana
  misc_feature: MA Experiment 20001907 PARAMETER Experiment Name: At_Drought_Reproduction_P Parameter: Plant Line Value: WS
  misc_feature: MA Experiment 20001907 PARAMETER Experiment Name: At_Drought_Reproduction_P Parameter: Timepoint (day) Value: 7
  misc_feature: MA Experiment 20001907 PARAMETER Experiment Name: At_Drought_Reproduction_P Parameter: Tissue Value: Siliques
  misc_feature: MA Experiment 20001907 PARAMETER Experiment Name: At_Drought_Reproduction_P Parameter: Treatment Value: Drought vs. No Drought
  misc_feature: MA Experiment ID: 20001908 Result: Down-regulated in Transcription
  misc_feature: MA Experiment 20001908 PARAMETER Experiment Name: At_Drought_Reproduction_P Parameter: Age (day) Value: 40
  misc_feature: MA Experiment 20001908 PARAMETER Experiment Name: At_Drought_Reproduction_P Parameter: Organism Value: A. thaliana
  misc_feature: MA Experiment 20001908 PARAMETER Experiment Name: At_Drought_Reproduction_P Parameter: Plant Line Value: WS
  misc_feature: MA Experiment 20001908 PARAMETER Experiment Name: At_Drought_Reproduction_P Parameter: Timepoint (day) Value: 10
  misc_feature: MA Experiment 20001908 PARAMETER Experiment Name: At_Drought_Reproduction_P Parameter: Tissue Value: Siliques
  misc_feature: MA Experiment 20001908 PARAMETER Experiment Name: At_Drought_Reproduction_P Parameter: Treatment Value: Drought vs. No Drought
  misc_feature: MA Experiment ID: 20001911 Result: Down-regulated in Transcription
  misc_feature: MA Experiment 20001911 PARAMETER Experiment Name: At_Drought_Reproduction_P Parameter: Age (day) Value: 40
  misc_feature: MA Experiment 20001911 PARAMETER Experiment Name: At_Drought_Reproduction_P Parameter: Organism Value: A. thaliana
  misc_feature: MA Experiment 20001911 PARAMETER Experiment Name: At_Drought_Reproduction_P Parameter: Plant Line Value: WS
  misc_feature: MA Experiment 20001911 PARAMETER Experiment Name: At_Drought_Reproduction_P Parameter: Timepoint (day) Value: 10
  misc_feature: MA Experiment 20001911 PARAMETER Experiment Name: At_Drought_Reproduction_P Parameter: Tissue Value: Flowers
  misc_feature: MA Experiment 20001911 PARAMETER Experiment Name: At_Drought_Reproduction_P Parameter: Treatment Value: Drought vs. No Drought
atccactctactcaacatggactcctccaaactctcatctctctctctttgcctcttcctcatttgcattatctatctcccccaacattctctcgcatgcggctcttgcaacccacggaagggcggaaagcactcccctaaagcccctaagctaccggttcctccggtgaccgtccctaagctacccgttcctcctgtgaccatccctaagctacccgttcctccagtgactgtacccaagctacccgttcctccagtgaccgtccccaagctacccgttcctccagtgacagtcccaaagctacccgttcccccagtaactgtccctaagctacccgttcctccggtaaccgtccctaagctacccgttcctccagtaaccgtccctaagctaccccttcctccgatttcagggctacccatacctccagtggtaggtcccaatctgccattgccacctttgccaattgtaggtcctattcttccaccgggaacaaccccaccagccacaggagggaaggactgtcctccaccgccagggagcgtaaagccaccatcagggggcgggaaggcgacatgtccaatagacacgctgaagttaggtgcttgcgtcgacttgttgggaggtttagtaaagatagggcttggggatccagcagttaacaaatgttgtccgttacttaaaggcctcgttgaaatcgaagccgcggcttgtctctgcactaccctcaagctcaaagctcttgacctcaatctttatgtccctgttgctcttcagcttctccttacctgtggcaaaaatccacctccgggctacacttgttccatatgataaactcactccacttataaaggatgctttggagaaaaaagtgagaagagaatggcagagctccaatctttcctgtcttggtttaccaaatacatcatatcaaatcctatccctttgattctttcctctatcgttcccttatgcttgtatcattaattaatgtgtgctttttagattaatgattcttctcttgtattaaagtatgatttgaaatcctttttttttctctatctctttttattgaattgattgaactgcgttcatgatactgtcaaaaagagagaaaaagagtacaatttt

SEQ ID NO: 39088 - protein, 276 aa, Arabidopsis thaliana
  peptide (1)..(276): Ceres Seq. ID no. 13503083
  misc_feature (193)..(274): Pfam Name: Protease inhibitor/seed storage/LTP family Pfam Description: Protease inhibitor/seed storage/LTP family
  misc_feature (193)..(274): Pfam Name: Protease inhibitor/seed storage/LTP family Pfam Description: Protease inhibitor/seed storage/LTP family
  misc_feature (38)..(274): Homolog of NCBI NO: 1709767 NR Description: 36.4 KD PROLINE-RICH PROTEIN
  misc_feature (38)..(274): Homolog of NCBI NO: 19521 NR Description: proline rich protein [Lycopersicon esculentum]
  misc_feature (26)..(274): Homolog of NCBI NO: 7446486 NR Description: hypothetical protein - carrot
  misc_feature (89)..(276): Homolog of NCBI NO: 17154773 NR Description: extensin-like protein [Cucumis sativus]
  misc_feature (43)..(274): Homolog of NCBI NO: 1076501 NR Description: cell wall protein - alfalfa
  misc_feature (38)..(274): Homolog of NCBI NO: 1709767 NR Description: 36.4 KD PROLINE-RICH PROTEIN
  misc_feature (26)..(274): Homolog of NCBI NO: 7446486 NR Description: hypothetical protein - carrot
  misc_feature (43)..(274): Homolog of NCBI NO: 1076501 NR Description: cell wall protein - alfalfa
  misc_feature (49)..(276): Homolog of NCBI NO: 18396941 NR Description: protease inhibitor/seed storage/lipid transfer
  misc_feature (6)..(204): Homolog of NCBI NO: 24417264 NR Description: unknown [Arabidopsis thaliana]
  misc_feature (6)..(248): Homolog of NCBI NO: 18396941 NR Description: protease inhibitor/seed storage/lipid transfer
  misc_feature (45)..(274): Homolog of NCBI NO: 7446482 NR Description: probable cell wall-plasma membrane linker protein
  misc_feature (44)..(274): Homolog of NCBI NO: 7446483 NR Description: probable cell wall protein - garden pea
  misc_feature (89)..(276): Homolog of NCBI NO: 17154773 NR Description: extensin-like protein [Cucumis sativus]
  misc_feature (38)..(274): Homolog of NCBI NO: 19521 NR Description: proline rich protein [Lycopersicon esculentum]
  misc_feature (44)..(274): Homolog of NCBI NO: 7446483 NR Description: probable cell wall protein - garden pea
  misc_feature (45)..(274): Homolog of NCBI NO: 7446482 NR Description: probable cell wall-plasma membrane linker protein
  misc_feature (6)..(248): Homolog of NCBI NO: 18396941 NR Description: protease inhibitor/seed storage/lipid transfer
  misc_feature (6)..(204): Homolog of NCBI NO: 24417264 NR Description: unknown [Arabidopsis thaliana]
  misc_feature (49)..(276): Homolog of NCBI NO: 18396941 NR Description: protease inhibitor/seed storage/lipid transfer
STLLNMDSSKLSSLSLCLFLICIIYLPQHSLACGSCNPRKGGKHSPKAPKLPVPPVTVPKLPVPPVTIPKLPVPPVTVPKLPVPPVTVPKLPVPPVTVPKLPVPPVTVPKLPVPPVTVPKLPVPPVTVPKLPLPPISGLPIPPVVGPNLPLPPLPIVGPILPPGTTPPATGGKDCPPPPGSVKPPSGGGKATCPIDTLKLGACVDLLGGLVKIGLGDPAVNKCCPLLKGLVEIEAAACLCTTLKLKALDLNLYVPVALQLLLTCGKNPPPGYTCSI

SEQ ID NO: 39089 - protein, 271 aa, Arabidopsis thaliana
  peptide (1)..(271): Ceres Seq. ID no. 13503084
  misc_feature (188)..(269): Pfam Name: Protease inhibitor/seed storage/LTP family Pfam Description: Protease inhibitor/seed storage/LTP family
  misc_feature (188)..(269): Pfam Name: Protease inhibitor/seed storage/LTP family Pfam Description: Protease inhibitor/seed storage/LTP family
  misc_feature (33)..(269): Homolog of NCBI NO: 1709767 NR Description: 36.4 KD PROLINE-RICH PROTEIN
  misc_feature (33)..(269): Homolog of NCBI NO: 19521 NR Description: proline rich protein [Lycopersicon esculentum]
  misc_feature (21)..(269): Homolog of NCBI NO: 7446486 NR Description: hypothetical protein - carrot
  misc_feature (84)..(271): Homolog of NCBI NO: 17154773 NR Description: extensin-like protein [Cucumis sativus]
  misc_feature (38)..(269): Homolog of NCBI NO: 1076501 NR Description: cell wall protein - alfalfa
  misc_feature (33)..(269): Homolog of NCBI NO: 1709767 NR Description: 36.4 KD PROLINE-RICH PROTEIN
  misc_feature (21)..(269): Homolog of NCBI NO: 7446486 NR Description: hypothetical protein - carrot
  misc_feature (38)..(269): Homolog of NCBI NO: 1076501 NR Description: cell wall protein - alfalfa
  misc_feature (44)..(271): Homolog of NCBI NO: 18396941 NR Description: protease inhibitor/seed storage/lipid transfer
  misc_feature (1)..(199): Homolog of NCBI NO: 24417264 NR Description: unknown [Arabidopsis thaliana]
  misc_feature (1)..(243): Homolog of NCBI NO: 18396941 NR Description: protease inhibitor/seed storage/lipid transfer
  misc_feature (40)..(269): Homolog of NCBI NO: 7446482 NR Description: probable cell wall-plasma membrane linker protein
  misc_feature (39)..(269): Homolog of NCBI NO: 7446483 NR Description: probable cell wall protein - garden pea
  misc_feature (84)..(271): Homolog of NCBI NO: 17154773 NR Description: extensin-like protein [Cucumis sativus]
  misc_feature (33)..(269): Homolog of NCBI NO: 19521 NR Description: proline rich protein [Lycopersicon esculentum]
  misc_feature (39)..(269): Homolog of NCBI NO: 7446483 NR Description: probable cell wall protein - garden pea
  misc_feature (40)..(269): Homolog of NCBI NO: 7446482 NR Description: probable cell wall-plasma membrane linker protein
  misc_feature (1)..(243): Homolog of NCBI NO: 18396941 NR Description: protease inhibitor/seed storage/lipid transfer
  misc_feature (1)..(199): Homolog of NCBI NO: 24417264 NR Description: unknown [Arabidopsis thaliana]
  misc_feature (44)..(271): Homolog of NCBI NO: 18396941 NR Description: protease inhibitor/seed storage/lipid transfer
MDSSKLSSLSLCLFLICIIYLPQHSLACGSCNPRKGGKHSPKAPKLPVPPVTVPKLPVPPVTIPKLPVPPVTVPKLPVPPVTVPKLPVPPVTVPKLPVPPVTVPKLPVPPVTVPKLPVPPVTVPKLPLPPISGLPIPPVVGPNLPLPPLPIVGPILPPGTTPPATGGKDCPPPPGSVKPPSGGGKATCPIDTLKLGACVDLLGGLVKIGLGDPAVNKCCPLLKGLVEIEAAACLCTTLKLKALDLNLYVPVALQLLLTCGKNPPPGYTCSI

SEQ ID NO: 39090 - DNA, 679 bp, Arabidopsis thaliana
  misc_feature (1)..(679): Ceres Seq. ID no. 12326166
  misc_feature: MA Experiment ID: 108434 Result: Up-regulated in Transcription
  misc_feature: MA Experiment 108434 PARAMETER Experiment Name: At_Root_Tips_cDNA_P Parameter: Tissue Value: Root Tips
  misc_feature: MA Experiment ID: 108462 Result: Down-regulated in Transcription
  misc_feature: MA Experiment 108462 PARAMETER Experiment Name: At_Germinating_Seeds_cDNA_P Parameter: Age (day) Value: 2 vs. 0
  misc_feature: MA Experiment 108462 PARAMETER Experiment Name: At_Germinating_Seeds_cDNA_P Parameter: Tissue Value: Germinating Seeds
  misc_feature: MA Experiment ID: 108463 Result: Down-regulated in Transcription
  misc_feature: MA Experiment 108463 PARAMETER Experiment Name: At_Germinating_Seeds_cDNA_P Parameter: Age (day) Value: 3 vs. 0
  misc_feature: MA Experiment 108463 PARAMETER Experiment Name: At_Germinating_Seeds_cDNA_P Parameter: Tissue Value: Germinating Seeds
  misc_feature: MA Experiment ID: 108464 Result: Down-regulated in Transcription
  misc_feature: MA Experiment 108464 PARAMETER Experiment Name: At_Germinating_Seeds_cDNA_P Parameter: Age (day) Value: 4 vs. 0
  misc_feature: MA Experiment 108464 PARAMETER Experiment Name: At_Germinating_Seeds_cDNA_P Parameter: Tissue Value: Germinating Seeds
cttttttaatccctttgtttctctgtggtattcaacaaatttgtctcgaatttatagagctcgaagcttcaaggaagttataatggctagtgaagatgaatcgattgaacaaaaagctgctgctcgtaaagaggcacttaaagctctaagggcagctcaggaactgtctgagaccaagagaggatgaagctgtcgaagaagatggtccagccatgaagtttagaaactatgttccccaagctaaggagcttcaggatggtaaactagcgccaccagagctacccaaattcgaagatccgatcgttgcacttccacctgctgtagagaagaaagaggacccatttgttaacatcgctccaaagaagccaaactgggacctccgaagagatgtgcaaaagaagcttgataagctcgaaaggcggactcaaaaggcaatgcataaactcatggaggagcaagagaaagaacgtgagatggctgaagctgatggtaacaccatagaaagttgaaacccaacgacgtcatcaaagaaagccaccactgaacagtatattctactcgattttgtttaactgttaaagcattcgaagtgagtagaccatgtaaaatcctacggccattggcatagacatagtaggtttatcttcttgtgtgaatcaaagaaagtcgcaatttattt

SEQ ID NO: 39091 - protein, 98 aa, Arabidopsis thaliana
  peptide (1)..(98): Ceres Seq. ID no. 12326167
  misc_feature (41)..(98): Homolog of NCBI NO: 31230214 NR Description: ENSANGP00000019573 [Anopheles gambiae]
  misc_feature (1)..(95): Homolog of NCBI NO: 20874062 NR Description: similar to hypothetical protein MGC23918
  misc_feature (1)..(95): Homolog of NCBI NO: 33469009 NR Description: RIKEN cDNA 2700094L05 [Mus musculus]
  misc_feature (1)..(90): Homolog of NCBI NO: 24651238 NR Description: CG15525-PA [Drosophila melanogaster]
  misc_feature (1)..(90): Homolog of NCBI NO: 21430888 NR Description: SD23244p [Drosophila melanogaster]
  misc_feature (1)..(87): Homolog of NCBI NO: 20072383 NR Description: Similar to RIKEN cDNA 2700094L05 gene [Mus
  misc_feature (1)..(87): Homolog of NCBI NO: 21756313 NR Description: unnamed protein product [Homo sapiens]
  misc_feature (1)..(87): Homolog of NCBI NO: 21389497 NR Description: hypothetical protein MGC23918 [Homo sapiens]
  misc_feature (1)..(95): Homolog of NCBI NO: 34866382 NR Description: similar to hypothetical protein MGC23918 [Rattus
  misc_feature (1)..(98): Homolog of NCBI NO: 18397111 NR Description: expressed protein
MKFRNYVPQAKELQDGKLAPPELPKFEDPIVALPPAVEKKEDPFVNIAPKKPNWDLRRDVQKKLDKLERRTQKAMHKLMEEQEKEREMAEADGNTIES

SEQ ID NO: 39092 - protein, 61 aa, Arabidopsis thaliana
  peptide (1)..(61): Ceres Seq. ID no. 12326168
  misc_feature (28)..(59): Homolog of NCBI NO: 18397111 NR Description: expressed protein
FFNPFVSLWYSTNLSRIYRARSFKEVIMASEDESIEQKAAARKEALKALRAAQELSETKRG

SEQ ID NO: 39093 - DNA, 1642 bp, Arabidopsis thaliana
  misc_feature (1)..(1642): Ceres Seq. ID no. 13645827
  misc_feature: MA Experiment ID: 20000180 Result: Down-regulated in Transcription
  misc_feature: MA Experiment 20000180 PARAMETER Experiment Name: At_Germinating_Seeds_P Parameter: Age (hr) Value: 24 vs. 0
  misc_feature: MA Experiment 20000180 PARAMETER Experiment Name: At_Germinating_Seeds_P Parameter: Tissue Value: Germinating Seeds
  misc_feature: MA Experiment ID: 20000182 Result: Up-regulated in Transcription
  misc_feature: MA Experiment 20000182 PARAMETER Experiment Name: At_2mM_SA_P Parameter: Age (day) Value: 14
  misc_feature: MA Experiment 20000182 PARAMETER Experiment Name: At_2mM_SA_P Parameter: Organism Value: A. thaliana
  misc_feature: MA Experiment 20000182 PARAMETER Experiment Name: At_2mM_SA_P Parameter: Plant Line Value: WS
  misc_feature: MA Experiment 20000182 PARAMETER Experiment Name: At_2mM_SA_P Parameter: Timepoint (hr) Value: 6
  misc_feature: MA Experiment 20000182 PARAMETER Experiment Name: At_2mM_SA_P Parameter: Tissue Value: Aerial
  misc_feature: MA Experiment 20000182 PARAMETER Experiment Name: At_2mM_SA_P Parameter: Treatment Value: 2mM SA vs. No Treatment
  misc_feature: MA Experiment ID: 20000234 Result: Down-regulated in Transcription
  misc_feature: MA Experiment 20000234 PARAMETER Experiment Name: At_Siliques_P Parameter: Age (day) Value: 21
  misc_feature: MA Experiment 20000234 PARAMETER Experiment Name: At_Siliques_P Parameter: Organism Value: A. thaliana
  misc_feature: MA Experiment 20000234 PARAMETER Experiment Name: At_Siliques_P Parameter: Plant Line Value: WS
  misc_feature: MA Experiment 20000234 PARAMETER Experiment Name: At_Siliques_P Parameter: Tissue Value: Less Than 5mm Siliques vs. Whole Plant
  misc_feature: MA Experiment ID: 20000235 Result: Down-regulated in Transcription
  misc_feature: MA Experiment 20000235 PARAMETER Experiment Name: At_Siliques_P Parameter: Age (day) Value: 21
  misc_feature: MA Experiment 20000235 PARAMETER Experiment Name: At_Siliques_P Parameter: Organism Value: A. thaliana
  misc_feature: MA Experiment 20000235 PARAMETER Experiment Name: At_Siliques_P Parameter: Plant Line Value: WS
  misc_feature: MA Experiment 20000235 PARAMETER Experiment Name: At_Siliques_P Parameter: Tissue Value: 5-10mm Siliques vs. Whole Plant
  misc_feature: MA Experiment ID: 20000264 Result: Down-regulated in Transcription
  misc_feature: MA Experiment 20000264 PARAMETER Experiment Name: At_Open_Flower_P Parameter: Age (day) Value: 21
  misc_feature: MA Experiment 20000264 PARAMETER Experiment Name: At_Open_Flower_P Parameter: Plant Line Value: WS
  misc_feature: MA Experiment 20000264 PARAMETER Experiment Name: At_Open_Flower_P Parameter: Tissue Value: Open Flower vs. Whole Plant
  misc_feature: MA Experiment ID: 20000445 Result: Up-regulated in Transcription
  misc_feature: MA Experiment 20000445 PARAMETER Experiment Name: At_100uM_NAA__P Parameter: Age (day) Value: 14
  misc_feature: MA Experiment 20000445 PARAMETER Experiment Name: At_100uM_NAA__P Parameter: Organism Value: A. thaliana
  misc_feature: MA Experiment 20000445 PARAMETER Experiment Name: At_100uM_NAA__P Parameter: Plant Line Value: WS
  misc_feature: MA Experiment 20000445 PARAMETER Experiment Name: At_100uM_NAA__P Parameter: Timepoint (hr) Value: 6
  misc_feature: MA Experiment 20000445 PARAMETER Experiment Name: At_100uM_NAA__P Parameter: Tissue Value: Aerial
  misc_feature: MA Experiment 20000445 PARAMETER Experiment Name: At_100uM_NAA__P Parameter: Treatment Value: 100uM NAA vs. No Treatment
  misc_feature: MA Experiment ID: 20001451 Result: Down-regulated in Transcription
  misc_feature: MA Experiment 20001451 PARAMETER Experiment Name: At_Far-red-induction_P Parameter: Age (day) Value: 7
  misc_feature: MA Experiment 20001451 PARAMETER Experiment Name: At_Far-red-induction_P Parameter: Light Value: Far-red vs. White
  misc_feature: MA Experiment 20001451 PARAMETER Experiment Name: At_Far-red-induction_P Parameter: Organism Value: A. thaliana
  misc_feature: MA Experiment 20001451 PARAMETER Experiment Name: At_Far-red-induction_P Parameter: Plant Line Value: Columbia
  misc_feature: MA Experiment 20001451 PARAMETER Experiment Name: At_Far-red-induction_P Parameter: Timepoint (hr) Value: 24
  misc_feature: MA Experiment 20001451 PARAMETER Experiment Name: At_Far-red-induction_P Parameter: Tissue Value: Whole Plant
  misc_feature: MA Experiment ID: 20001556 Result: Up-regulated in Transcription
  misc_feature: MA Experiment 20001556 PARAMETER Experiment Name: At_Drought_Soil_Dry_P Parameter: Age (day) Value: 26
  misc_feature: MA Experiment 20001556 PARAMETER Experiment Name: At_Drought_Soil_Dry_P Parameter: Organism Value: A. thaliana
  misc_feature: MA Experiment 20001556 PARAMETER Experiment Name: At_Drought_Soil_Dry_P Parameter: Plant Line Value: WS
  misc_feature: MA Experiment 20001556 PARAMETER Experiment Name: At_Drought_Soil_Dry_P Parameter: Post Timepoint (hr) Value: None
  misc_feature: MA Experiment 20001556 PARAMETER Experiment Name: At_Drought_Soil_Dry_P Parameter: Post-Treatment Value: None
  misc_feature: MA Experiment 20001556 PARAMETER Experiment Name: At_Drought_Soil_Dry_P Parameter: Timepoint (day) Value: 12
  misc_feature: MA Experiment 20001556 PARAMETER Experiment Name: At_Drought_Soil_Dry_P Parameter: Treatment Value: Drought vs. No Drought
  misc_feature: MA Experiment ID: 20001557 Result: Up-regulated in Transcription
  misc_feature: MA Experiment 20001557 PARAMETER Experiment Name: At_Drought_Soil_Dry_P Parameter: Age (day) Value: 27
  misc_feature: MA Experiment 20001557 PARAMETER Experiment Name: At_Drought_Soil_Dry_P Parameter: Organism Value: A. thaliana
  misc_feature: MA Experiment 20001557 PARAMETER Experiment Name: At_Drought_Soil_Dry_P Parameter: Plant Line Value: WS
  misc_feature: MA Experiment 20001557 PARAMETER Experiment Name: At_Drought_Soil_Dry_P Parameter: Post Timepoint (hr) Value: 3
  misc_feature: MA Experiment 20001557 PARAMETER Experiment Name: At_Drought_Soil_Dry_P Parameter: Post-Treatment Value: Re-Water vs. No Drought
  misc_feature: MA Experiment 20001557 PARAMETER Experiment Name: At_Drought_Soil_Dry_P Parameter: Timepoint (day) Value: 13
  misc_feature: MA Experiment 20001557 PARAMETER Experiment Name: At_Drought_Soil_Dry_P Parameter: Treatment Value: Drought vs. No Drought
  misc_feature: MA Experiment ID: 20001559 Result: Up-regulated in Transcription
  misc_feature: MA Experiment 20001559 PARAMETER Experiment Name: At_Drought_Soil_Dry_P Parameter: Age (day) Value: 28
  misc_feature: MA Experiment 20001559 PARAMETER Experiment Name: At_Drought_Soil_Dry_P Parameter: Organism Value: A. thaliana
  misc_feature: MA Experiment 20001559 PARAMETER Experiment Name: At_Drought_Soil_Dry_P Parameter: Plant Line Value: WS
  misc_feature: MA Experiment 20001559 PARAMETER Experiment Name: At_Drought_Soil_Dry_P Parameter: Post Timepoint (hr) Value: 29
  misc_feature: MA Experiment 20001559 PARAMETER Experiment Name: At_Drought_Soil_Dry_P Parameter: Post-Treatment Value: Re-Water vs. No Drought
  misc_feature: MA Experiment 20001559 PARAMETER Experiment Name: At_Drought_Soil_Dry_P Parameter: Timepoint (day) Value: 14
  misc_feature: MA Experiment 20001559 PARAMETER Experiment Name: At_Drought_Soil_Dry_P Parameter: Treatment Value: Drought vs. No Drought
  misc_feature: MA Experiment ID: 20001560 Result: Up-regulated in Transcription
  misc_feature: MA Experiment 20001560 PARAMETER Experiment Name: At_Drought_Soil_Dry_P Parameter: Age (day) Value: 28
  misc_feature: MA Experiment 20001560 PARAMETER Experiment Name: At_Drought_Soil_Dry_P Parameter: Organism Value: A. thaliana
  misc_feature: MA Experiment 20001560 PARAMETER Experiment Name: At_Drought_Soil_Dry_P Parameter: Plant Line Value: WS
  misc_feature: MA Experiment 20001560 PARAMETER Experiment Name: At_Drought_Soil_Dry_P Parameter: Post Timepoint (hr) Value: None
  misc_feature: MA Experiment 20001560 PARAMETER Experiment Name: At_Drought_Soil_Dry_P Parameter: Post-Treatment Value: None
  misc_feature: MA Experiment 20001560 PARAMETER Experiment Name: At_Drought_Soil_Dry_P Parameter: Timepoint (day) Value: 14
  misc_feature: MA Experiment 20001560 PARAMETER Experiment Name: At_Drought_Soil_Dry_P Parameter: Treatment Value: Drought vs. No Drought
  misc_feature: MA Experiment ID: 20001757 Result: Down-regulated in Transcription
  misc_feature: MA Experiment 20001757 PARAMETER Experiment Name: At_50mM_NH4NO3_L-to-H_P Parameter: Timepoint (hr) Value: 6
  misc_feature: MA Experiment 20001757 PARAMETER Experiment Name: At_50mM_NH4NO3_L-to-H_P Parameter: Tissue Value: Leaf
  misc_feature: MA Experiment 20001757 PARAMETER Experiment Name: At_50mM_NH4NO3_L-to-H_P Parameter: Treatment Value: 50mM NH4NO3 vs 100mM Mannitol
gtatttgttcttgcttgctaaagtttttttgctctgtacggtgacaagaccagagagatgaagttattgagcaatagtctaatgttccttcctctgctggctttggctttaaccgcagtttcgtcgcttaaatacagcagaaatgacttccctccaggctttgtctttggctctggcacatcagcttatcaggtggaaggagctgctgacgaagatgggagaactcctagcatttgggatgtttttgctcatgccggacactccggagtagcagctggaaatgttgcatgtgaccagtatcacaaatacaaggaagatgtgaagctcatggcagacatgggattggaggcttacagattctctatatcctggtcaaggcttttaccaagtggaagaggaccaatcaatcccaaggggctacaatactacaacaatcttattgatgaattgatcactcatggaatccagccacatgttacattgcaccactttgatctcccacaggccttagaagatgagtatggaggttggctcagccaagaaatcgtgagagacttcacagcttatgcagatacttgcttcaaggagtttggagatagagtgtcacattggactactataaacgaggtcaatgtgtttgcccttggagggtatgaccagggaataacaccgcctgctcgatgctctcctccatttggacttaattgtaccaaaggaaactcttccattgagccttacattgccgtacacaacatgttgctcgcacacgcttctgcaacaatcttatacaagcaacagtacaaggcaacagctagagtgaatgacttctatattggttggattttacatccgttggtgtttggtgattatcctgagacgatgaagaccaatgttgggtctagattgccagcttttacagaggaggagtcagaacaagttaaaggcgcatttgatttcgttggagtgataaattacatggcgctttatgtcaaagacaactcttcctctctgaaacctaatctccaggatttcaacacagatatagccgtggaaatgaccttggttggaaacacatcaatcgagaatgagtatgcaaatacaccatggagtctgcaacagatacttttgtatgtcaaagaaacttatggaaaccctcctgtctatatcctagagaatggacaaatgactcctcacagctcatcacttgtggacacaacaagggtgaagtatctgagctcgtacattaaagcagtgcttcattcactcaggaaaggatcggacgtaaaagggtattttcagtggtcgttgatggatgtgtttgagctatttggtgggtacgagaggagctttggattattgtacgtggacttcaaggatccttctcttaagaggagccctaaactctctgctcactggtactcttccttcctcaagggaacactgcaccatccatcatatgcttcgtcttgatcatttgatttcaatggttataatgcttagttgtcggaaatgcaaaccattactatgttttatttttgctaaataaaatcattactatgtttttttctttatcatctttacaataaatcaagatataaacattgtatgttagaaaaagccaaataggtattagtctgttatt

SEQ ID NO: 39094 - protein, 470 aa, Arabidopsis thaliana
  peptide (1)..(470): Ceres Seq. ID no. 13645828
  misc_feature (245)..(460): Homolog of NCBI NO: 22330338 NR Description: glycosyl hydrolase family 1 [Arabidopsis thaliana]
  misc_feature (9)..(249): Homolog of NCBI NO: 22330338 NR Description: glycosyl hydrolase family 1 [Arabidopsis thaliana]
  misc_feature (250)..(462): Homolog of NCBI NO: 18417073 NR Description: glycosyl hydrolase family 1 [Arabidopsis
  misc_feature (1)..(253): Homolog of NCBI NO: 18417073 NR Description: glycosyl hydrolase family 1 [Arabidopsis
  misc_feature (250)..(460): Homolog of NCBI NO: 22328869 NR Description: glycosyl hydrolase family 1 [Arabidopsis thaliana]
  misc_feature (4)..(249): Homolog of NCBI NO: 22328869 NR Description: glycosyl hydrolase family 1 [Arabidopsis thaliana]
  misc_feature (249)..(469): Homolog of NCBI NO: 25289480 NR Description: F22D16.15 protein - Arabidopsis thaliana
  misc_feature (1)..(249): Homolog of NCBI NO: 25289480 NR Description: F22D16.15 protein - Arabidopsis thaliana
  misc_feature (1)..(470): Homolog of NCBI NO: 30678403 NR Description: glycosyl hydrolase family 1 [Arabidopsis thaliana]
  misc_feature (1)..(470): Homolog of NCBI NO: 18379020 NR Description: glycosyl hydrolase family 1 [Arabidopsis
MKLLSNSLMFLPLLALALTAVSSLKYSRNDFPPGFVFGSGTSAYQVEGAADEDGRTPSIWDVFAHAGHSGVAAGNVACDQYHKYKEDVKLMADMGLEAYRFSISWSRLLPSGRGPINPKGLQYYNNLIDELITHGIQPHVTLHHFDLPQALEDEYGGWLSQEIVRDFTAYADTCFKEFGDRVSHWTTINEVNVFALGGYDQGITPPARCSPPFGLNCTKGNSSIEPYIAVHNMLLAHASATILYKQQYKATARVNDFYIGWILHPLVFGDYPETMKTNVGSRLPAFTEEESEQVKGAFDFVGVINYMALYVKDNSSSLKPNLQDFNTDIAVEMTLVGNTSIENEYANTPWSLQQILLYVKETYGNPPVYILENGQMTPHSSSLVDTTRVKYLSSYIKAVLHSLRKGSDVKGYFQWSLMDVFELFGGYERSFGLLYVDFKDPSLKRSPKLSAHWYSSFLKGTLHHPSYASS

SEQ ID NO: 39095 - protein, 462 aa, Arabidopsis thaliana
  peptide (1)..(462): Ceres Seq. ID no. 13645829
  misc_feature (237)..(452): Homolog of NCBI NO: 22330338 NR Description: glycosyl hydrolase family 1 [Arabidopsis thaliana]
  misc_feature (1)..(241): Homolog of NCBI NO: 22330338 NR Description: glycosyl hydrolase family 1 [Arabidopsis thaliana]
  misc_feature (242)..(454): Homolog of NCBI NO: 18417073 NR Description: glycosyl hydrolase family 1 [Arabidopsis
  misc_feature (1)..(245): Homolog of NCBI NO: 18417073 NR Description: glycosyl hydrolase family 1 [Arabidopsis
  misc_feature (242)..(452): Homolog of NCBI NO: 22328869 NR Description: glycosyl hydrolase family 1 [Arabidopsis thaliana]
  misc_feature (1)..(241): Homolog of NCBI NO: 22328869 NR Description: glycosyl hydrolase family 1 [Arabidopsis thaliana]
  misc_feature (241)..(461): Homolog of NCBI NO: 25289480 NR Description: F22D16.15 protein - Arabidopsis thaliana
  misc_feature (1)..(241): Homolog of NCBI NO: 25289480 NR Description: F22D16.15 protein - Arabidopsis thaliana
  misc_feature (1)..(462): Homolog of NCBI NO: 30678403 NR Description: glycosyl hydrolase family 1 [Arabidopsis thaliana]
  misc_feature (1)..(462): Homolog of NCBI NO: 18379020 NR Description: glycosyl hydrolase family 1 [Arabidopsis
MFLPLLALALTAVSSLKYSRNDFPPGFVFGSGTSAYQVEGAADEDGRTPSIWDVFAHAGHSGVAAGNVACDQYHKYKEDVKLMADMGLEAYRFSISWSRLLPSGRGPINPKGLQYYNNLIDELITHGIQPHVTLHHFDLPQALEDEYGGWLSQEIVRDFTAYADTCFKEFGDRVSHWTTINEVNVFALGGYDQGITPPARCSPPFGLNCTKGNSSIEPYIAVHNMLLAHASATILYKQQYKATARVNDFYIGWILHPLVFGDYPETMKTNVGSRLPAFTEEESEQVKGAFDFVGVINYMALYVKDNSSSLKPNLQDFNTDIAVEMTLVGNTSIENEYANTPWSLQQILLYVKETYGNPPVYILENGQMTPHSSSLVDTTRVKYLSSYIKAVLHSLRKGSDVKGYFQWSLMDVFELFGGYERSFGLLYVDFKDPSLKRSPKLSAHWYSSFLKGTLHHPSYASS

SEQ ID NO: 39096 - protein, 380 aa, Arabidopsis thaliana
  peptide (1)..(380): Ceres Seq. ID no. 13645830
  misc_feature (155)..(370): Homolog of NCBI NO: 22330338 NR Description: glycosyl hydrolase family 1 [Arabidopsis thaliana]
  misc_feature (1)..(159): Homolog of NCBI NO: 22330338 NR Description: glycosyl hydrolase family 1 [Arabidopsis thaliana]
  misc_feature (160)..(372): Homolog of NCBI NO: 18417073 NR Description: glycosyl hydrolase family 1 [Arabidopsis
  misc_feature (1)..(163): Homolog of NCBI NO: 18417073 NR Description: glycosyl hydrolase family 1 [Arabidopsis
  misc_feature (160)..(370): Homolog of NCBI NO: 22328869 NR Description: glycosyl hydrolase family 1 [Arabidopsis thaliana]
  misc_feature (1)..(159): Homolog of NCBI NO: 22328869 NR Description: glycosyl hydrolase family 1 [Arabidopsis thaliana]
  misc_feature (159)..(379): Homolog of NCBI NO: 25289480 NR Description: F22D16.15 protein - Arabidopsis thaliana
  misc_feature (1)..(159): Homolog of NCBI NO: 25289480 NR Description: F22D16.15 protein - Arabidopsis thaliana
  misc_feature (1)..(380): Homolog of NCBI NO: 30678403 NR Description: glycosyl hydrolase family 1 [Arabidopsis thaliana]
  misc_feature (1)..(380): Homolog of NCBI NO: 18379020 NR Description: glycosyl hydrolase family 1 [Arabidopsis
MADMGLEAYRFSISWSRLLPSGRGPINPKGLQYYNNLIDELITHGIQPHVTLHHFDLPQALEDEYGGWLSQEIVRDFTAYADTCFKEFGDRVSHWTTINEVNVFALGGYDQGITPPARCSPPFGLNCTKGNSSIEPYIAVHNMLLAHASATILYKQQYKATARVNDFYIGWILHPLVFGDYPETMKTNVGSRLPAFTEEESEQVKGAFDFVGVINYMALYVKDNSSSLKPNLQDFNTDIAVEMTLVGNTSIENEYANTPWSLQQILLYVKETYGNPPVYILENGQMTPHSSSLVDTTRVKYLSSYIKAVLHSLRKGSDVKGYFQWSLMDVFELFGGYERSFGLLYVDFKDPSLKRSPKLSAHWYSSFLKGTLHHPSYASS

SEQ ID NO: 39097 - DNA, 1157 bp, Arabidopsis thaliana
  misc_feature (1)..(1157): Ceres Seq. ID no. 12371955
  misc_feature: MA Experiment ID: 108462 Result: Up-regulated in Transcription
  misc_feature: MA Experiment 108462 PARAMETER Experiment Name: At_Germinating_Seeds_cDNA_P Parameter: Age (day) Value: 2 vs. 0
  misc_feature: MA Experiment 108462 PARAMETER Experiment Name: At_Germinating_Seeds_cDNA_P Parameter: Tissue Value: Germinating Seeds
  misc_feature: MA Experiment ID: 108579 Result: Up-regulated in Transcription
  misc_feature: MA Experiment 108579 PARAMETER Experiment Name: At_4deg_Cold_cDNA_P Parameter: Temperature (deg C) Value: 4 vs. 22
  misc_feature: MA Experiment 108579 PARAMETER Experiment Name: At_4deg_Cold_cDNA_P Parameter: Timepoint (hr) Value: 6
  misc_feature: MA Experiment 108579 PARAMETER Experiment Name: At_4deg_Cold_cDNA_P Parameter: Tissue Value: Aerial
  misc_feature: MA Experiment ID: 20000234 Result: Down-regulated in Transcription
  misc_feature: MA Experiment 20000234 PARAMETER Experiment Name: At_Siliques_P Parameter: Age (day) Value: 21
  misc_feature: MA Experiment 20000234 PARAMETER Experiment Name: At_Siliques_P Parameter: Organism Value: A. thaliana
  misc_feature: MA Experiment 20000234 PARAMETER Experiment Name: At_Siliques_P Parameter: Plant Line Value: WS
  misc_feature: MA Experiment 20000234 PARAMETER Experiment Name: At_Siliques_P Parameter: Tissue Value: Less Than 5mm Siliques vs. Whole Plant
  misc_feature: MA Experiment ID: 20000235 Result: Down-regulated in Transcription
  misc_feature: MA Experiment 20000235 PARAMETER Experiment Name: At_Siliques_P Parameter: Age (day) Value: 21
  misc_feature: MA Experiment 20000235 PARAMETER Experiment Name: At_Siliques_P Parameter: Organism Value: A. thaliana
  misc_feature: MA Experiment 20000235 PARAMETER Experiment Name: At_Siliques_P Parameter: Plant Line Value: WS
  misc_feature: MA Experiment 20000235 PARAMETER Experiment Name: At_Siliques_P Parameter: Tissue Value: 5-10mm Siliques vs. Whole Plant
  misc_feature: MA Experiment ID: 20000264 Result: Down-regulated in Transcription
  misc_feature: MA Experiment 20000264 PARAMETER Experiment Name: At_Open_Flower_P Parameter: Age (day) Value: 21
  misc_feature: MA Experiment 20000264 PARAMETER Experiment Name: At_Open_Flower_P Parameter: Plant Line Value: WS
  misc_feature: MA Experiment 20000264 PARAMETER Experiment Name: At_Open_Flower_P Parameter: Tissue Value: Open Flower vs. Whole Plant
  misc_feature: MA Experiment ID: 20000265 Result: Down-regulated in Transcription
  misc_feature: MA Experiment 20000265 PARAMETER Experiment Name: At_Open_Flower_P Parameter: Age (day) Value: 21
  misc_feature: MA Experiment 20000265 PARAMETER Experiment Name: At_Open_Flower_P Parameter: Plant Line Value: WS
  misc_feature: MA Experiment 20000265 PARAMETER Experiment Name: At_Open_Flower_P Parameter: Tissue Value: Closed Flower vs. Whole Plant
  misc_feature: MA Experiment ID: 20000286 Result: Down-regulated in Transcription
  misc_feature: MA Experiment 20000286 PARAMETER Experiment Name: At_Open_Flower_P Parameter: Age (day) Value: 21
  misc_feature: MA Experiment 20000286 PARAMETER Experiment Name: At_Open_Flower_P Parameter: Plant Line Value: WS
  misc_feature: MA Experiment 20000286 PARAMETER Experiment Name: At_Open_Flower_P Parameter: Tissue Value: Half Open vs. Whole Plant
  misc_feature: MA Experiment ID: 20000451 Result: Up-regulated in Transcription
  misc_feature: MA Experiment 20000451 PARAMETER Experiment Name: At_CS6879_Shoots-Roots_P Parameter: Age (day) Value: 14
  misc_feature: MA Experiment 20000451 PARAMETER Experiment Name: At_CS6879_Shoots-Roots_P Parameter: Organism Value: A. thaliana
  misc_feature: MA Experiment 20000451 PARAMETER Experiment Name: At_CS6879_Shoots-Roots_P Parameter: Plant Line Value: CS6879 vs. WS
  misc_feature: MA Experiment 20000451 PARAMETER Experiment Name: At_CS6879_Shoots-Roots_P Parameter: Tissue Value: Roots
  misc_feature: MA Experiment ID: 20000452 Result: Up-regulated in Transcription
  misc_feature: MA Experiment 20000452 PARAMETER Experiment Name: At_CS6879_Shoots-Roots_P Parameter: Age (day) Value: 14
  misc_feature: MA Experiment 20000452 PARAMETER Experiment Name: At_CS6879_Shoots-Roots_P Parameter: Organism Value: A. thaliana
  misc_feature: MA Experiment 20000452 PARAMETER Experiment Name: At_CS6879_Shoots-Roots_P Parameter: Plant Line Value: CS6879 vs. WS
  misc_feature: MA Experiment 20000452 PARAMETER Experiment Name: At_CS6879_Shoots-Roots_P Parameter: Tissue Value: Shoots
  misc_feature: MA Experiment ID: 20000574 Result: Down-regulated in Transcription
  misc_feature: MA Experiment 20000574 PARAMETER Experiment Name: At_100uM_ABA_Mutants__P Parameter: Organism Value: A. thaliana
  misc_feature: MA Experiment 20000574 PARAMETER Experiment Name: At_100uM_ABA_Mutants__P Parameter: Plant Line Value: CS23 vs. Ler wt
  misc_feature: MA Experiment 20000574 PARAMETER Experiment Name: At_100uM_ABA_Mutants__P Parameter: Timepoint (hr) Value: N/A
  misc_feature: MA Experiment 20000574 PARAMETER Experiment Name: At_100uM_ABA_Mutants__P Parameter: Tissue Value: Whole Plant
  misc_feature: MA Experiment 20000574 PARAMETER Experiment Name: At_100uM_ABA_Mutants__P Parameter: Treatment Value: None
atccttaaagatctcgttacggtttttgtcggaattgtttcgatttgttgtgtttctcaataagctctcgcttgtcagagaaacaccggcaacgccgttaaaatagtcaccggagaccatttagcatcgtagagttcgccttttatggcgttcacgtggggatctgctctccggatttctgttctccttatccttgtagctgcaattgtcttagcttgttattttctccctgttgagaagctattgaaggattttttgttatgggttgaacaagatctagggccttggggaccttttgccctagctgttgcgtacattcctcttacagttttggctgttcctgcctcggttctcacgctcggtggtggctacctttttgggctgccaattggttttgtggcggactcagtcggtgctacacttggctcaggagctgcatttctacttggccgtacgattggaaaaccttttgtagttgcaaaattaaaggattatcctcagtttcagtcagtggcactcgccattgagaaatccggcttcaagatatgcttgctgctccggcttgctcctcttctcccattcagcatgttgaactacctcttatctgtcacgccaattcggctaggtccatacttgctttcttcgtggttagggatgatgccaataacacttgcgttagtgtatgttggaacaactctaaaagacctttctgatgtaactcacaagtggagcgagttctcgccaggtcgctgggcgttcttaatttcgagccttgtaatatccgtgatattaatggtgtgtgttacaaaggtggcgaaagacgctctaagaaaagctttagcagagcacggaggagacataaacgaagcggttgcagccttaccggagctgaccgttactgatgatacttcgacggatttaagtgagcctctattgataaagatagatcctcaacaacctcaggatcaagtaaaccatagtcattaaaattaagatgatgaatacttactttgtataatctttattttaacatacaaagcttagttttcttggtttgtatgataataacatagattaaaaattatttttaaaaagttatttttcttagtaactttgagatgtaattattagttcacagggatttaaaatattggatg

SEQ ID NO: 39098 - protein, 280 aa, Arabidopsis thaliana
  peptide (1)..(280): Ceres Seq. ID no. 12371956
  misc_feature (10)..(236): Homolog of NCBI NO: 17232678 NR Description: hypothetical protein [Nostoc sp. PCC 7120]
  misc_feature (26)..(232): Homolog of NCBI NO: 23128177 NR Description: hypothetical protein [Nostoc punctiforme]
  misc_feature (5)..(228): Homolog of NCBI NO: 32476849 NR Description: conserved hypothetical protein [Pirellula sp.]
  misc_feature (7)..(233): Homolog of NCBI NO: 23128176 NR Description: hypothetical protein [Nostoc punctiforme]
  misc_feature (11)..(233): Homolog of NCBI NO: 23042280 NR Description: hypothetical protein [Trichodesmium erythraeum
  misc_feature (1)..(269): Homolog of NCBI NO: 25406732 NR Description: protein F15K9.14 [imported] - Arabidopsis
  misc_feature (1)..(269): Homolog of NCBI NO: 30678508 NR Description: expressed protein [Arabidopsis thaliana]
  misc_feature (1)..(269): Homolog of NCBI NO: 40823094 NR Description: At1g03260 [Arabidopsis thaliana]
  misc_feature (1)..(268): Homolog of NCBI NO: 23617115 NR Description: contains EST AU173803(R3795)~integral membrane
  misc_feature (1)..(280): Homolog of NCBI NO: 30687125 NR Description: expressed protein [Arabidopsis thaliana]
MAFTWGSALRISVLLILVAAIVLACYFLPVEKLLKDFLLWVEQDLGPWGPFALAVAYIPLTVLAVPASVLTLGGGYLFGLPIGFVADSVGATLGSGAAFLLGRTIGKPFVVAKLKDYPQFQSVALAIEKSGFKICLLLRLAPLLPFSMLNYLLSVTPIRLGPYLLSSWLGMMPITLALVYVGTTLKDLSDVTHKWSEFSPGRWAFLISSLVISVILMVCVTKVAKDALRKALAEHGGDINEAVAALPELTVTDDTSTDLSEPLLIKIDPQQPQDQVNHSH

SEQ ID NO: 39099 - DNA, 1133 bp, Arabidopsis thaliana; identical to SEQ ID NO: 29056
  misc_feature (1)..(1133): Ceres Seq. ID no. 12336045
  misc_feature: MA Experiment ID: 20000182 Result: Down-regulated in Transcription
  misc_feature: MA Experiment 20000182 PARAMETER Experiment Name: At_2mM_SA_P Parameter: Age (day) Value: 14
  misc_feature: MA Experiment 20000182 PARAMETER Experiment Name: At_2mM_SA_P Parameter: Organism Value: A. thaliana
  misc_feature: MA Experiment 20000182 PARAMETER Experiment Name: At_2mM_SA_P Parameter: Plant Line Value: WS
  misc_feature: MA Experiment 20000182 PARAMETER Experiment Name: At_2mM_SA_P Parameter: Timepoint (hr) Value: 6
  misc_feature: MA Experiment 20000182 PARAMETER Experiment Name: At_2mM_SA_P Parameter: Tissue Value: Aerial
  misc_feature: MA Experiment 20000182 PARAMETER Experiment Name: At_2mM_SA_P Parameter: Treatment Value: 2mM SA vs. No Treatment
  misc_feature: MA Experiment ID: 20000184 Result: Up-regulated in Transcription
  misc_feature: MA Experiment 20000184 PARAMETER Experiment Name: At_Shoots__P Parameter: Age (day) Value: 7
  misc_feature: MA Experiment 20000184 PARAMETER Experiment Name: At_Shoots__P Parameter: Tissue Value: Shoots vs. Whole Plant
  misc_feature: MA Experiment ID: 20000234 Result: Down-regulated in Transcription
  misc_feature: MA Experiment 20000234 PARAMETER Experiment Name: At_Siliques_P Parameter: Age (day) Value: 21
  misc_feature: MA Experiment 20000234 PARAMETER Experiment Name: At_Siliques_P Parameter: Organism Value: A. thaliana
  misc_feature: MA Experiment 20000234 PARAMETER Experiment Name: At_Siliques_P Parameter: Plant Line Value: WS
  misc_feature: MA Experiment 20000234 PARAMETER Experiment Name: At_Siliques_P Parameter: Tissue Value: Less Than 5mm Siliques vs. Whole Plant
  misc_feature: MA Experiment ID: 20000235 Result: Down-regulated in Transcription
  misc_feature: MA Experiment 20000235 PARAMETER Experiment Name: At_Siliques_P Parameter: Age (day) Value: 21
  misc_feature: MA Experiment 20000235 PARAMETER Experiment Name: At_Siliques_P Parameter: Organism Value: A. thaliana
  misc_feature: MA Experiment 20000235 PARAMETER Experiment Name: At_Siliques_P Parameter: Plant Line Value: WS
  misc_feature: MA Experiment 20000235 PARAMETER Experiment Name: At_Siliques_P Parameter: Tissue Value: 5-10mm Siliques vs. Whole Plant
  misc_feature: MA Experiment ID: 20000264 Result: Down-regulated in Transcription
  misc_feature: MA Experiment 20000264 PARAMETER Experiment Name: At_Open_Flower_P Parameter: Age (day) Value: 21
  misc_feature: MA Experiment 20000264 PARAMETER Experiment Name: At_Open_Flower_P Parameter: Plant Line Value: WS
  misc_feature: MA Experiment 20000264 PARAMETER Experiment Name: At_Open_Flower_P Parameter: Tissue Value: Open Flower vs. Whole Plant
  misc_feature: MA Experiment ID: 20000265 Result: Down-regulated in Transcription
  misc_feature: MA Experiment 20000265 PARAMETER Experiment Name: At_Open_Flower_P Parameter: Age (day) Value: 21
  misc_feature: MA Experiment 20000265 PARAMETER Experiment Name: At_Open_Flower_P Parameter: Plant Line Value: WS
  misc_feature: MA Experiment 20000265 PARAMETER Experiment Name: At_Open_Flower_P Parameter: Tissue Value: Closed Flower vs. Whole Plant
  misc_feature: MA Experiment ID: 20000308 Result: Down-regulated in Transcription
  misc_feature: MA Experiment 20000308 PARAMETER Experiment Name: At_100mM_NaCl__P Parameter: Age (day) Value: 17
  misc_feature: MA Experiment 20000308 PARAMETER Experiment Name: At_100mM_NaCl__P Parameter: Organism Value: A. thaliana
  misc_feature: MA Experiment 20000308 PARAMETER Experiment Name: At_100mM_NaCl__P Parameter: Plant Line Value: WS
  misc_feature: MA Experiment 20000308 PARAMETER Experiment Name: At_100mM_NaCl__P Parameter: Timepoint (hr) Value: 72
  misc_feature: MA Experiment 20000308 PARAMETER Experiment Name: At_100mM_NaCl__P Parameter: Tissue Value: Whole Plant
  misc_feature: MA Experiment 20000308 PARAMETER Experiment Name: At_100mM_NaCl__P Parameter: Treatment Value: 100mM NaCl vs. No Treatment
  misc_feature: MA Experiment ID: 20001247 Result: Up-regulated in Transcription
  misc_feature: MA Experiment 20001247 PARAMETER Experiment Name: At_Far-red-induction_P Parameter: Age (day) Value: 7
  misc_feature: MA Experiment 20001247 PARAMETER Experiment Name: At_Far-red-induction_P Parameter: Light Value: Far-red vs. White
  misc_feature: MA Experiment 20001247 PARAMETER Experiment Name: At_Far-red-induction_P Parameter: Organism Value: A. thaliana
  misc_feature: MA Experiment 20001247 PARAMETER Experiment Name: At_Far-red-induction_P Parameter: Plant Line Value: Columbia
  misc_feature: MA Experiment 20001247 PARAMETER Experiment Name: At_Far-red-induction_P Parameter: Timepoint (hr) Value: 1
  misc_feature: MA Experiment 20001247 PARAMETER Experiment Name: At_Far-red-induction_P Parameter: Tissue Value: Whole Plant
  misc_feature: MA Experiment ID: 20001450 Result: Up-regulated in Transcription
  misc_feature: MA Experiment 20001450 PARAMETER Experiment Name: At_Far-red-induction_P Parameter: Age (day) Value: 7
  misc_feature: MA Experiment 20001450 PARAMETER Experiment Name: At_Far-red-induction_P Parameter: Light Value: Far-red vs. White
  misc_feature: MA Experiment 20001450 PARAMETER Experiment Name: At_Far-red-induction_P Parameter: Organism Value: A. thaliana
  misc_feature: MA Experiment 20001450 PARAMETER Experiment Name: At_Far-red-induction_P Parameter: Plant Line Value: Columbia
  misc_feature: MA Experiment 20001450 PARAMETER Experiment Name: At_Far-red-induction_P Parameter: Timepoint (hr) Value: 8
  misc_feature: MA Experiment 20001450 PARAMETER Experiment Name: At_Far-red-induction_P Parameter: Tissue Value: Whole Plant
  misc_feature: MA Experiment ID: 20001451 Result: Up-regulated in Transcription
  misc_feature: MA Experiment 20001451 PARAMETER Experiment Name: At_Far-red-induction_P Parameter: Age (day) Value: 7
  misc_feature: MA Experiment 20001451 PARAMETER Experiment Name: At_Far-red-induction_P Parameter: Light Value: Far-red vs. White
  misc_feature: MA Experiment 20001451 PARAMETER Experiment Name: At_Far-red-induction_P Parameter: Organism Value: A. thaliana
  misc_feature: MA Experiment 20001451 PARAMETER Experiment Name: At_Far-red-induction_P Parameter: Plant Line Value: Columbia
  misc_feature: MA Experiment 20001451 PARAMETER Experiment Name: At_Far-red-induction_P Parameter: Timepoint (hr) Value: 24
  misc_feature: MA Experiment 20001451 PARAMETER Experiment Name: At_Far-red-induction_P Parameter: Tissue Value: Whole Plant
  misc_feature: MA Experiment ID: 20001555 Result: Down-regulated in Transcription
  misc_feature: MA Experiment 20001555 PARAMETER Experiment Name: At_Drought_Soil_Dry_P Parameter: Age (day) Value: 24
  misc_feature: MA Experiment 20001555 PARAMETER Experiment Name: At_Drought_Soil_Dry_P Parameter: Organism Value: A. thaliana
  misc_feature: MA Experiment 20001555 PARAMETER Experiment Name: At_Drought_Soil_Dry_P Parameter: Plant Line Value: WS
  misc_feature: MA Experiment 20001555 PARAMETER Experiment Name: At_Drought_Soil_Dry_P Parameter: Post Timepoint (hr) Value: None
  misc_feature: MA Experiment 20001555 PARAMETER Experiment Name: At_Drought_Soil_Dry_P Parameter: Post-Treatment Value: None
  misc_feature: MA Experiment 20001555 PARAMETER Experiment Name: At_Drought_Soil_Dry_P Parameter: Timepoint (day) Value: 10
  misc_feature: MA Experiment 20001555 PARAMETER Experiment Name: At_Drought_Soil_Dry_P Parameter: Treatment Value: Drought vs. No Drought
  misc_feature: MA Experiment ID: 20001556 Result: Down-regulated in Transcription
  misc_feature: MA Experiment 20001556 PARAMETER Experiment Name: At_Drought_Soil_Dry_P Parameter: Age (day) Value: 26
  misc_feature: MA Experiment 20001556 PARAMETER Experiment Name: At_Drought_Soil_Dry_P Parameter: Organism Value: A. thaliana
  misc_feature: MA Experiment 20001556 PARAMETER Experiment Name: At_Drought_Soil_Dry_P Parameter: Plant Line Value: WS
  misc_feature: MA Experiment 20001556 PARAMETER Experiment Name: At_Drought_Soil_Dry_P Parameter: Post Timepoint (hr) Value: None
  misc_feature: MA Experiment 20001556 PARAMETER Experiment Name: At_Drought_Soil_Dry_P Parameter: Post-Treatment Value: None
  misc_feature: MA Experiment 20001556 PARAMETER Experiment Name: At_Drought_Soil_Dry_P Parameter: Timepoint (day) Value: 12
  misc_feature: MA Experiment 20001556 PARAMETER Experiment Name: At_Drought_Soil_Dry_P Parameter: Treatment Value: Drought vs. No Drought
  misc_feature: MA Experiment ID: 20001558 Result: Down-regulated in Transcription
  misc_feature: MA Experiment 20001558 PARAMETER Experiment Name: At_Drought_Soil_Dry_P Parameter: Age (day) Value: 27
  misc_feature: MA Experiment 20001558 PARAMETER Experiment Name: At_Drought_Soil_Dry_P Parameter: Organism Value: A. thaliana
  misc_feature: MA Experiment 20001558 PARAMETER Experiment Name: At_Drought_Soil_Dry_P Parameter: Plant Line Value: WS
  misc_feature: MA Experiment 20001558 PARAMETER Experiment Name: At_Drought_Soil_Dry_P Parameter: Post Timepoint (hr) Value: 6
  misc_feature: MA Experiment 20001558 PARAMETER Experiment Name: At_Drought_Soil_Dry_P Parameter: Post-Treatment Value: Re-Water vs. No Drought
  misc_feature: MA Experiment 20001558 PARAMETER Experiment Name: At_Drought_Soil_Dry_P Parameter: Timepoint (day) Value: 13
  misc_feature: MA Experiment 20001558 PARAMETER Experiment Name: At_Drought_Soil_Dry_P Parameter: Treatment Value: Drought vs. No Drought
  misc_feature: MA Experiment ID: 20001904 Result: Down-regulated in Transcription
  misc_feature: MA Experiment 20001904 PARAMETER Experiment Name: At_Drought_Reproduction_P Parameter: Age (day) Value: 37
  misc_feature: MA Experiment 20001904 PARAMETER Experiment Name: At_Drought_Reproduction_P Parameter: Organism Value: A. thaliana
  misc_feature: MA Experiment 20001904 PARAMETER Experiment Name: At_Drought_Reproduction_P Parameter: Plant Line Value: WS
  misc_feature: MA Experiment 20001904 PARAMETER Experiment Name: At_Drought_Reproduction_P Parameter: Timepoint (day) Value: 7
  misc_feature: MA Experiment 20001904 PARAMETER Experiment Name: At_Drought_Reproduction_P Parameter: Tissue Value: Rosettes
  misc_feature: MA Experiment 20001904 PARAMETER Experiment Name: At_Drought_Reproduction_P Parameter: Treatment Value: Drought vs. No Drought

SEQ ID NO: 39100 - protein, 285 aa, Arabidopsis thaliana; identical to SEQ ID NO: 29057
  peptide (1)..(285): Ceres Seq. ID no. 12336046
  misc_feature (20)..(284): Pfam Name: Plant protein of unknown function (DUF868) Pfam Description: Plant protein of unknown function (DUF868)
  misc_feature (20)..(284): Pfam Name: Plant protein of unknown function (DUF868) Pfam Description: Plant protein of unknown function (DUF868)
  misc_feature (20)..(284): Pfam Name: Plant protein of unknown function (DUF868) Pfam Description: Plant protein of unknown function (DUF868)
  misc_feature (21)..(285): Homolog of NCBI NO: 18397034 NR Description: expressed protein
  misc_feature (21)..(285): Homolog of NCBI NO: 15241702 NR Description: putative protein
  misc_feature (25)..(283): Homolog of NCBI NO: 22331055 NR Description: hypothetical protein; protein id: At3g13229.1
  misc_feature (1)..(65): Homolog of NCBI NO: 20804936 NR Description: P0456E05.14 [Oryza sativa (japonica
  misc_feature (70)..(285): Homolog of NCBI NO: 20804936 NR Description: P0456E05.14 [Oryza sativa (japonica
  misc_feature (21)..(285): Homolog of NCBI NO: 18397034 NR Description: expressed protein
  misc_feature (25)..(283): Homolog of NCBI NO: 22331055 NR Description: hypothetical protein; protein id: At3g13229.1
  misc_feature (70)..(285): Homolog of NCBI NO: 20804936 NR Description: P0456E05.14 [Oryza sativa (japonica
  misc_feature (1)..(65): Homolog of NCBI NO: 20804936 NR Description: P0456E05.14 [Oryza sativa (japonica
  misc_feature (25)..(283): Homolog of NCBI NO: 22331055 NR Description: hypothetical protein; protein id: At3g13229.1
  misc_feature (21)..(285): Homolog of NCBI NO: 15241702 NR Description: putative protein
  misc_feature (21)..(285): Homolog of NCBI NO: 18397034 NR Description: expressed protein
  misc_feature (1)..(285): Homolog of NCBI NO: 15235452 NR Description: putative protein
  misc_feature (4)..(259): Homolog of NCBI NO: 15228105 NR Description: hypothetical protein; protein id: At2g04220.1
  misc_feature (1)..(250): Homolog of NCBI NO: 15238927 NR Description: putative protein; protein id: At5g48270.1
  misc_feature (251)..(285): Homolog of NCBI NO: 15238927 NR Description: putative protein; protein id: At5g48270.1
  misc_feature (58)..(259): Homolog of NCBI NO: 25334990 NR Description: hypothetical protein At2g04220 [imported] -
  misc_feature (1)..(285): Homolog of NCBI NO: 15235452 NR Description: putative protein
  misc_feature (4)..(259): Homolog of NCBI NO: 15228105 NR Description: hypothetical protein; protein id: At2g04220.1
  misc_feature (1)..(250): Homolog of NCBI NO: 15238927 NR Description: putative protein; protein id: At5g48270.1
  misc_feature (251)..(285): Homolog of NCBI NO: 15238927 NR Description: putative protein; protein id: At5g48270.1
  misc_feature (58)..(259): Homolog of NCBI NO: 25334990 NR Description: hypothetical protein At2g04220 [imported] -
  misc_feature (70)..(285): Homolog of NCBI NO: 20804936 NR Description: P0456E05.14 [Oryza sativa (japonica
  misc_feature (1)..(65): Homolog of NCBI NO: 20804936 NR Description: P0456E05.14 [Oryza sativa (japonica
  misc_feature (21)..(285): Homolog of NCBI NO: 15241702 NR Description: putative protein
  misc_feature (58)..(259): Homolog of NCBI NO: 25334990 NR Description: hypothetical protein At2g04220 [imported] -
  misc_feature (251)..(285): Homolog of NCBI NO: 15238927 NR Description: putative protein; protein id: At5g48270.1
  misc_feature (1)..(250): Homolog of NCBI NO: 15238927 NR Description: putative protein; protein id: At5g48270.1
  misc_feature (4)..(259): Homolog of NCBI NO: 15228105 NR Description: hypothetical protein; protein id: At2g04220.1
  misc_feature (1)..(285): Homolog of NCBI NO: 15235452 NR Description: putative protein

SEQ ID NO: 39101 - protein, 251 aa, Arabidopsis thaliana; identical to SEQ ID NO: 29058
  peptide (1)..(251): Ceres Seq. ID no. 12336047
  misc_feature (1)..(250): Pfam Name: Plant protein of unknown function (DUF868) Pfam Description: Plant protein of unknown function (DUF868)
  misc_feature (1)..(250): Pfam Name: Plant protein of unknown function (DUF868) Pfam Description: Plant protein of unknown function (DUF868)
  misc_feature (1)..(250): Pfam Name: Plant protein of unknown function (DUF868) Pfam Description: Plant protein of unknown function (DUF868)
  misc_feature (1)..(251): Homolog of NCBI NO: 18397034 NR Description: expressed protein
  misc_feature (1)..(251): Homolog of NCBI NO: 15241702 NR Description: putative protein
  misc_feature (1)..(249): Homolog of NCBI NO: 22331055 NR Description: hypothetical protein; protein id: At3g13229.1
  misc_feature (1)..(31): Homolog of NCBI NO: 20804936 NR Description: P0456E05.14 [Oryza sativa (japonica
  misc_feature (36)..(251): Homolog of NCBI NO: 20804936 NR Description: P0456E05.14 [Oryza sativa (japonica
  misc_feature (1)..(251): Homolog of NCBI NO: 18397034 NR Description: expressed protein
  misc_feature (1)..(249): Homolog of NCBI NO: 22331055 NR Description: hypothetical protein; protein id: At3g13229.1
  misc_feature (36)..(251): Homolog of NCBI NO: 20804936 NR Description: P0456E05.14 [Oryza sativa (japonica
  misc_feature (1)..(31): Homolog of NCBI NO: 20804936 NR Description: P0456E05.14 [Oryza sativa (japonica
  misc_feature (1)..(249): Homolog of NCBI NO: 22331055 NR Description: hypothetical protein; protein id: At3g13229.1
  misc_feature (1)..(251): Homolog of NCBI NO: 15241702 NR Description: putative protein
  misc_feature (1)..(251): Homolog of NCBI NO: 18397034 NR Description: expressed protein
  misc_feature (1)..(251): Homolog of NCBI NO: 15235452 NR Description: putative protein
  misc_feature (1)..(225): Homolog of NCBI NO: 15228105 NR Description: hypothetical protein; protein id: At2g04220.1
  misc_feature (1)..(216): Homolog of NCBI NO: 15238927 NR Description: putative protein; protein id: At5g48270.1
  misc_feature (217)..(251): Homolog of NCBI NO: 15238927 NR Description: putative protein; protein id: At5g48270.1
  misc_feature (24)..(225): Homolog of NCBI NO: 25334990 NR Description: hypothetical protein At2g04220 [imported] -
  misc_feature (1)..(251): Homolog of NCBI NO: 15235452 NR Description: putative protein
  misc_feature (1)..(225): Homolog of NCBI NO: 15228105 NR Description: hypothetical protein; protein id: At2g04220.1
  misc_feature (1)..(216): Homolog of NCBI NO: 15238927 NR Description: putative protein; protein id: At5g48270.1
  misc_feature (217)..(251): Homolog of NCBI NO: 15238927 NR Description: putative protein; protein id: At5g48270.1
  misc_feature (24)..(225): Homolog of NCBI NO: 25334990 NR Description: hypothetical protein At2g04220 [imported] -
  misc_feature (36)..(251): Homolog of NCBI NO: 20804936 NR Description: P0456E05.14 [Oryza sativa (japonica
  misc_feature (1)..(31): Homolog of NCBI NO: 20804936 NR Description: P0456E05.14 [Oryza sativa (japonica
  misc_feature (1)..(251): Homolog of NCBI NO: 15241702 NR Description: putative protein
  misc_feature (24)..(225): Homolog of NCBI NO: 25334990 NR Description: hypothetical protein At2g04220 [imported] -
  misc_feature (217)..(251): Homolog of NCBI NO: 15238927 NR Description: putative protein; protein id: At5g48270.1
  misc_feature (1)..(216): Homolog of NCBI NO: 15238927 NR Description: putative protein; protein id: At5g48270.1
  misc_feature (1)..(225): Homolog of NCBI NO: 15228105 NR Description: hypothetical protein; protein id: At2g04220.1
  misc_feature (1)..(251): Homolog of NCBI NO: 15235452 NR Description: putative protein

SEQ ID NO: 39102 - protein, 235 aa, Arabidopsis thaliana; identical to SEQ ID NO: 29059
  peptide (1)..(235): Ceres Seq. ID no. 12336048
  misc_feature (1)..(234): Pfam Name: Plant protein of unknown function (DUF868) Pfam Description: Plant protein of unknown function (DUF868)
  misc_feature (1)..(234): Pfam Name: Plant protein of unknown function (DUF868) Pfam Description: Plant protein of unknown function (DUF868)
  misc_feature (1)..(234): Pfam Name: Plant protein of unknown function (DUF868) Pfam Description: Plant protein of unknown function (DUF868)
  misc_feature (1)..(235): Homolog of NCBI NO: 18397034 NR Description: expressed protein
  misc_feature (1)..(235): Homolog of NCBI NO: 15241702 NR Description: putative protein
  misc_feature (1)..(233): Homolog of NCBI NO: 22331055 NR Description: hypothetical protein; protein id: At3g13229.1
  misc_feature (1)..(15): Homolog of NCBI NO: 20804936 NR Description: P0456E05.14 [Oryza sativa (japonica
  misc_feature (20)..(235): Homolog of NCBI NO: 20804936 NR Description: P0456E05.14 [Oryza sativa (japonica
  misc_feature (1)..(235): Homolog of NCBI NO: 18397034 NR Description: expressed protein
  misc_feature (1)..(233): Homolog of NCBI NO: 22331055 NR Description: hypothetical protein; protein id: At3g13229.1
  misc_feature (20)..(235): Homolog of NCBI NO: 20804936 NR Description: P0456E05.14 [Oryza sativa (japonica
  misc_feature (1)..(15): Homolog of NCBI NO: 20804936 NR Description: P0456E05.14 [Oryza sativa (japonica
  misc_feature (1)..(233): Homolog of NCBI NO: 22331055 NR Description: hypothetical protein; protein id: At3g13229.1
  misc_feature (1)..(235): Homolog of NCBI NO: 15241702 NR Description: putative protein
  misc_feature (1)..(235): Homolog of NCBI NO: 18397034 NR Description: expressed protein
  misc_feature (1)..(235): Homolog of NCBI NO: 15235452 NR Description: putative protein
  misc_feature (1)..(209): Homolog of NCBI NO: 15228105 NR Description: hypothetical protein; protein id: At2g04220.1
  misc_feature (1)..(200): Homolog of NCBI NO: 15238927 NR Description: putative protein; protein id: At5g48270.1
  misc_feature (201)..(235): Homolog of NCBI NO: 15238927 NR Description: putative protein; protein id: At5g48270.1
  misc_feature (8)..(209): Homolog of NCBI NO: 25334990 NR Description: hypothetical protein At2g04220 [imported] -
  misc_feature (1)..(235): Homolog of NCBI NO: 15235452 NR Description: putative protein
  misc_feature (1)..(209): Homolog of NCBI NO: 15228105 NR Description: hypothetical protein; protein id: At2g04220.1
  misc_feature (1)..(200): Homolog of NCBI NO: 15238927 NR Description: putative protein; protein id: At5g48270.1
  misc_feature (201)..(235): Homolog of NCBI NO: 15238927 NR Description: putative protein; protein id: At5g48270.1
  misc_feature (8)..(209): Homolog of NCBI NO: 25334990 NR Description: hypothetical protein At2g04220 [imported] -
  misc_feature (20)..(235): Homolog of NCBI NO: 20804936 NR Description: P0456E05.14 [Oryza sativa (japonica
  misc_feature (1)..(15): Homolog of NCBI NO: 20804936 NR Description: P0456E05.14 [Oryza sativa (japonica
  misc_feature (1)..(235): Homolog of NCBI NO: 15241702 NR Description: putative protein
  misc_feature (8)..(209): Homolog of NCBI NO: 25334990 NR Description: hypothetical protein At2g04220 [imported] -
  misc_feature (201)..(235): Homolog of NCBI NO: 15238927 NR Description: putative protein; protein id: At5g48270.1
  misc_feature (1)..(200): Homolog of NCBI NO: 15238927 NR Description: putative protein; protein id: At5g48270.1
  misc_feature (1)..(209): Homolog of NCBI NO: 15228105 NR Description: hypothetical protein; protein id: At2g04220.1
  misc_feature (1)..(235): Homolog of NCBI NO: 15235452 NR Description: putative protein

SEQ ID NO: 39103 - DNA, 2928 bp, Arabidopsis thaliana
  misc_feature (1)..(2928): Ceres Seq. ID no. 12330169
  misc_feature: MA Experiment ID: 108569 Result: Up-regulated in Transcription
  misc_feature: MA Experiment 108569 PARAMETER Experiment Name: At_0.001%_MeJA__cDNA_P Parameter: Timepoint (hr) Value: 6
  misc_feature: MA Experiment 108569 PARAMETER Experiment Name: At_0.001%_MeJA__cDNA_P Parameter: Tissue Value: Aerial
  misc_feature: MA Experiment 108569 PARAMETER Experiment Name: At_0.001%_MeJA__cDNA_P Parameter: Treatment Value: 0.001% MeJA vs. No Treatment
  misc_feature: MA Experiment ID: 108572 Result: Up-regulated in Transcription
  misc_feature: MA Experiment 108572 PARAMETER Experiment Name: At_Drought_cDNA_P Parameter: Timepoint (hr) Value: 1
  misc_feature: MA Experiment 108572 PARAMETER Experiment Name: At_Drought_cDNA_P Parameter: Tissue Value: Aerial
  misc_feature: MA Experiment 108572 PARAMETER Experiment Name: At_Drought_cDNA_P Parameter: Treatment Value: Drought vs. No Drought
  misc_feature: MA Experiment ID: 108573 Result: Up-regulated in Transcription
  misc_feature: MA Experiment 108573 PARAMETER Experiment Name: At_Drought_cDNA_P Parameter: Timepoint (hr) Value: 6
  misc_feature: MA Experiment 108573 PARAMETER Experiment Name: At_Drought_cDNA_P Parameter: Tissue Value: Aerial
  misc_feature: MA Experiment 108573 PARAMETER Experiment Name: At_Drought_cDNA_P Parameter: Treatment Value: Drought vs. No Drought
  misc_feature: MA Experiment ID: 108577 Result: Down-regulated in Transcription
  misc_feature: MA Experiment 108577 PARAMETER Experiment Name: At_42deg_Heat_cDNA_P Parameter: Temperature (deg C) Value: 42 vs. 22
  misc_feature: MA Experiment 108577 PARAMETER Experiment Name: At_42deg_Heat_cDNA_P Parameter: Timepoint (hr) Value: 6
  misc_feature: MA Experiment 108577 PARAMETER Experiment Name: At_42deg_Heat_cDNA_P Parameter: Tissue Value: Aerial
aaaaactcctaaaccaaattataattgttagtaagttaagtaacagagaacaaaataatactcgtaactcttgtttccaaactataacgtaacttttgttcatcatcttcacagtttctgtttctgtttctaaagattctaaattttgtgttttttttttcctttttctttcgattatttttgattttctgatggaattccgcaaaccctttaagtctcatagctcgtataaacagattataagcaccggaaatcaaaacgagaagacaaagaagaagaagaaactggcgaatcttgacgatggcgacattgctaaaactcagagctctgggtctagtttcgatggaaacagctataagttctggcaagacattgcaacagatgattatacaaagagcgggagtttcgatttcccgcaataccgtgaggagatcacactcgatgtaaacgaagaaacagaggaaacagaggatgtcagcaacaacaacaatttgtccggttctaaagaaacgagagtctctttcaaaataaacagttcaggaactaataatatgtctggttctgtacgttcttgtacatcttcgacttcgttttcatcggccacaatgcggttaaatttagagcagcagttggaggatgaaggagaggtggttgtaagatgttcatcggtgaggaaaacagagcttgtttcgagggcgaaggcgagatcgaggttgatagatccgccacaagaagaggaacaacaatactcgagctggatcgggacatcggatcagttaagatcaggtttacttgggagacactctgatgatattgatgaagaagatgattcttcggctgaagaagatgttccagtggaatatcgaaagttgaaaatggacgcgataacgttgcttcaatggatgagcttaatcgcactcgtagtggcgttagtgttgagtctagcgcttcatacttggagaaaaatgctactctatggagccttcatctgtggaaatgggaagtggtcttgctggttctcatctgcgggaggctggtttcgggatgcggaatacgaatcatcgtcttctttatcgaaagaaacttcctattgaggaaacgggttctttacttcgtatacggtgtgaagactgctgttcagaactgtctctggcttggcctcgtgctcgtcgcttggcatttcttgttcgacaagaaagtagaaagggaaacacaaagcgacgttcttcttctcgtatctaaaatattagtgtgtttcttgttgagcacggtcttatggctgatcaagacactggtggtgaaagttttagcatcttcgttccacgttagtacctactttgatcggattcaagaagctctgtttcatcattacttgatcgagacgttatctgtacctccaatgcttgagttaagcaggattgaggaagaggaagatcggacgcaagatgagatctacaaggtgcagaaaggaggagctgatttatcacccgaactttgttccgctgcgtttcctcaggaaaaaagtggaagtacaatgaacatgaagttctctccaatcattccgaagacgggtggtgataacggaatcacaatggatgatttacacaagatgaatcagaaaaacgtttcagcttggaacatgaagagactgatgaagattgtgagaaatatttccctgactacgttggacgaacaagcgcttcaaaacacgtgtgaagatgaatccactcgacagatacggagcgaaaaagaagctaaagcagctgcaaggaagattttcaagaacgtagctcaacctggcacaaaacacatatacctggaggacttgatgagatttttgcgagtagacgaggcgatgaagacaatgtgtctcttcgaaggcgccttagtgaccaaaaagattactaaatcagccttgaagaactggctggtaaatgctttcagagagagaagagcacttgccttaacactcaatgacaccaaaacagcagtgaacaaactccatcacatgattagttttctcactgccattgtcatcatagtcatatggctgatccttcttgaaatcgctacttccaagtatcttttatttttaacttcacaagttgtactcttagccttcatgtttgggaactctctcaagaccgtcttcgagtcaatcatcttcctcttcatcattcacccttacgatgttggtgatcggttactcatcgacactgtagagatggtggtggaggaaatgaacattctcacaacagttttcttgagagctgacaatctgaagattgtgtatccaaatattcttctatggcagaaagcgatccacaattacaaccgtagtccggatatgggagatgaagttacatgctgtgtccacattactactcctcctgaaaagattgctgcaatcaaacaaagaatatcaagctacattgatagcaagccagagtattggtatccaaaagctgatatcattgtaaaggatgtggaagatttgaacattgtgaggatagcaatatggctgtgtcataaaattaaccatcaaaacatgggagagagatttacaagaagagcgttgttgatcgaggaagtaatcaaaatcctcctcgaactcgacattcaataccggtttcatccacttgatatcaatgttaaaaccatgccaacagttgtctcgagcagagttccaccaggctggtcacaaaaccctgattcaaggtaattatagagatgatgtgaattgtgttatcttaactcttaagtgtgttttagtatgaggtttgattgttgtattttttttttctttttttgtaaaccggttgttgtatatatatgaaggtgaaagcaaagagtgggatcataaacttgtgttatagaaactttatgaaaatagaaactaatgatatttttagtaatgatttttttttt

SEQ ID NO: 39104 - protein, 607 aa, Arabidopsis thaliana
  peptide (1)..(607): Ceres Seq. ID no. 12330170
  misc_feature (369)..(577): Pfam Name: Mechanosensitive ion channel Pfam Description: Mechanosensitive ion channel
  misc_feature (333)..(530): Homolog of NCBI NO: 25411771 NR Description: hypothetical protein At2g17010 [imported] -
  misc_feature (23)..(600): Homolog of NCBI NO: 38345847 NR Description: OSJNBa0084K11.11 [Oryza sativa (japonica
  misc_feature (227)..(303): Homolog of NCBI NO: 30679840 NR Description: expressed protein [Arabidopsis thaliana]
  misc_feature (403)..(602): Homolog of NCBI NO: 15231928 NR Description: hypothetical protein; protein id: At3g14810.1
  misc_feature (25)..(381): Homolog of NCBI NO: 15231928 NR Description: hypothetical protein; protein id: At3g14810.1
  misc_feature (22)..(148): Homolog of NCBI NO: 30679840 NR Description: expressed protein [Arabidopsis thaliana]
  misc_feature (333)..(603): Homolog of NCBI NO: 30679840 NR Description: expressed protein [Arabidopsis thaliana]
  misc_feature (19)..(602): Homolog of NCBI NO: 15220793 NR Description: hypothetical protein; protein id: At1g53470.1
  misc_feature (25)..(602): Homolog of NCBI NO: 11994592 NR Description: gb|AAD30575.1~gene_id:T21E2.7~strong similarity
  misc_feature (26)..(601): Homolog of NCBI NO: 15218429 NR Description: hypothetical protein; protein id: At1g78610.1
MDELNRTRSGVSVESSASYLEKNATLWSLHLWKWEVVLLVLICGRLVSGCGIRIIVFFIERNFLLRKRVLYFVYGVKTAVQNCLWLGLVLVAWHFLFDKKVERETQSDVLLLVSKILVCFLLSTVLWLIKTLVVKVLASSFHVSTYFDRIQEALFHHYLIETLSVPPMLELSRIEEEEDRTQDEIYKVQKGGADLSPELCSAAFPQEKSGSTMNMKFSPIIPKTGGDNGITMDDLHKMNQKNVSAWNMKRLMKIVRNISLTTLDEQALQNTCEDESTRQIRSEKEAKAAARKIFKNVAQPGTKHIYLEDLMRFLRVDEAMKTMCLFEGALVTKKITKSALKNWLVNAFRERRALALTLNDTKTAVNKLHHMISFLTAIVIIVIWLILLEIATSKYLLFLTSQVVLLAFMFGNSLKTVFESIIFLFIIHPYDVGDRLLIDTVEMVVEEMNILTTVFLRADNLKIVYPNILLWQKAIHNYNRSPDMGDEVTCCVHITTPPEKIAAIKQRISSYIDSKPEYWYPKADIIVKDVEDLNIVRIAIWLCHKINHQNMGERFTRRALLIEEVIKILLELDIQYRFHPLDINVKTMPTVVSSRVPPGWSQNPDSR

SEQ ID NO: 39105 - protein, 440 aa, Arabidopsis thaliana
  peptide (1)..(440): Ceres Seq. ID no. 12330171
  misc_feature (202)..(410): Pfam Name: Mechanosensitive ion channel Pfam Description: Mechanosensitive ion channel
  misc_feature (60)..(136): Homolog of NCBI NO: 25411771 NR Description: hypothetical protein At2g17010 [imported] -
  misc_feature (166)..(363): Homolog of NCBI NO: 25411771 NR Description: hypothetical protein At2g17010 [imported] -
  misc_feature (1)..(433): Homolog of NCBI NO: 38345847 NR Description: OSJNBa0084K11.11 [Oryza sativa (japonica
  misc_feature (60)..(136): Homolog of NCBI NO: 30679840 NR Description: expressed protein [Arabidopsis thaliana]
  misc_feature (236)..(435): Homolog of NCBI NO: 15231928 NR Description: hypothetical protein; protein id: At3g14810.1
  misc_feature (1)..(214): Homolog of NCBI NO: 15231928 NR Description: hypothetical protein; protein id: At3g14810.1
  misc_feature (166)..(436): Homolog of NCBI NO: 30679840 NR Description: expressed protein [Arabidopsis thaliana]
  misc_feature (1)..(435): Homolog of NCBI NO: 15220793 NR Description: hypothetical protein; protein id: At1g53470.1
  misc_feature (1)..(435): Homolog of NCBI NO: 11994592 NR Description: gb|AAD30575.1~gene_id:T21E2.7~strong similarity
  misc_feature (1)..(434): Homolog of NCBI NO: 15218429 NR Description: hypothetical protein; protein id: At1g78610.1
MLELSRIEEEEDRTQDEIYKVQKGGADLSPELCSAAFPQEKSGSTMNMKFSPIIPKTGGDNGITMDDLHKMNQKNVSAWNMKRLMKIVRNISLTTLDEQALQNTCEDESTRQIRSEKEAKAAARKIFKNVAQPGTKHIYLEDLMRFLRVDEAMKTMCLFEGALVTKKITKSALKNWLVNAFRERRALALTLNDTKTAVNKLHHMISFLTAIVIIVIWLILLEIATSKYLLFLTSQVVLLAFMFGNSLKTVFESIIFLFIIHPYDVGDRLLIDTVEMVVEEMNILTTVFLRADNLKIVYPNILLWQKAIHNYNRSPDMGDEVTCCVHITTPPEKIAAIKQRISSYIDSKPEYWYPKADIIVKDVEDLNIVRIAIWLCHKINHQNMGERFTRRALLIEEVIKILLELDIQYRFHPLDINVKTMPTVVSSRVPPGWSQNPDSR

SEQ ID NO: 39106 - protein, 395 aa, Arabidopsis thaliana
  peptide (1)..(395): Ceres Seq. ID no. 12330172
  misc_feature (157)..(365): Pfam Name: Mechanosensitive ion channel Pfam Description: Mechanosensitive ion channel
  misc_feature (15)..(91): Homolog of NCBI NO: 25411771 NR Description: hypothetical protein At2g17010 [imported] -
  misc_feature (121)..(318): Homolog of NCBI NO: 25411771 NR Description: hypothetical protein At2g17010 [imported] -
  misc_feature (1)..(388): Homolog of NCBI NO: 38345847 NR Description: OSJNBa0084K11.11 [Oryza sativa (japonica
  misc_feature (15)..(91): Homolog of NCBI NO: 30679840 NR Description: expressed protein [Arabidopsis thaliana]
  misc_feature (191)..(390): Homolog of NCBI NO: 15231928 NR Description: hypothetical protein; protein id: At3g14810.1
  misc_feature (1)..(169): Homolog of NCBI NO: 15231928 NR Description: hypothetical protein; protein id: At3g14810.1
  misc_feature (121)..(391): Homolog of NCBI NO: 30679840 NR Description: expressed protein [Arabidopsis thaliana]
  misc_feature (1)..(390): Homolog of NCBI NO: 15220793 NR Description: hypothetical protein; protein id: At1g53470.1
  misc_feature (1)..(390): Homolog of NCBI NO: 11994592 NR Description: gb|AAD30575.1~gene_id:T21E2.7~strong similarity
  misc_feature (1)..(389): Homolog of NCBI NO: 15218429 NR Description: hypothetical protein; protein id: At1g78610.1
MNMKFSPIIPKTGGDNGITMDDLHKMNQKNVSAWNMKRLMKIVRNISLTTLDEQALQNTCEDESTRQIRSEKEAKAAARKIFKNVAQPGTKHIYLEDLMRFLRVDEAMKTMCLFEGALVTKKITKSALKNWLVNAFRERRALALTLNDTKTAVNKLHHMISFLTAIVIIVIWLILLEIATSKYLLFLTSQVVLLAFMFGNSLKTVFESIIFLFIIHPYDVGDRLLIDTVEMVVEEMNILTTVFLRADNLKIVYPNILLWQKAIHNYNRSPDMGDEVTCCVHITTPPEKIAAIKQRISSYIDSKPEYWYPKADIIVKDVEDLNIVRIAIWLCHKINHQNMGERFTRRALLIEEVIKILLELDIQYRFHPLDINVKTMPTVVSSRVPPGWSQNPDSR

SEQ ID NO: 39107 - DNA, 1836 bp, Arabidopsis thaliana
  misc_feature (1)..(1836): Ceres Seq. ID no. 12329328
  misc_feature: MA Experiment ID: 108434 Result: Up-regulated in Transcription
  misc_feature: MA Experiment 108434 PARAMETER Experiment Name: At_Root_Tips_cDNA_P Parameter: Tissue Value: Root Tips
  misc_feature: MA Experiment ID: 108461 Result: Up-regulated in Transcription
  misc_feature: MA Experiment 108461 PARAMETER Experiment Name: At_Germinating_Seeds_cDNA_P Parameter: Age (day) Value: 1 vs. 0
  misc_feature: MA Experiment 108461 PARAMETER Experiment Name: At_Germinating_Seeds_cDNA_P Parameter: Tissue Value: Germinating Seeds
  misc_feature: MA Experiment ID: 108462 Result: Up-regulated in Transcription
  misc_feature: MA Experiment 108462 PARAMETER Experiment Name: At_Germinating_Seeds_cDNA_P Parameter: Age (day) Value: 2 vs. 0
  misc_feature: MA Experiment 108462 PARAMETER Experiment Name: At_Germinating_Seeds_cDNA_P Parameter: Tissue Value: Germinating Seeds
  misc_feature: MA Experiment ID: 20000179 Result: Up-regulated in Transcription
  misc_feature: MA Experiment 20000179 PARAMETER Experiment Name: At_Germinating_Seeds_P Parameter: Age (hr) Value: 6 vs. 0
  misc_feature: MA Experiment 20000179 PARAMETER Experiment Name: At_Germinating_Seeds_P Parameter: Tissue Value: Germinating Seeds
  misc_feature: MA Experiment ID: 20000180 Result: Up-regulated in Transcription
  misc_feature: MA Experiment 20000180 PARAMETER Experiment Name: At_Germinating_Seeds_P Parameter: Age (hr) Value: 24 vs. 0
  misc_feature: MA Experiment 20000180 PARAMETER Experiment Name: At_Germinating_Seeds_P Parameter: Tissue Value: Germinating Seeds
  misc_feature: MA Experiment ID: 20000794 Result: Up-regulated in Transcription
  misc_feature: MA Experiment 20000794 PARAMETER Experiment Name: At_Petals_P Parameter: Age (day) Value: 23-25 days
  misc_feature: MA Experiment 20000794 PARAMETER Experiment Name: At_Petals_P Parameter: Plant Line Value: WS
  misc_feature: MA Experiment 20000794 PARAMETER Experiment Name: At_Petals_P Parameter: Tissue Value: Petals vs. Whole plant
  misc_feature: MA Experiment ID: 20001451 Result: Down-regulated in Transcription
  misc_feature: MA Experiment 20001451 PARAMETER Experiment Name: At_Far-red-induction_P Parameter: Age (day) Value: 7
  misc_feature: MA Experiment 20001451 PARAMETER Experiment Name: At_Far-red-induction_P Parameter: Light Value: Far-red vs. White
  misc_feature: MA Experiment 20001451 PARAMETER Experiment Name: At_Far-red-induction_P Parameter: Organism Value: A. thaliana
  misc_feature: MA Experiment 20001451 PARAMETER Experiment Name: At_Far-red-induction_P Parameter: Plant Line Value: Columbia
  misc_feature: MA Experiment 20001451 PARAMETER Experiment Name: At_Far-red-induction_P Parameter: Timepoint (hr) Value: 24
  misc_feature: MA Experiment 20001451 PARAMETER Experiment Name: At_Far-red-induction_P Parameter: Tissue Value: Whole Plant
  misc_feature: MA Experiment ID: 20001556 Result: Up-regulated in Transcription
  misc_feature: MA Experiment 20001556 PARAMETER Experiment Name: At_Drought_Soil_Dry_P Parameter: Age (day) Value: 26
  misc_feature: MA Experiment 20001556 PARAMETER Experiment Name: At_Drought_Soil_Dry_P Parameter: Organism Value: A. thaliana
  misc_feature: MA Experiment 20001556 PARAMETER Experiment Name: At_Drought_Soil_Dry_P Parameter: Plant Line Value: WS
  misc_feature: MA Experiment 20001556 PARAMETER Experiment Name: At_Drought_Soil_Dry_P Parameter: Post Timepoint (hr) Value: None
  misc_feature: MA Experiment 20001556 PARAMETER Experiment Name: At_Drought_Soil_Dry_P Parameter: Post-Treatment Value: None
  misc_feature: MA Experiment 20001556 PARAMETER Experiment Name: At_Drought_Soil_Dry_P Parameter: Timepoint (day) Value: 12
  misc_feature: MA Experiment 20001556 PARAMETER Experiment Name: At_Drought_Soil_Dry_P Parameter: Treatment Value: Drought vs. No Drought
gttaatctttttcttcaatctctcgatctgatcgttatcgaaaccgcgcgattctaaccaagtccaggtgacaaatcagctctgctaaaatactcacaaagtctcgtgatcatattttgtggatcacatcattgtcttatttttggaattgcttatcctcgcactagttcactgatttgagatctgtgcagttaattttgtgctccatagcgattccatggcttctttaatgttatctctcggttccacttctctgttaccgcgcgagattaacaaggataagctaaagcttggaacttctgcttcgaacccgttcctaaaagcaaagtcttttagcagagtgactatgacggttgcagtgaagccttctcgtttcgagggtataactatggctccaccagaccctattcttggagtcagtgaagcattcaaagctgacactaacgggatgaaactcaatcttggtgttggtgcttatcgtactgaggaactccagccttatgtgcttaatgttgttaaaaaggcggagaatttgatgttggagagaggagataacaaagagtatcttccaattgaggggttggcagcattcaacaaggctactgctgagttgctatttggagctggtcatcctgttattaaggaacaaagagtagcaacaattcagggtctttcgggaacaggttcactgcgattagcagcggctcttatagagcgttatttccctggagcaaaagttgtgatctcatcaccaacctggggtaatcacaagaatatcttcaatgatgccaaagttccgtggtccgaataccgctactatgatccaaaaacaattggtttggattttgagggaatgatagcagatataaaggaagctccagaaggatccttcatcttgcttcacggatgtgctcacaacccaactggaattgacccaacaccagaacagtgggtaaaaattgctgatgtcattcaggaaaagaaccatatcccatttttcgatgttgcataccagggctttgctagtggaagccttgatgaagatgcagcatctgtgagattatttgctgagcggggaatggagttttttgttgctcagtcatatagtaaaaatttaggtttgtatgcagaaagaattggggcaatcaatgtcgtgtgctcctcagctgatgctgctacaagggtcaagagccagttgaaaaggattgctcggcctatgtactcgaatccaccagttcatggggcgagaatcgtggccaatgtagtgggtgatgtaactatgttcagtgaatggaaagcagagatggaaatgatggcaggaagaataaagacggttagacaagagctgtatgatagcctcgtttcaaaagacaagagcgggaaggactggtccttcattctgaagcaaattggcatgttctctttcaccggcctaaacaaagctcagagcgataacatgacggacaaatggcacgtgtatatgactaaagacgggaggatatcattggccggattatctctggccaaatgcgagtatcttgctgatgcgatcatcgactcataccataacgtaagctgagcttccatctcagtagatgacaataagaaacagttttatataccctttttagcttcttcttgatctttgattgaaaccagatggctaaattaataagctagcatcacactatgattgctagacaattttcaaggaaacttttgatttgatcgtgtttgacaggccttgttgtattgggagactcccatcgagttatagaagaacttgttacgattgtattttacataatttcacaactatacttgaccggaagagtt

SEQ ID NO: 39108 - protein, 453 aa, Arabidopsis thaliana
  peptide (1)..(453): Ceres Seq. ID no. 12329329
  misc_feature (131)..(449): Pfam Name: Aminotransferase class I and II Pfam Description: Aminotransferase class I and II
  misc_feature (1)..(453): Homolog of NCBI NO: 485495 NR Description: aspartate transaminase (EC 2.6.1.1) AAT5
  misc_feature (2)..(453): Homolog of NCBI NO: 2605932 NR Description: aspartate aminotransferase [Lotus corniculatus]
  misc_feature (1)..(453): Homolog of NCBI NO: 25990362 NR Description: aspartate aminotransferase [Phaseolus vulgaris]
  misc_feature (1)..(453): Homolog of NCBI NO: 445118 NR Description: Asp aminotransferase
  misc_feature (1)..(453): Homolog of NCBI NO: 1076500 NR Description: aspartate transaminase (EC 2.6.1.1) - alfalfa
  misc_feature (1)..(453): Homolog of NCBI NO: 21618222 NR Description: aspartate aminotransferase [Arabidopsis thaliana]
  misc_feature (1)..(453): Homolog of NCBI NO: 531555 NR Description: aspartate aminotransferase [Arabidopsis thaliana]
  misc_feature (1)..(453): Homolog of NCBI NO: 15236129 NR Description: aspartate aminotransferase
MASLMLSLGSTSLLPREINKDKLKLGTSASNPFLKAKSFSRVTMTVAVKPSRFEGITMAPPDPILGVSEAFKADTNGMKLNLGVGAYRTEELQPYVLNVVKKAENLMLERGDNKEYLPIEGLAAFNKATAELLFGAGHPVIKEQRVATIQGLSGTGSLRLAAALIERYFPGAKVVISSPTWGNHKNIFNDAKVPWSEYRYYDPKTIGLDFEGMIADIKEAPEGSFILLHGCAHNPTGIDPTPEQWVKIADVIQEKNHIPFFDVAYQGFASGSLDEDAASVRLFAERGMEFFVAQSYSKNLGLYAERIGAINVVCSSADAATRVKSQLKRIARPMYSNPPVHGARIVANVVGDVTMFSEWKAEMEMMAGRIKTVRQELYDSLVSKDKSGKDWSFILKQIGMFSFTGLNKAQSDNMTDKWHVYMTKDGRISLAGLSLAKCEYLADAIIDSYHNVS

SEQ ID NO: 39109 - protein, 449 aa, Arabidopsis thaliana
  peptide (1)..(449): Ceres Seq. ID no. 12329330
  misc_feature (127)..(445): Pfam Name: Aminotransferase class I and II Pfam Description: Aminotransferase class I and II
  misc_feature (1)..(449): Homolog of NCBI NO: 485495 NR Description: aspartate transaminase (EC 2.6.1.1) AAT5
  misc_feature (1)..(449): Homolog of NCBI NO: 2605932 NR Description: aspartate aminotransferase [Lotus corniculatus]
  misc_feature (1)..(449): Homolog of NCBI NO: 25990362 NR Description: aspartate aminotransferase [Phaseolus vulgaris]
  misc_feature (1)..(449): Homolog of NCBI NO: 445118 NR Description: Asp aminotransferase
  misc_feature (1)..(449): Homolog of NCBI NO: 1076500 NR Description: aspartate transaminase (EC 2.6.1.1) - alfalfa
  misc_feature (1)..(449): Homolog of NCBI NO: 21618222 NR Description: aspartate aminotransferase [Arabidopsis thaliana]
  misc_feature (1)..(449): Homolog of NCBI NO: 531555 NR Description: aspartate aminotransferase [Arabidopsis thaliana]
  misc_feature (1)..(449): Homolog of NCBI NO: 15236129 NR Description: aspartate aminotransferase
MLSLGSTSLLPREINKDKLKLGTSASNPFLKAKSFSRVTMTVAVKPSRFEGITMAPPDPILGVSEAFKADTNGMKLNLGVGAYRTEELQPYVLNVVKKAENLMLERGDNKEYLPIEGLAAFNKATAELLFGAGHPVIKEQRVATIQGLSGTGSLRLAAALIERYFPGAKVVISSPTWGNHKNIFNDAKVPWSEYRYYDPKTIGLDFEGMIADIKEAPEGSFILLHGCAHNPTGIDPTPEQWVKIADVIQEKNHIPFFDVAYQGFASGSLDEDAASVRLFAERGMEFFVAQSYSKNLGLYAERIGAINVVCSSADAATRVKSQLKRIARPMYSNPPVHGARIVANVVGDVTMFSEWKAEMEMMAGRIKTVRQELYDSLVSKDKSGKDWSFILKQIGMFSFTGLNKAQSDNMTDKWHVYMTKDGRISLAGLSLAKCEYLADAIIDSYHNVS

SEQ ID NO: 39110 - protein, 410 aa, Arabidopsis thaliana
  peptide (1)..(410): Ceres Seq. ID no. 12329331
  misc_feature (88)..(406): Pfam Name: Aminotransferase class I and II Pfam Description: Aminotransferase class I and II
  misc_feature (1)..(410): Homolog of NCBI NO: 485495 NR Description: aspartate transaminase (EC 2.6.1.1) AAT5
  misc_feature (1)..(410): Homolog of NCBI NO: 2605932 NR Description: aspartate aminotransferase [Lotus corniculatus]
  misc_feature (1)..(410): Homolog of NCBI NO: 25990362 NR Description: aspartate aminotransferase [Phaseolus vulgaris]
  misc_feature (1)..(410): Homolog of NCBI NO: 445118 NR Description: Asp aminotransferase
  misc_feature (1)..(410): Homolog of NCBI NO: 1076500 NR Description: aspartate transaminase (EC 2.6.1.1) - alfalfa
  misc_feature (1)..(410): Homolog of NCBI NO: 21618222 NR Description: aspartate aminotransferase [Arabidopsis thaliana]
  misc_feature (1)..(410): Homolog of NCBI NO: 531555 NR Description: aspartate aminotransferase [Arabidopsis thaliana]
  misc_feature (1)..(410): Homolog of NCBI NO: 15236129 NR Description: aspartate aminotransferase
MTVAVKPSRFEGITMAPPDPILGVSEAFKADTNGMKLNLGVGAYRTEELQPYVLNVVKKAENLMLERGDNKEYLPIEGLAAFNKATAELLFGAGHPVIKEQRVATIQGLSGTGSLRLAAALIERYFPGAKVVISSPTWGNHKNIFNDAKVPWSEYRYYDPKTIGLDFEGMIADIKEAPEGSFILLHGCAHNPTGIDPTPEQWVKIADVIQEKNHIPFFDVAYQGFASGSLDEDAASVRLFAERGMEFFVAQSYSKNLGLYAERIGAINVVCSSADAATRVKSQLKRIARPMYSNPPVHGARIVANVVGDVTMFSEWKAEMEMMAGRIKTVRQELYDSLVSKDKSGKDWSFILKQIGMFSFTGLNKAQSDNMTDKWHVYMTKDGRISLAGLSLAKCEYLADAIIDSYHNVS

SEQ ID NO: 39111 - DNA, 1160 bp, Arabidopsis thaliana
  misc_feature (1)..(1160): Ceres Seq. ID no. 13488715
  misc_feature: MA Experiment ID: 108461 Result: Down-regulated in Transcription
  misc_feature: MA Experiment 108461 PARAMETER Experiment Name: At_Germinating_Seeds_cDNA_P Parameter: Age (day) Value: 1 vs. 0
  misc_feature: MA Experiment 108461 PARAMETER Experiment Name: At_Germinating_Seeds_cDNA_P Parameter: Tissue Value: Germinating Seeds
  misc_feature: MA Experiment ID: 108462 Result: Down-regulated in Transcription
  misc_feature: MA Experiment 108462 PARAMETER Experiment Name: At_Germinating_Seeds_cDNA_P Parameter: Age (day) Value: 2 vs. 0
  misc_feature: MA Experiment 108462 PARAMETER Experiment Name: At_Germinating_Seeds_cDNA_P Parameter: Tissue Value: Germinating Seeds
  misc_feature: MA Experiment ID: 108463 Result: Down-regulated in Transcription
  misc_feature: MA Experiment 108463 PARAMETER Experiment Name: At_Germinating_Seeds_cDNA_P Parameter: Age (day) Value: 3 vs. 0
  misc_feature: MA Experiment 108463 PARAMETER Experiment Name: At_Germinating_Seeds_cDNA_P Parameter: Tissue Value: Germinating Seeds
  misc_feature: MA Experiment ID: 108464 Result: Down-regulated in Transcription
  misc_feature: MA Experiment 108464 PARAMETER Experiment Name: At_Germinating_Seeds_cDNA_P Parameter: Age (day) Value: 4 vs. 0
  misc_feature: MA Experiment 108464 PARAMETER Experiment Name: At_Germinating_Seeds_cDNA_P Parameter: Tissue Value: Germinating Seeds
  misc_feature: MA Experiment ID: 108473 Result: Up-regulated in Transcription
  misc_feature: MA Experiment 108473 PARAMETER Experiment Name: At_Drought_Flowers_cDNA_P Parameter: Timepoint (hr) Value: 7 d
  misc_feature: MA Experiment 108473 PARAMETER Experiment Name: At_Drought_Flowers_cDNA_P Parameter: Tissue Value: Flower
  misc_feature: MA Experiment 108473 PARAMETER Experiment Name: At_Drought_Flowers_cDNA_P Parameter: Treatment Value: Drought vs. No Drought
  misc_feature: MA Experiment ID: 108488 Result: Down-regulated in Transcription
  misc_feature: MA Experiment ID: 108572 Result: Up-regulated in Transcription
  misc_feature: MA Experiment 108572 PARAMETER Experiment Name: At_Drought_cDNA_P Parameter: Timepoint (hr) Value: 1
  misc_feature: MA Experiment 108572 PARAMETER Experiment Name: At_Drought_cDNA_P Parameter: Tissue Value: Aerial
  misc_feature: MA Experiment 108572 PARAMETER Experiment Name: At_Drought_cDNA_P Parameter: Treatment Value: Drought vs. No Drought
  misc_feature: MA Experiment ID: 108573 Result: Up-regulated in Transcription
  misc_feature: MA Experiment 108573 PARAMETER Experiment Name: At_Drought_cDNA_P Parameter: Timepoint (hr) Value: 6
  misc_feature: MA Experiment 108573 PARAMETER Experiment Name: At_Drought_cDNA_P Parameter: Tissue Value: Aerial
  misc_feature: MA Experiment 108573 PARAMETER Experiment Name: At_Drought_cDNA_P Parameter: Treatment Value: Drought vs. No Drought
  misc_feature: MA Experiment ID: 108605 Result: Up-regulated in Transcription
  misc_feature: MA Experiment 108605 PARAMETER Experiment Name: At_100uM_ABA_cDNA_P Parameter: Timepoint (hr) Value: 6
  misc_feature: MA Experiment 108605 PARAMETER Experiment Name: At_100uM_ABA_cDNA_P Parameter: Tissue Value: Aerial
  misc_feature: MA Experiment 108605 PARAMETER Experiment Name: At_100uM_ABA_cDNA_P Parameter: Treatment Value: 100uM ABA vs. No Treatment
  misc_feature: MA Experiment ID: 108607 Result: Up-regulated in Transcription
  misc_feature: MA Experiment 108607 PARAMETER Experiment Name: At_100uM_ABA_cDNA_P Parameter: Timepoint (hr) Value: 4
  misc_feature: MA Experiment 108607 PARAMETER Experiment Name: At_100uM_ABA_cDNA_P Parameter: Tissue Value: Aerial
  misc_feature: MA Experiment 108607 PARAMETER Experiment Name: At_100uM_ABA_cDNA_P Parameter: Treatment Value: 100uM ABA vs. No Treatment
  misc_feature: MA Experiment ID: 108608 Result: Up-regulated in Transcription
  misc_feature: MA Experiment 108608 PARAMETER Experiment Name: At_100uM_ABA_cDNA_P Parameter: Timepoint (hr) Value: 1
  misc_feature: MA Experiment 108608 PARAMETER Experiment Name: At_100uM_ABA_cDNA_P Parameter: Tissue Value: Aerial
  misc_feature: MA Experiment 108608 PARAMETER Experiment Name: At_100uM_ABA_cDNA_P Parameter: Treatment Value: 100uM ABA vs. No Treatment
  misc_feature: MA Experiment ID: 108609 Result: Up-regulated in Transcription
  misc_feature: MA Experiment 108609 PARAMETER Experiment Name: At_100uM_ABA_cDNA_P Parameter: Timepoint (hr) Value: 24
  misc_feature: MA Experiment 108609 PARAMETER Experiment Name: At_100uM_ABA_cDNA_P Parameter: Tissue Value: Aerial
  misc_feature: MA Experiment 108609 PARAMETER Experiment Name: At_100uM_ABA_cDNA_P Parameter: Treatment Value: 100uM ABA vs. No Treatment
  misc_feature: MA Experiment ID: 108668 Result: Up-regulated in Transcription
  misc_feature: MA Experiment 108668 PARAMETER Experiment Name: At_2mM_SA_cDNA_P Parameter: Plant Line Value: WS
  misc_feature: MA Experiment 108668 PARAMETER Experiment Name: At_2mM_SA_cDNA_P Parameter: Timepoint (hr) Value: 6
  misc_feature: MA Experiment 108668 PARAMETER Experiment Name: At_2mM_SA_cDNA_P Parameter: Treatment Value: 2mM SA vs. No Treatment
  misc_feature: MA Experiment ID: 20000071 Result: Up-regulated in Transcription
  misc_feature: MA Experiment 20000071 PARAMETER Experiment Name: At_100uM_ABA_Mutants_cDNA_P Parameter: Plant Line Value: CS8104
  misc_feature: MA Experiment 20000071 PARAMETER Experiment Name: At_100uM_ABA_Mutants_cDNA_P Parameter: Timepoint (hr) Value: 6
  misc_feature: MA Experiment 20000071 PARAMETER Experiment Name: At_100uM_ABA_Mutants_cDNA_P Parameter: Tissue Value: Aerial
  misc_feature: MA Experiment 20000071 PARAMETER Experiment Name: At_100uM_ABA_Mutants_cDNA_P Parameter: Treatment Value: 100uM ABA vs. No Treatment
  misc_feature: MA Experiment ID: 20000072 Result: Up-regulated in Transcription
  misc_feature: MA Experiment 20000072 PARAMETER Experiment Name: At_100uM_ABA_Mutants_cDNA_P Parameter: Plant Line Value: CS8105
  misc_feature: MA Experiment 20000072 PARAMETER Experiment Name: At_100uM_ABA_Mutants_cDNA_P Parameter: Timepoint (hr) Value: 6
  misc_feature: MA Experiment 20000072 PARAMETER Experiment Name: At_100uM_ABA_Mutants_cDNA_P Parameter: Tissue Value: Aerial
  misc_feature: MA Experiment 20000072 PARAMETER Experiment Name: At_100uM_ABA_Mutants_cDNA_P Parameter: Treatment Value: 100uM ABA vs. No Treatment
  misc_feature: MA Experiment ID: 20000087 Result: Up-regulated in Transcription
  misc_feature: MA Experiment 20000087 PARAMETER Experiment Name: At_100uM_ABA_Mutants_cDNA_P Parameter: Plant Line Value: WS
  misc_feature: MA Experiment 20000087 PARAMETER Experiment Name: At_100uM_ABA_Mutants_cDNA_P Parameter: Timepoint (hr) Value: 6
  misc_feature: MA Experiment 20000087 PARAMETER Experiment Name: At_100uM_ABA_Mutants_cDNA_P Parameter: Tissue Value: Aerial
  misc_feature: MA Experiment 20000087 PARAMETER Experiment Name: At_100uM_ABA_Mutants_cDNA_P Parameter: Treatment Value: 100uM ABA vs. No Treatment
  misc_feature: MA Experiment ID: 20000088 Result: Up-regulated in Transcription
  misc_feature: MA Experiment 20000088 PARAMETER Experiment Name: At_100uM_ABA_Mutants_cDNA_P Parameter: Plant Line Value: Landsberg
  misc_feature: MA Experiment 20000088 PARAMETER Experiment Name: At_100uM_ABA_Mutants_cDNA_P Parameter: Timepoint (hr) Value: 6
  misc_feature: MA Experiment 20000088 PARAMETER Experiment Name: At_100uM_ABA_Mutants_cDNA_P Parameter: Tissue Value: Aerial
  misc_feature: MA Experiment 20000088 PARAMETER Experiment Name: At_100uM_ABA_Mutants_cDNA_P Parameter: Treatment Value: 100uM ABA vs. No Treatment
  misc_feature: MA Experiment ID: 20000166 Result: Up-regulated in Transcription
  misc_feature: MA Experiment 20000166 PARAMETER Experiment Name: At_100uM_ABA_P Parameter: Age (day) Value: 14
  misc_feature: MA Experiment 20000166 PARAMETER Experiment Name: At_100uM_ABA_P Parameter: Organism Value: A. thaliana
  misc_feature: MA Experiment 20000166 PARAMETER Experiment Name: At_100uM_ABA_P Parameter: Plant Line Value: WS
  misc_feature: MA Experiment 20000166 PARAMETER Experiment Name: At_100uM_ABA_P Parameter: Timepoint (hr) Value: 1
  misc_feature: MA Experiment 20000166 PARAMETER Experiment Name: At_100uM_ABA_P Parameter: Tissue Value: Aerial
  misc_feature: MA Experiment 20000166 PARAMETER Experiment Name: At_100uM_ABA_P Parameter: Treatment Value: 100uM ABA vs. No Treatment
  misc_feature: MA Experiment ID: 20000169 Result: Up-regulated in Transcription
  misc_feature: MA Experiment 20000169 PARAMETER Experiment Name: At_100uM_ABA_P Parameter: Age (day) Value: 14
  misc_feature: MA Experiment 20000169 PARAMETER Experiment Name: At_100uM_ABA_P Parameter: Organism Value: A. thaliana
  misc_feature: MA Experiment 20000169 PARAMETER Experiment Name: At_100uM_ABA_P Parameter: Plant Line Value: WS
  misc_feature: MA Experiment 20000169 PARAMETER Experiment Name: At_100uM_ABA_P Parameter: Timepoint (hr) Value: 6
  misc_feature: MA Experiment 20000169 PARAMETER Experiment Name: At_100uM_ABA_P Parameter: Tissue Value: Aerial
  misc_feature: MA Experiment 20000169 PARAMETER Experiment Name: At_100uM_ABA_P Parameter: Treatment Value: 100uM ABA vs. No Treatment
  misc_feature: MA Experiment ID: 20000180 Result: Down-regulated in Transcription
  misc_feature: MA Experiment 20000180 PARAMETER Experiment Name: At_Germinating_Seeds_P Parameter: Age (hr) Value: 24 vs. 0
  misc_feature: MA Experiment 20000180 PARAMETER Experiment Name: At_Germinating_Seeds_P Parameter: Tissue Value: Germinating Seeds
  misc_feature: MA Experiment ID: 20000185 Result: Down-regulated in Transcription
  misc_feature: MA Experiment 20000185 PARAMETER Experiment Name: At_Roots__P Parameter: Age (day) Value: 7 vs. 21
  misc_feature: MA Experiment 20000185 PARAMETER Experiment Name: At_Roots__P Parameter: Organism Value: A. thaliana
  misc_feature: MA Experiment 20000185 PARAMETER Experiment Name: At_Roots__P Parameter: Tissue Value: Roots vs. Whole Plant
  misc_feature: MA Experiment ID: 20000267 Result: Up-regulated in Transcription
  misc_feature: MA Experiment 20000267 PARAMETER Experiment Name: At_Drought_P Parameter: Age (day) Value: 7
  misc_feature: MA Experiment 20000267 PARAMETER Experiment Name: At_Drought_P Parameter: Organism Value: A. thaliana
  misc_feature: MA Experiment 20000267 PARAMETER Experiment Name: At_Drought_P Parameter: Plant Line Value: WS
  misc_feature: MA Experiment 20000267 PARAMETER Experiment Name: At_Drought_P Parameter: Timepoint (hr) Value: 6
  misc_feature: MA Experiment 20000267 PARAMETER Experiment Name: At_Drought_P Parameter: Tissue Value: Whole Plant
  misc_feature: MA Experiment 20000267 PARAMETER Experiment Name: At_Drought_P Parameter: Treatment Value: Drought vs. No Drought
  misc_feature: MA Experiment ID: 20000268 Result: Up-regulated in Transcription
  misc_feature: MA Experiment 20000268 PARAMETER Experiment Name: At_100mM_NaCl__P Parameter: Age (day) Value: 14
  misc_feature: MA Experiment 20000268 PARAMETER Experiment Name: At_100mM_NaCl__P Parameter: Organism Value: A. thaliana
  misc_feature: MA Experiment 20000268 PARAMETER Experiment Name: At_100mM_NaCl__P Parameter: Plant Line Value: WS
  misc_feature: MA Experiment 20000268 PARAMETER Experiment Name: At_100mM_NaCl__P Parameter: Timepoint (hr) Value: 6
  misc_feature: MA Experiment 20000268 PARAMETER Experiment Name: At_100mM_NaCl__P Parameter: Tissue Value: Whole Plant
  misc_feature: MA Experiment 20000268 PARAMETER Experiment Name: At_100mM_NaCl__P Parameter: Treatment Value: 100mM NaCl vs. No Treatment
  misc_feature: MA Experiment ID: 20000436 Result: Up-regulated in Transcription
  misc_feature: MA Experiment 20000436 PARAMETER Experiment Name: At_Drought_P Parameter: Age (day) Value: 7
  misc_feature: MA Experiment 20000436 PARAMETER Experiment Name: At_Drought_P Parameter: Organism Value: A. thaliana
  misc_feature: MA Experiment 20000436 PARAMETER Experiment Name: At_Drought_P Parameter: Plant Line Value: WS
  misc_feature: MA Experiment 20000436 PARAMETER Experiment Name: At_Drought_P Parameter: Timepoint (hr) Value: 12
  misc_feature: MA Experiment 20000436 PARAMETER Experiment Name: At_Drought_P Parameter: Tissue Value: Whole Plant
  misc_feature: MA Experiment 20000436 PARAMETER Experiment Name: At_Drought_P Parameter: Treatment Value: Drought vs. No Drought
  misc_feature: MA Experiment ID: 20000437 Result: Up-regulated in Transcription
  misc_feature: MA Experiment 20000437 PARAMETER Experiment Name: At_Drought_P Parameter: Age (day) Value: 8
  misc_feature: MA Experiment 20000437 PARAMETER Experiment Name: At_Drought_P Parameter: Organism Value: A. thaliana
  misc_feature: MA Experiment 20000437 PARAMETER Experiment Name: At_Drought_P Parameter: Plant Line Value: WS
  misc_feature: MA Experiment 20000437 PARAMETER Experiment Name: At_Drought_P Parameter: Timepoint (hr) Value: 24
  misc_feature: MA Experiment 20000437 PARAMETER Experiment Name: At_Drought_P Parameter: Tissue Value: Whole Plant
  misc_feature: MA Experiment 20000437 PARAMETER Experiment Name: At_Drought_P Parameter: Treatment Value: Drought vs. No Drought
  misc_feature: MA Experiment ID: 20000453 Result: Up-regulated in Transcription
  misc_feature: MA Experiment 20000453 PARAMETER Experiment Name: At_100uM_ABA_P Parameter: Age (day) Value: 15
  misc_feature: MA Experiment 20000453 PARAMETER Experiment Name: At_100uM_ABA_P Parameter: Organism Value: A. thaliana
  misc_feature: MA Experiment 20000453 PARAMETER Experiment Name: At_100uM_ABA_P Parameter: Plant Line Value: WS
  misc_feature: MA Experiment 20000453 PARAMETER Experiment Name: At_100uM_ABA_P Parameter: Timepoint (hr) Value: 24
  misc_feature: MA Experiment 20000453 PARAMETER Experiment Name: At_100uM_ABA_P Parameter: Tissue Value: Aerial
  misc_feature: MA Experiment 20000453 PARAMETER Experiment Name: At_100uM_ABA_P Parameter: Treatment Value: 100uM ABA vs. No Treatment
  misc_feature: MA Experiment ID: 20000455 Result: Up-regulated in Transcription
  misc_feature: MA Experiment 20000455 PARAMETER Experiment Name: At_100uM_ABA_P Parameter: Age (day) Value: 16
  misc_feature: MA Experiment 20000455 PARAMETER Experiment Name: At_100uM_ABA_P Parameter: Organism Value: A. thaliana
  misc_feature: MA Experiment 20000455 PARAMETER Experiment Name: At_100uM_ABA_P Parameter: Plant Line Value: WS
  misc_feature: MA Experiment 20000455 PARAMETER Experiment Name: At_100uM_ABA_P Parameter: Timepoint (hr) Value: 48
  misc_feature: MA Experiment 20000455 PARAMETER Experiment Name: At_100uM_ABA_P Parameter: Tissue Value: Aerial
  misc_feature: MA Experiment 20000455 PARAMETER Experiment Name: At_100uM_ABA_P Parameter: Treatment Value: 100uM ABA vs. No Treatment
  misc_feature: MA Experiment ID: 20001554 Result: Up-regulated in Transcription
  misc_feature: MA Experiment 20001554 PARAMETER Experiment Name: At_Drought_Soil_Dry_P Parameter: Age (day) Value: 21
  misc_feature: MA Experiment 20001554 PARAMETER Experiment Name: At_Drought_Soil_Dry_P Parameter: Organism Value: A. thaliana
  misc_feature: MA Experiment 20001554 PARAMETER Experiment Name: At_Drought_Soil_Dry_P Parameter: Plant Line Value: WS
  misc_feature: MA Experiment 20001554 PARAMETER Experiment Name: At_Drought_Soil_Dry_P Parameter: Post Timepoint (hr) Value: None
  misc_feature: MA Experiment 20001554 PARAMETER Experiment Name: At_Drought_Soil_Dry_P Parameter: Post-Treatment Value: None
  misc_feature: MA Experiment 20001554 PARAMETER Experiment Name: At_Drought_Soil_Dry_P Parameter: Timepoint (day) Value: 7
  misc_feature: MA Experiment 20001554 PARAMETER Experiment Name: At_Drought_Soil_Dry_P Parameter: Treatment Value: Drought vs. No Drought
  misc_feature: MA Experiment ID: 20001555 Result: Up-regulated in Transcription
  misc_feature: MA Experiment 20001555 PARAMETER Experiment Name: At_Drought_Soil_Dry_P Parameter: Age (day) Value: 24
  misc_feature: MA Experiment 20001555 PARAMETER Experiment Name: At_Drought_Soil_Dry_P Parameter: Organism Value: A. thaliana
  misc_feature: MA Experiment 20001555 PARAMETER Experiment Name: At_Drought_Soil_Dry_P Parameter: Plant Line Value: WS
  misc_feature: MA Experiment 20001555 PARAMETER Experiment Name: At_Drought_Soil_Dry_P Parameter: Post Timepoint (hr) Value: None
  misc_feature: MA Experiment 20001555 PARAMETER Experiment Name: At_Drought_Soil_Dry_P Parameter: Post-Treatment Value: None
  misc_feature: MA Experiment 20001555 PARAMETER Experiment Name: At_Drought_Soil_Dry_P Parameter: Timepoint (day) Value: 10
  misc_feature: MA Experiment 20001555 PARAMETER Experiment Name: At_Drought_Soil_Dry_P Parameter: Treatment Value: Drought vs. No Drought
  misc_feature: MA Experiment ID: 20001556 Result: Up-regulated in Transcription
  misc_feature: MA Experiment 20001556 PARAMETER Experiment Name: At_Drought_Soil_Dry_P Parameter: Age (day) Value: 26
  misc_feature: MA Experiment 20001556 PARAMETER Experiment Name: At_Drought_Soil_Dry_P Parameter: Organism Value: A. thaliana
  misc_feature: MA Experiment 20001556 PARAMETER Experiment Name: At_Drought_Soil_Dry_P Parameter: Plant Line Value: WS
  misc_feature: MA Experiment 20001556 PARAMETER Experiment Name: At_Drought_Soil_Dry_P Parameter: Post Timepoint (hr) Value: None
  misc_feature: MA Experiment 20001556 PARAMETER Experiment Name: At_Drought_Soil_Dry_P Parameter: Post-Treatment Value: None
  misc_feature: MA Experiment 20001556 PARAMETER Experiment Name: At_Drought_Soil_Dry_P Parameter: Timepoint (day) Value: 12
  misc_feature: MA Experiment 20001556 PARAMETER Experiment Name: At_Drought_Soil_Dry_P Parameter: Treatment Value: Drought vs. No Drought
  misc_feature: MA Experiment ID: 20001557 Result: Up-regulated in Transcription
  misc_feature: MA Experiment 20001557 PARAMETER Experiment Name: At_Drought_Soil_Dry_P Parameter: Age (day) Value: 27
  misc_feature: MA Experiment 20001557 PARAMETER Experiment Name: At_Drought_Soil_Dry_P Parameter: Organism Value: A. thaliana
  misc_feature: MA Experiment 20001557 PARAMETER Experiment Name: At_Drought_Soil_Dry_P Parameter: Plant Line Value: WS
  misc_feature: MA Experiment 20001557 PARAMETER Experiment Name: At_Drought_Soil_Dry_P Parameter: Post Timepoint (hr) Value: 3
  misc_feature: MA Experiment 20001557 PARAMETER Experiment Name: At_Drought_Soil_Dry_P Parameter: Post-Treatment Value: Re-Water vs. No Drought
  misc_feature: MA Experiment 20001557 PARAMETER Experiment Name: At_Drought_Soil_Dry_P Parameter: Timepoint (day) Value: 13
  misc_feature: MA Experiment 20001557 PARAMETER Experiment Name: At_Drought_Soil_Dry_P Parameter: Treatment Value: Drought vs. No Drought
  misc_feature: MA Experiment ID: 20001757 Result: Down-regulated in Transcription
  misc_feature: MA Experiment 20001757 PARAMETER Experiment Name: At_50mM_NH4NO3_L-to-H_P Parameter: Timepoint (hr) Value: 6
  misc_feature: MA Experiment 20001757 PARAMETER Experiment Name: At_50mM_NH4NO3_L-to-H_P Parameter: Tissue Value: Leaf
  misc_feature: MA Experiment 20001757 PARAMETER Experiment Name: At_50mM_NH4NO3_L-to-H_P Parameter: Treatment Value: 50mM NH4NO3 vs 100mM Mannitol
  misc_feature: MA Experiment ID: 20001773 Result: Down-regulated in Transcription
  misc_feature: MA Experiment 20001773 PARAMETER Experiment Name: At_Far-red-enriched-adult_P Parameter: Age (day) Value: 30
  misc_feature: MA Experiment 20001773 PARAMETER Experiment Name: At_Far-red-enriched-adult_P Parameter: Light Value: Far-red enriched vs. White
  misc_feature: MA Experiment 20001773 PARAMETER Experiment Name: At_Far-red-enriched-adult_P Parameter: Organism Value: A. thaliana
  misc_feature: MA Experiment 20001773 PARAMETER Experiment Name: At_Far-red-enriched-adult_P Parameter: Plant Line Value: Columbia
  misc_feature: MA Experiment 20001773 PARAMETER Experiment Name: At_Far-red-enriched-adult_P Parameter: Timepoint (hr) Value: 48
  misc_feature: MA Experiment 20001773 PARAMETER Experiment Name: At_Far-red-enriched-adult_P Parameter: Tissue Value: Aerial
  misc_feature: MA Experiment ID: 20001905 Result: Up-regulated in Transcription
  misc_feature: MA Experiment 20001905 PARAMETER Experiment Name: At_Drought_Reproduction_P Parameter: Age (day) Value: 40
  misc_feature: MA Experiment 20001905 PARAMETER Experiment Name: At_Drought_Reproduction_P Parameter: Organism Value: A. thaliana
  misc_feature: MA Experiment 20001905 PARAMETER Experiment Name: At_Drought_Reproduction_P Parameter: Plant Line Value: WS
  misc_feature: MA Experiment 20001905 PARAMETER Experiment Name: At_Drought_Reproduction_P Parameter: Timepoint (day) Value: 10
  misc_feature: MA Experiment 20001905 PARAMETER Experiment Name: At_Drought_Reproduction_P Parameter: Tissue Value: Rosettes
  misc_feature: MA Experiment 20001905 PARAMETER Experiment Name: At_Drought_Reproduction_P Parameter: Treatment Value: Drought vs. No Drought
  misc_feature: MA Experiment ID: 20001906 Result: Up-regulated in Transcription
  misc_feature: MA Experiment 20001906 PARAMETER Experiment Name: At_Drought_Reproduction_P Parameter: Age (day) Value: 35
  misc_feature: MA Experiment 20001906 PARAMETER Experiment Name: At_Drought_Reproduction_P Parameter: Organism Value: A. thaliana
  misc_feature: MA Experiment 20001906 PARAMETER Experiment Name: At_Drought_Reproduction_P Parameter: Plant Line Value: WS
  misc_feature: MA Experiment 20001906 PARAMETER Experiment Name: At_Drought_Reproduction_P Parameter: Timepoint (day) Value: 5
  misc_feature: MA Experiment 20001906 PARAMETER Experiment Name: At_Drought_Reproduction_P Parameter: Tissue Value: Siliques
  misc_feature: MA Experiment 20001906 PARAMETER Experiment Name: At_Drought_Reproduction_P Parameter: Treatment Value: Drought vs. No Drought
  misc_feature: MA Experiment ID: 20001907 Result: Up-regulated in Transcription
  misc_feature: MA Experiment 20001907 PARAMETER Experiment Name: At_Drought_Reproduction_P Parameter: Age (day) Value: 37
  misc_feature: MA Experiment 20001907 PARAMETER Experiment Name: At_Drought_Reproduction_P Parameter: Organism Value: A. thaliana
  misc_feature: MA Experiment 20001907 PARAMETER Experiment Name: At_Drought_Reproduction_P Parameter: Plant Line Value: WS
  misc_feature: MA Experiment 20001907 PARAMETER Experiment Name: At_Drought_Reproduction_P Parameter: Timepoint (day) Value: 7
  misc_feature: MA Experiment 20001907 PARAMETER Experiment Name: At_Drought_Reproduction_P Parameter: Tissue Value: Siliques
  misc_feature: MA Experiment 20001907 PARAMETER Experiment Name: At_Drought_Reproduction_P Parameter: Treatment Value: Drought vs. No Drought
  misc_feature: MA Experiment ID: 20001908 Result: Up-regulated in Transcription
  misc_feature: MA Experiment 20001908 PARAMETER Experiment Name: At_Drought_Reproduction_P Parameter: Age (day) Value: 40
  misc_feature: MA Experiment 20001908 PARAMETER Experiment Name: At_Drought_Reproduction_P Parameter: Organism Value: A. thaliana
  misc_feature: MA Experiment 20001908 PARAMETER Experiment Name: At_Drought_Reproduction_P Parameter: Plant Line Value: WS
  misc_feature: MA Experiment 20001908 PARAMETER Experiment Name: At_Drought_Reproduction_P Parameter: Timepoint (day) Value: 10
  misc_feature: MA Experiment 20001908 PARAMETER Experiment Name: At_Drought_Reproduction_P Parameter: Tissue Value: Siliques
  misc_feature: MA Experiment 20001908 PARAMETER Experiment Name: At_Drought_Reproduction_P Parameter: Treatment Value: Drought vs. No Drought
  misc_feature: MA Experiment ID: 20001909 Result: Up-regulated in Transcription
  misc_feature: MA Experiment 20001909 PARAMETER Experiment Name: At_Drought_Reproduction_P Parameter: Age (day) Value: 35
  misc_feature: MA Experiment 20001909 PARAMETER Experiment Name: At_Drought_Reproduction_P Parameter: Organism Value: A. thaliana
  misc_feature: MA Experiment 20001909 PARAMETER Experiment Name: At_Drought_Reproduction_P Parameter: Plant Line Value: WS
  misc_feature: MA Experiment 20001909 PARAMETER Experiment Name: At_Drought_Reproduction_P Parameter: Timepoint (day) Value: 5
  misc_feature: MA Experiment 20001909 PARAMETER Experiment Name: At_Drought_Reproduction_P Parameter: Tissue Value: Flowers
  misc_feature: MA Experiment 20001909 PARAMETER Experiment Name: At_Drought_Reproduction_P Parameter: Treatment Value: Drought vs. No Drought
  misc_feature: MA Experiment ID: 20001911 Result: Up-regulated in Transcription
  misc_feature: MA Experiment 20001911 PARAMETER Experiment Name: At_Drought_Reproduction_P Parameter: Age (day) Value: 40
  misc_feature: MA Experiment 20001911 PARAMETER Experiment Name: At_Drought_Reproduction_P Parameter: Organism Value: A. thaliana
  misc_feature: MA Experiment 20001911 PARAMETER Experiment Name: At_Drought_Reproduction_P Parameter: Plant Line Value: WS
  misc_feature: MA Experiment 20001911 PARAMETER Experiment Name: At_Drought_Reproduction_P Parameter: Timepoint (day) Value: 10
  misc_feature: MA Experiment 20001911 PARAMETER Experiment Name: At_Drought_Reproduction_P Parameter: Tissue Value: Flowers
  misc_feature: MA Experiment 20001911 PARAMETER Experiment Name: At_Drought_Reproduction_P Parameter: Treatment Value: Drought vs. No Drought
aaaaaaacaaacttgtttgttagacaaaacatgaatttccggggaggttgttgtattgcgaggtacggtggtagtggtggtggaaatgatatgtcgaaggttgatcggattatgctccggtaccgtccgattgcaccgagacctgattctggtggatctcctgcttcaccgacggagaagaatggatcggtgataactaacgtttcgtcgagatcacggagaggtaagagaaaatattcaaaggagaataatagtagcagtaccggatccgttaatagtaacggtaacagcaaacgacagagaaacgatgagacgaagaacggatctggtggtggtagagagatcgtgacgttgcctcttcttccagagactcctgagaagaaagactcgccgttgaaggctaaggcggcgccggagttaggtgcggcggcgttgtggctgagttttaatgacggagctagttataacagacgttatcagacagagttaatgacggaaacggttgtgtcgtcgttgttgacggtggagtgtgtaacggagagattgatggagggagagtatgagttagggtgtacggacgaggagaggaagatgaatcttgagagagacacgtgtcctggttttatatcggacggtttagggagagtcatttggacgaacggttcttacagagagttggtggttgggaaagatcatgagcagtgtagtaagatgagtgtgtggcttgtgatgaaggagaagcctttggtaacgtaccggacttttacgtgtagaatgagattgcagtacacgtgtcgtgataaggaggtgagttcgattacttcgttctgtgatgtttggaggatgagtgacggtggctttgcgtggcggcttgatgttgatgctgcactttgccttggacggtgaggattgggccgttggattagagatgatgttagattgatgagatgaggatatttaataacgacatgcaagttagatagatatttggacttccaactttatgagtgtacatacatatttcgcaattttgtagcttttaagttttaacattttgatttcaatgttctgttttaatttgtagtgtttggtgttttattcttcttcttttttggggtttgtataaaaactcttggttagtcggtatctttcttttttcc

SEQ ID NO: 39112 - protein, 301 aa, Arabidopsis thaliana
  peptide (1)..(301): Ceres Seq. ID no. 13488716
  misc_feature (25)..(174): Homolog of NCBI NO: 15237495 NR Description: hypothetical protein [Arabidopsis thaliana]
  misc_feature (11)..(300): Homolog of NCBI NO: 15237494 NR Description: hypothetical protein [Arabidopsis thaliana]
  misc_feature (57)..(299): Homolog of NCBI NO: 15237495 NR Description: hypothetical protein [Arabidopsis thaliana]
  misc_feature (21)..(299): Homolog of NCBI NO: 15232126 NR Description: expressed protein [Arabidopsis thaliana]
  misc_feature (11)..(299): Homolog of NCBI NO: 21537225 NR Description: unknown [Arabidopsis thaliana]
  misc_feature (11)..(299): Homolog of NCBI NO: 18408645 NR Description: expressed protein [Arabidopsis thaliana]
  misc_feature (11)..(299): Homolog of NCBI NO: 15242729 NR Description: expressed protein [Arabidopsis thaliana]
  misc_feature (11)..(301): Homolog of NCBI NO: 15240662 NR Description: expressed protein [Arabidopsis thaliana]
KKTNLFVRQNMNFRGGCCIARYGGSGGGNDMSKVDRIMLRYRPIAPRPDSGGSPASPTEKNGSVITNVSSRSRRGKRKYSKENNSSSTGSVNSNGNSKRQRNDETKNGSGGGREIVTLPLLPETPEKKDSPLKAKAAPELGAAALWLSFNDGASYNRRYQTELMTETVVSSLLTVECVTERLMEGEYELGCTDEERKMNLERDTCPGFISDGLGRVIWTNGSYRELVVGKDHEQCSKMSVWLVMKEKPLVTYRTFTCRMRLQYTCRDKEVSSITSFCDVWRMSDGGFAWRLDVDAALCLGR

SEQ ID NO: 39113 - protein, 291 aa, Arabidopsis thaliana
  peptide (1)..(291): Ceres Seq. ID no. 13488717
  misc_feature (15)..(164): Homolog of NCBI NO: 15237495 NR Description: hypothetical protein [Arabidopsis thaliana]
  misc_feature (1)..(290): Homolog of NCBI NO: 15237494 NR Description: hypothetical protein [Arabidopsis thaliana]
  misc_feature (47)..(289): Homolog of NCBI NO: 15237495 NR Description: hypothetical protein [Arabidopsis thaliana]
  misc_feature (11)..(289): Homolog of NCBI NO: 15232126 NR Description: expressed protein [Arabidopsis thaliana]
  misc_feature (1)..(289): Homolog of NCBI NO: 21537225 NR Description: unknown [Arabidopsis thaliana]
  misc_feature (1)..(289): Homolog of NCBI NO: 18408645 NR Description: expressed protein [Arabidopsis thaliana]
  misc_feature (1)..(289): Homolog of NCBI NO: 15242729 NR Description: expressed protein [Arabidopsis thaliana]
  misc_feature (1)..(291): Homolog of NCBI NO: 15240662 NR Description: expressed protein [Arabidopsis thaliana]
MNFRGGCCIARYGGSGGGNDMSKVDRIMLRYRPIAPRPDSGGSPASPTEKNGSVITNVSSRSRRGKRKYSKENNSSSTGSVNSNGNSKRQRNDETKNGSGGGREIVTLPLLPETPEKKDSPLKAKAAPELGAAALWLSFNDGASYNRRYQTELMTETVVSSLLTVECVTERLMEGEYELGCTDEERKMNLERDTCPGFISDGLGRVIWTNGSYRELVVGKDHEQCSKMSVWLVMKEKPLVTYRTFTCRMRLQYTCRDKEVSSITSFCDVWRMSDGGFAWRLDVDAALCLGR

SEQ ID NO: 39114 - protein, 271 aa, Arabidopsis thaliana
  peptide (1)..(271): Ceres Seq. ID no. 13488718
  misc_feature (1)..(144): Homolog of NCBI NO: 15237495 NR Description: hypothetical protein [Arabidopsis thaliana]
  misc_feature (1)..(270): Homolog of NCBI NO: 15237494 NR Description: hypothetical protein [Arabidopsis thaliana]
  misc_feature (27)..(269): Homolog of NCBI NO: 15237495 NR Description: hypothetical protein [Arabidopsis thaliana]
  misc_feature (1)..(269): Homolog of NCBI NO: 15232126 NR Description: expressed protein [Arabidopsis thaliana]
  misc_feature (1)..(269): Homolog of NCBI NO: 21537225 NR Description: unknown [Arabidopsis thaliana]
  misc_feature (1)..(269): Homolog of NCBI NO: 18408645 NR Description: expressed protein [Arabidopsis thaliana]
  misc_feature (1)..(269): Homolog of NCBI NO: 15242729 NR Description: expressed protein [Arabidopsis thaliana]
  misc_feature (1)..(271): Homolog of NCBI NO: 15240662 NR Description: expressed protein [Arabidopsis thaliana]
MSKVDRIMLRYRPIAPRPDSGGSPASPTEKNGSVITNVSSRSRRGKRKYSKENNSSSTGSVNSNGNSKRQRNDETKNGSGGGREIVTLPLLPETPEKKDSPLKAKAAPELGAAALWLSFNDGASYNRRYQTELMTETVVSSLLTVECVTERLMEGEYELGCTDEERKMNLERDTCPGFISDGLGRVIWTNGSYRELVVGKDHEQCSKMSVWLVMKEKPLVTYRTFTCRMRLQYTCRDKEVSSITSFCDVWRMSDGGFAWRLDVDAALCLGR

SEQ ID NO: 39115 - DNA, 1247 bp, Arabidopsis thaliana
  misc_feature (1)..(1247): Ceres Seq. ID no. 12328176
  misc_feature: MA Experiment ID: 108474 Result: Down-regulated in Transcription
  misc_feature: MA Experiment 108474 PARAMETER Experiment Name: At_Drought_Flowers_cDNA_P Parameter: Timepoint (hr) Value: null
  misc_feature: MA Experiment 108474 PARAMETER Experiment Name: At_Drought_Flowers_cDNA_P Parameter: Treatment Value: Drought vs. No Drought
  misc_feature: MA Experiment ID: 108501 Result: Down-regulated in Transcription
  misc_feature: MA Experiment 108501 PARAMETER Experiment Name: At_ap2_floral_buds_cDNA_P Parameter: Plant Line Value: ap2 (Ler.)
  misc_feature: MA Experiment 108501 PARAMETER Experiment Name: At_ap2_floral_buds_cDNA_P Parameter: Tissue Value: Closed Flower
  misc_feature: MA Experiment ID: 20000440 Result: Up-regulated in Transcription
  misc_feature: MA Experiment 20000440 PARAMETER Experiment Name: At_Closed-Flower__Sub_P Parameter: Tissue Value: Closed Flower vs. Whole Plant
gccgttgacttcttttcctctgtaagtcaactctctgtttgtctctacatacatccatccatctatctttggatcgtcattttctctttgtggactaaagtttaagagagaacatgggtgtatttcctggatttggtagctggatcaatcaaaacactcaacagcttcctcacaaggcagagtccgagagatctgagaatgcgaaatttaagtcaaagtcagagacaaacactcatgaggcgagagatgaaatgaaacagcaattaaaactttggagagatacagagaagaaggaacaatggaatgatgctcctcctaatgtgaaggtggaaagaagaaatgatctagaatggggtatgtcaactatagaaatgcaatttacattaggattgcctcctcaagcagcttacaacgttttaactaatccagacaaccaaccatacttcagaatcatcaaaggacgccaacttttggtttcttcttttaacttatcatttcattgattcaaataaaataatgataacaagatttgagagtgtgtcatagttttcttcttatgaaaggaaaacatatcaagaaaagttgtgtcgccggataccgggaaagggcagcttgtggacaccaagaaagctgtggcctggaacttcctttggttatctggaactatcccgataattgcaaattttatcgaacaccgacaagtccttaccgtacaatatacggtaaaaaataagatgttcataaacatgtttgtcagtataaagtggagccgctatacgtagattcagaacgcttgtgcaaacaaaagaagccgaagagtacagaagaatacgaaagatgtagccgcggacaaggaaggattgggtcgaaagtgacattggaccagatgtttaagccttcttttatttttaatctgccaccgatttcttggtacgttcgtcggataaccatcaagaccatgaaaactctgatcgaagatcttcaaattacaagtgccatgatccgaggtatttgaaacgtcccaaatccgctacaaattgatagaacatcaaataaagttataaaatcactttttataaatttaaatagcagaatattacatatgactttagaagtgtatgttcttatggtcactttataacatcaaattaaatgtatagaaaatgtttctaaccaatagttcttaattagacgattatacatagtcaatttgtgtcttttcatattttttaatatcatatattttc

SEQ ID NO: 39116 - protein, 129 aa, Arabidopsis thaliana
  peptide (1)..(129): Ceres Seq. ID no. 12328177
  misc_feature (1)..(71): Homolog of NCBI NO: 18395270 NR Description: OBP32pep protein, putative
  misc_feature (1)..(71): Homolog of NCBI NO: 21536644 NR Description: OBP32pep protein, putative [Arabidopsis thaliana]
  misc_feature (3)..(111): Homolog of NCBI NO: 25373403 NR Description: hypothetical protein F5O8.13 - Arabidopsis
  misc_feature (1)..(120): Homolog of NCBI NO: 15220821 NR Description: hypothetical protein; protein id: At1g23660.1
  misc_feature (1)..(129): Homolog of NCBI NO: 8778583 NR Description: F28C11.19 [Arabidopsis thaliana]
  misc_feature (1)..(123): Homolog of NCBI NO: 25373395 NR Description: hypothetical protein F5O8.22 - Arabidopsis
  misc_feature (1)..(129): Homolog of NCBI NO: 18395251 NR Description: putative OBP32pep protein; protein id:
  misc_feature (1)..(123): Homolog of NCBI NO: 15220781 NR Description: OBP32pep protein, putative; protein id:
  misc_feature (1)..(120): Homolog of NCBI NO: 25373400 NR Description: hypothetical protein F5O8.7 [imported] -
  misc_feature (1)..(120): Homolog of NCBI NO: 8778586 NR Description: F28C11.14 [Arabidopsis thaliana]
MGVFPGFGSWINQNTQQLPHKAESERSENAKFKSKSETNTHEARDEMKQQLKLWRDTEKKEQWNDAPPNVKVERRNDLEWGMSTIEMQFTLGLPPQAAYNVLTNPDNQPYFRIIKGRQLLVSSFNLSFH

SEQ ID NO: 39117 - protein, 83 aa, Arabidopsis thaliana
  peptide (1)..(83): Ceres Seq. ID no. 12328178
  misc_feature (1)..(25): Homolog of NCBI NO: 18395270 NR Description: OBP32pep protein, putative
  misc_feature (1)..(25): Homolog of NCBI NO: 21536644 NR Description: OBP32pep protein, putative [Arabidopsis thaliana]
  misc_feature (1)..(65): Homolog of NCBI NO: 25373403 NR Description: hypothetical protein F5O8.13 - Arabidopsis
  misc_feature (1)..(74): Homolog of NCBI NO: 15220821 NR Description: hypothetical protein; protein id: At1g23660.1
  misc_feature (1)..(83): Homolog of NCBI NO: 8778583 NR Description: F28C11.19 [Arabidopsis thaliana]
  misc_feature (1)..(77): Homolog of NCBI NO: 25373395 NR Description: hypothetical protein F5O8.22 - Arabidopsis
  misc_feature (1)..(83): Homolog of NCBI NO: 18395251 NR Description: putative OBP32pep protein; protein id:
  misc_feature (1)..(77): Homolog of NCBI NO: 15220781 NR Description: OBP32pep protein, putative; protein id:
  misc_feature (1)..(74): Homolog of NCBI NO: 25373400 NR Description: hypothetical protein F5O8.7 [imported] -
  misc_feature (1)..(74): Homolog of NCBI NO: 8778586 NR Description: F28C11.14 [Arabidopsis thaliana]
MKQQLKLWRDTEKKEQWNDAPPNVKVERRNDLEWGMSTIEMQFTLGLPPQAAYNVLTNPDNQPYFRIIKGRQLLVSSFNLSFH

SEQ ID NO: 39118 - DNA, 1227 bp, Arabidopsis thaliana
  misc_feature (1)..(1227): Ceres Seq. ID no. 12395444
  misc_feature: MA Experiment ID: 108576 Result: Up-regulated in Transcription
  misc_feature: MA Experiment 108576 PARAMETER Experiment Name: At_42deg_Heat_cDNA_P Parameter: Temperature (deg C) Value: 42 vs. 22
  misc_feature: MA Experiment 108576 PARAMETER Experiment Name: At_42deg_Heat_cDNA_P Parameter: Timepoint (hr) Value: 1
  misc_feature: MA Experiment 108576 PARAMETER Experiment Name: At_42deg_Heat_cDNA_P Parameter: Tissue Value: Aerial
  misc_feature: MA Experiment ID: 108577 Result: Up-regulated in Transcription
  misc_feature: MA Experiment 108577 PARAMETER Experiment Name: At_42deg_Heat_cDNA_P Parameter: Temperature (deg C) Value: 42 vs. 22
  misc_feature: MA Experiment 108577 PARAMETER Experiment Name: At_42deg_Heat_cDNA_P Parameter: Timepoint (hr) Value: 6
  misc_feature: MA Experiment 108577 PARAMETER Experiment Name: At_42deg_Heat_cDNA_P Parameter: Tissue Value: Aerial
  misc_feature: MA Experiment ID: 20001906 Result: Down-regulated in Transcription
  misc_feature: MA Experiment 20001906 PARAMETER Experiment Name: At_Drought_Reproduction_P Parameter: Age (day) Value: 35
  misc_feature: MA Experiment 20001906 PARAMETER Experiment Name: At_Drought_Reproduction_P Parameter: Organism Value: A. thaliana
  misc_feature: MA Experiment 20001906 PARAMETER Experiment Name: At_Drought_Reproduction_P Parameter: Plant Line Value: WS
  misc_feature: MA Experiment 20001906 PARAMETER Experiment Name: At_Drought_Reproduction_P Parameter: Timepoint (day) Value: 5
  misc_feature: MA Experiment 20001906 PARAMETER Experiment Name: At_Drought_Reproduction_P Parameter: Tissue Value: Siliques
  misc_feature: MA Experiment 20001906 PARAMETER Experiment Name: At_Drought_Reproduction_P Parameter: Treatment Value: Drought vs. No Drought
acgttctattttcttctcctttttctatctttagcaatgaacatatcagtaaacggacagtcacaagtacctcctggctttaggtttcacccaaccgaggaagagctcttgaagtattacctccgcaagaaaatctctaacatcaaaatcgatctcgatgttattcctgacattgatctcaacaagctcgagccttgggatattcaagagatgtgtaagattggaacgaccccgcaaaacgattggtatttctttagccataaggacaagaagtatcccacggggactagaaccaacagagccaccacggtgggattttggaaagcgacgggacgtgacaagaccatatataccaatgatgataggatcgggatgcgaaagacgcttgtcttctacaaaggtcgagcccctcatggtcagaaatccgattggatcatgcaaatatagactcgacgagagtgtattaatctcctcgtgtggcgatgatgacgtcaacgtagaaacgtgtgatgtcataggaagtgacgaaggatgggtggtgtgtcgtgttttcaagaaaaataacctttgcaaaaacatgattagtagtagcccggcgagttcggtgaaaacgccgtcgttcaatgaggagactatcgagcaacttctcgaagttatggggcaatcttgtaaaggagagatagttttagaccctttcttaaaactccctaacctcgaatgccataacaacaccaccatcacgagttatcagcggttaatcgacgaccaagtcaacaactgccacgtcagcaaagttatggatcccagcttcatcactagctgggccgctttggatcggctcgttgcctcacagttaaatgggcccaactcgtattcaataccagccgttagtgagacttcacaatcaccgtatcatggactgaaccggtccggttgtcataccggtttaacaccagattactatataccggagattgatttatggaacgaggcagatttcgcgagaacgacatgccacttgttgaacggtagtggataacggaaatggaagagaggaagtgactaagtgagtgacataccaaaacattgtgtagaaagatataataatcatcataccatatggtatagttgttgaaacttttacggtataaatggtcagattgtgataattacagtacgtagttatgtgatatcattacagaaaataaaagttgtctatatctgtgt

SEQ ID NO: 39119 - protein, 293 aa, Arabidopsis thaliana
  peptide (1)..(293): Ceres Seq. ID no. 12395445
  misc_feature (123)..(197): Homolog of NCBI NO: 15217491 NR Description: unknown protein; protein id: At1g33280.1
  misc_feature (122)..(152): Homolog of NCBI NO: 15235031 NR Description: NAM/NAP like protein; protein id: At4g10350.1
  misc_feature (123)..(148): Homolog of NCBI NO: 6006373 NR Description: Similar to NAM like protein (AC005310)
  misc_feature (95)..(290): Homolog of NCBI NO: 7485760 NR Description: NAM (no apical meristem)-like protein
  misc_feature (95)..(293): Homolog of NCBI NO: 27754598 NR Description: putative NAM (no apical meristem) protein
  misc_feature (95)..(293): Homolog of NCBI NO: 30690500 NR Description: No apical meristem (NAM) protein family
  misc_feature (95)..(293): Homolog of NCBI NO: 15228643 NR Description: NAM-like protein
  misc_feature (95)..(293): Homolog of NCBI NO: 21536577 NR Description: NAM-like protein [Arabidopsis thaliana]
MLFLTLISTSSSLGIFKRCVRLERPRKTIGISLAIRTRSIPRGLEPTEPPRWDFGKRRDVTRPYIPMMIGSGCERRLSSTKVEPLMVRNPIGSCKYRLDESVLISSCGDDDVNVETCDVIGSDEGWVVCRVFKKNNLCKNMISSSPASSVKTPSFNEETIEQLLEVMGQSCKGEIVLDPFLKLPNLECHNNTTITSYQRLIDDQVNNCHVSKVMDPSFITSWAALDRLVASQLNGPNSYSIPAVSETSQSPYHGLNRSGCHTGLTPDYYIPEIDLWNEADFARTTCHLLNGSG

SEQ ID NO: 39120 - protein, 227 aa, Arabidopsis thaliana
  peptide (1)..(227): Ceres Seq. ID no. 12395446
  misc_feature (57)..(131): Homolog of NCBI NO: 15217491 NR Description: unknown protein; protein id: At1g33280.1
  misc_feature (56)..(86): Homolog of NCBI NO: 15235031 NR Description: NAM/NAP like protein; protein id: At4g10350.1
  misc_feature (57)..(82): Homolog of NCBI NO: 6006373 NR Description: Similar to NAM like protein (AC005310)
  misc_feature (29)..(224): Homolog of NCBI NO: 7485760 NR Description: NAM (no apical meristem)-like protein
  misc_feature (29)..(227): Homolog of NCBI NO: 27754598 NR Description: putative NAM (no apical meristem) protein
  misc_feature (29)..(227): Homolog of NCBI NO: 30690500 NR Description: No apical meristem (NAM) protein family
  misc_feature (29)..(227): Homolog of NCBI NO: 15228643 NR Description: NAM-like protein
  misc_feature (29)..(227): Homolog of NCBI NO: 21536577 NR Description: NAM-like protein [Arabidopsis thaliana]
MMIGSGCERRLSSTKVEPLMVRNPIGSCKYRLDESVLISSCGDDDVNVETCDVIGSDEGWVVCRVFKKNNLCKNMISSSPASSVKTPSFNEETIEQLLEVMGQSCKGEIVLDPFLKLPNLECHNNTTITSYQRLIDDQVNNCHVSKVMDPSFITSWAALDRLVASQLNGPNSYSIPAVSETSQSPYHGLNRSGCHTGLTPDYYIPEIDLWNEADFARTTCHLLNGSG

SEQ ID NO: 39121 - protein, 226 aa, Arabidopsis thaliana
  peptide (1)..(226): Ceres Seq. ID no. 12395447
  misc_feature (56)..(130): Homolog of NCBI NO: 15217491 NR Description: unknown protein; protein id: At1g33280.1
  misc_feature (55)..(85): Homolog of NCBI NO: 15235031 NR Description: NAM/NAP like protein; protein id: At4g10350.1
  misc_feature (56)..(81): Homolog of NCBI NO: 6006373 NR Description: Similar to NAM like protein (AC005310)
  misc_feature (28)..(223): Homolog of NCBI NO: 7485760 NR Description: NAM (no apical meristem)-like protein
  misc_feature (28)..(226): Homolog of NCBI NO: 27754598 NR Description: putative NAM (no apical meristem) protein
  misc_feature (28)..(226): Homolog of NCBI NO: 30690500 NR Description: No apical meristem (NAM) protein family
  misc_feature (28)..(226): Homolog of NCBI NO: 15228643 NR Description: NAM-like protein
  misc_feature (28)..(226): Homolog of NCBI NO: 21536577 NR Description: NAM-like protein [Arabidopsis thaliana]
MIGSGCERRLSSTKVEPLMVRNPIGSCKYRLDESVLISSCGDDDVNVETCDVIGSDEGWVVCRVFKKNNLCKNMISSSPASSVKTPSFNEETIEQLLEVMGQSCKGEIVLDPFLKLPNLECHNNTTITSYQRLIDDQVNNCHVSKVMDPSFITSWAALDRLVASQLNGPNSYSIPAVSETSQSPYHGLNRSGCHTGLTPDYYIPEIDLWNEADFARTTCHLLNGSG

SEQ ID NO: 39122 - DNA, 578 bp, Arabidopsis thaliana
  misc_feature (1)..(578): Ceres Seq. ID no. 12323206
  misc_feature: MA Experiment ID: 108462 Result: Down-regulated in Transcription
  misc_feature: MA Experiment 108462 PARAMETER Experiment Name: At_Germinating_Seeds_cDNA_P Parameter: Age (day) Value: 2 vs. 0
  misc_feature: MA Experiment 108462 PARAMETER Experiment Name: At_Germinating_Seeds_cDNA_P Parameter: Tissue Value: Germinating Seeds
  misc_feature: MA Experiment ID: 108463 Result: Down-regulated in Transcription
  misc_feature: MA Experiment 108463 PARAMETER Experiment Name: At_Germinating_Seeds_cDNA_P Parameter: Age (day) Value: 3 vs. 0
  misc_feature: MA Experiment 108463 PARAMETER Experiment Name: At_Germinating_Seeds_cDNA_P Parameter: Tissue Value: Germinating Seeds
  misc_feature: MA Experiment ID: 108464 Result: Down-regulated in Transcription
  misc_feature: MA Experiment 108464 PARAMETER Experiment Name: At_Germinating_Seeds_cDNA_P Parameter: Age (day) Value: 4 vs. 0
  misc_feature: MA Experiment 108464 PARAMETER Experiment Name: At_Germinating_Seeds_cDNA_P Parameter: Tissue Value: Germinating Seeds
  misc_feature: MA Experiment ID: 108488 Result: Down-regulated in Transcription
  misc_feature: MA Experiment ID: 108572 Result: Down-regulated in Transcription
  misc_feature: MA Experiment 108572 PARAMETER Experiment Name: At_Drought_cDNA_P Parameter: Timepoint (hr) Value: 1
  misc_feature: MA Experiment 108572 PARAMETER Experiment Name: At_Drought_cDNA_P Parameter: Tissue Value: Aerial
  misc_feature: MA Experiment 108572 PARAMETER Experiment Name: At_Drought_cDNA_P Parameter: Treatment Value: Drought vs. No Drought
  misc_feature: MA Experiment ID: 108573 Result: Down-regulated in Transcription
  misc_feature: MA Experiment 108573 PARAMETER Experiment Name: At_Drought_cDNA_P Parameter: Timepoint (hr) Value: 6
  misc_feature: MA Experiment 108573 PARAMETER Experiment Name: At_Drought_cDNA_P Parameter: Tissue Value: Aerial
  misc_feature: MA Experiment 108573 PARAMETER Experiment Name: At_Drought_cDNA_P Parameter: Treatment Value: Drought vs. No Drought
  misc_feature: MA Experiment ID: 108576 Result: Down-regulated in Transcription
  misc_feature: MA Experiment 108576 PARAMETER Experiment Name: At_42deg_Heat_cDNA_P Parameter: Temperature (deg C) Value: 42 vs. 22
  misc_feature: MA Experiment 108576 PARAMETER Experiment Name: At_42deg_Heat_cDNA_P Parameter: Timepoint (hr) Value: 1
  misc_feature: MA Experiment 108576 PARAMETER Experiment Name: At_42deg_Heat_cDNA_P Parameter: Tissue Value: Aerial
  misc_feature: MA Experiment ID: 108577 Result: Down-regulated in Transcription
  misc_feature: MA Experiment 108577 PARAMETER Experiment Name: At_42deg_Heat_cDNA_P Parameter: Temperature (deg C) Value: 42 vs. 22
  misc_feature: MA Experiment 108577 PARAMETER Experiment Name: At_42deg_Heat_cDNA_P Parameter: Timepoint (hr) Value: 6
  misc_feature: MA Experiment 108577 PARAMETER Experiment Name: At_42deg_Heat_cDNA_P Parameter: Tissue Value: Aerial
  misc_feature: MA Experiment ID: 108579 Result: Up-regulated in Transcription
  misc_feature: MA Experiment 108579 PARAMETER Experiment Name: At_4deg_Cold_cDNA_P Parameter: Temperature (deg C) Value: 4 vs. 22
  misc_feature: MA Experiment 108579 PARAMETER Experiment Name: At_4deg_Cold_cDNA_P Parameter: Timepoint (hr) Value: 6
  misc_feature: MA Experiment 108579 PARAMETER Experiment Name: At_4deg_Cold_cDNA_P Parameter: Tissue Value: Aerial
  misc_feature: MA Experiment ID: 108585 Result: Down-regulated in Transcription
  misc_feature: MA Experiment 108585 PARAMETER Experiment Name: At_5mM_NaNP_cDNA_P Parameter: Timepoint (hr) Value: 6
  misc_feature: MA Experiment 108585 PARAMETER Experiment Name: At_5mM_NaNP_cDNA_P Parameter: Tissue Value: Aerial
  misc_feature: MA Experiment 108585 PARAMETER Experiment Name: At_5mM_NaNP_cDNA_P Parameter: Treatment Value: null
  misc_feature: MA Experiment ID: 108605 Result: Down-regulated in Transcription
  misc_feature: MA Experiment 108605 PARAMETER Experiment Name: At_100uM_ABA_cDNA_P Parameter: Timepoint (hr) Value: 6
  misc_feature: MA Experiment 108605 PARAMETER Experiment Name: At_100uM_ABA_cDNA_P Parameter: Tissue Value: Aerial
  misc_feature: MA Experiment 108605 PARAMETER Experiment Name: At_100uM_ABA_cDNA_P Parameter: Treatment Value: 100uM ABA vs. No Treatment
  misc_feature: MA Experiment ID: 108607 Result: Down-regulated in Transcription
  misc_feature: MA Experiment 108607 PARAMETER Experiment Name: At_100uM_ABA_cDNA_P Parameter: Timepoint (hr) Value: 4
  misc_feature: MA Experiment 108607 PARAMETER Experiment Name: At_100uM_ABA_cDNA_P Parameter: Tissue Value: Aerial
  misc_feature: MA Experiment 108607 PARAMETER Experiment Name: At_100uM_ABA_cDNA_P Parameter: Treatment Value: 100uM ABA vs. No Treatment
  misc_feature: MA Experiment ID: 20000069 Result: Up-regulated in Transcription
  misc_feature: MA Experiment 20000069 PARAMETER Experiment Name: At_100uM_ABA_Mutants_cDNA_P Parameter: Plant Line Value: CS23
  misc_feature: MA Experiment 20000069 PARAMETER Experiment Name: At_100uM_ABA_Mutants_cDNA_P Parameter: Timepoint (hr) Value: 6
  misc_feature: MA Experiment 20000069 PARAMETER Experiment Name: At_100uM_ABA_Mutants_cDNA_P Parameter: Tissue Value: Aerial
  misc_feature: MA Experiment 20000069 PARAMETER Experiment Name: At_100uM_ABA_Mutants_cDNA_P Parameter: Treatment Value: 100uM ABA vs. No Treatment
  misc_feature: MA Experiment ID: 20000070 Result: Up-regulated in Transcription
  misc_feature: MA Experiment 20000070 PARAMETER Experiment Name: At_100uM_ABA_Mutants_cDNA_P Parameter: Plant Line Value: CS24
  misc_feature: MA Experiment 20000070 PARAMETER Experiment Name: At_100uM_ABA_Mutants_cDNA_P Parameter: Timepoint (hr) Value: 6
  misc_feature: MA Experiment 20000070 PARAMETER Experiment Name: At_100uM_ABA_Mutants_cDNA_P Parameter: Tissue Value: Aerial
  misc_feature: MA Experiment 20000070 PARAMETER Experiment Name: At_100uM_ABA_Mutants_cDNA_P Parameter: Treatment Value: 100uM ABA vs. No Treatment
  misc_feature: MA Experiment ID: 20000071 Result: Up-regulated in Transcription
  misc_feature: MA Experiment 20000071 PARAMETER Experiment Name: At_100uM_ABA_Mutants_cDNA_P Parameter: Plant Line Value: CS8104
  misc_feature: MA Experiment 20000071 PARAMETER Experiment Name: At_100uM_ABA_Mutants_cDNA_P Parameter: Timepoint (hr) Value: 6
  misc_feature: MA Experiment 20000071 PARAMETER Experiment Name: At_100uM_ABA_Mutants_cDNA_P Parameter: Tissue Value: Aerial
  misc_feature: MA Experiment 20000071 PARAMETER Experiment Name: At_100uM_ABA_Mutants_cDNA_P Parameter: Treatment Value: 100uM ABA vs. No Treatment
  misc_feature: MA Experiment ID: 20000072 Result: Up-regulated in Transcription
  misc_feature: MA Experiment 20000072 PARAMETER Experiment Name: At_100uM_ABA_Mutants_cDNA_P Parameter: Plant Line Value: CS8105
  misc_feature: MA Experiment 20000072 PARAMETER Experiment Name: At_100uM_ABA_Mutants_cDNA_P Parameter: Timepoint (hr) Value: 6
  misc_feature: MA Experiment 20000072 PARAMETER Experiment Name: At_100uM_ABA_Mutants_cDNA_P Parameter: Tissue Value: Aerial
  misc_feature: MA Experiment 20000072 PARAMETER Experiment Name: At_100uM_ABA_Mutants_cDNA_P Parameter: Treatment Value: 100uM ABA vs. No Treatment
  misc_feature: MA Experiment ID: 20000086 Result: Up-regulated in Transcription
  misc_feature: MA Experiment 20000086 PARAMETER Experiment Name: At_100uM_ABA_Mutants_cDNA_P Parameter: Plant Line Value: CS22
  misc_feature: MA Experiment 20000086 PARAMETER Experiment Name: At_100uM_ABA_Mutants_cDNA_P Parameter: Timepoint (hr) Value: 6
  misc_feature: MA Experiment 20000086 PARAMETER Experiment Name: At_100uM_ABA_Mutants_cDNA_P Parameter: Tissue Value: Aerial
  misc_feature: MA Experiment 20000086 PARAMETER Experiment Name: At_100uM_ABA_Mutants_cDNA_P Parameter: Treatment Value: 100uM ABA vs. No Treatment
  misc_feature: MA Experiment ID: 20000087 Result: Up-regulated in Transcription
  misc_feature: MA Experiment 20000087 PARAMETER Experiment Name: At_100uM_ABA_Mutants_cDNA_P Parameter: Plant Line Value: WS
  misc_feature: MA Experiment 20000087 PARAMETER Experiment Name: At_100uM_ABA_Mutants_cDNA_P Parameter: Timepoint (hr) Value: 6
  misc_feature: MA Experiment 20000087 PARAMETER Experiment Name: At_100uM_ABA_Mutants_cDNA_P Parameter: Tissue Value: Aerial
  misc_feature: MA Experiment 20000087 PARAMETER Experiment Name: At_100uM_ABA_Mutants_cDNA_P Parameter: Treatment Value: 100uM ABA vs. No Treatment
  misc_feature: MA Experiment ID: 20000088 Result: Up-regulated in Transcription
  misc_feature: MA Experiment 20000088 PARAMETER Experiment Name: At_100uM_ABA_Mutants_cDNA_P Parameter: Plant Line Value: Landsberg
  misc_feature: MA Experiment 20000088 PARAMETER Experiment Name: At_100uM_ABA_Mutants_cDNA_P Parameter: Timepoint (hr) Value: 6
  misc_feature: MA Experiment 20000088 PARAMETER Experiment Name: At_100uM_ABA_Mutants_cDNA_P Parameter: Tissue Value: Aerial
  misc_feature: MA Experiment 20000088 PARAMETER Experiment Name: At_100uM_ABA_Mutants_cDNA_P Parameter: Treatment Value: 100uM ABA vs. No Treatment
  misc_feature: MA Experiment ID: 20000089 Result: Up-regulated in Transcription
  misc_feature: MA Experiment ID: 20000090 Result: Up-regulated in Transcription
  misc_feature: MA Experiment ID: 20000111 Result: Down-regulated in Transcription
  misc_feature: MA Experiment 20000111 PARAMETER Experiment Name: At_42deg_Heat_cDNA_P Parameter: Temperature (deg C) Value: 42 vs. 22
  misc_feature: MA Experiment 20000111 PARAMETER Experiment Name: At_42deg_Heat_cDNA_P Parameter: Timepoint (hr) Value: 6
  misc_feature: MA Experiment 20000111 PARAMETER Experiment Name: At_42deg_Heat_cDNA_P Parameter: Tissue Value: Aerial
  misc_feature: MA Experiment ID: 20000112 Result: Down-regulated in Transcription
  misc_feature: MA Experiment 20000112 PARAMETER Experiment Name: At_42deg_Heat_cDNA_P Parameter: Temperature (deg C) Value: 42 vs. 22
  misc_feature: MA Experiment 20000112 PARAMETER Experiment Name: At_42deg_Heat_cDNA_P Parameter: Timepoint (hr) Value: 2
  misc_feature: MA Experiment 20000112 PARAMETER Experiment Name: At_42deg_Heat_cDNA_P Parameter: Tissue Value: Aerial
  misc_feature: MA Experiment ID: 20000113 Result: Down-regulated in Transcription
  misc_feature: MA Experiment 20000113 PARAMETER Experiment Name: At_42deg_Heat_cDNA_P Parameter: Temperature (deg C) Value: 42 vs. 22
  misc_feature: MA Experiment 20000113 PARAMETER Experiment Name: At_42deg_Heat_cDNA_P Parameter: Timepoint (hr) Value: 8
  misc_feature: MA Experiment 20000113 PARAMETER Experiment Name: At_42deg_Heat_cDNA_P Parameter: Tissue Value: Aerial
  misc_feature: MA Experiment ID: 20000117 Result: Up-regulated in Transcription
  misc_feature: MA Experiment 20000117 PARAMETER Experiment Name: At_100uM_ABA_Mutants_cDNA_P Parameter: Plant Line Value: Columbia
  misc_feature: MA Experiment 20000117 PARAMETER Experiment Name: At_100uM_ABA_Mutants_cDNA_P Parameter: Timepoint (hr) Value: 6
  misc_feature: MA Experiment 20000117 PARAMETER Experiment Name: At_100uM_ABA_Mutants_cDNA_P Parameter: Tissue Value: Aerial
  misc_feature: MA Experiment 20000117 PARAMETER Experiment Name: At_100uM_ABA_Mutants_cDNA_P Parameter: Treatment Value: 100uM ABA vs. No Treatment
  misc_feature: MA Experiment ID: 20000173 Result: Down-regulated in Transcription
  misc_feature: MA Experiment 20000173 PARAMETER Experiment Name: At_42deg_Heat_P Parameter: Age (day) Value: 14
  misc_feature: MA Experiment 20000173 PARAMETER Experiment Name: At_42deg_Heat_P Parameter: Organism Value: A. thaliana
  misc_feature: MA Experiment 20000173 PARAMETER Experiment Name: At_42deg_Heat_P Parameter: Plant Line Value: WS
  misc_feature: MA Experiment 20000173 PARAMETER Experiment Name: At_42deg_Heat_P Parameter: Temperature (deg C) Value: 42 vs. 22
  misc_feature: MA Experiment 20000173 PARAMETER Experiment Name: At_42deg_Heat_P Parameter: Timepoint (hr) Value: 6
  misc_feature: MA Experiment 20000173 PARAMETER Experiment Name: At_42deg_Heat_P Parameter: Tissue Value: Aerial
  misc_feature: MA Experiment ID: 20000213 Result: Up-regulated in Transcription
  misc_feature: MA Experiment 20000213 PARAMETER Experiment Name: At_4deg_Cold_P Parameter: Timepoint (hr) Value: 2
  misc_feature: MA Experiment ID: 20000453 Result: Down-regulated in Transcription
  misc_feature: MA Experiment 20000453 PARAMETER Experiment Name: At_100uM_ABA_P Parameter: Age (day) Value: 15
  misc_feature: MA Experiment 20000453 PARAMETER Experiment Name: At_100uM_ABA_P Parameter: Organism Value: A. thaliana
  misc_feature: MA Experiment 20000453 PARAMETER Experiment Name: At_100uM_ABA_P Parameter: Plant Line Value: WS
  misc_feature: MA Experiment 20000453 PARAMETER Experiment Name: At_100uM_ABA_P Parameter: Timepoint (hr) Value: 24
  misc_feature: MA Experiment 20000453 PARAMETER Experiment Name: At_100uM_ABA_P Parameter: Tissue Value: Aerial
  misc_feature: MA Experiment 20000453 PARAMETER Experiment Name: At_100uM_ABA_P Parameter: Treatment Value: 100uM ABA vs. No Treatment
  misc_feature: MA Experiment ID: 20001247 Result: Down-regulated in Transcription
  misc_feature: MA Experiment 20001247 PARAMETER Experiment Name: At_Far-red-induction_P Parameter: Age (day) Value: 7
  misc_feature: MA Experiment 20001247 PARAMETER Experiment Name: At_Far-red-induction_P Parameter: Light Value: Far-red vs. White
  misc_feature: MA Experiment 20001247 PARAMETER Experiment Name: At_Far-red-induction_P Parameter: Organism Value: A. thaliana
  misc_feature: MA Experiment 20001247 PARAMETER Experiment Name: At_Far-red-induction_P Parameter: Plant Line Value: Columbia
  misc_feature: MA Experiment 20001247 PARAMETER Experiment Name: At_Far-red-induction_P Parameter: Timepoint (hr) Value: 1
  misc_feature: MA Experiment 20001247 PARAMETER Experiment Name: At_Far-red-induction_P Parameter: Tissue Value: Whole Plant
  misc_feature: MA Experiment ID: 20001248 Result: Up-regulated in Transcription
  misc_feature: MA Experiment 20001248 PARAMETER Experiment Name: At_Far-red-induction_P Parameter: Age (day) Value: 7
  misc_feature: MA Experiment 20001248 PARAMETER Experiment Name: At_Far-red-induction_P Parameter: Light Value: Far-red vs. White
  misc_feature: MA Experiment 20001248 PARAMETER Experiment Name: At_Far-red-induction_P Parameter: Organism Value: A. thaliana
  misc_feature: MA Experiment 20001248 PARAMETER Experiment Name: At_Far-red-induction_P Parameter: Plant Line Value: Columbia
  misc_feature: MA Experiment 20001248 PARAMETER Experiment Name: At_Far-red-induction_P Parameter: Timepoint (hr) Value: 4
  misc_feature: MA Experiment 20001248 PARAMETER Experiment Name: At_Far-red-induction_P Parameter: Tissue Value: Whole Plant
  misc_feature: MA Experiment ID: 20001557 Result: Up-regulated in Transcription
  misc_feature: MA Experiment 20001557 PARAMETER Experiment Name: At_Drought_Soil_Dry_P Parameter: Age (day) Value: 27
  misc_feature: MA Experiment 20001557 PARAMETER Experiment Name: At_Drought_Soil_Dry_P Parameter: Organism Value: A. thaliana
  misc_feature: MA Experiment 20001557 PARAMETER Experiment Name: At_Drought_Soil_Dry_P Parameter: Plant Line Value: WS
  misc_feature: MA Experiment 20001557 PARAMETER Experiment Name: At_Drought_Soil_Dry_P Parameter: Post Timepoint (hr) Value: 3
  misc_feature: MA Experiment 20001557 PARAMETER Experiment Name: At_Drought_Soil_Dry_P Parameter: Post-Treatment Value: Re-Water vs. No Drought
  misc_feature: MA Experiment 20001557 PARAMETER Experiment Name: At_Drought_Soil_Dry_P Parameter: Timepoint (day) Value: 13
  misc_feature: MA Experiment 20001557 PARAMETER Experiment Name: At_Drought_Soil_Dry_P Parameter: Treatment Value: Drought vs. No Drought
acacataagtctctctcttacattttgaaaccctaatttctcaaaaaaaatgtctgaagttgagtacctgctttgtcggcggccttgcctgggccaccaatgatgaagatcttcaaaggacgttctcacagttcggcgacgttatcgattctaagatcattaacgaccgcgagagtggaagatcaaggggattcggattcgtcaccttcaaggacgagaaagccatgagggatgcgattgaagagatgaacggtaaagagctcgatggacgtgtcatcaccgtgaacgaggctcagtcgagaggtagcggcggtggcggaggaggccgtggtggacgccgtgagggaggtggctacggaggcggtgatggtggaagttacggcggcggtggtggcggctggtaatcaaagatagagttgtttgcgtgctgctgctctgtttttggtttagatttggatttgtgtcaccacttctggtttggttatcgttcgtttggtttacttttttgatgaaacagtttcgtttaagtcttctttgtctggatcgaaatgttaattcgcgtgttgtttactaaattt

SEQ ID NO: 39123 - protein, 59 aa, Arabidopsis thaliana
  peptide (1)..(59): Ceres Seq. ID no. 12323207
  misc_feature (1)..(59): Homolog of NCBI NO: 21553354 NR Description: glycine-rich RNA binding protein 7 [Arabidopsis
  misc_feature (1)..(59): Homolog of NCBI NO: 15226605 NR Description: glycine-rich RNA binding protein AtGRP7
  misc_feature (1)..(59): Homolog of NCBI NO: 1346181 NR Description: Glycine-rich RNA-binding protein GRP2A
  misc_feature (1)..(59): Homolog of NCBI NO: 2226370 NR Description: RNA-binding protein [Nicotiana glutinosa]
  misc_feature (1)..(59): Homolog of NCBI NO: 30692258 NR Description: glycine-rich RNA-binding protein 8 (GRP8) (CCR1)
  misc_feature (1)..(59): Homolog of NCBI NO: 544426 NR Description: Glycine-rich RNA-binding protein
  misc_feature (1)..(59): Homolog of NCBI NO: 1346180 NR Description: Glycine-rich RNA-binding protein GRP1A
  misc_feature (1)..(59): Homolog of NCBI NO: 544416 NR Description: Glycine-rich RNA-binding protein 10
  misc_feature (1)..(58): Homolog of NCBI NO: 15235002 NR Description: glycine-rich RNA-binding protein 8 (GRP8)
  misc_feature (1)..(59): Homolog of NCBI NO: 30692254 NR Description: glycine-rich RNA-binding protein 8 (GRP8) (CCR1)
MRDAIEEMNGKELDGRVITVNEAQSRGSGGGGGGRGGRREGGGYGGGDGGSYGGGGGGW

SEQ ID NO: 39124 - protein, 52 aa, Arabidopsis thaliana
  peptide (1)..(52): Ceres Seq. ID no. 12323208
  misc_feature (1)..(52): Homolog of NCBI NO: 21553354 NR Description: glycine-rich RNA binding protein 7 [Arabidopsis
  misc_feature (1)..(52): Homolog of NCBI NO: 15226605 NR Description: glycine-rich RNA binding protein AtGRP7
  misc_feature (1)..(52): Homolog of NCBI NO: 1346181 NR Description: Glycine-rich RNA-binding protein GRP2A
  misc_feature (1)..(52): Homolog of NCBI NO: 2226370 NR Description: RNA-binding protein [Nicotiana glutinosa]
  misc_feature (1)..(52): Homolog of NCBI NO: 30692258 NR Description: glycine-rich RNA-binding protein 8 (GRP8) (CCR1)
  misc_feature (1)..(52): Homolog of NCBI NO: 544426 NR Description: Glycine-rich RNA-binding protein
  misc_feature (1)..(52): Homolog of NCBI NO: 1346180 NR Description: Glycine-rich RNA-binding protein GRP1A
  misc_feature (1)..(52): Homolog of NCBI NO: 544416 NR Description: Glycine-rich RNA-binding protein 10
  misc_feature (1)..(51): Homolog of NCBI NO: 15235002 NR Description: glycine-rich RNA-binding protein 8 (GRP8)
  misc_feature (1)..(52): Homolog of NCBI NO: 30692254 NR Description: glycine-rich RNA-binding protein 8 (GRP8) (CCR1)
MNGKELDGRVITVNEAQSRGSGGGGGGRGGRREGGGYGGGDGGSYGGGGGGW

SEQ ID NO: 39125 - protein, 42 aa, Arabidopsis thaliana
  peptide (1)..(42): Ceres Seq. ID no. 12323209
MMKIFKGRSHSSATLSILRSLTTARVEDQGDSDSSPSRTRKP

SEQ ID NO: 39126 - DNA, 2337 bp, Arabidopsis thaliana
  misc_feature (1)..(2337): Ceres Seq. ID no. 13645846
  misc_feature: MA Experiment ID: 20000171 Result: Down-regulated in Transcription
  misc_feature: MA Experiment 20000171 PARAMETER Experiment Name: At_42deg_Heat_P Parameter: Age (day) Value: 14
  misc_feature: MA Experiment 20000171 PARAMETER Experiment Name: At_42deg_Heat_P Parameter: Organism Value: A. thaliana
  misc_feature: MA Experiment 20000171 PARAMETER Experiment Name: At_42deg_Heat_P Parameter: Plant Line Value: WS
  misc_feature: MA Experiment 20000171 PARAMETER Experiment Name: At_42deg_Heat_P Parameter: Temperature (deg C) Value: 42 vs. 22
  misc_feature: MA Experiment 20000171 PARAMETER Experiment Name: At_42deg_Heat_P Parameter: Timepoint (hr) Value: 1
  misc_feature: MA Experiment 20000171 PARAMETER Experiment Name: At_42deg_Heat_P Parameter: Tissue Value: Aerial
  misc_feature: MA Experiment ID: 20000173 Result: Down-regulated in Transcription
  misc_feature: MA Experiment 20000173 PARAMETER Experiment Name: At_42deg_Heat_P Parameter: Age (day) Value: 14
  misc_feature: MA Experiment 20000173 PARAMETER Experiment Name: At_42deg_Heat_P Parameter: Organism Value: A. thaliana
  misc_feature: MA Experiment 20000173 PARAMETER Experiment Name: At_42deg_Heat_P Parameter: Plant Line Value: WS
  misc_feature: MA Experiment 20000173 PARAMETER Experiment Name: At_42deg_Heat_P Parameter: Temperature (deg C) Value: 42 vs. 22
  misc_feature: MA Experiment 20000173 PARAMETER Experiment Name: At_42deg_Heat_P Parameter: Timepoint (hr) Value: 6
  misc_feature: MA Experiment 20000173 PARAMETER Experiment Name: At_42deg_Heat_P Parameter: Tissue Value: Aerial
  misc_feature: MA Experiment ID: 20000184 Result: Down-regulated in Transcription
  misc_feature: MA Experiment 20000184 PARAMETER Experiment Name: At_Shoots__P Parameter: Age (day) Value: 7
  misc_feature: MA Experiment 20000184 PARAMETER Experiment Name: At_Shoots__P Parameter: Tissue Value: Shoots vs. Whole Plant
  misc_feature: MA Experiment ID: 20000185 Result: Down-regulated in Transcription
  misc_feature: MA Experiment 20000185 PARAMETER Experiment Name: At_Roots__P Parameter: Age (day) Value: 7 vs. 21
  misc_feature: MA Experiment 20000185 PARAMETER Experiment Name: At_Roots__P Parameter: Organism Value: A. thaliana
  misc_feature: MA Experiment 20000185 PARAMETER Experiment Name: At_Roots__P Parameter: Tissue Value: Roots vs. Whole Plant
  misc_feature: MA Experiment ID: 20000439 Result: Down-regulated in Transcription
  misc_feature: MA Experiment 20000439 PARAMETER Experiment Name: At_Roots__P Parameter: Age (day) Value: 14 vs. 21
  misc_feature: MA Experiment 20000439 PARAMETER Experiment Name: At_Roots__P Parameter: Organism Value: A. thaliana
  misc_feature: MA Experiment 20000439 PARAMETER Experiment Name: At_Roots__P Parameter: Tissue Value: Roots vs. Whole Plant
  misc_feature: MA Experiment ID: 20000451 Result: Up-regulated in Transcription
  misc_feature: MA Experiment 20000451 PARAMETER Experiment Name: At_CS6879_Shoots-Roots_P Parameter: Age (day) Value: 14
  misc_feature: MA Experiment 20000451 PARAMETER Experiment Name: At_CS6879_Shoots-Roots_P Parameter: Organism Value: A. thaliana
  misc_feature: MA Experiment 20000451 PARAMETER Experiment Name: At_CS6879_Shoots-Roots_P Parameter: Plant Line Value: CS6879 vs. WS
  misc_feature: MA Experiment 20000451 PARAMETER Experiment Name: At_CS6879_Shoots-Roots_P Parameter: Tissue Value: Roots
  misc_feature: MA Experiment ID: 20000573 Result: Down-regulated in Transcription
  misc_feature: MA Experiment 20000573 PARAMETER Experiment Name: At_100uM_ABA_Mutants__P Parameter: Organism Value: A. thaliana
  misc_feature: MA Experiment 20000573 PARAMETER Experiment Name: At_100uM_ABA_Mutants__P Parameter: Plant Line Value: CS22 vs. Ler wt
  misc_feature: MA Experiment 20000573 PARAMETER Experiment Name: At_100uM_ABA_Mutants__P Parameter: Timepoint (hr) Value: N/A
  misc_feature: MA Experiment 20000573 PARAMETER Experiment Name: At_100uM_ABA_Mutants__P Parameter: Tissue Value: Whole Plant
  misc_feature: MA Experiment 20000573 PARAMETER Experiment Name: At_100uM_ABA_Mutants__P Parameter: Treatment Value: None
  misc_feature: MA Experiment ID: 20001450 Result: Down-regulated in Transcription
  misc_feature: MA Experiment 20001450 PARAMETER Experiment Name: At_Far-red-induction_P Parameter: Age (day) Value: 7
  misc_feature: MA Experiment 20001450 PARAMETER Experiment Name: At_Far-red-induction_P Parameter: Light Value: Far-red vs. White
  misc_feature: MA Experiment 20001450 PARAMETER Experiment Name: At_Far-red-induction_P Parameter: Organism Value: A. thaliana
  misc_feature: MA Experiment 20001450 PARAMETER Experiment Name: At_Far-red-induction_P Parameter: Plant Line Value: Columbia
  misc_feature: MA Experiment 20001450 PARAMETER Experiment Name: At_Far-red-induction_P Parameter: Timepoint (hr) Value: 8
  misc_feature: MA Experiment 20001450 PARAMETER Experiment Name: At_Far-red-induction_P Parameter: Tissue Value: Whole Plant
  misc_feature: MA Experiment ID: 20001451 Result: Down-regulated in Transcription
  misc_feature: MA Experiment 20001451 PARAMETER Experiment Name: At_Far-red-induction_P Parameter: Age (day) Value: 7
  misc_feature: MA Experiment 20001451 PARAMETER Experiment Name: At_Far-red-induction_P Parameter: Light Value: Far-red vs. White
  misc_feature: MA Experiment 20001451 PARAMETER Experiment Name: At_Far-red-induction_P Parameter: Organism Value: A. thaliana
  misc_feature: MA Experiment 20001451 PARAMETER Experiment Name: At_Far-red-induction_P Parameter: Plant Line Value: Columbia
  misc_feature: MA Experiment 20001451 PARAMETER Experiment Name: At_Far-red-induction_P Parameter: Timepoint (hr) Value: 24
  misc_feature: MA Experiment 20001451 PARAMETER Experiment Name: At_Far-red-induction_P Parameter: Tissue Value: Whole Plant
  misc_feature: MA Experiment ID: 20001555 Result: Down-regulated in Transcription
  misc_feature: MA Experiment 20001555 PARAMETER Experiment Name: At_Drought_Soil_Dry_P Parameter: Age (day) Value: 24
  misc_feature: MA Experiment 20001555 PARAMETER Experiment Name: At_Drought_Soil_Dry_P Parameter: Organism Value: A. thaliana
  misc_feature: MA Experiment 20001555 PARAMETER Experiment Name: At_Drought_Soil_Dry_P Parameter: Plant Line Value: WS
  misc_feature: MA Experiment 20001555 PARAMETER Experiment Name: At_Drought_Soil_Dry_P Parameter: Post Timepoint (hr) Value: None
  misc_feature: MA Experiment 20001555 PARAMETER Experiment Name: At_Drought_Soil_Dry_P Parameter: Post-Treatment Value: None
  misc_feature: MA Experiment 20001555 PARAMETER Experiment Name: At_Drought_Soil_Dry_P Parameter: Timepoint (day) Value: 10
  misc_feature: MA Experiment 20001555 PARAMETER Experiment Name: At_Drought_Soil_Dry_P Parameter: Treatment Value: Drought vs. No Drought
  misc_feature: MA Experiment ID: 20001557 Result: Up-regulated in Transcription
  misc_feature: MA Experiment 20001557 PARAMETER Experiment Name: At_Drought_Soil_Dry_P Parameter: Age (day) Value: 27
  misc_feature: MA Experiment 20001557 PARAMETER Experiment Name: At_Drought_Soil_Dry_P Parameter: Organism Value: A. thaliana
  misc_feature: MA Experiment 20001557 PARAMETER Experiment Name: At_Drought_Soil_Dry_P Parameter: Plant Line Value: WS
  misc_feature: MA Experiment 20001557 PARAMETER Experiment Name: At_Drought_Soil_Dry_P Parameter: Post Timepoint (hr) Value: 3
  misc_feature: MA Experiment 20001557 PARAMETER Experiment Name: At_Drought_Soil_Dry_P Parameter: Post-Treatment Value: Re-Water vs. No Drought
  misc_feature: MA Experiment 20001557 PARAMETER Experiment Name: At_Drought_Soil_Dry_P Parameter: Timepoint (day) Value: 13
  misc_feature: MA Experiment 20001557 PARAMETER Experiment Name: At_Drought_Soil_Dry_P Parameter: Treatment Value: Drought vs. No Drought
  misc_feature: MA Experiment ID: 20001558 Result: Up-regulated in Transcription
  misc_feature: MA Experiment 20001558 PARAMETER Experiment Name: At_Drought_Soil_Dry_P Parameter: Age (day) Value: 27
  misc_feature: MA Experiment 20001558 PARAMETER Experiment Name: At_Drought_Soil_Dry_P Parameter: Organism Value: A. thaliana
  misc_feature: MA Experiment 20001558 PARAMETER Experiment Name: At_Drought_Soil_Dry_P Parameter: Plant Line Value: WS
  misc_feature: MA Experiment 20001558 PARAMETER Experiment Name: At_Drought_Soil_Dry_P Parameter: Post Timepoint (hr) Value: 6
  misc_feature: MA Experiment 20001558 PARAMETER Experiment Name: At_Drought_Soil_Dry_P Parameter: Post-Treatment Value: Re-Water vs. No Drought
  misc_feature: MA Experiment 20001558 PARAMETER Experiment Name: At_Drought_Soil_Dry_P Parameter: Timepoint (day) Value: 13
  misc_feature: MA Experiment 20001558 PARAMETER Experiment Name: At_Drought_Soil_Dry_P Parameter: Treatment Value: Drought vs. No Drought
  misc_feature: MA Experiment ID: 20001904 Result: Down-regulated in Transcription
  misc_feature: MA Experiment 20001904 PARAMETER Experiment Name: At_Drought_Reproduction_P Parameter: Age (day) Value: 37
  misc_feature: MA Experiment 20001904 PARAMETER Experiment Name: At_Drought_Reproduction_P Parameter: Organism Value: A. thaliana
  misc_feature: MA Experiment 20001904 PARAMETER Experiment Name: At_Drought_Reproduction_P Parameter: Plant Line Value: WS
  misc_feature: MA Experiment 20001904 PARAMETER Experiment Name: At_Drought_Reproduction_P Parameter: Timepoint (day) Value: 7
  misc_feature: MA Experiment 20001904 PARAMETER Experiment Name: At_Drought_Reproduction_P Parameter: Tissue Value: Rosettes
  misc_feature: MA Experiment 20001904 PARAMETER Experiment Name: At_Drought_Reproduction_P Parameter: Treatment Value: Drought vs. No Drought
  misc_feature: MA Experiment ID: 20001905 Result: Down-regulated in Transcription
  misc_feature: MA Experiment 20001905 PARAMETER Experiment Name: At_Drought_Reproduction_P Parameter: Age (day) Value: 40
  misc_feature: MA Experiment 20001905 PARAMETER Experiment Name: At_Drought_Reproduction_P Parameter: Organism Value: A. thaliana
  misc_feature: MA Experiment 20001905 PARAMETER Experiment Name: At_Drought_Reproduction_P Parameter: Plant Line Value: WS
  misc_feature: MA Experiment 20001905 PARAMETER Experiment Name: At_Drought_Reproduction_P Parameter: Timepoint (day) Value: 10
  misc_feature: MA Experiment 20001905 PARAMETER Experiment Name: At_Drought_Reproduction_P Parameter: Tissue Value: Rosettes
  misc_feature: MA Experiment 20001905 PARAMETER Experiment Name: At_Drought_Reproduction_P Parameter: Treatment Value: Drought vs. No Drought
  misc_feature: MA Experiment ID: 20001911 Result: Down-regulated in Transcription
  misc_feature: MA Experiment 20001911 PARAMETER Experiment Name: At_Drought_Reproduction_P Parameter: Age (day) Value: 40
  misc_feature: MA Experiment 20001911 PARAMETER Experiment Name: At_Drought_Reproduction_P Parameter: Organism Value: A. thaliana
  misc_feature: MA Experiment 20001911 PARAMETER Experiment Name: At_Drought_Reproduction_P Parameter: Plant Line Value: WS
  misc_feature: MA Experiment 20001911 PARAMETER Experiment Name: At_Drought_Reproduction_P Parameter: Timepoint (day) Value: 10
  misc_feature: MA Experiment 20001911 PARAMETER Experiment Name: At_Drought_Reproduction_P Parameter: Tissue Value: Flowers
  misc_feature: MA Experiment 20001911 PARAMETER Experiment Name: At_Drought_Reproduction_P Parameter: Treatment Value: Drought vs. No Drought
caaattatcttctttctctttctctctgatcatttccaaattatttctaagctaagaaaatctttaaaaataacaaagcttctaaaataataatccgacctaccggattcaaaccattgatctgaagatcatctataaaccagtccttgatctataaactaaaataagggaagaaaaaaacaagagagagaaatagagaatgaagtcttttgcggctaaggtagaagagggagttaaaggaatagacggaaagccgtcggtaggtccggtgtaccggaatcttctgtcggaaaaaggttttcctccgattgattctgagatcaccactgcttgggacattttcagtaaatcagtggagaaattccctgacaataatatgcttggatggcgtcgaattgttgatgagaaggttggaccatatatgtggaaaacgtacaaggaagtatacgaagaagttttgcagattggctctgcactacgagccgccggagctgaacctgggagtcgagtggggatctacggtgttaattgtcctcagtggatcatagcaatggaggcttgtgcagctcacactctaatctgtgtacctctatatgatacattgggttcaggagcagtcgattacattgtagagcatgcggaaatcgactttgtgtttgtccaagacaccaaaattaaaggacttcttgagccagattgcaaatgtgctaaacggctaaaagctatagtttccttcactaacgtgagcgacgagcttagccacaaggcttcagaaattggagtcaaaacatactcctggatcgattttctccatatgggacgtgagaaaccggaagacacgaacccgcctaaggcgtttaacatatgcaccataatgtacaccagcggcacaagcggtgatcctaaaggtgtggttttgactcaccaagcggtcgcgacttttgttgttgggatggatctctatatggaccagtttgaagataagatgacacatgatgatgtgtatctctccttcttgccgttggctcatattcttgaccgtatgaatgaggaatacttctttcgcaaaggcgcttccgtcggctattaccatggaaatttgaacgtgttacgtgacgatattcaagaactgaaaccgacttatctagctggagtaccaagagtgtttgagagaatccatgaggggattcaaaaggctcttcaagaacttaatccaagaaggagattcatcttcaatgctctctacaaacacaagcttgcgtggttgaatcgtagatactctcatagtaaagcttcacccatggctgatttcattgctttcagaaagattagagacaaattgggaggtcgcatccggttgttagtatccggaggagcacctttgagccctgagattgaagagtttttgagagttacttgttgttgctttgtcgttcaaggctacggtctaacggagacgcttggaggaacggctttgggtttcccggacgagatgtgtatgctagggacagtcggtattccagcggtttacaacgagatacggcttgaggaggtgtctgaaatgggctatgacccgctcggagaaaatccggcaggagagatctgtataagaggacaatgtatgttttctgggtattacaagaaccctgaactcactgaagaagtcatgaaagatggatggttccacacaggagatataggtgagattcttccaaacggagtactcaagatcatcgatcgcaaaaagaatctgatcaaactttctcaaggagaatatgttgctctcgagcatttggaaaacatcttcgggcaaaactctgttgtccaagatatatgggtttatggagacagcttcaaatctatgcttgtcgcggtggttgttcccaacccagaaaccgtcaacaggtgggctaaagatctcggttttactaaaccattcgtagaactctgttctttcccggagcttaaagaacacatcatttcagaactgaagtccacggcagaaaagaacaagctaagaaagtttgagtacatcaaagcggtggcagtggagacaaaacctttcgacgtagagagagacttagtgactgcgacgctcaagaatcggaggaacaatcttctcaaatattatcaggtgcaaatcgacgaaatgtaccgcaaattggcctcaaagaaaatctgaaagtattgcgatgatgtgtgtgctgttattgatagttatatatgtacgttatatgtatcaataattcatagatatgagctttatgctttatgtaatattttatttttatgttgtatgacatttacatcataattatggattttttttttcttttg

SEQ ID NO: 39127 - protein, 660 aa, Arabidopsis thaliana
  peptide (1)..(660): Ceres Seq. ID no. 13645847
  misc_feature (78)..(345): Pfam Name: AMP-binding enzyme Pfam Description: AMP-binding enzyme
  misc_feature (36)..(657): Homolog of NCBI NO: 18397422 NR Description: AMP-binding protein, putative [Arabidopsis
  misc_feature (36)..(657): Homolog of NCBI NO: 13516481 NR Description: long-chain acyl-CoA synthetase [Arabidopsis
  misc_feature (8)..(659): Homolog of NCBI NO: 7437844 NR Description: probable long-chain-fatty-acid-CoA ligase (EC
  misc_feature (8)..(652): Homolog of NCBI NO: 22330132 NR Description: long-chain-fatty-acid--CoA ligase (acyl CoA
  misc_feature (20)..(653): Homolog of NCBI NO: 34898260 NR Description: similar to long-chain-fatty-acid--CoA ligase 1
  misc_feature (2)..(653): Homolog of NCBI NO: 20805871 NR Description: long chain acyl-CoA synthetase 5 [Arabidopsis
  misc_feature (2)..(653): Homolog of NCBI NO: 15237023 NR Description: long-chain-fatty-acid--CoA ligase (acyl CoA
  misc_feature (4)..(654): Homolog of NCBI NO: 15217631 NR Description: long-chain-fatty-acid--CoA ligase (acyl-CoA
  misc_feature (1)..(659): Homolog of NCBI NO: 7437845 NR Description: probable long-chain-fatty-acid-CoA ligase (EC
  misc_feature (1)..(658): Homolog of NCBI NO: 15236634 NR Description: long-chain-fatty-acid--CoA ligase (acyl-CoA
MKSFAAKVEEGVKGIDGKPSVGPVYRNLLSEKGFPPIDSEITTAWDIFSKSVEKFPDNNMLGWRRIVDEKVGPYMWKTYKEVYEEVLQIGSALRAAGAEPGSRVGIYGVNCPQWIIAMEACAAHTLICVPLYDTLGSGAVDYIVEHAEIDFVFVQDTKIKGLLEPDCKCAKRLKAIVSFTNVSDELSHKASEIGVKTYSWIDFLHMGREKPEDTNPPKAFNICTIMYTSGTSGDPKGVVLTHQAVATFVVGMDLYMDQFEDKMTHDDVYLSFLPLAHILDRMNEEYFFRKGASVGYYHGNLNVLRDDIQELKPTYLAGVPRVFERIHEGIQKALQELNPRRRFIFNALYKHKLAWLNRRYSHSKASPMADFIAFRKIRDKLGGRIRLLVSGGAPLSPEIEEFLRVTCCCFVVQGYGLTETLGGTALGFPDEMCMLGTVGIPAVYNEIRLEEVSEMGYDPLGENPAGEICIRGQCMFSGYYKNPELTEEVMKDGWFHTGDIGEILPNGVLKIIDRKKNLIKLSQGEYVALEHLENIFGQNSVVQDIWVYGDSFKSMLVAVVVPNPETVNRWAKDLGFTKPFVELCSFPELKEHIISELKSTAEKNKLRKFEYIKAVAVETKPFDVERDLVTATLKNRRNNLLKYYQVQIDEMYRKLASKKI

SEQ ID NO: 39128 - protein, 601 aa, Arabidopsis thaliana
  peptide (1)..(601): Ceres Seq. ID no. 13645848
  misc_feature (19)..(286): Pfam Name: AMP-binding enzyme Pfam Description: AMP-binding enzyme
  misc_feature (1)..(598): Homolog of NCBI NO: 18397422 NR Description: AMP-binding protein, putative [Arabidopsis
  misc_feature (1)..(598): Homolog of NCBI NO: 13516481 NR Description: long-chain acyl-CoA synthetase [Arabidopsis
  misc_feature (1)..(600): Homolog of NCBI NO: 7437844 NR Description: probable long-chain-fatty-acid-CoA ligase (EC
  misc_feature (1)..(593): Homolog of NCBI NO: 22330132 NR Description: long-chain-fatty-acid--CoA ligase (acyl CoA
  misc_feature (1)..(594): Homolog of NCBI NO: 34898260 NR Description: similar to long-chain-fatty-acid--CoA ligase 1
  misc_feature (1)..(594): Homolog of NCBI NO: 20805871 NR Description: long chain acyl-CoA synthetase 5 [Arabidopsis
  misc_feature (1)..(594): Homolog of NCBI NO: 15237023 NR Description: long-chain-fatty-acid--CoA ligase (acyl CoA
  misc_feature (1)..(595): Homolog of NCBI NO: 15217631 NR Description: long-chain-fatty-acid--CoA ligase (acyl-CoA
  misc_feature (1)..(600): Homolog of NCBI NO: 7437845 NR Description: probable long-chain-fatty-acid-CoA ligase (EC
  misc_feature (1)..(599): Homolog of NCBI NO: 15236634 NR Description: long-chain-fatty-acid--CoA ligase (acyl-CoA
MLGWRRIVDEKVGPYMWKTYKEVYEEVLQIGSALRAAGAEPGSRVGIYGVNCPQWIIAMEACAAHTLICVPLYDTLGSGAVDYIVEHAEIDFVFVQDTKIKGLLEPDCKCAKRLKAIVSFTNVSDELSHKASEIGVKTYSWIDFLHMGREKPEDTNPPKAFNICTIMYTSGTSGDPKGVVLTHQAVATFVVGMDLYMDQFEDKMTHDDVYLSFLPLAHILDRMNEEYFFRKGASVGYYHGNLNVLRDDIQELKPTYLAGVPRVFERIHEGIQKALQELNPRRRFIFNALYKHKLAWLNRRYSHSKASPMADFIAFRKIRDKLGGRIRLLVSGGAPLSPEIEEFLRVTCCCFVVQGYGLTETLGGTALGFPDEMCMLGTVGIPAVYNEIRLEEVSEMGYDPLGENPAGEICIRGQCMFSGYYKNPELTEEVMKDGWFHTGDIGEILPNGVLKIIDRKKNLIKLSQGEYVALEHLENIFGQNSVVQDIWVYGDSFKSMLVAVVVPNPETVNRWAKDLGFTKPFVELCSFPELKEHIISELKSTAEKNKLRKFEYIKAVAVETKPFDVERDLVTATLKNRRNNLLKYYQVQIDEMYRKLASKKI

SEQ ID NO: 39129 - protein, 586 aa, Arabidopsis thaliana
  peptide (1)..(586): Ceres Seq. ID no. 13645849
  misc_feature (4)..(271): Pfam Name: AMP-binding enzyme Pfam Description: AMP-binding enzyme
  misc_feature (1)..(583): Homolog of NCBI NO: 18397422 NR Description: AMP-binding protein, putative [Arabidopsis
  misc_feature (1)..(583): Homolog of NCBI NO: 13516481 NR Description: long-chain acyl-CoA synthetase [Arabidopsis
  misc_feature (1)..(585): Homolog of NCBI NO: 7437844 NR Description: probable long-chain-fatty-acid-CoA ligase (EC
  misc_feature (1)..(578): Homolog of NCBI NO: 22330132 NR Description: long-chain-fatty-acid--CoA ligase (acyl CoA
  misc_feature (1)..(579): Homolog of NCBI NO: 34898260 NR Description: similar to long-chain-fatty-acid--CoA ligase 1
  misc_feature (1)..(579): Homolog of NCBI NO: 20805871 NR Description: long chain acyl-CoA synthetase 5 [Arabidopsis
  misc_feature (1)..(579): Homolog of NCBI NO: 15237023 NR Description: long-chain-fatty-acid--CoA ligase (acyl CoA
  misc_feature (1)..(580): Homolog of NCBI NO: 15217631 NR Description: long-chain-fatty-acid--CoA ligase (acyl-CoA
  misc_feature (1)..(585): Homolog of NCBI NO: 7437845 NR Description: probable long-chain-fatty-acid-CoA ligase (EC
  misc_feature (1)..(584): Homolog of NCBI NO: 15236634 NR Description: long-chain-fatty-acid--CoA ligase (acyl-CoA
MWKTYKEVYEEVLQIGSALRAAGAEPGSRVGIYGVNCPQWIIAMEACAAHTLICVPLYDTLGSGAVDYIVEHAEIDFVFVQDTKIKGLLEPDCKCAKRLKAIVSFTNVSDELSHKASEIGVKTYSWIDFLHMGREKPEDTNPPKAFNICTIMYTSGTSGDPKGVVLTHQAVATFVVGMDLYMDQFEDKMTHDDVYLSFLPLAHILDRMNEEYFFRKGASVGYYHGNLNVLRDDIQELKPTYLAGVPRVFERIHEGIQKALQELNPRRRFIFNALYKHKLAWLNRRYSHSKASPMADFIAFRKIRDKLGGRIRLLVSGGAPLSPEIEEFLRVTCCCFVVQGYGLTETLGGTALGFPDEMCMLGTVGIPAVYNEIRLEEVSEMGYDPLGENPAGEICIRGQCMFSGYYKNPELTEEVMKDGWFHTGDIGEILPNGVLKIIDRKKNLIKLSQGEYVALEHLENIFGQNSVVQDIWVYGDSFKSMLVAVVVPNPETVNRWAKDLGFTKPFVELCSFPELKEHIISELKSTAEKNKLRKFEYIKAVAVETKPFDVERDLVTATLKNRRNNLLKYYQVQIDEMYRKLASKKI

SEQ ID NO: 39130 - DNA, 1917 bp, Arabidopsis thaliana
  misc_feature (1)..(1917): Ceres Seq. ID no. 12371118
  misc_feature: MA Experiment ID: 108461 Result: Down-regulated in Transcription
  misc_feature: MA Experiment 108461 PARAMETER Experiment Name: At_Germinating_Seeds_cDNA_P Parameter: Age (day) Value: 1 vs. 0
  misc_feature: MA Experiment 108461 PARAMETER Experiment Name: At_Germinating_Seeds_cDNA_P Parameter: Tissue Value: Germinating Seeds
  misc_feature: MA Experiment ID: 108462 Result: Down-regulated in Transcription
  misc_feature: MA Experiment 108462 PARAMETER Experiment Name: At_Germinating_Seeds_cDNA_P Parameter: Age (day) Value: 2 vs. 0
  misc_feature: MA Experiment 108462 PARAMETER Experiment Name: At_Germinating_Seeds_cDNA_P Parameter: Tissue Value: Germinating Seeds
  misc_feature: MA Experiment ID: 108463 Result: Down-regulated in Transcription
  misc_feature: MA Experiment 108463 PARAMETER Experiment Name: At_Germinating_Seeds_cDNA_P Parameter: Age (day) Value: 3 vs. 0
  misc_feature: MA Experiment 108463 PARAMETER Experiment Name: At_Germinating_Seeds_cDNA_P Parameter: Tissue Value: Germinating Seeds
  misc_feature: MA Experiment ID: 108464 Result: Down-regulated in Transcription
  misc_feature: MA Experiment 108464 PARAMETER Experiment Name: At_Germinating_Seeds_cDNA_P Parameter: Age (day) Value: 4 vs. 0
  misc_feature: MA Experiment 108464 PARAMETER Experiment Name: At_Germinating_Seeds_cDNA_P Parameter: Tissue Value: Germinating Seeds
  misc_feature: MA Experiment ID: 20001556 Result: Up-regulated in Transcription
  misc_feature: MA Experiment 20001556 PARAMETER Experiment Name: At_Drought_Soil_Dry_P Parameter: Age (day) Value: 26
  misc_feature: MA Experiment 20001556 PARAMETER Experiment Name: At_Drought_Soil_Dry_P Parameter: Organism Value: A. thaliana
  misc_feature: MA Experiment 20001556 PARAMETER Experiment Name: At_Drought_Soil_Dry_P Parameter: Plant Line Value: WS
  misc_feature: MA Experiment 20001556 PARAMETER Experiment Name: At_Drought_Soil_Dry_P Parameter: Post Timepoint (hr) Value: None
  misc_feature: MA Experiment 20001556 PARAMETER Experiment Name: At_Drought_Soil_Dry_P Parameter: Post-Treatment Value: None
  misc_feature: MA Experiment 20001556 PARAMETER Experiment Name: At_Drought_Soil_Dry_P Parameter: Timepoint (day) Value: 12
  misc_feature: MA Experiment 20001556 PARAMETER Experiment Name: At_Drought_Soil_Dry_P Parameter: Treatment Value: Drought vs. No Drought
gtacttgatatttaaaatcgatttctgatacacttgttagattgagacaatgagcaagggggcggcaataatagcttatgcaaatcccatctttcatattcgacatctaaagcttgaatctttcttgtggaacatcatcattcgtgccattgttcacaatgtttcgtcgcctcaacgacattctccgatctcagtctacctccgtatgcgcaaccatcgcgtctctcccgattttcatacctttccgtttcttctcccttctttccacaatccgcttcatcttcctcttgggcaacgaactcatgctcagattcttctttttggacttgacaaagacccatttgtccgaacttcactgctcaacatgtattcttcctgtggcgacttgagatcagctcagcgagttttcgatgactcgggctcgaaggatttaccggcctggaactctgtggtcaatgcttatgccaaagctgggttgatcgatgatgcgcggaaactgttcgacgaaatgcctgaaagaaacgtgatttcctggagctgcttgattaacggctacgttatgtgtgggaaatacaaagaagcgcttgatttgttccgggagatgcaattacctaaaccaaacgaagcattcgtcagacccaacgagtttacaatgtcgactgtactctcggcttgtgggcgattgggtgcgctcgagcaagggaaatgggttcacgcttacatcgataagtaccacgttgagattgacattgtcttaggcacagctctcattgatatgtacgccaaatgtgggagcctcgagagggcgaaaagggttttcaatgccttgggatccaagaaagatgtcaaagcttacagtgctatgatatgttgcttagcaatgtacggtctcacagatgagtgcttccaactgttctctgagatgaccacgagtgacaacataaacccaaactctgtgacatttgtgggcattctcggtgcttgtgtacatcgaggtctaataaacgaaggaaaatcttactttaaaatgatgattgaggaatttggtatacgccatcaatccagcattatggttgtatggttgatctctacggaagatctggtttgatcaaagaagcagagagctttatagcatctatgcctatggagcctgatgtacttatttgggggtctctcttaagcggatcaagaatgcttggggatatcaagacttgtgaaggtgccctcaagcgactcatcgagctagatcctatgaacagtggagcatatgtgcttctctctaacgtctatgccaaaacagggaggtggatggaagtcaagtgtatcagacacgaaatggaggcaatgcaaaactatttccctcttttccaactcttttcttaactgttgcacagtttctgaagtaaatacagattctctctacaggtaaagggcattaataaagttccgggatgtagctatgttgaagtagagggagtggttcacgagtttgttgtaggagacgaatctcaacaagagagcgaaaggatctatgctatgctcgatgagataatgcagaggctgagagaagctggatatgttacagacactaaggaggttttacttgatcttaacgagaaagataaagagatagctttgtcttaccacagtgagaaactggctattgcgttctgtttgatgaagacaaggcctggaactccagtgagaatcatcaagaacctcagaatctgtggagattgtcatcttgtaatgaagatgatctcgaagctttttagtagagaaattgttgtgagagattgtaatagatttcaccattttagagacgggtcttgctcttgcagagatttttggtgataacaattgcagcaatgtttgtgttggattgaataaacatattactgaattttggaggttttg

SEQ ID NO: 39131 - protein, 352 aa, Arabidopsis thaliana
  peptide (1)..(352): Ceres Seq. ID no. 12371119
  misc_feature (47)..(334): Homolog of NCBI NO: 15228829 NR Description: hypothetical protein; protein id: At3g22690.1
  misc_feature (47)..(334): Homolog of NCBI NO: 9279687 NR Description: gb|AAC35225.1~gene_id:MWI23.6~strong similarity
  misc_feature (85)..(334): Homolog of NCBI NO: 34910594 NR Description: putative selenium-binding protein
  misc_feature (10)..(337): Homolog of NCBI NO: 15242684 NR Description: putative protein; protein id: At5g40410.1
  misc_feature (29)..(334): Homolog of NCBI NO: 34915288 NR Description: similar to selenium-binding protein
  misc_feature (1)..(334): Homolog of NCBI NO: 15240085 NR Description: selenium-binding protein-like; protein id:
  misc_feature (10)..(334): Homolog of NCBI NO: 15239745 NR Description: selenium-binding protein-like
  misc_feature (10)..(337): Homolog of NCBI NO: 10178152 NR Description: selenium-binding protein-like [Arabidopsis
  misc_feature (8)..(340): Homolog of NCBI NO: 15223099 NR Description: unknown protein; protein id: At1g08070.1
  misc_feature (1)..(334): Homolog of NCBI NO: 15229340 NR Description: putative protein; protein id: At3g62890.1
MSKGAAIIAYANPIFHIRHLKLESFLWNIIIRAIVHNVSSPQRHSPISVYLRMRNHRVSPDFHTFPFLLPSFHNPLHLPLGQRTHAQILLFGLDKDPFVRTSLLNMYSSCGDLRSAQRVFDDSGSKDLPAWNSVVNAYAKAGLIDDARKLFDEMPERNVISWSCLINGYVMCGKYKEALDLFREMQLPKPNEAFVRPNEFTMSTVLSACGRLGALEQGKWVHAYIDKYHVEIDIVLGTALIDMYAKCGSLERAKRVFNALGSKKDVKAYSAMICCLAMYGLTDECFQLFSEMTTSDNINPNSVTFVGILGACVHRGLINEGKSYFKMMIEEFGIRHQSSIMVVWLISTEDLV

SEQ ID NO: 39132 - protein, 300 aa, Arabidopsis thaliana
  peptide (1)..(300): Ceres Seq. ID no. 12371120
  misc_feature (1)..(282): Homolog of NCBI NO: 15228829 NR Description: hypothetical protein; protein id: At3g22690.1
  misc_feature (1)..(282): Homolog of NCBI NO: 9279687 NR Description: gb|AAC35225.1~gene_id:MWI23.6~strong similarity
  misc_feature (33)..(282): Homolog of NCBI NO: 34910594 NR Description: putative selenium-binding protein
  misc_feature (1)..(285): Homolog of NCBI NO: 15242684 NR Description: putative protein; protein id: At5g40410.1
  misc_feature (1)..(282): Homolog of NCBI NO: 34915288 NR Description: similar to selenium-binding protein
  misc_feature (1)..(282): Homolog of NCBI NO: 15240085 NR Description: selenium-binding protein-like; protein id:
  misc_feature (1)..(282): Homolog of NCBI NO: 15239745 NR Description: selenium-binding protein-like
  misc_feature (1)..(285): Homolog of NCBI NO: 10178152 NR Description: selenium-binding protein-like [Arabidopsis
  misc_feature (1)..(288): Homolog of NCBI NO: 15223099 NR Description: unknown protein; protein id: At1g08070.1
  misc_feature (1)..(282): Homolog of NCBI NO: 15229340 NR Description: putative protein; protein id: At3g62890.1
MRNHRVSPDFHTFPFLLPSFHNPLHLPLGQRTHAQILLFGLDKDPFVRTSLLNMYSSCGDLRSAQRVFDDSGSKDLPAWNSVVNAYAKAGLIDDARKLFDEMPERNVISWSCLINGYVMCGKYKEALDLFREMQLPKPNEAFVRPNEFTMSTVLSACGRLGALEQGKWVHAYIDKYHVEIDIVLGTALIDMYAKCGSLERAKRVFNALGSKKDVKAYSAMICCLAMYGLTDECFQLFSEMTTSDNINPNSVTFVGILGACVHRGLINEGKSYFKMMIEEFGIRHQSSIMVVWLISTEDLV

SEQ ID NO: 39133 - protein, 247 aa, Arabidopsis thaliana
  peptide (1)..(247): Ceres Seq. ID no. 12371121
  misc_feature (1)..(229): Homolog of NCBI NO: 15228829 NR Description: hypothetical protein; protein id: At3g22690.1
  misc_feature (1)..(229): Homolog of NCBI NO: 9279687 NR Description: gb|AAC35225.1~gene_id:MWI23.6~strong similarity
  misc_feature (1)..(229): Homolog of NCBI NO: 34910594 NR Description: putative selenium-binding protein
  misc_feature (1)..(232): Homolog of NCBI NO: 15242684 NR Description: putative protein; protein id: At5g40410.1
  misc_feature (1)..(229): Homolog of NCBI NO: 34915288 NR Description: similar to selenium-binding protein
  misc_feature (1)..(229): Homolog of NCBI NO: 15240085 NR Description: selenium-binding protein-like; protein id:
  misc_feature (1)..(229): Homolog of NCBI NO: 15239745 NR Description: selenium-binding protein-like
  misc_feature (1)..(232): Homolog of NCBI NO: 10178152 NR Description: selenium-binding protein-like [Arabidopsis
  misc_feature (1)..(235): Homolog of NCBI NO: 15223099 NR Description: unknown protein; protein id: At1g08070.1
  misc_feature (1)..(229): Homolog of NCBI NO: 15229340 NR Description: putative protein; protein id: At3g62890.1
MYSSCGDLRSAQRVFDDSGSKDLPAWNSVVNAYAKAGLIDDARKLFDEMPERNVISWSCLINGYVMCGKYKEALDLFREMQLPKPNEAFVRPNEFTMSTVLSACGRLGALEQGKWVHAYIDKYHVEIDIVLGTALIDMYAKCGSLERAKRVFNALGSKKDVKAYSAMICCLAMYGLTDECFQLFSEMTTSDNINPNSVTFVGILGACVHRGLINEGKSYFKMMIEEFGIRHQSSIMVVWLISTEDLV

SEQ ID NO: 39134 - DNA, 2250 bp, Arabidopsis thaliana
  misc_feature (1)..(2250): Ceres Seq. ID no. 13497578
  misc_feature: MA Experiment ID: 108462 Result: Down-regulated in Transcription
  misc_feature: MA Experiment 108462 PARAMETER Experiment Name: At_Germinating_Seeds_cDNA_P Parameter: Age (day) Value: 2 vs. 0
  misc_feature: MA Experiment 108462 PARAMETER Experiment Name: At_Germinating_Seeds_cDNA_P Parameter: Tissue Value: Germinating Seeds
  misc_feature: MA Experiment ID: 108488 Result: Down-regulated in Transcription
  misc_feature: MA Experiment ID: 108577 Result: Down-regulated in Transcription
  misc_feature: MA Experiment 108577 PARAMETER Experiment Name: At_42deg_Heat_cDNA_P Parameter: Temperature (deg C) Value: 42 vs. 22
  misc_feature: MA Experiment 108577 PARAMETER Experiment Name: At_42deg_Heat_cDNA_P Parameter: Timepoint (hr) Value: 6
  misc_feature: MA Experiment 108577 PARAMETER Experiment Name: At_42deg_Heat_cDNA_P Parameter: Tissue Value: Aerial
  misc_feature: MA Experiment ID: 20000069 Result: Up-regulated in Transcription
  misc_feature: MA Experiment 20000069 PARAMETER Experiment Name: At_100uM_ABA_Mutants_cDNA_P Parameter: Plant Line Value: CS23
  misc_feature: MA Experiment 20000069 PARAMETER Experiment Name: At_100uM_ABA_Mutants_cDNA_P Parameter: Timepoint (hr) Value: 6
  misc_feature: MA Experiment 20000069 PARAMETER Experiment Name: At_100uM_ABA_Mutants_cDNA_P Parameter: Tissue Value: Aerial
  misc_feature: MA Experiment 20000069 PARAMETER Experiment Name: At_100uM_ABA_Mutants_cDNA_P Parameter: Treatment Value: 100uM ABA vs. No Treatment
  misc_feature: MA Experiment ID: 20000071 Result: Up-regulated in Transcription
  misc_feature: MA Experiment 20000071 PARAMETER Experiment Name: At_100uM_ABA_Mutants_cDNA_P Parameter: Plant Line Value: CS8104
  misc_feature: MA Experiment 20000071 PARAMETER Experiment Name: At_100uM_ABA_Mutants_cDNA_P Parameter: Timepoint (hr) Value: 6
  misc_feature: MA Experiment 20000071 PARAMETER Experiment Name: At_100uM_ABA_Mutants_cDNA_P Parameter: Tissue Value: Aerial
  misc_feature: MA Experiment 20000071 PARAMETER Experiment Name: At_100uM_ABA_Mutants_cDNA_P Parameter: Treatment Value: 100uM ABA vs. No Treatment
  misc_feature: MA Experiment ID: 20000087 Result: Up-regulated in Transcription
  misc_feature: MA Experiment 20000087 PARAMETER Experiment Name: At_100uM_ABA_Mutants_cDNA_P Parameter: Plant Line Value: WS
  misc_feature: MA Experiment 20000087 PARAMETER Experiment Name: At_100uM_ABA_Mutants_cDNA_P Parameter: Timepoint (hr) Value: 6
  misc_feature: MA Experiment 20000087 PARAMETER Experiment Name: At_100uM_ABA_Mutants_cDNA_P Parameter: Tissue Value: Aerial
  misc_feature: MA Experiment 20000087 PARAMETER Experiment Name: At_100uM_ABA_Mutants_cDNA_P Parameter: Treatment Value: 100uM ABA vs. No Treatment
  misc_feature: MA Experiment ID: 20000117 Result: Up-regulated in Transcription
  misc_feature: MA Experiment 20000117 PARAMETER Experiment Name: At_100uM_ABA_Mutants_cDNA_P Parameter: Plant Line Value: Columbia
  misc_feature: MA Experiment 20000117 PARAMETER Experiment Name: At_100uM_ABA_Mutants_cDNA_P Parameter: Timepoint (hr) Value: 6
  misc_feature: MA Experiment 20000117 PARAMETER Experiment Name: At_100uM_ABA_Mutants_cDNA_P Parameter: Tissue Value: Aerial
  misc_feature: MA Experiment 20000117 PARAMETER Experiment Name: At_100uM_ABA_Mutants_cDNA_P Parameter: Treatment Value: 100uM ABA vs. No Treatment
  misc_feature: MA Experiment ID: 20000224 Result: Down-regulated in Transcription
  misc_feature: MA Experiment ID: 20000794 Result: Up-regulated in Transcription
  misc_feature: MA Experiment 20000794 PARAMETER Experiment Name: At_Petals_P Parameter: Age (day) Value: 23-25 days
  misc_feature: MA Experiment 20000794 PARAMETER Experiment Name: At_Petals_P Parameter: Plant Line Value: WS
  misc_feature: MA Experiment 20000794 PARAMETER Experiment Name: At_Petals_P Parameter: Tissue Value: Petals vs. Whole plant
  misc_feature: MA Experiment ID: 20001557 Result: Up-regulated in Transcription
  misc_feature: MA Experiment 20001557 PARAMETER Experiment Name: At_Drought_Soil_Dry_P Parameter: Age (day) Value: 27
  misc_feature: MA Experiment 20001557 PARAMETER Experiment Name: At_Drought_Soil_Dry_P Parameter: Organism Value: A. thaliana
  misc_feature: MA Experiment 20001557 PARAMETER Experiment Name: At_Drought_Soil_Dry_P Parameter: Plant Line Value: WS
  misc_feature: MA Experiment 20001557 PARAMETER Experiment Name: At_Drought_Soil_Dry_P Parameter: Post Timepoint (hr) Value: 3
  misc_feature: MA Experiment 20001557 PARAMETER Experiment Name: At_Drought_Soil_Dry_P Parameter: Post-Treatment Value: Re-Water vs. No Drought
  misc_feature: MA Experiment 20001557 PARAMETER Experiment Name: At_Drought_Soil_Dry_P Parameter: Timepoint (day) Value: 13
  misc_feature: MA Experiment 20001557 PARAMETER Experiment Name: At_Drought_Soil_Dry_P Parameter: Treatment Value: Drought vs. No Drought
gtatcttgctctgtctccgataccaaaaggtttttgtattctattgaagattataaactaaagggaggagctttgagaatttgattgttgatatccaaggatttgcaagctagtttttttttttacgacgttatacttttcgattatgagtgcatcatgggctgatgtagctgactcagagaacacgggttctgggtcttctaatcagaattctcatccttcacgacctgcttatgttcctccacatctaaggaacaggccagcagcttctgagcctgttgctccattgccagctaatgatcgtgtaggttatggtggtccaccttctggctctcgatgggctcctggtggtagtggtgttggtgttggaggtggtggtggttatagggctgatgcaggtcgtcctggctctggctctggctatggtggacgaggaggtggtggttggaacaacagaagcggagggtgggaccgtagggaacgtgaagtaaacccctttgaaaatgatgattccgaaccagaaccagcttttactgagcaggataatacggttattaattttgatgcctatgaagatattccgattgagaccagtggggataatgtgcctcctcctgttaacacattcgcagagatagatctcggggaggcattgaatctaaatatccgtagatgcaaatatgttaagccaacacctgttcagcgtcatgcgattccgatattgcttgaagggagggatttgatggcctgtgctcagacagggtcggggaagacagctgctttttgctttccaatcattagtggaataatgaaagatcagcatgtacagagaccccgtggttcacgaacagtctaccctcttgcagttattctctcaccaacaagagagttggcaagtcagatacatgatgaggctaaaaggttctcttaccaaactggtgtgaaggtggttgttgcatatggaggaacacctattaaccagcagctccgggaacttgagaggggagtcgatattcttgtggcaacgcctggtcgattaaatgatttgctcgagagagctagagtctcaatgcagatgattagatttttagctcttgatgaggccgataggatgcttgacatgggttttgaaccacaaattagaaagattgtcgaacaaatggacatgcctccacgtggagttagacagacactgttgtttagtgctacatttccaagagaaattcagagactcgcagctgacttcctagcaaattatatatttttggctgtgggtagagtgggttcaagtaccgatttaattgtccaaagggttgagtttgtccttgactctgacaaaagaagtcatctcatggacctgcttcacgctcagagagagaatggcatccaaggcaagcaagccctgaccttagtttttgtggagacaaagagaggagctgactctttggaaaattggttgtgcatcaatgggtttccagcaacctccattcacggtgacagaacacagcaggaaagagaagtggcattgaaagccttcaagagtgggagaacaccgattttggttgcaactgatgtagcagcacgtggccttgacattccccacgtggctcatgtggtcaacttcgatctgccaaatgacattgatgactatgtccaccgtattggacgaacaggacgtgctggcaaatcaggactagcaactgccttcttcaacgatggcaacacctcactggccagaccgctcgctgagctgatgcaagaagctaaccaagaagtccctgagtggctcactcggtatgcgtcacggtcctcttttggtggtggtaagaaccggcggtctggtggtcgatttggtggccgtgactttagaagggaagggtctttcggtagcggtagaggaggctatggcggtggaggaggagggtatggcggcggaggaggctatggtggtggaggaggctatggcggcggaggaggctatggtggtggatatggtggtgcttcaagtggtggatatggtggagaacctccaagtgcttgggactaagcttccaatgttctttttgttttggttacaacttttgacaaaaaaaatatttcttctacattcacaaagagagtatgtattgccccttacacctatgagatttcactcaggagatggatatataacaattgttgatgttttaggtgttttgatctttttaggctattattaggggttgtcataaaaacagtcatcagtttcgc

SEQ ID NO: 39135 - protein, 633 aa, Arabidopsis thaliana
  peptide (1)..(633): Ceres Seq. ID no. 13497579
  misc_feature (172)..(389): Pfam Name: DEAD/DEAH box helicase Pfam Description: DEAD/DEAH box helicase
  misc_feature (9)..(111): Homolog of NCBI NO: 19528473 NR Description: RE28061p [Drosophila melanogaster]
  misc_feature (60)..(626): Homolog of NCBI NO: 19528473 NR Description: RE28061p [Drosophila melanogaster]
  misc_feature (9)..(111): Homolog of NCBI NO: 17985987 NR Description: belle CG9748-PA [Drosophila melanogaster]
  misc_feature (60)..(626): Homolog of NCBI NO: 17985987 NR Description: belle CG9748-PA [Drosophila melanogaster]
  misc_feature (200)..(633): Homolog of NCBI NO: 17064740 NR Description: ATP-dependent RNA helicase-like protein
  misc_feature (1)..(633): Homolog of NCBI NO: 34393986 NR Description: putative DEAD-box RNA helicase DEAD3(i|6753620)
  misc_feature (26)..(633): Homolog of NCBI NO: 11267530 NR Description: ATP-dependent RNA helicase-like protein -
  misc_feature (2)..(626): Homolog of NCBI NO: 15231074 NR Description: DEAD box RNA helicase, putative [Arabidopsis
  misc_feature (1)..(619): Homolog of NCBI NO: 11267530 NR Description: ATP-dependent RNA helicase-like protein -
  misc_feature (1)..(633): Homolog of NCBI NO: 18410973 NR Description: DEAD box RNA helicase, putative [Arabidopsis
MSASWADVADSENTGSGSSNQNSHPSRPAYVPPHLRNRPAASEPVAPLPANDRVGYGGPPSGSRWAPGGSGVGVGGGGGYRADAGRPGSGSGYGGRGGGGWNNRSGGWDRREREVNPFENDDSEPEPAFTEQDNTVINFDAYEDIPIETSGDNVPPPVNTFAEIDLGEALNLNIRRCKYVKPTPVQRHAIPILLEGRDLMACAQTGSGKTAAFCFPIISGIMKDQHVQRPRGSRTVYPLAVILSPTRELASQIHDEAKRFSYQTGVKVVVAYGGTPINQQLRELERGVDILVATPGRLNDLLERARVSMQMIRFLALDEADRMLDMGFEPQIRKIVEQMDMPPRGVRQTLLFSATFPREIQRLAADFLANYIFLAVGRVGSSTDLIVQRVEFVLDSDKRSHLMDLLHAQRENGIQGKQALTLVFVETKRGADSLENWLCINGFPATSIHGDRTQQEREVALKAFKSGRTPILVATDVAARGLDIPHVAHVVNFDLPNDIDDYVHRIGRTGRAGKSGLATAFFNDGNTSLARPLAELMQEANQEVPEWLTRYASRSSFGGGKNRRSGGRFGGRDFRREGSFGSGRGGYGGGGGGYGGGGGYGGGGGYGGGGGYGGGYGGASSGGYGGEPPSAWD

SEQ ID NO: 39136 - protein, 434 aa, Arabidopsis thaliana
  peptide (1)..(434): Ceres Seq. ID no. 13497580
  misc_feature (1)..(190): Pfam Name: DEAD/DEAH box helicase Pfam Description: DEAD/DEAH box helicase
  misc_feature (1)..(427): Homolog of NCBI NO: 113825 NR Description: Putative ATP-dependent RNA helicase An3
  misc_feature (1)..(433): Homolog of NCBI NO: 11267519 NR Description: probable ATP-dependent RNA helicase DED1
  misc_feature (1)..(427): Homolog of NCBI NO: 19528473 NR Description: RE28061p [Drosophila melanogaster]
  misc_feature (1)..(427): Homolog of NCBI NO: 17985987 NR Description: belle CG9748-PA [Drosophila melanogaster]
  misc_feature (1)..(434): Homolog of NCBI NO: 17064740 NR Description: ATP-dependent RNA helicase-like protein
  misc_feature (1)..(434): Homolog of NCBI NO: 34393986 NR Description: putative DEAD-box RNA helicase DEAD3(i|6753620)
  misc_feature (1)..(434): Homolog of NCBI NO: 11267530 NR Description: ATP-dependent RNA helicase-like protein -
  misc_feature (1)..(427): Homolog of NCBI NO: 15231074 NR Description: DEAD box RNA helicase, putative [Arabidopsis
  misc_feature (1)..(420): Homolog of NCBI NO: 11267530 NR Description: ATP-dependent RNA helicase-like protein -
  misc_feature (1)..(434): Homolog of NCBI NO: 18410973 NR Description: DEAD box RNA helicase, putative [Arabidopsis
MACAQTGSGKTAAFCFPIISGIMKDQHVQRPRGSRTVYPLAVILSPTRELASQIHDEAKRFSYQTGVKVVVAYGGTPINQQLRELERGVDILVATPGRLNDLLERARVSMQMIRFLALDEADRMLDMGFEPQIRKIVEQMDMPPRGVRQTLLFSATFPREIQRLAADFLANYIFLAVGRVGSSTDLIVQRVEFVLDSDKRSHLMDLLHAQRENGIQGKQALTLVFVETKRGADSLENWLCINGFPATSIHGDRTQQEREVALKAFKSGRTPILVATDVAARGLDIPHVAHVVNFDLPNDIDDYVHRIGRTGRAGKSGLATAFFNDGNTSLARPLAELMQEANQEVPEWLTRYASRSSFGGGKNRRSGGRFGGRDFRREGSFGSGRGGYGGGGGGYGGGGGYGGGGGYGGGGGYGGGYGGASSGGYGGEPPSAWD

SEQ ID NO: 39137 - protein, 412 aa, Arabidopsis thaliana
  peptide (1)..(412): Ceres Seq. ID no. 13497581
  misc_feature (1)..(168): Pfam Name: DEAD/DEAH box helicase Pfam Description: DEAD/DEAH box helicase
  misc_feature (1)..(405): Homolog of NCBI NO: 113825 NR Description: Putative ATP-dependent RNA helicase An3
  misc_feature (1)..(411): Homolog of NCBI NO: 11267519 NR Description: probable ATP-dependent RNA helicase DED1
  misc_feature (1)..(405): Homolog of NCBI NO: 19528473 NR Description: RE28061p [Drosophila melanogaster]
  misc_feature (1)..(405): Homolog of NCBI NO: 17985987 NR Description: belle CG9748-PA [Drosophila melanogaster]
  misc_feature (1)..(412): Homolog of NCBI NO: 17064740 NR Description: ATP-dependent RNA helicase-like protein
  misc_feature (1)..(412): Homolog of NCBI NO: 34393986 NR Description: putative DEAD-box RNA helicase DEAD3(i|6753620)
  misc_feature (1)..(412): Homolog of NCBI NO: 11267530 NR Description: ATP-dependent RNA helicase-like protein -
  misc_feature (1)..(405): Homolog of NCBI NO: 15231074 NR Description: DEAD box RNA helicase, putative [Arabidopsis
  misc_feature (1)..(398): Homolog of NCBI NO: 11267530 NR Description: ATP-dependent RNA helicase-like protein -
  misc_feature (1)..(412): Homolog of NCBI NO: 18410973 NR Description: DEAD box RNA helicase, putative [Arabidopsis
MKDQHVQRPRGSRTVYPLAVILSPTRELASQIHDEAKRFSYQTGVKVVVAYGGTPINQQLRELERGVDILVATPGRLNDLLERARVSMQMIRFLALDEADRMLDMGFEPQIRKIVEQMDMPPRGVRQTLLFSATFPREIQRLAADFLANYIFLAVGRVGSSTDLIVQRVEFVLDSDKRSHLMDLLHAQRENGIQGKQALTLVFVETKRGADSLENWLCINGFPATSIHGDRTQQEREVALKAFKSGRTPILVATDVAARGLDIPHVAHVVNFDLPNDIDDYVHRIGRTGRAGKSGLATAFFNDGNTSLARPLAELMQEANQEVPEWLTRYASRSSFGGGKNRRSGGRFGGRDFRREGSFGSGRGGYGGGGGGYGGGGGYGGGGGYGGGGGYGGGYGGASSGGYGGEPPSAWD

SEQ ID NO: 39138 - DNA, 1143 bp, Arabidopsis thaliana
  misc_feature (1)..(1143): Ceres Seq. ID no. 12329706
  misc_feature: MA Experiment ID: 108434 Result: Up-regulated in Transcription
  misc_feature: MA Experiment 108434 PARAMETER Experiment Name: At_Root_Tips_cDNA_P Parameter: Tissue Value: Root Tips
  misc_feature: MA Experiment ID: 108461 Result: Down-regulated in Transcription
  misc_feature: MA Experiment 108461 PARAMETER Experiment Name: At_Germinating_Seeds_cDNA_P Parameter: Age (day) Value: 1 vs. 0
  misc_feature: MA Experiment 108461 PARAMETER Experiment Name: At_Germinating_Seeds_cDNA_P Parameter: Tissue Value: Germinating Seeds
  misc_feature: MA Experiment ID: 108462 Result: Down-regulated in Transcription
  misc_feature: MA Experiment 108462 PARAMETER Experiment Name: At_Germinating_Seeds_cDNA_P Parameter: Age (day) Value: 2 vs. 0
  misc_feature: MA Experiment 108462 PARAMETER Experiment Name: At_Germinating_Seeds_cDNA_P Parameter: Tissue Value: Germinating Seeds
  misc_feature: MA Experiment ID: 108463 Result: Down-regulated in Transcription
  misc_feature: MA Experiment 108463 PARAMETER Experiment Name: At_Germinating_Seeds_cDNA_P Parameter: Age (day) Value: 3 vs. 0
  misc_feature: MA Experiment 108463 PARAMETER Experiment Name: At_Germinating_Seeds_cDNA_P Parameter: Tissue Value: Germinating Seeds
  misc_feature: MA Experiment ID: 108464 Result: Down-regulated in Transcription
  misc_feature: MA Experiment 108464 PARAMETER Experiment Name: At_Germinating_Seeds_cDNA_P Parameter: Age (day) Value: 4 vs. 0
  misc_feature: MA Experiment 108464 PARAMETER Experiment Name: At_Germinating_Seeds_cDNA_P Parameter: Tissue Value: Germinating Seeds
  misc_feature: MA Experiment ID: 20000180 Result: Down-regulated in Transcription
  misc_feature: MA Experiment 20000180 PARAMETER Experiment Name: At_Germinating_Seeds_P Parameter: Age (hr) Value: 24 vs. 0
  misc_feature: MA Experiment 20000180 PARAMETER Experiment Name: At_Germinating_Seeds_P Parameter: Tissue Value: Germinating Seeds
  misc_feature: MA Experiment ID: 20000184 Result: Down-regulated in Transcription
  misc_feature: MA Experiment 20000184 PARAMETER Experiment Name: At_Shoots__P Parameter: Age (day) Value: 7
  misc_feature: MA Experiment 20000184 PARAMETER Experiment Name: At_Shoots__P Parameter: Tissue Value: Shoots vs. Whole Plant
  misc_feature: MA Experiment ID: 20001911 Result: Up-regulated in Transcription
  misc_feature: MA Experiment 20001911 PARAMETER Experiment Name: At_Drought_Reproduction_P Parameter: Age (day) Value: 40
  misc_feature: MA Experiment 20001911 PARAMETER Experiment Name: At_Drought_Reproduction_P Parameter: Organism Value: A. thaliana
  misc_feature: MA Experiment 20001911 PARAMETER Experiment Name: At_Drought_Reproduction_P Parameter: Plant Line Value: WS
  misc_feature: MA Experiment 20001911 PARAMETER Experiment Name: At_Drought_Reproduction_P Parameter: Timepoint (day) Value: 10
  misc_feature: MA Experiment 20001911 PARAMETER Experiment Name: At_Drought_Reproduction_P Parameter: Tissue Value: Flowers
  misc_feature: MA Experiment 20001911 PARAMETER Experiment Name: At_Drought_Reproduction_P Parameter: Treatment Value: Drought vs. No Drought
attctctaggcttttttatattctgaaagttttgattttttgtatcttgttttgtttctcaatcatcaatttgtggtagtagctcactagcaaacaatggaggggaggttgaataatatgtggaggttgactgtgaatgagagcaaattcgttgaatctgcgttgcaatctgagctcagagtcgatggtcgtggcctttatgattaccgcaagcttactattaagtttggcaaggaatatggcagctcacaagttcaactgggtcagactcatgtaatggcttttgtgactgctcagctagtacaaccttacaaagacagacctagtgaaggctccttctctatcttcaccgagttttctccaatggctgatccatcgtttgagccagggcatcctggtgaatctgctgttgagcttggccgtattatagaccgtgctctacgagaaagccgtgcagtagatacagagtcgctttgtgttctagccggaaagctggtttggtctgttcgcattgatcttcacattttggacaatggagggaacttggttgatgctgctaatgttgctgccttagccgcactcatgactttcaggagacctgattgcactgtaggaggggacaacagtcaagacgtgatcatacatccacccgaagaaagggaaccacttcctttgataatacatcatctcccaatagccttcacgtttggattttttaataaaggcagtatcttggtgatggacccaacttacgttgaagaagctgttatgtgtgggagaatgactgtgacagtcaatgccaatggcgatatatgcgcaatccaaaaaccaggagaagaaggcgtgaaccagagtgtaatccttcattgcctgcgtcttgcttcttcaagagcttctgcaacaacaaagataattagagatgcagttgaagcatacaaccgtgagaggagctcacagaaggtggagcggcatcatactttggctaagtctgaagttttgggacctattgtagttgtgtaggaagagacataaataaaacatttgctgtggtcgtcgattgtaaataaagattttagttgtagaaatcttatcagcaacactaagctataaaaacgtcgatatgatcaagacatgttgagactc

SEQ ID NO: 39139 - protein, 307 aa, Arabidopsis thaliana
  peptide (1)..(307): Ceres Seq. ID no. 12329707
  misc_feature (36)..(168): Pfam Name: 3' exoribonuclease family, domain 1 Pfam Description: 3' exoribonuclease family, domain 1
  misc_feature (28)..(278): Homolog of NCBI NO: 14285675 NR Description: Exosome complex exonuclease RRP45 autoantigen 1) (Autoantigen PM/Scl 1) (Polymyositis/scleroderma
  misc_feature (15)..(284): Homolog of NCBI NO: 34856829 NR Description: similar to polymyositis scleroderma overlap
  misc_feature (15)..(284): Homolog of NCBI NO: 12847890 NR Description: unnamed protein product [Mus musculus]
  misc_feature (15)..(284): Homolog of NCBI NO: 9506981 NR Description: polymyositis/scleroderma autoantigen 1 [Mus
  misc_feature (15)..(278): Homolog of NCBI NO: 28172868 NR Description: polymyositis/scleroderma autoantigen 1 [Homo
  misc_feature (15)..(278): Homolog of NCBI NO: 28172864 NR Description: polymyositis/scleroderma autoantigen 1 [Homo
  misc_feature (12)..(287): Homolog of NCBI NO: 19075183 NR Description: putative exosome 3'-5' exoribonuclease complex
  misc_feature (1)..(307): Homolog of NCBI NO: 15232342 NR Description: nucleolar autoantigen - like protein; protein id:
  misc_feature (1)..(307): Homolog of NCBI NO: 18399822 NR Description: expressed protein
  misc_feature (1)..(307): Homolog of NCBI NO: 21536581 NR Description: nucleolar autoantigen-like protein [Arabidopsis
MEGRLNNMWRLTVNESKFVESALQSELRVDGRGLYDYRKLTIKFGKEYGSSQVQLGQTHVMAFVTAQLVQPYKDRPSEGSFSIFTEFSPMADPSFEPGHPGESAVELGRIIDRALRESRAVDTESLCVLAGKLVWSVRIDLHILDNGGNLVDAANVAALAALMTFRRPDCTVGGDNSQDVIIHPPEEREPLPLIIHHLPIAFTFGFFNKGSILVMDPTYVEEAVMCGRMTVTVNANGDICAIQKPGEEGVNQSVILHCLRLASSRASATTKIIRDAVEAYNRERSSQKVERHHTLAKSEVLGPIVVV

SEQ ID NO: 39140 - protein, 300 aa, Arabidopsis thaliana
  peptide (1)..(300): Ceres Seq. ID no. 12329708
  misc_feature (29)..(161): Pfam Name: 3' exoribonuclease family, domain 1 Pfam Description: 3' exoribonuclease family, domain 1
  misc_feature (21)..(271): Homolog of NCBI NO: 14285675 NR Description: Exosome complex exonuclease RRP45 autoantigen 1) (Autoantigen PM/Scl 1) (Polymyositis/scleroderma
  misc_feature (8)..(277): Homolog of NCBI NO: 34856829 NR Description: similar to polymyositis scleroderma overlap
  misc_feature (8)..(277): Homolog of NCBI NO: 12847890 NR Description: unnamed protein product [Mus musculus]
  misc_feature (8)..(277): Homolog of NCBI NO: 9506981 NR Description: polymyositis/scleroderma autoantigen 1 [Mus
  misc_feature (8)..(271): Homolog of NCBI NO: 28172868 NR Description: polymyositis/scleroderma autoantigen 1 [Homo
  misc_feature (8)..(271): Homolog of NCBI NO: 28172864 NR Description: polymyositis/scleroderma autoantigen 1 [Homo
  misc_feature (5)..(280): Homolog of NCBI NO: 19075183 NR Description: putative exosome 3'-5' exoribonuclease complex
  misc_feature (1)..(300): Homolog of NCBI NO: 15232342 NR Description: nucleolar autoantigen - like protein; protein id:
  misc_feature (1)..(300): Homolog of NCBI NO: 18399822 NR Description: expressed protein
  misc_feature (1)..(300): Homolog of NCBI NO: 21536581 NR Description: nucleolar autoantigen-like protein [Arabidopsis
MWRLTVNESKFVESALQSELRVDGRGLYDYRKLTIKFGKEYGSSQVQLGQTHVMAFVTAQLVQPYKDRPSEGSFSIFTEFSPMADPSFEPGHPGESAVELGRIIDRALRESRAVDTESLCVLAGKLVWSVRIDLHILDNGGNLVDAANVAALAALMTFRRPDCTVGGDNSQDVIIHPPEEREPLPLIIHHLPIAFTFGFFNKGSILVMDPTYVEEAVMCGRMTVTVNANGDICAIQKPGEEGVNQSVILHCLRLASSRASATTKIIRDAVEAYNRERSSQKVERHHTLAKSEVLGPIVVV

SEQ ID NO: 39141 - protein, 247 aa, Arabidopsis thaliana
  peptide (1)..(247): Ceres Seq. ID no. 12329709
  misc_feature (1)..(108): Pfam Name: 3' exoribonuclease family, domain 1 Pfam Description: 3' exoribonuclease family, domain 1
  misc_feature (1)..(218): Homolog of NCBI NO: 14285675 NR Description: Exosome complex exonuclease RRP45 autoantigen 1) (Autoantigen PM/Scl 1) (Polymyositis/scleroderma
  misc_feature (1)..(224): Homolog of NCBI NO: 34856829 NR Description: similar to polymyositis scleroderma overlap
  misc_feature (1)..(224): Homolog of NCBI NO: 12847890 NR Description: unnamed protein product [Mus musculus]
  misc_feature (1)..(224): Homolog of NCBI NO: 9506981 NR Description: polymyositis/scleroderma autoantigen 1 [Mus
  misc_feature (1)..(218): Homolog of NCBI NO: 28172868 NR Description: polymyositis/scleroderma autoantigen 1 [Homo
  misc_feature (1)..(218): Homolog of NCBI NO: 28172864 NR Description: polymyositis/scleroderma autoantigen 1 [Homo
  misc_feature (1)..(227): Homolog of NCBI NO: 19075183 NR Description: putative exosome 3'-5' exoribonuclease complex
  misc_feature (1)..(247): Homolog of NCBI NO: 15232342 NR Description: nucleolar autoantigen - like protein; protein id:
  misc_feature (1)..(247): Homolog of NCBI NO: 18399822 NR Description: expressed protein
  misc_feature (1)..(247): Homolog of NCBI NO: 21536581 NR Description: nucleolar autoantigen-like protein [Arabidopsis
MAFVTAQLVQPYKDRPSEGSFSIFTEFSPMADPSFEPGHPGESAVELGRIIDRALRESRAVDTESLCVLAGKLVWSVRIDLHILDNGGNLVDAANVAALAALMTFRRPDCTVGGDNSQDVIIHPPEEREPLPLIIHHLPIAFTFGFFNKGSILVMDPTYVEEAVMCGRMTVTVNANGDICAIQKPGEEGVNQSVILHCLRLASSRASATTKIIRDAVEAYNRERSSQKVERHHTLAKSEVLGPIVVV

SEQ ID NO: 39142 - DNA, 1141 bp, Arabidopsis thaliana
  misc_feature (1)..(1141): Ceres Seq. ID no. 12422273
  misc_feature: MA Experiment ID: 108462 Result: Down-regulated in Transcription
  misc_feature: MA Experiment 108462 PARAMETER Experiment Name: At_Germinating_Seeds_cDNA_P Parameter: Age (day) Value: 2 vs. 0
  misc_feature: MA Experiment 108462 PARAMETER Experiment Name: At_Germinating_Seeds_cDNA_P Parameter: Tissue Value: Germinating Seeds
  misc_feature: MA Experiment ID: 108463 Result: Down-regulated in Transcription
  misc_feature: MA Experiment 108463 PARAMETER Experiment Name: At_Germinating_Seeds_cDNA_P Parameter: Age (day) Value: 3 vs. 0
  misc_feature: MA Experiment 108463 PARAMETER Experiment Name: At_Germinating_Seeds_cDNA_P Parameter: Tissue Value: Germinating Seeds
  misc_feature: MA Experiment ID: 108464 Result: Down-regulated in Transcription
  misc_feature: MA Experiment 108464 PARAMETER Experiment Name: At_Germinating_Seeds_cDNA_P Parameter: Age (day) Value: 4 vs. 0
  misc_feature: MA Experiment 108464 PARAMETER Experiment Name: At_Germinating_Seeds_cDNA_P Parameter: Tissue Value: Germinating Seeds
  misc_feature: MA Experiment ID: 20000180 Result: Down-regulated in Transcription
  misc_feature: MA Experiment 20000180 PARAMETER Experiment Name: At_Germinating_Seeds_P Parameter: Age (hr) Value: 24 vs. 0
  misc_feature: MA Experiment 20000180 PARAMETER Experiment Name: At_Germinating_Seeds_P Parameter: Tissue Value: Germinating Seeds
  misc_feature: MA Experiment ID: 20000224 Result: Up-regulated in Transcription
  misc_feature: MA Experiment ID: 20001557 Result: Up-regulated in Transcription
  misc_feature: MA Experiment 20001557 PARAMETER Experiment Name: At_Drought_Soil_Dry_P Parameter: Age (day) Value: 27
  misc_feature: MA Experiment 20001557 PARAMETER Experiment Name: At_Drought_Soil_Dry_P Parameter: Organism Value: A. thaliana
  misc_feature: MA Experiment 20001557 PARAMETER Experiment Name: At_Drought_Soil_Dry_P Parameter: Plant Line Value: WS
  misc_feature: MA Experiment 20001557 PARAMETER Experiment Name: At_Drought_Soil_Dry_P Parameter: Post Timepoint (hr) Value: 3
  misc_feature: MA Experiment 20001557 PARAMETER Experiment Name: At_Drought_Soil_Dry_P Parameter: Post-Treatment Value: Re-Water vs. No Drought
  misc_feature: MA Experiment 20001557 PARAMETER Experiment Name: At_Drought_Soil_Dry_P Parameter: Timepoint (day) Value: 13
  misc_feature: MA Experiment 20001557 PARAMETER Experiment Name: At_Drought_Soil_Dry_P Parameter: Treatment Value: Drought vs. No Drought
attatctgggcagttgttggaacatacacgagctggtgagcgtgttgctgttgattcgagaaagcgtaaccctgctgattttgcattatggaaggcggcaaagcctgatgagccaagttgggagagcccttggggtccaggaagaccaggatggcacatcgagtgcagtgcaatgagtgttcattatctgtctccgaaatttgatattcatggaggtggtgcagatcttaaattcccgcatcatgaaaatgagatcgcccagacatgtgctgcatgtgaggatagtggtgtaaattactggttgcataatgggcatgtcactatcaacaacgagaagatggcaaaatcaaagcacaactttaaaacgattagagaaataaccgctagctaccatccattggctctgaggcacttcttgatgagtgcacagtaccggtctcctctgagtttcactgcctcacagctagagagttcgtcagaagctttatactatgtttaccagactttacaagatcttgatgaaggtctgtcaccatatcaagacgcattgtctgaagatggtggaaaatctgaacaaactgcagaaggaaaagacatcattaagaagcagcgaatgtcaatgcttgtgtcactcgttgagattgagaaagcagcaagggaagttcttgatgtacttggtttactcactacactgagctatgccgagattttgaaagaaatgaaactaaaaacactaataagagcagaaattggagaagaaggtatttcgcagttaatagaagaaaggataacagccaggaagaataaagatttcacgaaaagtgatgagattagagagaaactgacaagaaaaggaatagcgttaatggacattggcaaagaaactgtatggagaccatgcttcccttctcaggctgattccagcacttgagcttagagcagagtcatggagatagttaacggtttcttcatttctctaactcttcttctttagccttttgtttgaggctctttctttataactctgtttttggaattttgcaatgacttcaaaatatacacttgttgctgtttgttgtattcttaccattcacaatgacattgtaacaatattgttactttggatattggttctatagcc

SEQ ID NO: 39143 - protein, 309 aa, Arabidopsis thaliana
  peptide (1)..(309): Ceres Seq. ID no. 12422274
  misc_feature (1)..(298): Homolog of NCBI NO: 34497201 NR Description: cysteinyl-tRNA synthetase [Chromobacterium
  misc_feature (167)..(298): Homolog of NCBI NO: 39998454 NR Description: cysteinyl-tRNA synthetase [Geobacter
  misc_feature (1)..(177): Homolog of NCBI NO: 39998454 NR Description: cysteinyl-tRNA synthetase [Geobacter
  misc_feature (1)..(296): Homolog of NCBI NO: 25293240 NR Description: probable cysteinyl-tRNA synthetase
  misc_feature (1)..(296): Homolog of NCBI NO: 18402580 NR Description: putative cysteinyl-tRNA synthetase
  misc_feature (211)..(298): Homolog of NCBI NO: 23055378 NR Description: hypothetical protein [Geobacter metallireducens]
  misc_feature (1)..(186): Homolog of NCBI NO: 23055378 NR Description: hypothetical protein [Geobacter metallireducens]
  misc_feature (1)..(302): Homolog of NCBI NO: 15228880 NR Description: cysteine-tRNA ligase-like protein; protein id:
  misc_feature (1)..(296): Homolog of NCBI NO: 9758060 NR Description: cysteine-tRNA ligase [Arabidopsis thaliana]
  misc_feature (1)..(296): Homolog of NCBI NO: 15241557 NR Description: cysteine-tRNA ligase -like protein; protein id:
LSGQLLEHTRAGERVAVDSRKRNPADFALWKAAKPDEPSWESPWGPGRPGWHIECSAMSVHYLSPKFDIHGGGADLKFPHHENEIAQTCAACEDSGVNYWLHNGHVTINNEKMAKSKHNFKTIREITASYHPLALRHFLMSAQYRSPLSFTASQLESSSEALYYVYQTLQDLDEGLSPYQDALSEDGGKSEQTAEGKDIIKKQRMSMLVSLVEIEKAAREVLDVLGLLTTLSYAEILKEMKLKTLIRAEIGEEGISQLIEERITARKNKDFTKSDEIREKLTRKGIALMDIGKETVWRPCFPSQADSST

SEQ ID NO: 39144 - protein, 252 aa, Arabidopsis thaliana
  peptide (1)..(252): Ceres Seq. ID no. 12422275
  misc_feature (1)..(241): Homolog of NCBI NO: 34497201 NR Description: cysteinyl-tRNA synthetase [Chromobacterium
  misc_feature (110)..(241): Homolog of NCBI NO: 39998454 NR Description: cysteinyl-tRNA synthetase [Geobacter
  misc_feature (1)..(120): Homolog of NCBI NO: 39998454 NR Description: cysteinyl-tRNA synthetase [Geobacter
  misc_feature (1)..(239): Homolog of NCBI NO: 25293240 NR Description: probable cysteinyl-tRNA synthetase
  misc_feature (1)..(239): Homolog of NCBI NO: 18402580 NR Description: putative cysteinyl-tRNA synthetase
  misc_feature (154)..(241): Homolog of NCBI NO: 23055378 NR Description: hypothetical protein [Geobacter metallireducens]
  misc_feature (1)..(129): Homolog of NCBI NO: 23055378 NR Description: hypothetical protein [Geobacter metallireducens]
  misc_feature (1)..(245): Homolog of NCBI NO: 15228880 NR Description: cysteine-tRNA ligase-like protein; protein id:
  misc_feature (1)..(239): Homolog of NCBI NO: 9758060 NR Description: cysteine-tRNA ligase [Arabidopsis thaliana]
  misc_feature (1)..(239): Homolog of NCBI NO: 15241557 NR Description: cysteine-tRNA ligase -like protein; protein id:
MSVHYLSPKFDIHGGGADLKFPHHENEIAQTCAACEDSGVNYWLHNGHVTINNEKMAKSKHNFKTIREITASYHPLALRHFLMSAQYRSPLSFTASQLESSSEALYYVYQTLQDLDEGLSPYQDALSEDGGKSEQTAEGKDIIKKQRMSMLVSLVEIEKAAREVLDVLGLLTTLSYAEILKEMKLKTLIRAEIGEEGISQLIEERITARKNKDFTKSDEIREKLTRKGIALMDIGKETVWRPCFPSQADSST

SEQ ID NO: 39145 - protein, 197 aa, Arabidopsis thaliana
  peptide (1)..(197): Ceres Seq. ID no. 12422276
  misc_feature (1)..(186): Homolog of NCBI NO: 34497201 NR Description: cysteinyl-tRNA synthetase [Chromobacterium
  misc_feature (55)..(186): Homolog of NCBI NO: 39998454 NR Description: cysteinyl-tRNA synthetase [Geobacter
  misc_feature (1)..(65): Homolog of NCBI NO: 39998454 NR Description: cysteinyl-tRNA synthetase [Geobacter
  misc_feature (1)..(184): Homolog of NCBI NO: 25293240 NR Description: probable cysteinyl-tRNA synthetase
  misc_feature (1)..(184): Homolog of NCBI NO: 18402580 NR Description: putative cysteinyl-tRNA synthetase
  misc_feature (99)..(186): Homolog of NCBI NO: 23055378 NR Description: hypothetical protein [Geobacter metallireducens]
  misc_feature (1)..(74): Homolog of NCBI NO: 23055378 NR Description: hypothetical protein [Geobacter metallireducens]
  misc_feature (1)..(190): Homolog of NCBI NO: 15228880 NR Description: cysteine-tRNA ligase-like protein; protein id:
  misc_feature (1)..(184): Homolog of NCBI NO: 9758060 NR Description: cysteine-tRNA ligase [Arabidopsis thaliana]
  misc_feature (1)..(184): Homolog of NCBI NO: 15241557 NR Description: cysteine-tRNA ligase -like protein; protein id:
MAKSKHNFKTIREITASYHPLALRHFLMSAQYRSPLSFTASQLESSSEALYYVYQTLQDLDEGLSPYQDALSEDGGKSEQTAEGKDIIKKQRMSMLVSLVEIEKAAREVLDVLGLLTTLSYAEILKEMKLKTLIRAEIGEEGISQLIEERITARKNKDFTKSDEIREKLTRKGIALMDIGKETVWRPCFPSQADSST

SEQ ID NO: 39146 - DNA, 1130 bp, Arabidopsis thaliana
  misc_feature (1)..(1130): Ceres Seq. ID no. 12330197
  misc_feature: MA Experiment ID: 108434 Result: Up-regulated in Transcription
  misc_feature: MA Experiment 108434 PARAMETER Experiment Name: At_Root_Tips_cDNA_P Parameter: Tissue Value: Root Tips
  misc_feature: MA Experiment ID: 108461 Result: Up-regulated in Transcription
  misc_feature: MA Experiment 108461 PARAMETER Experiment Name: At_Germinating_Seeds_cDNA_P Parameter: Age (day) Value: 1 vs. 0
  misc_feature: MA Experiment 108461 PARAMETER Experiment Name: At_Germinating_Seeds_cDNA_P Parameter: Tissue Value: Germinating Seeds
  misc_feature: MA Experiment ID: 20000179 Result: Down-regulated in Transcription
  misc_feature: MA Experiment 20000179 PARAMETER Experiment Name: At_Germinating_Seeds_P Parameter: Age (hr) Value: 6 vs. 0
  misc_feature: MA Experiment 20000179 PARAMETER Experiment Name: At_Germinating_Seeds_P Parameter: Tissue Value: Germinating Seeds
  misc_feature: MA Experiment ID: 20000180 Result: Down-regulated in Transcription
  misc_feature: MA Experiment 20000180 PARAMETER Experiment Name: At_Germinating_Seeds_P Parameter: Age (hr) Value: 24 vs. 0
  misc_feature: MA Experiment 20000180 PARAMETER Experiment Name: At_Germinating_Seeds_P Parameter: Tissue Value: Germinating Seeds
  misc_feature: MA Experiment ID: 20000495 Result: Up-regulated in Transcription
  misc_feature: MA Experiment 20000495 PARAMETER Experiment Name: At_Guard_Cells_P Parameter: Harvest Date Value: 8/2/2002
  misc_feature: MA Experiment 20000495 PARAMETER Experiment Name: At_Guard_Cells_P Parameter: Organism Value: A. thaliana
  misc_feature: MA Experiment 20000495 PARAMETER Experiment Name: At_Guard_Cells_P Parameter: Tissue Value: Guard Cells vs. Leaves
  misc_feature: MA Experiment ID: 20001248 Result: Up-regulated in Transcription
  misc_feature: MA Experiment 20001248 PARAMETER Experiment Name: At_Far-red-induction_P Parameter: Age (day) Value: 7
  misc_feature: MA Experiment 20001248 PARAMETER Experiment Name: At_Far-red-induction_P Parameter: Light Value: Far-red vs. White
  misc_feature: MA Experiment 20001248 PARAMETER Experiment Name: At_Far-red-induction_P Parameter: Organism Value: A. thaliana
  misc_feature: MA Experiment 20001248 PARAMETER Experiment Name: At_Far-red-induction_P Parameter: Plant Line Value: Columbia
  misc_feature: MA Experiment 20001248 PARAMETER Experiment Name: At_Far-red-induction_P Parameter: Timepoint (hr) Value: 4
  misc_feature: MA Experiment 20001248 PARAMETER Experiment Name: At_Far-red-induction_P Parameter: Tissue Value: Whole Plant
  misc_feature: MA Experiment ID: 20001450 Result: Up-regulated in Transcription
  misc_feature: MA Experiment 20001450 PARAMETER Experiment Name: At_Far-red-induction_P Parameter: Age (day) Value: 7
  misc_feature: MA Experiment 20001450 PARAMETER Experiment Name: At_Far-red-induction_P Parameter: Light Value: Far-red vs. White
  misc_feature: MA Experiment 20001450 PARAMETER Experiment Name: At_Far-red-induction_P Parameter: Organism Value: A. thaliana
  misc_feature: MA Experiment 20001450 PARAMETER Experiment Name: At_Far-red-induction_P Parameter: Plant Line Value: Columbia
  misc_feature: MA Experiment 20001450 PARAMETER Experiment Name: At_Far-red-induction_P Parameter: Timepoint (hr) Value: 8
  misc_feature: MA Experiment 20001450 PARAMETER Experiment Name: At_Far-red-induction_P Parameter: Tissue Value: Whole Plant
  misc_feature: MA Experiment ID: 20001451 Result: Up-regulated in Transcription
  misc_feature: MA Experiment 20001451 PARAMETER Experiment Name: At_Far-red-induction_P Parameter: Age (day) Value: 7
  misc_feature: MA Experiment 20001451 PARAMETER Experiment Name: At_Far-red-induction_P Parameter: Light Value: Far-red vs. White
  misc_feature: MA Experiment 20001451 PARAMETER Experiment Name: At_Far-red-induction_P Parameter: Organism Value: A. thaliana
  misc_feature: MA Experiment 20001451 PARAMETER Experiment Name: At_Far-red-induction_P Parameter: Plant Line Value: Columbia
  misc_feature: MA Experiment 20001451 PARAMETER Experiment Name: At_Far-red-induction_P Parameter: Timepoint (hr) Value: 24
  misc_feature: MA Experiment 20001451 PARAMETER Experiment Name: At_Far-red-induction_P Parameter: Tissue Value: Whole Plant
atttttctcctaccgtcgaactaaatcctagggcacaggtgaaatcgccgagtgacgtctagccaccgcaccgcctccttctccggttatctcgctactaatcagactattccacagctatgtcacaggtagacagcagaaattcatcagcagccaagcgtgctagaactgacggggggcgtagagaagatgattggatctgcccaagttgtggcaatgtcaacttttcattcaggacaacttgcaatatgcgtaattgcactcagcctagacctgcagatcataatggaaagtctgctcccaaacctatgcaacatcaacaaggtttctcatcacccggggcatacttaggatctgggggtccccctccagtatatatgggcgggtcaccatatggatctcctctctttaatggatcgtctatgcctccttatgacgtcccattttctgggggttcgccttaccattttaactataatagccgaatgcctgccggagctcattacagaccattacatatgtctggaccaccaccataccatggcggatctatgatgggaagtggtggtatgtatggaatgcctccaccaatagacaggtatggccttggtatggcaatgggtcctggttctgccgctgccatgatgccaagaccaaggttttacccagatgaaaaatcacaaaagagagattcaactcgcgataatgattggacatgtccgaattgtggtaatgtaaacttctcattcagaactgtatgtaacatgaggaagtgcaacactccaaagcctggttctcagcagggtggaagctcagataaaatatccaaacaaaatgcaccggaagggagctggaagtgtgataactgtggaaatataaactacccattcaggagcaaatgcaacaggcaaaactgtggagctgataagcctggggatcggtcgaatggatctccgtcccgtgcaccagaagagaacgatcaggtttgtaagatgtatctatgtggtcacaactgtttgttaataaaatgtttgcctctgaaactcgtaaatgtaacaacctgtgtagattttatgccttgtgaaagcagaggttatatgtttatgaaaaaattgactccgactacgttt

SEQ ID NO: 39147 - protein, 337 aa, Arabidopsis thaliana
  peptide (1)..(337): Ceres Seq. ID no. 12330198
  misc_feature (48)..(141): Pfam Name: Extensin-like region Pfam Description: Extensin-like region
  misc_feature (89)..(284): Homolog of NCBI NO: 33146999 NR Description: putative p53 binding protein
  misc_feature (191)..(262): Homolog of NCBI NO: 23510073 NR Description: hypothetical protein [Plasmodium falciparum 3D7]
  misc_feature (194)..(273): Homolog of NCBI NO: 15865325 NR Description: putative non-ribosomal nucleolar protein
  misc_feature (10)..(53): Homolog of NCBI NO: 18698995 NR Description: p53 binding protein [Oryza sativa]
  misc_feature (177)..(226): Homolog of NCBI NO: 18698995 NR Description: p53 binding protein [Oryza sativa]
  misc_feature (191)..(271): Homolog of NCBI NO: 18698995 NR Description: p53 binding protein [Oryza sativa]
  misc_feature (1)..(271): Homolog of NCBI NO: 33146999 NR Description: putative p53 binding protein
  misc_feature (1)..(286): Homolog of NCBI NO: 27817857 NR Description: OJ1081_B12.5 [Oryza sativa (japonica
  misc_feature (44)..(288): Homolog of NCBI NO: 25404955 NR Description: protein F1N21.14 [imported] - Arabidopsis
  misc_feature (1)..(288): Homolog of NCBI NO: 22330480 NR Description: similar to RRM-containing RNA-binding protein,
MSQVDSRNSSAAKRARTDGGRREDDWICPSCGNVNFSFRTTCNMRNCTQPRPADHNGKSAPKPMQHQQGFSSPGAYLGSGGPPPVYMGGSPYGSPLFNGSSMPPYDVPFSGGSPYHFNYNSRMPAGAHYRPLHMSGPPPYHGGSMMGSGGMYGMPPPIDRYGLGMAMGPGSAAAMMPRPRFYPDEKSQKRDSTRDNDWTCPNCGNVNFSFRTVCNMRKCNTPKPGSQQGGSSDKISKQNAPEGSWKCDNCGNINYPFRSKCNRQNCGADKPGDRSNGSPSRAPEENDQVCKMYLCGHNCLLIKCLPLKLVNVTTCVDFMPCESRGYMFMKKLTPTTF

SEQ ID NO: 39148 - protein, 294 aa, Arabidopsis thaliana
  peptide (1)..(294): Ceres Seq. ID no. 12330199
  misc_feature (5)..(98): Pfam Name: Extensin-like region Pfam Description: Extensin-like region
  misc_feature (144)..(222): Homolog of NCBI NO: 30962835 NR Description: Unknown (protein for MGC:56597) [Danio rerio]
  misc_feature (46)..(241): Homolog of NCBI NO: 33146999 NR Description: putative p53 binding protein
  misc_feature (148)..(219): Homolog of NCBI NO: 23510073 NR Description: hypothetical protein [Plasmodium falciparum 3D7]
  misc_feature (151)..(230): Homolog of NCBI NO: 15865325 NR Description: putative non-ribosomal nucleolar protein
  misc_feature (134)..(183): Homolog of NCBI NO: 18698995 NR Description: p53 binding protein [Oryza sativa]
  misc_feature (148)..(228): Homolog of NCBI NO: 18698995 NR Description: p53 binding protein [Oryza sativa]
  misc_feature (1)..(228): Homolog of NCBI NO: 33146999 NR Description: putative p53 binding protein
  misc_feature (1)..(243): Homolog of NCBI NO: 27817857 NR Description: OJ1081_B12.5 [Oryza sativa (japonica
  misc_feature (1)..(245): Homolog of NCBI NO: 25404955 NR Description: protein F1N21.14 [imported] - Arabidopsis
  misc_feature (1)..(245): Homolog of NCBI NO: 22330480 NR Description: similar to RRM-containing RNA-binding protein,
MRNCTQPRPADHNGKSAPKPMQHQQGFSSPGAYLGSGGPPPVYMGGSPYGSPLFNGSSMPPYDVPFSGGSPYHFNYNSRMPAGAHYRPLHMSGPPPYHGGSMMGSGGMYGMPPPIDRYGLGMAMGPGSAAAMMPRPRFYPDEKSQKRDSTRDNDWTCPNCGNVNFSFRTVCNMRKCNTPKPGSQQGGSSDKISKQNAPEGSWKCDNCGNINYPFRSKCNRQNCGADKPGDRSNGSPSRAPEENDQVCKMYLCGHNCLLIKCLPLKLVNVTTCVDFMPCESRGYMFMKKLTPTTF

SEQ ID NO: 39149 - protein, 274 aa, Arabidopsis thaliana
  peptide (1)..(274): Ceres Seq. ID no. 12330200
  misc_feature (1)..(78): Pfam Name: Extensin-like region Pfam Description: Extensin-like region
  misc_feature (124)..(202): Homolog of NCBI NO: 30962835 NR Description: Unknown (protein for MGC:56597) [Danio rerio]
  misc_feature (26)..(221): Homolog of NCBI NO: 33146999 NR Description: putative p53 binding protein
  misc_feature (128)..(199): Homolog of NCBI NO: 23510073 NR Description: hypothetical protein [Plasmodium falciparum 3D7]
  misc_feature (131)..(210): Homolog of NCBI NO: 15865325 NR Description: putative non-ribosomal nucleolar protein
  misc_feature (114)..(163): Homolog of NCBI NO: 18698995 NR Description: p53 binding protein [Oryza sativa]
  misc_feature (128)..(208): Homolog of NCBI NO: 18698995 NR Description: p53 binding protein [Oryza sativa]
  misc_feature (1)..(208): Homolog of NCBI NO: 33146999 NR Description: putative p53 binding protein
  misc_feature (1)..(223): Homolog of NCBI NO: 27817857 NR Description: OJ1081_B12.5 [Oryza sativa (japonica
  misc_feature (1)..(225): Homolog of NCBI NO: 25404955 NR Description: protein F1N21.14 [imported] - Arabidopsis
  misc_feature (1)..(225): Homolog of NCBI NO: 22330480 NR Description: similar to RRM-containing RNA-binding protein,
MQHQQGFSSPGAYLGSGGPPPVYMGGSPYGSPLFNGSSMPPYDVPFSGGSPYHFNYNSRMPAGAHYRPLHMSGPPPYHGGSMMGSGGMYGMPPPIDRYGLGMAMGPGSAAAMMPRPRFYPDEKSQKRDSTRDNDWTCPNCGNVNFSFRTVCNMRKCNTPKPGSQQGGSSDKISKQNAPEGSWKCDNCGNINYPFRSKCNRQNCGADKPGDRSNGSPSRAPEENDQVCKMYLCGHNCLLIKCLPLKLVNVTTCVDFMPCESRGYMFMKKLTPTTF

SEQ ID NO: 39150 - DNA, 1652 bp, Arabidopsis thaliana
  misc_feature (1)..(1652): Ceres Seq. ID no. 12599962
  misc_feature: MA Experiment ID: 108434 Result: Up-regulated in Transcription
  misc_feature: MA Experiment 108434 PARAMETER Experiment Name: At_Root_Tips_cDNA_P Parameter: Tissue Value: Root Tips
  misc_feature: MA Experiment ID: 108435 Result: Up-regulated in Transcription
  misc_feature: MA Experiment 108435 PARAMETER Experiment Name: At_stm_Mutants_cDNA_P Parameter: Plant Line Value: wt Landsburg vs stm
  misc_feature: MA Experiment 108435 PARAMETER Experiment Name: At_stm_Mutants_cDNA_P Parameter: Tissue Value: Shoot Apical Meristem Region
  misc_feature: MA Experiment ID: 108595 Result: Up-regulated in Transcription
  misc_feature: MA Experiment 108595 PARAMETER Experiment Name: At_Ler-pi_Ovule_cDNA_P Parameter: Plant Line Value: null
  misc_feature: MA Experiment ID: 108668 Result: Down-regulated in Transcription
  misc_feature: MA Experiment 108668 PARAMETER Experiment Name: At_2mM_SA_cDNA_P Parameter: Plant Line Value: WS
  misc_feature: MA Experiment 108668 PARAMETER Experiment Name: At_2mM_SA_cDNA_P Parameter: Timepoint (hr) Value: 6
  misc_feature: MA Experiment 108668 PARAMETER Experiment Name: At_2mM_SA_cDNA_P Parameter: Treatment Value: 2mM SA vs. No Treatment
gttaacggtcggaatctaaaaaatgtctcctaactactccttcttcttcttcatcttcttcctcacttcacactcttctgttttctccagaatcttaccagagacctccacaaccactacctcaattctcaatgtcgctgactccatccacagaaccaagtatacgtcgtcgtttcggttaaaccagcaagaagaacagactcactctgcttcttcttctttcagcttgcagcttcattcacgagtttccgtccgaggaactgaacactcagactataagtcactcacactagccagactcaaccgtgacacagcccgagtcaaatctctcataacccgtttagatctagccatcaacaacatatccaaagcagatctcaaacccatcagcacaatgtacaccactgaggaacaagatatcgaagctcctttaatctccggcacgactcaaggaagtggcgagtacttcacacgcgtcggtatcggaaaaccggcgcgtgaagtttatatggttctagatactggaagtgacgtgaactggctacaatgtactccttgcgctgactgttaccaccaaaccgaaccaatcttcgagccatcgtcgtcttcttcttacgagcctctctcttgtgacactccacagtgcaatgcccttgaagtctcagaatgtagaaacgccacgtgtctttacgaggtttcttacggtgatggttcttacaccgttggagatttcgccaccgagactctcacaatcggctcaactctagttcaaaacgtcgccgttggttgtggacacagcaacgaagggttgttcgtcggcgccgccggtttacttggactcggcggtggtttgttagctcttccgtcgcagctcaacacgacgtcgttctcgtactgtctcgttgaccgtgactcagactcggcttcgaccgtggatttcgggacttctctttctcctgacgccgtcgtggctccgttgctacgtaaccaccagctcgacacgttttactacctaggcctcaccggaataagcgtcggcggcgagttgcttcagattcctcagtcttctttcgagatggacgagtcaggcagcggtgggatcatcatcgactcaggaaccgccgtgactcgtctccagaccgaaatctataactcgcttagagactcgttcgtgaaaggaacgttggacttggaaaaagcagccggggtggcgatgtttgacacgtgttataacctttcggctaagacgacggtagaagtcccgaccgtggcttttcatttccccggcgggaagatgttggctttgccggcgaagaactacatgattccggttgactcggtggggacattttgtttggcatttgcaccgacggcgagttcactagcgattatcggaaacgtgcagcaacaagggacacgtgtcactttcgatttggcaaattctctcattggattctcgtctaataaatgctaagctgttttcatcaaaaaaaacaaaaatgctaagctgttttttctataaatatatttgagttacaatgaaaaggaaaagtcacttaaaagatagtaatgttaagttagagtactgtactactgtttggttgtgtttgtttcttgtacttgttgttgcaatgcatagagtgaaaaagagt

SEQ ID NO: 39151 - protein, 483 aa, Arabidopsis thaliana
  peptide (1)..(483): Ceres Seq. ID no. 12599963
  misc_feature (90)..(481): Pfam Name: Eukaryotic aspartyl protease Pfam Description: Eukaryotic aspartyl protease
  misc_feature (93)..(483): Homolog of NCBI NO: 24417232 NR Description: unknown [Arabidopsis thaliana]
  misc_feature (93)..(483): Homolog of NCBI NO: 15231010 NR Description: hypothetical protein, 5' partial
  misc_feature (8)..(483): Homolog of NCBI NO: 28392860 NR Description: unknown protein [Arabidopsis thaliana]
  misc_feature (19)..(483): Homolog of NCBI NO: 15228618 NR Description: putative protein
  misc_feature (5)..(483): Homolog of NCBI NO: 21594980 NR Description: chloroplast nucleoid DNA binding protein,
  misc_feature (5)..(483): Homolog of NCBI NO: 15223368 NR Description: chloroplast nucleoid DNA binding protein, putative
  misc_feature (68)..(483): Homolog of NCBI NO: 34895664 NR Description: nucleoid DNA-binding protein cnd41-like protein
  misc_feature (13)..(483): Homolog of NCBI NO: 19424106 NR Description: putative chloroplast nucleoid DNA-binding protein
  misc_feature (13)..(483): Homolog of NCBI NO: 15229656 NR Description: putative chloroplast nucleoid DNA-binding protein
  misc_feature (1)..(483): Homolog of NCBI NO: 15222611 NR Description: hypothetical protein
MSPNYSFFFFIFFLTSHSSVFSRILPETSTTTTSILNVADSIHRTKYTSSFRLNQQEEQTHSASSSFSLQLHSRVSVRGTEHSDYKSLTLARLNRDTARVKSLITRLDLAINNISKADLKPISTMYTTEEQDIEAPLISGTTQGSGEYFTRVGIGKPAREVYMVLDTGSDVNWLQCTPCADCYHQTEPIFEPSSSSSYEPLSCDTPQCNALEVSECRNATCLYEVSYGDGSYTVGDFATETLTIGSTLVQNVAVGCGHSNEGLFVGAAGLLGLGGGLLALPSQLNTTSFSYCLVDRDSDSASTVDFGTSLSPDAVVAPLLRNHQLDTFYYLGLTGISVGGELLQIPQSSFEMDESGSGGIIIDSGTAVTRLQTEIYNSLRDSFVKGTLDLEKAAGVAMFDTCYNLSAKTTVEVPTVAFHFPGGKMLALPAKNYMIPVDSVGTFCLAFAPTASSLAIIGNVQQQGTRVTFDLANSLIGFSSNKC

SEQ ID NO: 39152 - protein, 359 aa, Arabidopsis thaliana
  peptide (1)..(359): Ceres Seq. ID no. 12599964
  misc_feature (1)..(357): Pfam Name: Eukaryotic aspartyl protease Pfam Description: Eukaryotic aspartyl protease
  misc_feature (1)..(359): Homolog of NCBI NO: 24417232 NR Description: unknown [Arabidopsis thaliana]
  misc_feature (1)..(359): Homolog of NCBI NO: 15231010 NR Description: hypothetical protein, 5' partial
  misc_feature (1)..(359): Homolog of NCBI NO: 28392860 NR Description: unknown protein [Arabidopsis thaliana]
  misc_feature (1)..(359): Homolog of NCBI NO: 15228618 NR Description: putative protein
  misc_feature (1)..(359): Homolog of NCBI NO: 21594980 NR Description: chloroplast nucleoid DNA binding protein,
  misc_feature (1)..(359): Homolog of NCBI NO: 15223368 NR Description: chloroplast nucleoid DNA binding protein, putative
  misc_feature (1)..(359): Homolog of NCBI NO: 34895664 NR Description: nucleoid DNA-binding protein cnd41-like protein
  misc_feature (1)..(359): Homolog of NCBI NO: 19424106 NR Description: putative chloroplast nucleoid DNA-binding protein
  misc_feature (1)..(359): Homolog of NCBI NO: 15229656 NR Description: putative chloroplast nucleoid DNA-binding protein
  misc_feature (1)..(359): Homolog of NCBI NO: 15222611 NR Description: hypothetical protein
MYTTEEQDIEAPLISGTTQGSGEYFTRVGIGKPAREVYMVLDTGSDVNWLQCTPCADCYHQTEPIFEPSSSSSYEPLSCDTPQCNALEVSECRNATCLYEVSYGDGSYTVGDFATETLTIGSTLVQNVAVGCGHSNEGLFVGAAGLLGLGGGLLALPSQLNTTSFSYCLVDRDSDSASTVDFGTSLSPDAVVAPLLRNHQLDTFYYLGLTGISVGGELLQIPQSSFEMDESGSGGIIIDSGTAVTRLQTEIYNSLRDSFVKGTLDLEKAAGVAMFDTCYNLSAKTTVEVPTVAFHFPGGKMLALPAKNYMIPVDSVGTFCLAFAPTASSLAIIGNVQQQGTRVTFDLANSLIGFSSNKC

SEQ ID NO: 39153 - protein, 321 aa, Arabidopsis thaliana
  peptide (1)..(321): Ceres Seq. ID no. 12599965
  misc_feature (1)..(319): Pfam Name: Eukaryotic aspartyl protease Pfam Description: Eukaryotic aspartyl protease
  misc_feature (1)..(321): Homolog of NCBI NO: 24417232 NR Description: unknown [Arabidopsis thaliana]
  misc_feature (1)..(321): Homolog of NCBI NO: 15231010 NR Description: hypothetical protein, 5' partial
  misc_feature (1)..(321): Homolog of NCBI NO: 28392860 NR Description: unknown protein [Arabidopsis thaliana]
  misc_feature (1)..(321): Homolog of NCBI NO: 15228618 NR Description: putative protein
  misc_feature (1)..(321): Homolog of NCBI NO: 21594980 NR Description: chloroplast nucleoid DNA binding protein,
  misc_feature (1)..(321): Homolog of NCBI NO: 15223368 NR Description: chloroplast nucleoid DNA binding protein, putative
  misc_feature (1)..(321): Homolog of NCBI NO: 34895664 NR Description: nucleoid DNA-binding protein cnd41-like protein
  misc_feature (1)..(321): Homolog of NCBI NO: 19424106 NR Description: putative chloroplast nucleoid DNA-binding protein
  misc_feature (1)..(321): Homolog of NCBI NO: 15229656 NR Description: putative chloroplast nucleoid DNA-binding protein
  misc_feature (1)..(321): Homolog of NCBI NO: 15222611 NR Description: hypothetical protein
MVLDTGSDVNWLQCTPCADCYHQTEPIFEPSSSSSYEPLSCDTPQCNALEVSECRNATCLYEVSYGDGSYTVGDFATETLTIGSTLVQNVAVGCGHSNEGLFVGAAGLLGLGGGLLALPSQLNTTSFSYCLVDRDSDSASTVDFGTSLSPDAVVAPLLRNHQLDTFYYLGLTGISVGGELLQIPQSSFEMDESGSGGIIIDSGTAVTRLQTEIYNSLRDSFVKGTLDLEKAAGVAMFDTCYNLSAKTTVEVPTVAFHFPGGKMLALPAKNYMIPVDSVGTFCLAFAPTASSLAIIGNVQQQGTRVTFDLANSLIGFSSNKC

SEQ ID NO: 39154 - DNA, 1778 bp, Arabidopsis thaliana
  misc_feature (1)..(1778): Ceres Seq. ID no. 12329299
  misc_feature: MA Experiment ID: 108561 Result: Down-regulated in Transcription
  misc_feature: MA Experiment 108561 PARAMETER Experiment Name: At_100uM_ABA_cDNA_P Parameter: Timepoint (hr) Value: 6
  misc_feature: MA Experiment 108561 PARAMETER Experiment Name: At_100uM_ABA_cDNA_P Parameter: Tissue Value: Aerial
  misc_feature: MA Experiment 108561 PARAMETER Experiment Name: At_100uM_ABA_cDNA_P Parameter: Treatment Value: 100uM ABA vs. No Treatment
  misc_feature: MA Experiment ID: 108576 Result: Down-regulated in Transcription
  misc_feature: MA Experiment 108576 PARAMETER Experiment Name: At_42deg_Heat_cDNA_P Parameter: Temperature (deg C) Value: 42 vs. 22
  misc_feature: MA Experiment 108576 PARAMETER Experiment Name: At_42deg_Heat_cDNA_P Parameter: Timepoint (hr) Value: 1
  misc_feature: MA Experiment 108576 PARAMETER Experiment Name: At_42deg_Heat_cDNA_P Parameter: Tissue Value: Aerial
  misc_feature: MA Experiment ID: 108577 Result: Down-regulated in Transcription
  misc_feature: MA Experiment 108577 PARAMETER Experiment Name: At_42deg_Heat_cDNA_P Parameter: Temperature (deg C) Value: 42 vs. 22
  misc_feature: MA Experiment 108577 PARAMETER Experiment Name: At_42deg_Heat_cDNA_P Parameter: Timepoint (hr) Value: 6
  misc_feature: MA Experiment 108577 PARAMETER Experiment Name: At_42deg_Heat_cDNA_P Parameter: Tissue Value: Aerial
  misc_feature: MA Experiment ID: 108595 Result: Down-regulated in Transcription
  misc_feature: MA Experiment 108595 PARAMETER Experiment Name: At_Ler-pi_Ovule_cDNA_P Parameter: Plant Line Value: null
  misc_feature: MA Experiment ID: 108605 Result: Down-regulated in Transcription
  misc_feature: MA Experiment 108605 PARAMETER Experiment Name: At_100uM_ABA_cDNA_P Parameter: Timepoint (hr) Value: 6
  misc_feature: MA Experiment 108605 PARAMETER Experiment Name: At_100uM_ABA_cDNA_P Parameter: Tissue Value: Aerial
  misc_feature: MA Experiment 108605 PARAMETER Experiment Name: At_100uM_ABA_cDNA_P Parameter: Treatment Value: 100uM ABA vs. No Treatment
  misc_feature: MA Experiment ID: 108668 Result: Down-regulated in Transcription
  misc_feature: MA Experiment 108668 PARAMETER Experiment Name: At_2mM_SA_cDNA_P Parameter: Plant Line Value: WS
  misc_feature: MA Experiment 108668 PARAMETER Experiment Name: At_2mM_SA_cDNA_P Parameter: Timepoint (hr) Value: 6
  misc_feature: MA Experiment 108668 PARAMETER Experiment Name: At_2mM_SA_cDNA_P Parameter: Treatment Value: 2mM SA vs. No Treatment
  misc_feature: MA Experiment ID: 20000070 Result: Down-regulated in Transcription
  misc_feature: MA Experiment 20000070 PARAMETER Experiment Name: At_100uM_ABA_Mutants_cDNA_P Parameter: Plant Line Value: CS24
  misc_feature: MA Experiment 20000070 PARAMETER Experiment Name: At_100uM_ABA_Mutants_cDNA_P Parameter: Timepoint (hr) Value: 6
  misc_feature: MA Experiment 20000070 PARAMETER Experiment Name: At_100uM_ABA_Mutants_cDNA_P Parameter: Tissue Value: Aerial
  misc_feature: MA Experiment 20000070 PARAMETER Experiment Name: At_100uM_ABA_Mutants_cDNA_P Parameter: Treatment Value: 100uM ABA vs. No Treatment
  misc_feature: MA Experiment ID: 20000071 Result: Down-regulated in Transcription
  misc_feature: MA Experiment 20000071 PARAMETER Experiment Name: At_100uM_ABA_Mutants_cDNA_P Parameter: Plant Line Value: CS8104
  misc_feature: MA Experiment 20000071 PARAMETER Experiment Name: At_100uM_ABA_Mutants_cDNA_P Parameter: Timepoint (hr) Value: 6
  misc_feature: MA Experiment 20000071 PARAMETER Experiment Name: At_100uM_ABA_Mutants_cDNA_P Parameter: Tissue Value: Aerial
  misc_feature: MA Experiment 20000071 PARAMETER Experiment Name: At_100uM_ABA_Mutants_cDNA_P Parameter: Treatment Value: 100uM ABA vs. No Treatment
  misc_feature: MA Experiment ID: 20000111 Result: Down-regulated in Transcription
  misc_feature: MA Experiment 20000111 PARAMETER Experiment Name: At_42deg_Heat_cDNA_P Parameter: Temperature (deg C) Value: 42 vs. 22
  misc_feature: MA Experiment 20000111 PARAMETER Experiment Name: At_42deg_Heat_cDNA_P Parameter: Timepoint (hr) Value: 6
  misc_feature: MA Experiment 20000111 PARAMETER Experiment Name: At_42deg_Heat_cDNA_P Parameter: Tissue Value: Aerial
  misc_feature: MA Experiment ID: 20000112 Result: Down-regulated in Transcription
  misc_feature: MA Experiment 20000112 PARAMETER Experiment Name: At_42deg_Heat_cDNA_P Parameter: Temperature (deg C) Value: 42 vs. 22
  misc_feature: MA Experiment 20000112 PARAMETER Experiment Name: At_42deg_Heat_cDNA_P Parameter: Timepoint (hr) Value: 2
  misc_feature: MA Experiment 20000112 PARAMETER Experiment Name: At_42deg_Heat_cDNA_P Parameter: Tissue Value: Aerial
  misc_feature: MA Experiment ID: 20000113 Result: Down-regulated in Transcription
  misc_feature: MA Experiment 20000113 PARAMETER Experiment Name: At_42deg_Heat_cDNA_P Parameter: Temperature (deg C) Value: 42 vs. 22
  misc_feature: MA Experiment 20000113 PARAMETER Experiment Name: At_42deg_Heat_cDNA_P Parameter: Timepoint (hr) Value: 8
  misc_feature: MA Experiment 20000113 PARAMETER Experiment Name: At_42deg_Heat_cDNA_P Parameter: Tissue Value: Aerial
  misc_feature: MA Experiment ID: 20000117 Result: Down-regulated in Transcription
  misc_feature: MA Experiment 20000117 PARAMETER Experiment Name: At_100uM_ABA_Mutants_cDNA_P Parameter: Plant Line Value: Columbia
  misc_feature: MA Experiment 20000117 PARAMETER Experiment Name: At_100uM_ABA_Mutants_cDNA_P Parameter: Timepoint (hr) Value: 6
  misc_feature: MA Experiment 20000117 PARAMETER Experiment Name: At_100uM_ABA_Mutants_cDNA_P Parameter: Tissue Value: Aerial
  misc_feature: MA Experiment 20000117 PARAMETER Experiment Name: At_100uM_ABA_Mutants_cDNA_P Parameter: Treatment Value: 100uM ABA vs. No Treatment
  misc_feature: MA Experiment ID: 20000184 Result: Up-regulated in Transcription
  misc_feature: MA Experiment 20000184 PARAMETER Experiment Name: At_Shoots__P Parameter: Age (day) Value: 7
  misc_feature: MA Experiment 20000184 PARAMETER Experiment Name: At_Shoots__P Parameter: Tissue Value: Shoots vs. Whole Plant
  misc_feature: MA Experiment ID: 20001555 Result: Down-regulated in Transcription
  misc_feature: MA Experiment 20001555 PARAMETER Experiment Name: At_Drought_Soil_Dry_P Parameter: Age (day) Value: 24
  misc_feature: MA Experiment 20001555 PARAMETER Experiment Name: At_Drought_Soil_Dry_P Parameter: Organism Value: A. thaliana
  misc_feature: MA Experiment 20001555 PARAMETER Experiment Name: At_Drought_Soil_Dry_P Parameter: Plant Line Value: WS
  misc_feature: MA Experiment 20001555 PARAMETER Experiment Name: At_Drought_Soil_Dry_P Parameter: Post Timepoint (hr) Value: None
  misc_feature: MA Experiment 20001555 PARAMETER Experiment Name: At_Drought_Soil_Dry_P Parameter: Post-Treatment Value: None
  misc_feature: MA Experiment 20001555 PARAMETER Experiment Name: At_Drought_Soil_Dry_P Parameter: Timepoint (day) Value: 10
  misc_feature: MA Experiment 20001555 PARAMETER Experiment Name: At_Drought_Soil_Dry_P Parameter: Treatment Value: Drought vs. No Drought
aaaaaaggcttctctgtgttgttctctgtgttgttctctgtggtcattcttctttcttttcacttcttcttcttcttcgctcttcttctcactgtcgggttccatttggcgcgaaaagttcttcactttttccagcttttttttgttctctgacagttttttttttttgtttggttacaaataaagatgccagtaagtgtggcactagttttgctgttgacattgagcagtgtgattctgattaatgggagaagttacggcgtcggaaacatatgcgatcgtggtcggagaccgagcgagagaccacacagtgtcaaaatcactgattttggtgctgtgggagatgggaaaacgttgaacacacttgcgtttcaaaatgctgtcttttatctaaagtctttcgctgataaaggtggtgctcagctttatgttcctccgggacggtggctcaccggaagtttcaacctcaccagtcatctcactctctttctcgagaaagacgccgtcatacttgcctcacaggatccatcgcattggcaagtcacggatgccttaccgtcatatgggcggggtattgatctaccagggaagagatacatgagtttgataaacggtgacatgctacatgatgtagtagtaacaggtgataacggtaccatagatgggcaaggccttgtttggtgggatcggtttaattctcattctttagagtacagtcgccctcaccttgtcgagtttgtctctgccgaaaatgtcattgtatcaaatcttacattcttgaacgctccggcttatactatccattcagtttattgtcgcaatttatacattcatagagtaacggctaatacttgtccagaatctccttataccatcggtattgtcccagattcttctgaaaatgtgtgtatccaagaatctagtatcaacatggggtatgatgccatttctcttaaaagtggttgtgatgaatacggtttatcgtatgcaagacctactgctaatgtccagataagaaatgtttaccttagagcagcttctggttcctccatttcctttggtagtgaaatgtctggtggtatatctgatgttgaggtcagtgatgctcacatacacaactcgttatccgggattgcctttagaacaacaaatggaagaggtggttatattaaggagattgatatttccaacatccatatggttaatgttggtactgcatttctagccaacggtagcttcggtactcatccggattctggtttcgatgaaaatgcttacccgcttgtgagtcacatcaggttacatgacattgttggagaaaacataagcactgctggatatttctttggaacgaaagagtctcctttcacttcgattttgttatcgaatatctctctgtcgattaaaaactcggcttcccctgctgattcttggcaatgctcatatgttgacgggtcttcggaattcgtagtccctgaaccgtgccttgagctgaagagttttgatagttactatggtagagctgaggccttatgaaaccaaacttcattaggaatgatgattcatatttgtttaagagagagcaaatggttctgattcttttcttttccccaaaaataaaccacagtgtgtagaattattacctgttccttgttggtgttgttgtccctgttatttgcagcttgtgagattaatatatcttgtacaggttcatttcttcattcatgtgtaaccaaagaaattttgtattagcccagtaaccagatattaattttttt

SEQ ID NO: 39155 - protein, 449 aa, Arabidopsis thaliana
  peptide (1)..(449): Ceres Seq. ID no. 12329300
  misc_feature (75)..(433): Pfam Name: Glycosyl hydrolases family 28 Pfam Description: Glycosyl hydrolases family 28
  misc_feature (9)..(437): Homolog of NCBI NO: 11263971 NR Description: hypothetical protein T17J13.70 - Arabidopsis
  misc_feature (9)..(437): Homolog of NCBI NO: 18412253 NR Description: polygalacturonase, putative
  misc_feature (39)..(438): Homolog of NCBI NO: 40714685 NR Description: putative polygalacturonase
  misc_feature (1)..(441): Homolog of NCBI NO: 21553827 NR Description: polygalacturonase, putative [Arabidopsis thaliana]
  misc_feature (3)..(441): Homolog of NCBI NO: 7939578 NR Description: polygalacturonase-like protein [Arabidopsis
  misc_feature (1)..(441): Homolog of NCBI NO: 15228881 NR Description: polygalacturonase, putative
  misc_feature (71)..(446): Homolog of NCBI NO: 18397713 NR Description: polygalacturonase, putative
  misc_feature (71)..(446): Homolog of NCBI NO: 21593399 NR Description: polygalacturonase-like protein [Arabidopsis
  misc_feature (3)..(446): Homolog of NCBI NO: 30679999 NR Description: polygalacturonase, putative [Arabidopsis
  misc_feature (1)..(449): Homolog of NCBI NO: 22327662 NR Description: Expressed protein
MPVSVALVLLLTLSSVILINGRSYGVGNICDRGRRPSERPHSVKITDFGAVGDGKTLNTLAFQNAVFYLKSFADKGGAQLYVPPGRWLTGSFNLTSHLTLFLEKDAVILASQDPSHWQVTDALPSYGRGIDLPGKRYMSLINGDMLHDVVVTGDNGTIDGQGLVWWDRFNSHSLEYSRPHLVEFVSAENVIVSNLTFLNAPAYTIHSVYCRNLYIHRVTANTCPESPYTIGIVPDSSENVCIQESSINMGYDAISLKSGCDEYGLSYARPTANVQIRNVYLRAASGSSISFGSEMSGGISDVEVSDAHIHNSLSGIAFRTTNGRGGYIKEIDISNIHMVNVGTAFLANGSFGTHPDSGFDENAYPLVSHIRLHDIVGENISTAGYFFGTKESPFTSILLSNISLSIKNSASPADSWQCSYVDGSSEFVVPEPCLELKSFDSYYGRAEAL

SEQ ID NO: 39156 - protein, 312 aa, Arabidopsis thaliana
  peptide (1)..(312): Ceres Seq. ID no. 12329301
  misc_feature (1)..(296): Pfam Name: Glycosyl hydrolases family 28 Pfam Description: Glycosyl hydrolases family 28
  misc_feature (1)..(300): Homolog of NCBI NO: 11263971 NR Description: hypothetical protein T17J13.70 - Arabidopsis
  misc_feature (1)..(300): Homolog of NCBI NO: 18412253 NR Description: polygalacturonase, putative
  misc_feature (1)..(301): Homolog of NCBI NO: 40714685 NR Description: putative polygalacturonase
  misc_feature (1)..(304): Homolog of NCBI NO: 21553827 NR Description: polygalacturonase, putative [Arabidopsis thaliana]
  misc_feature (1)..(304): Homolog of NCBI NO: 7939578 NR Description: polygalacturonase-like protein [Arabidopsis
  misc_feature (1)..(304): Homolog of NCBI NO: 15228881 NR Description: polygalacturonase, putative
  misc_feature (1)..(309): Homolog of NCBI NO: 18397713 NR Description: polygalacturonase, putative
  misc_feature (1)..(309): Homolog of NCBI NO: 21593399 NR Description: polygalacturonase-like protein [Arabidopsis
  misc_feature (1)..(309): Homolog of NCBI NO: 30679999 NR Description: polygalacturonase, putative [Arabidopsis
  misc_feature (1)..(312): Homolog of NCBI NO: 22327662 NR Description: Expressed protein
MSLINGDMLHDVVVTGDNGTIDGQGLVWWDRFNSHSLEYSRPHLVEFVSAENVIVSNLTFLNAPAYTIHSVYCRNLYIHRVTANTCPESPYTIGIVPDSSENVCIQESSINMGYDAISLKSGCDEYGLSYARPTANVQIRNVYLRAASGSSISFGSEMSGGISDVEVSDAHIHNSLSGIAFRTTNGRGGYIKEIDISNIHMVNVGTAFLANGSFGTHPDSGFDENAYPLVSHIRLHDIVGENISTAGYFFGTKESPFTSILLSNISLSIKNSASPADSWQCSYVDGSSEFVVPEPCLELKSFDSYYGRAEAL

SEQ ID NO: 39157 - protein, 305 aa, Arabidopsis thaliana
  peptide (1)..(305): Ceres Seq. ID no. 12329302
  misc_feature (1)..(289): Pfam Name: Glycosyl hydrolases family 28 Pfam Description: Glycosyl hydrolases family 28
  misc_feature (1)..(293): Homolog of NCBI NO: 11263971 NR Description: hypothetical protein T17J13.70 - Arabidopsis
  misc_feature (1)..(293): Homolog of NCBI NO: 18412253 NR Description: polygalacturonase, putative
  misc_feature (1)..(294): Homolog of NCBI NO: 40714685 NR Description: putative polygalacturonase
  misc_feature (1)..(297): Homolog of NCBI NO: 21553827 NR Description: polygalacturonase, putative [Arabidopsis thaliana]
  misc_feature (1)..(297): Homolog of NCBI NO: 7939578 NR Description: polygalacturonase-like protein [Arabidopsis
  misc_feature (1)..(297): Homolog of NCBI NO: 15228881 NR Description: polygalacturonase, putative
  misc_feature (1)..(302): Homolog of NCBI NO: 18397713 NR Description: polygalacturonase, putative
  misc_feature (1)..(302): Homolog of NCBI NO: 21593399 NR Description: polygalacturonase-like protein [Arabidopsis
  misc_feature (1)..(302): Homolog of NCBI NO: 30679999 NR Description: polygalacturonase, putative [Arabidopsis
  misc_feature (1)..(305): Homolog of NCBI NO: 22327662 NR Description: Expressed protein
MLHDVVVTGDNGTIDGQGLVWWDRFNSHSLEYSRPHLVEFVSAENVIVSNLTFLNAPAYTIHSVYCRNLYIHRVTANTCPESPYTIGIVPDSSENVCIQESSINMGYDAISLKSGCDEYGLSYARPTANVQIRNVYLRAASGSSISFGSEMSGGISDVEVSDAHIHNSLSGIAFRTTNGRGGYIKEIDISNIHMVNVGTAFLANGSFGTHPDSGFDENAYPLVSHIRLHDIVGENISTAGYFFGTKESPFTSILLSNISLSIKNSASPADSWQCSYVDGSSEFVVPEPCLELKSFDSYYGRAEAL

SEQ ID NO: 39158 - DNA, 1681 bp, Arabidopsis thaliana
  misc_feature (1)..(1681): Ceres Seq. ID no. 12385085
  misc_feature: MA Experiment ID: 108434 Result: Up-regulated in Transcription
  misc_feature: MA Experiment 108434 PARAMETER Experiment Name: At_Root_Tips_cDNA_P Parameter: Tissue Value: Root Tips
  misc_feature: MA Experiment ID: 108461 Result: Down-regulated in Transcription
  misc_feature: MA Experiment 108461 PARAMETER Experiment Name: At_Germinating_Seeds_cDNA_P Parameter: Age (day) Value: 1 vs. 0
  misc_feature: MA Experiment 108461 PARAMETER Experiment Name: At_Germinating_Seeds_cDNA_P Parameter: Tissue Value: Germinating Seeds
  misc_feature: MA Experiment ID: 108462 Result: Down-regulated in Transcription
  misc_feature: MA Experiment 108462 PARAMETER Experiment Name: At_Germinating_Seeds_cDNA_P Parameter: Age (day) Value: 2 vs. 0
  misc_feature: MA Experiment 108462 PARAMETER Experiment Name: At_Germinating_Seeds_cDNA_P Parameter: Tissue Value: Germinating Seeds
  misc_feature: MA Experiment ID: 108463 Result: Down-regulated in Transcription
  misc_feature: MA Experiment 108463 PARAMETER Experiment Name: At_Germinating_Seeds_cDNA_P Parameter: Age (day) Value: 3 vs. 0
  misc_feature: MA Experiment 108463 PARAMETER Experiment Name: At_Germinating_Seeds_cDNA_P Parameter: Tissue Value: Germinating Seeds
  misc_feature: MA Experiment ID: 108464 Result: Down-regulated in Transcription
  misc_feature: MA Experiment 108464 PARAMETER Experiment Name: At_Germinating_Seeds_cDNA_P Parameter: Age (day) Value: 4 vs. 0
  misc_feature: MA Experiment 108464 PARAMETER Experiment Name: At_Germinating_Seeds_cDNA_P Parameter: Tissue Value: Germinating Seeds
  misc_feature: MA Experiment ID: 108576 Result: Up-regulated in Transcription
  misc_feature: MA Experiment 108576 PARAMETER Experiment Name: At_42deg_Heat_cDNA_P Parameter: Temperature (deg C) Value: 42 vs. 22
  misc_feature: MA Experiment 108576 PARAMETER Experiment Name: At_42deg_Heat_cDNA_P Parameter: Timepoint (hr) Value: 1
  misc_feature: MA Experiment 108576 PARAMETER Experiment Name: At_42deg_Heat_cDNA_P Parameter: Tissue Value: Aerial
  misc_feature: MA Experiment ID: 108577 Result: Up-regulated in Transcription
  misc_feature: MA Experiment 108577 PARAMETER Experiment Name: At_42deg_Heat_cDNA_P Parameter: Temperature (deg C) Value: 42 vs. 22
  misc_feature: MA Experiment 108577 PARAMETER Experiment Name: At_42deg_Heat_cDNA_P Parameter: Timepoint (hr) Value: 6
  misc_feature: MA Experiment 108577 PARAMETER Experiment Name: At_42deg_Heat_cDNA_P Parameter: Tissue Value: Aerial
  misc_feature: MA Experiment ID: 108579 Result: Up-regulated in Transcription
  misc_feature: MA Experiment 108579 PARAMETER Experiment Name: At_4deg_Cold_cDNA_P Parameter: Temperature (deg C) Value: 4 vs. 22
  misc_feature: MA Experiment 108579 PARAMETER Experiment Name: At_4deg_Cold_cDNA_P Parameter: Timepoint (hr) Value: 6
  misc_feature: MA Experiment 108579 PARAMETER Experiment Name: At_4deg_Cold_cDNA_P Parameter: Tissue Value: Aerial
  misc_feature: MA Experiment ID: 108585 Result: Up-regulated in Transcription
  misc_feature: MA Experiment 108585 PARAMETER Experiment Name: At_5mM_NaNP_cDNA_P Parameter: Timepoint (hr) Value: 6
  misc_feature: MA Experiment 108585 PARAMETER Experiment Name: At_5mM_NaNP_cDNA_P Parameter: Tissue Value: Aerial
  misc_feature: MA Experiment 108585 PARAMETER Experiment Name: At_5mM_NaNP_cDNA_P Parameter: Treatment Value: null
  misc_feature: MA Experiment ID: 20000087 Result: Down-regulated in Transcription
  misc_feature: MA Experiment 20000087 PARAMETER Experiment Name: At_100uM_ABA_Mutants_cDNA_P Parameter: Plant Line Value: WS
  misc_feature: MA Experiment 20000087 PARAMETER Experiment Name: At_100uM_ABA_Mutants_cDNA_P Parameter: Timepoint (hr) Value: 6
  misc_feature: MA Experiment 20000087 PARAMETER Experiment Name: At_100uM_ABA_Mutants_cDNA_P Parameter: Tissue Value: Aerial
  misc_feature: MA Experiment 20000087 PARAMETER Experiment Name: At_100uM_ABA_Mutants_cDNA_P Parameter: Treatment Value: 100uM ABA vs. No Treatment
  misc_feature: MA Experiment ID: 20000093 Result: Up-regulated in Transcription
  misc_feature: MA Experiment 20000093 PARAMETER Experiment Name: At_42deg_Heat_cDNA_P Parameter: Temperature (deg C) Value: 42 vs. 22
  misc_feature: MA Experiment 20000093 PARAMETER Experiment Name: At_42deg_Heat_cDNA_P Parameter: Timepoint (hr) Value: 0.5
  misc_feature: MA Experiment 20000093 PARAMETER Experiment Name: At_42deg_Heat_cDNA_P Parameter: Tissue Value: Aerial
  misc_feature: MA Experiment ID: 20000111 Result: Up-regulated in Transcription
  misc_feature: MA Experiment 20000111 PARAMETER Experiment Name: At_42deg_Heat_cDNA_P Parameter: Temperature (deg C) Value: 42 vs. 22
  misc_feature: MA Experiment 20000111 PARAMETER Experiment Name: At_42deg_Heat_cDNA_P Parameter: Timepoint (hr) Value: 6
  misc_feature: MA Experiment 20000111 PARAMETER Experiment Name: At_42deg_Heat_cDNA_P Parameter: Tissue Value: Aerial
  misc_feature: MA Experiment ID: 20000112 Result: Up-regulated in Transcription
  misc_feature: MA Experiment 20000112 PARAMETER Experiment Name: At_42deg_Heat_cDNA_P Parameter: Temperature (deg C) Value: 42 vs. 22
  misc_feature: MA Experiment 20000112 PARAMETER Experiment Name: At_42deg_Heat_cDNA_P Parameter: Timepoint (hr) Value: 2
  misc_feature: MA Experiment 20000112 PARAMETER Experiment Name: At_42deg_Heat_cDNA_P Parameter: Tissue Value: Aerial
  misc_feature: MA Experiment ID: 20000113 Result: Up-regulated in Transcription
  misc_feature: MA Experiment 20000113 PARAMETER Experiment Name: At_42deg_Heat_cDNA_P Parameter: Temperature (deg C) Value: 42 vs. 22
  misc_feature: MA Experiment 20000113 PARAMETER Experiment Name: At_42deg_Heat_cDNA_P Parameter: Timepoint (hr) Value: 8
  misc_feature: MA Experiment 20000113 PARAMETER Experiment Name: At_42deg_Heat_cDNA_P Parameter: Tissue Value: Aerial
  misc_feature: MA Experiment ID: 20000144 Result: Up-regulated in Transcription
  misc_feature: MA Experiment 20000144 PARAMETER Experiment Name: At_42deg_Heat_cDNA_P Parameter: Temperature (deg C) Value: 42 vs. 22
  misc_feature: MA Experiment 20000144 PARAMETER Experiment Name: At_42deg_Heat_cDNA_P Parameter: Timepoint (hr) Value: 1
  misc_feature: MA Experiment 20000144 PARAMETER Experiment Name: At_42deg_Heat_cDNA_P Parameter: Tissue Value: Aerial
  misc_feature: MA Experiment ID: 20000171 Result: Up-regulated in Transcription
  misc_feature: MA Experiment 20000171 PARAMETER Experiment Name: At_42deg_Heat_P Parameter: Age (day) Value: 14
  misc_feature: MA Experiment 20000171 PARAMETER Experiment Name: At_42deg_Heat_P Parameter: Organism Value: A. thaliana
  misc_feature: MA Experiment 20000171 PARAMETER Experiment Name: At_42deg_Heat_P Parameter: Plant Line Value: WS
  misc_feature: MA Experiment 20000171 PARAMETER Experiment Name: At_42deg_Heat_P Parameter: Temperature (deg C) Value: 42 vs. 22
  misc_feature: MA Experiment 20000171 PARAMETER Experiment Name: At_42deg_Heat_P Parameter: Timepoint (hr) Value: 1
  misc_feature: MA Experiment 20000171 PARAMETER Experiment Name: At_42deg_Heat_P Parameter: Tissue Value: Aerial
  misc_feature: MA Experiment ID: 20000173 Result: Up-regulated in Transcription
  misc_feature: MA Experiment 20000173 PARAMETER Experiment Name: At_42deg_Heat_P Parameter: Age (day) Value: 14
  misc_feature: MA Experiment 20000173 PARAMETER Experiment Name: At_42deg_Heat_P Parameter: Organism Value: A. thaliana
  misc_feature: MA Experiment 20000173 PARAMETER Experiment Name: At_42deg_Heat_P Parameter: Plant Line Value: WS
  misc_feature: MA Experiment 20000173 PARAMETER Experiment Name: At_42deg_Heat_P Parameter: Temperature (deg C) Value: 42 vs. 22
  misc_feature: MA Experiment 20000173 PARAMETER Experiment Name: At_42deg_Heat_P Parameter: Timepoint (hr) Value: 6
  misc_feature: MA Experiment 20000173 PARAMETER Experiment Name: At_42deg_Heat_P Parameter: Tissue Value: Aerial
  misc_feature: MA Experiment ID: 20000180 Result: Down-regulated in Transcription
  misc_feature: MA Experiment 20000180 PARAMETER Experiment Name: At_Germinating_Seeds_P Parameter: Age (hr) Value: 24 vs. 0
  misc_feature: MA Experiment 20000180 PARAMETER Experiment Name: At_Germinating_Seeds_P Parameter: Tissue Value: Germinating Seeds
  misc_feature: MA Experiment ID: 20000184 Result: Down-regulated in Transcription
  misc_feature: MA Experiment 20000184 PARAMETER Experiment Name: At_Shoots__P Parameter: Age (day) Value: 7
  misc_feature: MA Experiment 20000184 PARAMETER Experiment Name: At_Shoots__P Parameter: Tissue Value: Shoots vs. Whole Plant
  misc_feature: MA Experiment ID: 20001247 Result: Down-regulated in Transcription
  misc_feature: MA Experiment 20001247 PARAMETER Experiment Name: At_Far-red-induction_P Parameter: Age (day) Value: 7
  misc_feature: MA Experiment 20001247 PARAMETER Experiment Name: At_Far-red-induction_P Parameter: Light Value: Far-red vs. White
  misc_feature: MA Experiment 20001247 PARAMETER Experiment Name: At_Far-red-induction_P Parameter: Organism Value: A. thaliana
  misc_feature: MA Experiment 20001247 PARAMETER Experiment Name: At_Far-red-induction_P Parameter: Plant Line Value: Columbia
  misc_feature: MA Experiment 20001247 PARAMETER Experiment Name: At_Far-red-induction_P Parameter: Timepoint (hr) Value: 1
  misc_feature: MA Experiment 20001247 PARAMETER Experiment Name: At_Far-red-induction_P Parameter: Tissue Value: Whole Plant
  misc_feature: MA Experiment ID: 20001248 Result: Down-regulated in Transcription
  misc_feature: MA Experiment 20001248 PARAMETER Experiment Name: At_Far-red-induction_P Parameter: Age (day) Value: 7
  misc_feature: MA Experiment 20001248 PARAMETER Experiment Name: At_Far-red-induction_P Parameter: Light Value: Far-red vs. White
  misc_feature: MA Experiment 20001248 PARAMETER Experiment Name: At_Far-red-induction_P Parameter: Organism Value: A. thaliana
  misc_feature: MA Experiment 20001248 PARAMETER Experiment Name: At_Far-red-induction_P Parameter: Plant Line Value: Columbia
  misc_feature: MA Experiment 20001248 PARAMETER Experiment Name: At_Far-red-induction_P Parameter: Timepoint (hr) Value: 4
  misc_feature: MA Experiment 20001248 PARAMETER Experiment Name: At_Far-red-induction_P Parameter: Tissue Value: Whole Plant
  misc_feature: MA Experiment ID: 20001450 Result: Down-regulated in Transcription
  misc_feature: MA Experiment 20001450 PARAMETER Experiment Name: At_Far-red-induction_P Parameter: Age (day) Value: 7
  misc_feature: MA Experiment 20001450 PARAMETER Experiment Name: At_Far-red-induction_P Parameter: Light Value: Far-red vs. White
  misc_feature: MA Experiment 20001450 PARAMETER Experiment Name: At_Far-red-induction_P Parameter: Organism Value: A. thaliana
  misc_feature: MA Experiment 20001450 PARAMETER Experiment Name: At_Far-red-induction_P Parameter: Plant Line Value: Columbia
  misc_feature: MA Experiment 20001450 PARAMETER Experiment Name: At_Far-red-induction_P Parameter: Timepoint (hr) Value: 8
  misc_feature: MA Experiment 20001450 PARAMETER Experiment Name: At_Far-red-induction_P Parameter: Tissue Value: Whole Plant
  misc_feature: MA Experiment ID: 20001451 Result: Down-regulated in Transcription
  misc_feature: MA Experiment 20001451 PARAMETER Experiment Name: At_Far-red-induction_P Parameter: Age (day) Value: 7
  misc_feature: MA Experiment 20001451 PARAMETER Experiment Name: At_Far-red-induction_P Parameter: Light Value: Far-red vs. White
  misc_feature: MA Experiment 20001451 PARAMETER Experiment Name: At_Far-red-induction_P Parameter: Organism Value: A. thaliana
  misc_feature: MA Experiment 20001451 PARAMETER Experiment Name: At_Far-red-induction_P Parameter: Plant Line Value: Columbia
  misc_feature: MA Experiment 20001451 PARAMETER Experiment Name: At_Far-red-induction_P Parameter: Timepoint (hr) Value: 24
  misc_feature: MA Experiment 20001451 PARAMETER Experiment Name: At_Far-red-induction_P Parameter: Tissue Value: Whole Plant
  misc_feature: MA Experiment ID: 20001555 Result: Up-regulated in Transcription
  misc_feature: MA Experiment 20001555 PARAMETER Experiment Name: At_Drought_Soil_Dry_P Parameter: Age (day) Value: 24
  misc_feature: MA Experiment 20001555 PARAMETER Experiment Name: At_Drought_Soil_Dry_P Parameter: Organism Value: A. thaliana
  misc_feature: MA Experiment 20001555 PARAMETER Experiment Name: At_Drought_Soil_Dry_P Parameter: Plant Line Value: WS
  misc_feature: MA Experiment 20001555 PARAMETER Experiment Name: At_Drought_Soil_Dry_P Parameter: Post Timepoint (hr) Value: None
  misc_feature: MA Experiment 20001555 PARAMETER Experiment Name: At_Drought_Soil_Dry_P Parameter: Post-Treatment Value: None
  misc_feature: MA Experiment 20001555 PARAMETER Experiment Name: At_Drought_Soil_Dry_P Parameter: Timepoint (day) Value: 10
  misc_feature: MA Experiment 20001555 PARAMETER Experiment Name: At_Drought_Soil_Dry_P Parameter: Treatment Value: Drought vs. No Drought
  misc_feature: MA Experiment ID: 20001556 Result: Up-regulated in Transcription
  misc_feature: MA Experiment 20001556 PARAMETER Experiment Name: At_Drought_Soil_Dry_P Parameter: Age (day) Value: 26
  misc_feature: MA Experiment 20001556 PARAMETER Experiment Name: At_Drought_Soil_Dry_P Parameter: Organism Value: A. thaliana
  misc_feature: MA Experiment 20001556 PARAMETER Experiment Name: At_Drought_Soil_Dry_P Parameter: Plant Line Value: WS
  misc_feature: MA Experiment 20001556 PARAMETER Experiment Name: At_Drought_Soil_Dry_P Parameter: Post Timepoint (hr) Value: None
  misc_feature: MA Experiment 20001556 PARAMETER Experiment Name: At_Drought_Soil_Dry_P Parameter: Post-Treatment Value: None
  misc_feature: MA Experiment 20001556 PARAMETER Experiment Name: At_Drought_Soil_Dry_P Parameter: Timepoint (day) Value: 12
  misc_feature: MA Experiment 20001556 PARAMETER Experiment Name: At_Drought_Soil_Dry_P Parameter: Treatment Value: Drought vs. No Drought
  misc_feature: MA Experiment ID: 20001557 Result: Up-regulated in Transcription
  misc_feature: MA Experiment 20001557 PARAMETER Experiment Name: At_Drought_Soil_Dry_P Parameter: Age (day) Value: 27
  misc_feature: MA Experiment 20001557 PARAMETER Experiment Name: At_Drought_Soil_Dry_P Parameter: Organism Value: A. thaliana
  misc_feature: MA Experiment 20001557 PARAMETER Experiment Name: At_Drought_Soil_Dry_P Parameter: Plant Line Value: WS
  misc_feature: MA Experiment 20001557 PARAMETER Experiment Name: At_Drought_Soil_Dry_P Parameter: Post Timepoint (hr) Value: 3
  misc_feature: MA Experiment 20001557 PARAMETER Experiment Name: At_Drought_Soil_Dry_P Parameter: Post-Treatment Value: Re-Water vs. No Drought
  misc_feature: MA Experiment 20001557 PARAMETER Experiment Name: At_Drought_Soil_Dry_P Parameter: Timepoint (day) Value: 13
  misc_feature: MA Experiment 20001557 PARAMETER Experiment Name: At_Drought_Soil_Dry_P Parameter: Treatment Value: Drought vs. No Drought
  misc_feature: MA Experiment ID: 20001558 Result: Up-regulated in Transcription
  misc_feature: MA Experiment 20001558 PARAMETER Experiment Name: At_Drought_Soil_Dry_P Parameter: Age (day) Value: 27
  misc_feature: MA Experiment 20001558 PARAMETER Experiment Name: At_Drought_Soil_Dry_P Parameter: Organism Value: A. thaliana
  misc_feature: MA Experiment 20001558 PARAMETER Experiment Name: At_Drought_Soil_Dry_P Parameter: Plant Line Value: WS
  misc_feature: MA Experiment 20001558 PARAMETER Experiment Name: At_Drought_Soil_Dry_P Parameter: Post Timepoint (hr) Value: 6
  misc_feature: MA Experiment 20001558 PARAMETER Experiment Name: At_Drought_Soil_Dry_P Parameter: Post-Treatment Value: Re-Water vs. No Drought
  misc_feature: MA Experiment 20001558 PARAMETER Experiment Name: At_Drought_Soil_Dry_P Parameter: Timepoint (day) Value: 13
  misc_feature: MA Experiment 20001558 PARAMETER Experiment Name: At_Drought_Soil_Dry_P Parameter: Treatment Value: Drought vs. No Drought
  misc_feature: MA Experiment ID: 20001560 Result: Up-regulated in Transcription
  misc_feature: MA Experiment 20001560 PARAMETER Experiment Name: At_Drought_Soil_Dry_P Parameter: Age (day) Value: 28
  misc_feature: MA Experiment 20001560 PARAMETER Experiment Name: At_Drought_Soil_Dry_P Parameter: Organism Value: A. thaliana
  misc_feature: MA Experiment 20001560 PARAMETER Experiment Name: At_Drought_Soil_Dry_P Parameter: Plant Line Value: WS
  misc_feature: MA Experiment 20001560 PARAMETER Experiment Name: At_Drought_Soil_Dry_P Parameter: Post Timepoint (hr) Value: None
  misc_feature: MA Experiment 20001560 PARAMETER Experiment Name: At_Drought_Soil_Dry_P Parameter: Post-Treatment Value: None
  misc_feature: MA Experiment 20001560 PARAMETER Experiment Name: At_Drought_Soil_Dry_P Parameter: Timepoint (day) Value: 14
  misc_feature: MA Experiment 20001560 PARAMETER Experiment Name: At_Drought_Soil_Dry_P Parameter: Treatment Value: Drought vs. No Drought
aactgaaaaattaaaaggcaaaagctttttttcagatttctgataatcagacagacagacacaaacaaacaccggtatcgacgaacggaactaactccgatatccaaaacccactccaagtttcacgaacgaagggcttagtatctgccatggctcctgatgcttctactgctcttgcagcgagggagaaagttcagcaaatcctgaatgcagcttgtaccggaaatctcgaattccttaagaatgttgctaagcagcttgatgaaggaaaagacttgacgaaaactgtggagagtattaaagacgcaaacaaacgtggagcgcttcacttcgctgcgagagaaggacaaactgaaatatgcagatatcttttggaagaactgaaactcaatgctgatgcaaaagatgaaactggtgatactccgcttgttcatgctgcgaggcaaggacagattgaaacggttaagtatcttttagagcaaggagctgatcccaatatagctagtgaactaggagccacagctttgcatcatgcggctgggacaggagaaatcgagttgctaaaggaattgctctctagaggtgttcctgttgattctgaaagtgaatctggcacgccattaatctgggctgctggccacgaccaaaaaaatgctgtggaagtcttgttagaacacaatgccaatcctaatgctgagactgaagataatatcacaccgttattatctgcagtggcagcgggttctctgtcatgcttagagttgttggtcaaggcaggtgccaaagctaacgtttttgctggtggtgcaactccattgcacattgcggctgatattggaaaccttgagttaattaactgtttacttaaagccggggctgatccgaatcagaaagatgaggagggtaataggccattagaagttgcagctgctagagacaacagaaaggttgttgagatcctcttcccattgacaacaaaaccagaaactgtttcggactggacagtagatggaattctcgctcacatggaatcaaacaaagaacaagaggaaaactcaaacaaggcgaaatcccaagagactgggatcaagaaagatcttcctgtggtctccccagaagcaaaggcaaaagccgcagaagcaaaagccagaggacaagacgcctttcacagaaaggattttcagatggctattgatgcttatacacaagcaattgattttgacccaacggatcataccttattctcaaaccgaagcctctgctggttgcgactaggacaagctgagcatgccttatctgatgctaaagcctgcagagaactaaacccagattggcctaaaggttgcttcagagaaggcgctgctctgcgtttgctacagcggtttgacgaggcagccaatgctttctacgagggagtattgcttagccctgaaagcaaagagctcattgatgctttcagagaagctgtagatgccggaaggaagtttcacggcaagggtgaggttaaggccaaatcataagatcttcgagagatggtttatgtagtatatgtatgaagttttgatctacttcttacctttgttctcccttgtgcactattcttaggaacaaagttttgtttgtggtcgaatttggtaatttgtccgagtttacagcttagataaaaaagagttggtaatac

SEQ ID NO: 39159 - protein, 456 aa, Arabidopsis thaliana
  peptide (1)..(456): Ceres Seq. ID no. 12385086
  misc_feature (362)..(395): Pfam Name: TPR Domain Pfam Description: TPR Domain
  misc_feature (20)..(442): Homolog of NCBI NO: 27542766 NR Description: ankyrin-like protein-like protein [Sorghum
  misc_feature (325)..(450): Homolog of NCBI NO: 38637543 NR Description: ankyrin-like protein [Oryza sativa (japonica
  misc_feature (2)..(211): Homolog of NCBI NO: 38637543 NR Description: ankyrin-like protein [Oryza sativa (japonica
  misc_feature (305)..(432): Homolog of NCBI NO: 13435243 NR Description: putative gag-pol polyprotein [Oryza sativa]
  misc_feature (17)..(297): Homolog of NCBI NO: 13435243 NR Description: putative gag-pol polyprotein [Oryza sativa]
  misc_feature (10)..(451): Homolog of NCBI NO: 34896852 NR Description: putative ankyrin [Oryza sativa]
  misc_feature (17)..(440): Homolog of NCBI NO: 27542768 NR Description: ankyrin-like protein-like protein [Sorghum
  misc_feature (1)..(456): Homolog of NCBI NO: 24745936 NR Description: ankyrin-like protein [Solanum tuberosum]
  misc_feature (1)..(456): Homolog of NCBI NO: 34329680 NR Description: unknown [Nicotiana benthamiana]
  misc_feature (1)..(456): Homolog of NCBI NO: 15229331 NR Description: ankyrin-like protein
MAPDASTALAAREKVQQILNAACTGNLEFLKNVAKQLDEGKDLTKTVESIKDANKRGALHFAAREGQTEICRYLLEELKLNADAKDETGDTPLVHAARQGQIETVKYLLEQGADPNIASELGATALHHAAGTGEIELLKELLSRGVPVDSESESGTPLIWAAGHDQKNAVEVLLEHNANPNAETEDNITPLLSAVAAGSLSCLELLVKAGAKANVFAGGATPLHIAADIGNLELINCLLKAGADPNQKDEEGNRPLEVAAARDNRKVVEILFPLTTKPETVSDWTVDGILAHMESNKEQEENSNKAKSQETGIKKDLPVVSPEAKAKAAEAKARGQDAFHRKDFQMAIDAYTQAIDFDPTDHTLFSNRSLCWLRLGQAEHALSDAKACRELNPDWPKGCFREGAALRLLQRFDEAANAFYEGVLLSPESKELIDAFREAVDAGRKFHGKGEVKAKS

SEQ ID NO: 39160 - DNA, 1016 bp, Arabidopsis thaliana; identical to SEQ ID NO: 38791
  misc_feature (1)..(1016): Ceres Seq. ID no. 13576736
  misc_feature: MA Experiment ID: 20000184 Result: Down-regulated in Transcription
  misc_feature: MA Experiment 20000184 PARAMETER Experiment Name: At_Shoots__P Parameter: Age (day) Value: 7
  misc_feature: MA Experiment 20000184 PARAMETER Experiment Name: At_Shoots__P Parameter: Tissue Value: Shoots vs. Whole Plant
  misc_feature: MA Experiment ID: 20000234 Result: Down-regulated in Transcription
  misc_feature: MA Experiment 20000234 PARAMETER Experiment Name: At_Siliques_P Parameter: Age (day) Value: 21
  misc_feature: MA Experiment 20000234 PARAMETER Experiment Name: At_Siliques_P Parameter: Organism Value: A. thaliana
  misc_feature: MA Experiment 20000234 PARAMETER Experiment Name: At_Siliques_P Parameter: Plant Line Value: WS
  misc_feature: MA Experiment 20000234 PARAMETER Experiment Name: At_Siliques_P Parameter: Tissue Value: Less Than 5mm Siliques vs. Whole Plant
  misc_feature: MA Experiment ID: 20000437 Result: Up-regulated in Transcription
  misc_feature: MA Experiment 20000437 PARAMETER Experiment Name: At_Drought_P Parameter: Age (day) Value: 8
  misc_feature: MA Experiment 20000437 PARAMETER Experiment Name: At_Drought_P Parameter: Organism Value: A. thaliana
  misc_feature: MA Experiment 20000437 PARAMETER Experiment Name: At_Drought_P Parameter: Plant Line Value: WS
  misc_feature: MA Experiment 20000437 PARAMETER Experiment Name: At_Drought_P Parameter: Timepoint (hr) Value: 24
  misc_feature: MA Experiment 20000437 PARAMETER Experiment Name: At_Drought_P Parameter: Tissue Value: Whole Plant
  misc_feature: MA Experiment 20000437 PARAMETER Experiment Name: At_Drought_P Parameter: Treatment Value: Drought vs. No Drought
  misc_feature: MA Experiment ID: 20001450 Result: Up-regulated in Transcription
  misc_feature: MA Experiment 20001450 PARAMETER Experiment Name: At_Far-red-induction_P Parameter: Age (day) Value: 7
  misc_feature: MA Experiment 20001450 PARAMETER Experiment Name: At_Far-red-induction_P Parameter: Light Value: Far-red vs. White
  misc_feature: MA Experiment 20001450 PARAMETER Experiment Name: At_Far-red-induction_P Parameter: Organism Value: A. thaliana
  misc_feature: MA Experiment 20001450 PARAMETER Experiment Name: At_Far-red-induction_P Parameter: Plant Line Value: Columbia
  misc_feature: MA Experiment 20001450 PARAMETER Experiment Name: At_Far-red-induction_P Parameter: Timepoint (hr) Value: 8
  misc_feature: MA Experiment 20001450 PARAMETER Experiment Name: At_Far-red-induction_P Parameter: Tissue Value: Whole Plant
  misc_feature: MA Experiment ID: 20001451 Result: Up-regulated in Transcription
  misc_feature: MA Experiment 20001451 PARAMETER Experiment Name: At_Far-red-induction_P Parameter: Age (day) Value: 7
  misc_feature: MA Experiment 20001451 PARAMETER Experiment Name: At_Far-red-induction_P Parameter: Light Value: Far-red vs. White
  misc_feature: MA Experiment 20001451 PARAMETER Experiment Name: At_Far-red-induction_P Parameter: Organism Value: A. thaliana
  misc_feature: MA Experiment 20001451 PARAMETER Experiment Name: At_Far-red-induction_P Parameter: Plant Line Value: Columbia
  misc_feature: MA Experiment 20001451 PARAMETER Experiment Name: At_Far-red-induction_P Parameter: Timepoint (hr) Value: 24
  misc_feature: MA Experiment 20001451 PARAMETER Experiment Name: At_Far-red-induction_P Parameter: Tissue Value: Whole Plant
  misc_feature: MA Experiment ID: 20001557 Result: Down-regulated in Transcription
  misc_feature: MA Experiment 20001557 PARAMETER Experiment Name: At_Drought_Soil_Dry_P Parameter: Age (day) Value: 27
  misc_feature: MA Experiment 20001557 PARAMETER Experiment Name: At_Drought_Soil_Dry_P Parameter: Organism Value: A. thaliana
  misc_feature: MA Experiment 20001557 PARAMETER Experiment Name: At_Drought_Soil_Dry_P Parameter: Plant Line Value: WS
  misc_feature: MA Experiment 20001557 PARAMETER Experiment Name: At_Drought_Soil_Dry_P Parameter: Post Timepoint (hr) Value: 3
  misc_feature: MA Experiment 20001557 PARAMETER Experiment Name: At_Drought_Soil_Dry_P Parameter: Post-Treatment Value: Re-Water vs. No Drought
  misc_feature: MA Experiment 20001557 PARAMETER Experiment Name: At_Drought_Soil_Dry_P Parameter: Timepoint (day) Value: 13
  misc_feature: MA Experiment 20001557 PARAMETER Experiment Name: At_Drought_Soil_Dry_P Parameter: Treatment Value: Drought vs. No Drought
  misc_feature: MA Experiment ID: 20001558 Result: Down-regulated in Transcription
  misc_feature: MA Experiment 20001558 PARAMETER Experiment Name: At_Drought_Soil_Dry_P Parameter: Age (day) Value: 27
  misc_feature: MA Experiment 20001558 PARAMETER Experiment Name: At_Drought_Soil_Dry_P Parameter: Organism Value: A. thaliana
  misc_feature: MA Experiment 20001558 PARAMETER Experiment Name: At_Drought_Soil_Dry_P Parameter: Plant Line Value: WS
  misc_feature: MA Experiment 20001558 PARAMETER Experiment Name: At_Drought_Soil_Dry_P Parameter: Post Timepoint (hr) Value: 6
  misc_feature: MA Experiment 20001558 PARAMETER Experiment Name: At_Drought_Soil_Dry_P Parameter: Post-Treatment Value: Re-Water vs. No Drought
  misc_feature: MA Experiment 20001558 PARAMETER Experiment Name: At_Drought_Soil_Dry_P Parameter: Timepoint (day) Value: 13
  misc_feature: MA Experiment 20001558 PARAMETER Experiment Name: At_Drought_Soil_Dry_P Parameter: Treatment Value: Drought vs. No Drought

SEQ ID NO: 39161 - protein, 190 aa, Arabidopsis thaliana; identical to SEQ ID NO: 38792
  peptide (1)..(190): Ceres Seq. ID no. 13576737
  misc_feature (134)..(166): Pfam Name: Ankyrin repeat Pfam Description: Ankyrin repeat
  misc_feature (134)..(166): Pfam Name: Ankyrin repeat Pfam Description: Ankyrin repeat
  misc_feature (88)..(172): Homolog of NCBI NO: 17230240 NR Description: hypothetical protein [Nostoc sp. PCC 7120]
  misc_feature (32)..(188): Homolog of NCBI NO: 34906752 NR Description: contains EST AU056950(S21011)~similar to
  misc_feature (24)..(104): Homolog of NCBI NO: 25407827 NR Description: hypothetical protein At2g26210 [imported] -
  misc_feature (32)..(188): Homolog of NCBI NO: 34906752 NR Description: contains EST AU056950(S21011)~similar to
  misc_feature (32)..(188): Homolog of NCBI NO: 33146872 NR Description: unknown protein [Oryza sativa (japonica
  misc_feature (1)..(190): Homolog of NCBI NO: 30683047 NR Description: expressed protein [Arabidopsis thaliana]
  misc_feature (24)..(104): Homolog of NCBI NO: 25407827 NR Description: hypothetical protein At2g26210 [imported] -
  misc_feature (88)..(172): Homolog of NCBI NO: 17230240 NR Description: hypothetical protein [Nostoc sp. PCC 7120]
  misc_feature (32)..(188): Homolog of NCBI NO: 33146872 NR Description: unknown protein [Oryza sativa (japonica
  misc_feature (1)..(190): Homolog of NCBI NO: 30683047 NR Description: expressed protein [Arabidopsis thaliana]

SEQ ID NO: 39162 - protein, 167 aa, Arabidopsis thaliana; identical to SEQ ID NO: 38793
  peptide (1)..(167): Ceres Seq. ID no. 13576738
  misc_feature (111)..(143): Pfam Name: Ankyrin repeat Pfam Description: Ankyrin repeat
  misc_feature (111)..(143): Pfam Name: Ankyrin repeat Pfam Description: Ankyrin repeat
  misc_feature (65)..(149): Homolog of NCBI NO: 17230240 NR Description: hypothetical protein [Nostoc sp. PCC 7120]
  misc_feature (9)..(165): Homolog of NCBI NO: 34906752 NR Description: contains EST AU056950(S21011)~similar to
  misc_feature (1)..(81): Homolog of NCBI NO: 25407827 NR Description: hypothetical protein At2g26210 [imported] -
  misc_feature (9)..(165): Homolog of NCBI NO: 34906752 NR Description: contains EST AU056950(S21011)~similar to
  misc_feature (9)..(165): Homolog of NCBI NO: 33146872 NR Description: unknown protein [Oryza sativa (japonica
  misc_feature (1)..(167): Homolog of NCBI NO: 30683047 NR Description: expressed protein [Arabidopsis thaliana]
  misc_feature (1)..(81): Homolog of NCBI NO: 25407827 NR Description: hypothetical protein At2g26210 [imported] -
  misc_feature (65)..(149): Homolog of NCBI NO: 17230240 NR Description: hypothetical protein [Nostoc sp. PCC 7120]
  misc_feature (9)..(165): Homolog of NCBI NO: 33146872 NR Description: unknown protein [Oryza sativa (japonica
  misc_feature (1)..(167): Homolog of NCBI NO: 30683047 NR Description: expressed protein [Arabidopsis thaliana]

SEQ ID NO: 39163 - protein, 159 aa, Arabidopsis thaliana; identical to SEQ ID NO: 38794
  peptide (1)..(159): Ceres Seq. ID no. 13576739
  misc_feature (103)..(135): Pfam Name: Ankyrin repeat Pfam Description: Ankyrin repeat
  misc_feature (103)..(135): Pfam Name: Ankyrin repeat Pfam Description: Ankyrin repeat
  misc_feature (57)..(141): Homolog of NCBI NO: 17230240 NR Description: hypothetical protein [Nostoc sp. PCC 7120]
  misc_feature (1)..(157): Homolog of NCBI NO: 34906752 NR Description: contains EST AU056950(S21011)~similar to
  misc_feature (1)..(73): Homolog of NCBI NO: 25407827 NR Description: hypothetical protein At2g26210 [imported] -
  misc_feature (1)..(157): Homolog of NCBI NO: 34906752 NR Description: contains EST AU056950(S21011)~similar to
  misc_feature (1)..(157): Homolog of NCBI NO: 33146872 NR Description: unknown protein [Oryza sativa (japonica
  misc_feature (1)..(159): Homolog of NCBI NO: 30683047 NR Description: expressed protein [Arabidopsis thaliana]
  misc_feature (1)..(73): Homolog of NCBI NO: 25407827 NR Description: hypothetical protein At2g26210 [imported] -
  misc_feature (57)..(141): Homolog of NCBI NO: 17230240 NR Description: hypothetical protein [Nostoc sp. PCC 7120]
  misc_feature (1)..(157): Homolog of NCBI NO: 33146872 NR Description: unknown protein [Oryza sativa (japonica
  misc_feature (1)..(159): Homolog of NCBI NO: 30683047 NR Description: expressed protein [Arabidopsis thaliana]

SEQ ID NO: 39164 - DNA, 898 bp, Arabidopsis thaliana
  misc_feature (1)..(898): Ceres Seq. ID no. 13496719
  misc_feature: MA Experiment ID: 20000180 Result: Down-regulated in Transcription
  misc_feature: MA Experiment 20000180 PARAMETER Experiment Name: At_Germinating_Seeds_P Parameter: Age (hr) Value: 24 vs. 0
  misc_feature: MA Experiment 20000180 PARAMETER Experiment Name: At_Germinating_Seeds_P Parameter: Tissue Value: Germinating Seeds
  misc_feature: MA Experiment ID: 20000184 Result: Up-regulated in Transcription
  misc_feature: MA Experiment 20000184 PARAMETER Experiment Name: At_Shoots__P Parameter: Age (day) Value: 7
  misc_feature: MA Experiment 20000184 PARAMETER Experiment Name: At_Shoots__P Parameter: Tissue Value: Shoots vs. Whole Plant
aaaaatcctccgtctacctccgtctacctccgtctgattcctctattgggagaatccaaatttgcttcaggttccgttcgttcatggcttcgccagaggagatgggtgatgatgcatcagaaattccatccccgccaaaaaacacttacaaggatcccgacggtggaaggcaacgattcttactggaacttgaatttattcaatgtctcgccaatcctacttacatccactacctggcacagaatcggtattttgaagatgaagcatttattggatacttgaagtatcttcaatactggcagcgaccagagtacatcaagttcattatgtacccacactgcctatatttccttgaacttcttcaaaaccccaacttcaggactgctatggctcatcctgcaaacaaggaattggcgcatagacaacagttttactattggaagaactacagaaacaacagactgaagcacattctacctcggcctcttccagagcctgtacctccacaaccaccagttgcaccttcaacttctttgccacctgcaccatctgcaactgctgctctctctccagccctttctccaatgcagtacaataatatgctttctaagaatgacactaggaatatgggtgctactggaattgatcgtaggaagagaaagaagggtatataagcatttcctgccctgaagcatacaccatggcgtcagtcgtcagatatggtttcctccatgtcctaggagggaagcctacttgactcaggttacaaaaatgttggaaactcggtattactcattccgtgtcataggccgtttatggaagttgtcatatatggtgttcaatctttgtctatgatatacaacaacccccaatcagtatcagtctttatctttgttcc

SEQ ID NO: 39165 - protein, 223 aa, Arabidopsis thaliana
  peptide (1)..(223): Ceres Seq. ID no. 13496720
  misc_feature (54)..(156): Pfam Name: SOH1 Pfam Description: SOH1
  misc_feature (52)..(164): Homolog of NCBI NO: 39589769 NR Description: Hypothetical protein CBG12403 [Caenorhabditis
  misc_feature (56)..(157): Homolog of NCBI NO: 21355471 NR Description: CG1057-PA [Drosophila melanogaster]
  misc_feature (51)..(155): Homolog of NCBI NO: 7705592 NR Description: CGI-125 protein [Homo sapiens]
  misc_feature (51)..(155): Homolog of NCBI NO: 13385570 NR Description: RIKEN cDNA 3110004H13 [Mus musculus]
  misc_feature (51)..(155): Homolog of NCBI NO: 27673870 NR Description: similar to CGI-125 protein [Homo sapiens] [Rattus
  misc_feature (36)..(208): Homolog of NCBI NO: 34899964 NR Description: P0428D12.23 [Oryza sativa (japonica
  misc_feature (51)..(194): Homolog of NCBI NO: 12597881 NR Description: hypothetical protein [Oryza sativa]
  misc_feature (36)..(208): Homolog of NCBI NO: 34899976 NR Description: P0039H02.5 [Oryza sativa (japonica
  misc_feature (36)..(208): Homolog of NCBI NO: 33146796 NR Description: SOH1-like protein [Oryza sativa (japonica
  misc_feature (28)..(223): Homolog of NCBI NO: 22326900 NR Description: SOH1 - like protein [Arabidopsis thaliana]
KSSVYLRLPPSDSSIGRIQICFRFRSFMASPEEMGDDASEIPSPPKNTYKDPDGGRQRFLLELEFIQCLANPTYIHYLAQNRYFEDEAFIGYLKYLQYWQRPEYIKFIMYPHCLYFLELLQNPNFRTAMAHPANKELAHRQQFYYWKNYRNNRLKHILPRPLPEPVPPQPPVAPSTSLPPAPSATAALSPALSPMQYNNMLSKNDTRNMGATGIDRRKRKKGI

SEQ ID NO: 39166 - protein, 196 aa, Arabidopsis thaliana
  peptide (1)..(196): Ceres Seq. ID no. 13496721
  misc_feature (27)..(129): Pfam Name: SOH1 Pfam Description: SOH1
  misc_feature (25)..(137): Homolog of NCBI NO: 39589769 NR Description: Hypothetical protein CBG12403 [Caenorhabditis
  misc_feature (29)..(130): Homolog of NCBI NO: 21355471 NR Description: CG1057-PA [Drosophila melanogaster]
  misc_feature (24)..(128): Homolog of NCBI NO: 7705592 NR Description: CGI-125 protein [Homo sapiens]
  misc_feature (24)..(128): Homolog of NCBI NO: 13385570 NR Description: RIKEN cDNA 3110004H13 [Mus musculus]
  misc_feature (24)..(128): Homolog of NCBI NO: 27673870 NR Description: similar to CGI-125 protein [Homo sapiens] [Rattus
  misc_feature (9)..(181): Homolog of NCBI NO: 34899964 NR Description: P0428D12.23 [Oryza sativa (japonica
  misc_feature (24)..(167): Homolog of NCBI NO: 12597881 NR Description: hypothetical protein [Oryza sativa]
  misc_feature (9)..(181): Homolog of NCBI NO: 34899976 NR Description: P0039H02.5 [Oryza sativa (japonica
  misc_feature (9)..(181): Homolog of NCBI NO: 33146796 NR Description: SOH1-like protein [Oryza sativa (japonica
  misc_feature (1)..(196): Homolog of NCBI NO: 22326900 NR Description: SOH1 - like protein [Arabidopsis thaliana]
MASPEEMGDDASEIPSPPKNTYKDPDGGRQRFLLELEFIQCLANPTYIHYLAQNRYFEDEAFIGYLKYLQYWQRPEYIKFIMYPHCLYFLELLQNPNFRTAMAHPANKELAHRQQFYYWKNYRNNRLKHILPRPLPEPVPPQPPVAPSTSLPPAPSATAALSPALSPMQYNNMLSKNDTRNMGATGIDRRKRKKGI

SEQ ID NO: 39167 - protein, 190 aa, Arabidopsis thaliana
  peptide (1)..(190): Ceres Seq. ID no. 13496722
  misc_feature (21)..(123): Pfam Name: SOH1 Pfam Description: SOH1
  misc_feature (19)..(131): Homolog of NCBI NO: 39589769 NR Description: Hypothetical protein CBG12403 [Caenorhabditis
  misc_feature (23)..(124): Homolog of NCBI NO: 21355471 NR Description: CG1057-PA [Drosophila melanogaster]
  misc_feature (18)..(122): Homolog of NCBI NO: 7705592 NR Description: CGI-125 protein [Homo sapiens]
  misc_feature (18)..(122): Homolog of NCBI NO: 13385570 NR Description: RIKEN cDNA 3110004H13 [Mus musculus]
  misc_feature (18)..(122): Homolog of NCBI NO: 27673870 NR Description: similar to CGI-125 protein [Homo sapiens] [Rattus
  misc_feature (3)..(175): Homolog of NCBI NO: 34899964 NR Description: P0428D12.23 [Oryza sativa (japonica
  misc_feature (18)..(161): Homolog of NCBI NO: 12597881 NR Description: hypothetical protein [Oryza sativa]
  misc_feature (3)..(175): Homolog of NCBI NO: 34899976 NR Description: P0039H02.5 [Oryza sativa (japonica
  misc_feature (3)..(175): Homolog of NCBI NO: 33146796 NR Description: SOH1-like protein [Oryza sativa (japonica
  misc_feature (1)..(190): Homolog of NCBI NO: 22326900 NR Description: SOH1 - like protein [Arabidopsis thaliana]
MGDDASEIPSPPKNTYKDPDGGRQRFLLELEFIQCLANPTYIHYLAQNRYFEDEAFIGYLKYLQYWQRPEYIKFIMYPHCLYFLELLQNPNFRTAMAHPANKELAHRQQFYYWKNYRNNRLKHILPRPLPEPVPPQPPVAPSTSLPPAPSATAALSPALSPMQYNNMLSKNDTRNMGATGIDRRKRKKGI

SEQ ID NO: 39168 - DNA, 1734 bp, Arabidopsis thaliana
  misc_feature (1)..(1734): Ceres Seq. ID no. 12562159
  misc_feature: MA Experiment ID: 108434 Result: Up-regulated in Transcription
  misc_feature: MA Experiment 108434 PARAMETER Experiment Name: At_Root_Tips_cDNA_P Parameter: Tissue Value: Root Tips
  misc_feature: MA Experiment ID: 108435 Result: Up-regulated in Transcription
  misc_feature: MA Experiment 108435 PARAMETER Experiment Name: At_stm_Mutants_cDNA_P Parameter: Plant Line Value: wt Landsburg vs stm
  misc_feature: MA Experiment 108435 PARAMETER Experiment Name: At_stm_Mutants_cDNA_P Parameter: Tissue Value: Shoot Apical Meristem Region
  misc_feature: MA Experiment ID: 108461 Result: Up-regulated in Transcription
  misc_feature: MA Experiment 108461 PARAMETER Experiment Name: At_Germinating_Seeds_cDNA_P Parameter: Age (day) Value: 1 vs. 0
  misc_feature: MA Experiment 108461 PARAMETER Experiment Name: At_Germinating_Seeds_cDNA_P Parameter: Tissue Value: Germinating Seeds
  misc_feature: MA Experiment ID: 20000111 Result: Down-regulated in Transcription
  misc_feature: MA Experiment 20000111 PARAMETER Experiment Name: At_42deg_Heat_cDNA_P Parameter: Temperature (deg C) Value: 42 vs. 22
  misc_feature: MA Experiment 20000111 PARAMETER Experiment Name: At_42deg_Heat_cDNA_P Parameter: Timepoint (hr) Value: 6
  misc_feature: MA Experiment 20000111 PARAMETER Experiment Name: At_42deg_Heat_cDNA_P Parameter: Tissue Value: Aerial
  misc_feature: MA Experiment ID: 20000112 Result: Down-regulated in Transcription
  misc_feature: MA Experiment 20000112 PARAMETER Experiment Name: At_42deg_Heat_cDNA_P Parameter: Temperature (deg C) Value: 42 vs. 22
  misc_feature: MA Experiment 20000112 PARAMETER Experiment Name: At_42deg_Heat_cDNA_P Parameter: Timepoint (hr) Value: 2
  misc_feature: MA Experiment 20000112 PARAMETER Experiment Name: At_42deg_Heat_cDNA_P Parameter: Tissue Value: Aerial
  misc_feature: MA Experiment ID: 20000113 Result: Down-regulated in Transcription
  misc_feature: MA Experiment 20000113 PARAMETER Experiment Name: At_42deg_Heat_cDNA_P Parameter: Temperature (deg C) Value: 42 vs. 22
  misc_feature: MA Experiment 20000113 PARAMETER Experiment Name: At_42deg_Heat_cDNA_P Parameter: Timepoint (hr) Value: 8
  misc_feature: MA Experiment 20000113 PARAMETER Experiment Name: At_42deg_Heat_cDNA_P Parameter: Tissue Value: Aerial
  misc_feature: MA Experiment ID: 20000179 Result: Up-regulated in Transcription
  misc_feature: MA Experiment 20000179 PARAMETER Experiment Name: At_Germinating_Seeds_P Parameter: Age (hr) Value: 6 vs. 0
  misc_feature: MA Experiment 20000179 PARAMETER Experiment Name: At_Germinating_Seeds_P Parameter: Tissue Value: Germinating Seeds
  misc_feature: MA Experiment ID: 20000234 Result: Up-regulated in Transcription
  misc_feature: MA Experiment 20000234 PARAMETER Experiment Name: At_Siliques_P Parameter: Age (day) Value: 21
  misc_feature: MA Experiment 20000234 PARAMETER Experiment Name: At_Siliques_P Parameter: Organism Value: A. thaliana
  misc_feature: MA Experiment 20000234 PARAMETER Experiment Name: At_Siliques_P Parameter: Plant Line Value: WS
  misc_feature: MA Experiment 20000234 PARAMETER Experiment Name: At_Siliques_P Parameter: Tissue Value: Less Than 5mm Siliques vs. Whole Plant
  misc_feature: MA Experiment ID: 20001905 Result: Up-regulated in Transcription
  misc_feature: MA Experiment 20001905 PARAMETER Experiment Name: At_Drought_Reproduction_P Parameter: Age (day) Value: 40
  misc_feature: MA Experiment 20001905 PARAMETER Experiment Name: At_Drought_Reproduction_P Parameter: Organism Value: A. thaliana
  misc_feature: MA Experiment 20001905 PARAMETER Experiment Name: At_Drought_Reproduction_P Parameter: Plant Line Value: WS
  misc_feature: MA Experiment 20001905 PARAMETER Experiment Name: At_Drought_Reproduction_P Parameter: Timepoint (day) Value: 10
  misc_feature: MA Experiment 20001905 PARAMETER Experiment Name: At_Drought_Reproduction_P Parameter: Tissue Value: Rosettes
  misc_feature: MA Experiment 20001905 PARAMETER Experiment Name: At_Drought_Reproduction_P Parameter: Treatment Value: Drought vs. No Drought
acaagggaggtgcttcgtcctcgaagcttttagaacttagccaagcagctgttgtttcttagttgactccctctccgacgaaaatggtgtccacgagcaagatcaaatccgttgatttctataggaaaatcccgagggatttgacagaggcgtctctgtctggtgctggattgtccattatagcagccctctctatgatatttctatttggaatggagttgaataattatttggctgtcagcacttccacatcggtcattgttgacaggagcgctgacggagacttcttgcgcttagattttaatataagcttcccgtcactttcatgtgaattcgcatctgtggatgtcagtgatgtattaggaactaacaggctaaatgtaacaaagacaattcggaagttttctattgattcgaatatgagacccactggttctgagtttcatgccggggaagttttatcactcattaatcatggagatgaaactggtgaagaaatagttgaagattcggtaccacttactggacgcaactttgacacatttacacatcaatttccaatcttggttgttaatttctatgctccgtggtgctattggtgtaatctcctgaaaccatcatgggagaaagcagctaaacagataaaagagagatatgatccagaaatggacggacgtgttattttggcaaaagttgactgcacccaagaaggtgatctctgtcggaggaatcatatacaagggtatccatccattcgcattttccgcaaaggcagtgatcttaaggatgacaatgcacaccacgaccatgaatcctactatggagatcgtgatacggaaagcttagtgaagatggtggtgagtctggttgaaccaattcatctagagccccataatctagcattggaggacaaatcagacaattcatcgagaactctaaaaaaggcaccttctacaggaggatgtcgagttgaaggatacatgcgtgtgaagaaggttccaggcaatttaatggtttcagctcgctcgggatctcattcctttgattcttctcagatgaatatgtcacatgttgttaaccatctatcctttgggcggaggattatgcctcagaaattttcggagtttaagcgcttgtcaccttatctcggcctaagccacgaccgtttagacggccggtccttcataaaccaacgagatctcggcccaaacgttaccattgagcattatcttcaaatagtaaagactgaggtagtgaaaagcaatggacaggcattggttgaggcgtatgagtacacagcacatagcagcgttgctcatagttactatttaccagtggccaagtttcactttgagctctcaccgatgcaggttctcataacggaaaactccaagtccttctcacatttcatcaccaacgtatgcgccattattggtggtgtcttcacggtggccggaatcttggattctattctccatcactccatgacactcatgaaaaagatagaacttggtaaaaacttctgaagctccctaagggttttatttcgttttcctctgtaacgagtcagaaatttttgccctagttataccagacgtcacttaaataattcggttatatatattcacaaactgttatccttttgaacatatataagtattatcgatgtctctgaagtctttgggagttttagtagaacaaattgttatcacttaaatcaggggaatttacttc

SEQ ID NO: 39169 - protein, 480 aa, Arabidopsis thaliana
  peptide (1)..(480): Ceres Seq. ID no. 12562160
  misc_feature (1)..(125): Homolog of NCBI NO: 7706278 NR Description: serologically defined breast cancer antigen 84
  misc_feature (293)..(478): Homolog of NCBI NO: 13384938 NR Description: serologically defined breast cancer antigen 84
  misc_feature (293)..(478): Homolog of NCBI NO: 7706278 NR Description: serologically defined breast cancer antigen 84
  misc_feature (1)..(119): Homolog of NCBI NO: 28278376 NR Description: Similar to serologically defined breast cancer
  misc_feature (277)..(478): Homolog of NCBI NO: 28278376 NR Description: Similar to serologically defined breast cancer
  misc_feature (1)..(158): Homolog of NCBI NO: 15223682 NR Description: hypothetical protein; protein id: At1g50950.1
  misc_feature (183)..(479): Homolog of NCBI NO: 15223682 NR Description: hypothetical protein; protein id: At1g50950.1
  misc_feature (164)..(480): Homolog of NCBI NO: 21618302 NR Description: unknown [Arabidopsis thaliana]
  misc_feature (1)..(479): Homolog of NCBI NO: 18402672 NR Description: expressed protein
  misc_feature (1)..(480): Homolog of NCBI NO: 22328963 NR Description: putative protein
MVSTSKIKSVDFYRKIPRDLTEASLSGAGLSIIAALSMIFLFGMELNNYLAVSTSTSVIVDRSADGDFLRLDFNISFPSLSCEFASVDVSDVLGTNRLNVTKTIRKFSIDSNMRPTGSEFHAGEVLSLINHGDETGEEIVEDSVPLTGRNFDTFTHQFPILVVNFYAPWCYWCNLLKPSWEKAAKQIKERYDPEMDGRVILAKVDCTQEGDLCRRNHIQGYPSIRIFRKGSDLKDDNAHHDHESYYGDRDTESLVKMVVSLVEPIHLEPHNLALEDKSDNSSRTLKKAPSTGGCRVEGYMRVKKVPGNLMVSARSGSHSFDSSQMNMSHVVNHLSFGRRIMPQKFSEFKRLSPYLGLSHDRLDGRSFINQRDLGPNVTIEHYLQIVKTEVVKSNGQALVEAYEYTAHSSVAHSYYLPVAKFHFELSPMQVLITENSKSFSHFITNVCAIIGGVFTVAGILDSILHHSMTLMKKIELGKNF

SEQ ID NO: 39170 - protein, 443 aa, Arabidopsis thaliana
  peptide (1)..(443): Ceres Seq. ID no. 12562161
  misc_feature (1)..(88): Homolog of NCBI NO: 7706278 NR Description: serologically defined breast cancer antigen 84
  misc_feature (256)..(441): Homolog of NCBI NO: 13384938 NR Description: serologically defined breast cancer antigen 84
  misc_feature (256)..(441): Homolog of NCBI NO: 7706278 NR Description: serologically defined breast cancer antigen 84
  misc_feature (1)..(82): Homolog of NCBI NO: 28278376 NR Description: Similar to serologically defined breast cancer
  misc_feature (240)..(441): Homolog of NCBI NO: 28278376 NR Description: Similar to serologically defined breast cancer
  misc_feature (1)..(121): Homolog of NCBI NO: 15223682 NR Description: hypothetical protein; protein id: At1g50950.1
  misc_feature (146)..(442): Homolog of NCBI NO: 15223682 NR Description: hypothetical protein; protein id: At1g50950.1
  misc_feature (127)..(443): Homolog of NCBI NO: 21618302 NR Description: unknown [Arabidopsis thaliana]
  misc_feature (1)..(442): Homolog of NCBI NO: 18402672 NR Description: expressed protein
  misc_feature (1)..(443): Homolog of NCBI NO: 22328963 NR Description: putative protein
MIFLFGMELNNYLAVSTSTSVIVDRSADGDFLRLDFNISFPSLSCEFASVDVSDVLGTNRLNVTKTIRKFSIDSNMRPTGSEFHAGEVLSLINHGDETGEEIVEDSVPLTGRNFDTFTHQFPILVVNFYAPWCYWCNLLKPSWEKAAKQIKERYDPEMDGRVILAKVDCTQEGDLCRRNHIQGYPSIRIFRKGSDLKDDNAHHDHESYYGDRDTESLVKMVVSLVEPIHLEPHNLALEDKSDNSSRTLKKAPSTGGCRVEGYMRVKKVPGNLMVSARSGSHSFDSSQMNMSHVVNHLSFGRRIMPQKFSEFKRLSPYLGLSHDRLDGRSFINQRDLGPNVTIEHYLQIVKTEVVKSNGQALVEAYEYTAHSSVAHSYYLPVAKFHFELSPMQVLITENSKSFSHFITNVCAIIGGVFTVAGILDSILHHSMTLMKKIELGKNF

SEQ ID NO: 39171 - protein, 437 aa, Arabidopsis thaliana
  peptide (1)..(437): Ceres Seq. ID no. 12562162
  misc_feature (1)..(82): Homolog of NCBI NO: 7706278 NR Description: serologically defined breast cancer antigen 84
  misc_feature (250)..(435): Homolog of NCBI NO: 13384938 NR Description: serologically defined breast cancer antigen 84
  misc_feature (250)..(435): Homolog of NCBI NO: 7706278 NR Description: serologically defined breast cancer antigen 84
  misc_feature (1)..(76): Homolog of NCBI NO: 28278376 NR Description: Similar to serologically defined breast cancer
  misc_feature (234)..(435): Homolog of NCBI NO: 28278376 NR Description: Similar to serologically defined breast cancer
  misc_feature (1)..(115): Homolog of NCBI NO: 15223682 NR Description: hypothetical protein; protein id: At1g50950.1
  misc_feature (140)..(436): Homolog of NCBI NO: 15223682 NR Description: hypothetical protein; protein id: At1g50950.1
  misc_feature (121)..(437): Homolog of NCBI NO: 21618302 NR Description: unknown [Arabidopsis thaliana]
  misc_feature (1)..(436): Homolog of NCBI NO: 18402672 NR Description: expressed protein
  misc_feature (1)..(437): Homolog of NCBI NO: 22328963 NR Description: putative protein
MELNNYLAVSTSTSVIVDRSADGDFLRLDFNISFPSLSCEFASVDVSDVLGTNRLNVTKTIRKFSIDSNMRPTGSEFHAGEVLSLINHGDETGEEIVEDSVPLTGRNFDTFTHQFPILVVNFYAPWCYWCNLLKPSWEKAAKQIKERYDPEMDGRVILAKVDCTQEGDLCRRNHIQGYPSIRIFRKGSDLKDDNAHHDHESYYGDRDTESLVKMVVSLVEPIHLEPHNLALEDKSDNSSRTLKKAPSTGGCRVEGYMRVKKVPGNLMVSARSGSHSFDSSQMNMSHVVNHLSFGRRIMPQKFSEFKRLSPYLGLSHDRLDGRSFINQRDLGPNVTIEHYLQIVKTEVVKSNGQALVEAYEYTAHSSVAHSYYLPVAKFHFELSPMQVLITENSKSFSHFITNVCAIIGGVFTVAGILDSILHHSMTLMKKIELGKNF

SEQ ID NO: 39172 - DNA, 929 bp, Arabidopsis thaliana
  misc_feature (1)..(929): Ceres Seq. ID no. 12599908
  misc_feature: MA Experiment ID: 20000171 Result: Down-regulated in Transcription
  misc_feature: MA Experiment 20000171 PARAMETER Experiment Name: At_42deg_Heat_P Parameter: Age (day) Value: 14
  misc_feature: MA Experiment 20000171 PARAMETER Experiment Name: At_42deg_Heat_P Parameter: Organism Value: A. thaliana
  misc_feature: MA Experiment 20000171 PARAMETER Experiment Name: At_42deg_Heat_P Parameter: Plant Line Value: WS
  misc_feature: MA Experiment 20000171 PARAMETER Experiment Name: At_42deg_Heat_P Parameter: Temperature (deg C) Value: 42 vs. 22
  misc_feature: MA Experiment 20000171 PARAMETER Experiment Name: At_42deg_Heat_P Parameter: Timepoint (hr) Value: 1
  misc_feature: MA Experiment 20000171 PARAMETER Experiment Name: At_42deg_Heat_P Parameter: Tissue Value: Aerial
  misc_feature: MA Experiment ID: 20000173 Result: Down-regulated in Transcription
  misc_feature: MA Experiment 20000173 PARAMETER Experiment Name: At_42deg_Heat_P Parameter: Age (day) Value: 14
  misc_feature: MA Experiment 20000173 PARAMETER Experiment Name: At_42deg_Heat_P Parameter: Organism Value: A. thaliana
  misc_feature: MA Experiment 20000173 PARAMETER Experiment Name: At_42deg_Heat_P Parameter: Plant Line Value: WS
  misc_feature: MA Experiment 20000173 PARAMETER Experiment Name: At_42deg_Heat_P Parameter: Temperature (deg C) Value: 42 vs. 22
  misc_feature: MA Experiment 20000173 PARAMETER Experiment Name: At_42deg_Heat_P Parameter: Timepoint (hr) Value: 6
  misc_feature: MA Experiment 20000173 PARAMETER Experiment Name: At_42deg_Heat_P Parameter: Tissue Value: Aerial
  misc_feature: MA Experiment ID: 20000437 Result: Down-regulated in Transcription
  misc_feature: MA Experiment 20000437 PARAMETER Experiment Name: At_Drought_P Parameter: Age (day) Value: 8
  misc_feature: MA Experiment 20000437 PARAMETER Experiment Name: At_Drought_P Parameter: Organism Value: A. thaliana
  misc_feature: MA Experiment 20000437 PARAMETER Experiment Name: At_Drought_P Parameter: Plant Line Value: WS
  misc_feature: MA Experiment 20000437 PARAMETER Experiment Name: At_Drought_P Parameter: Timepoint (hr) Value: 24
  misc_feature: MA Experiment 20000437 PARAMETER Experiment Name: At_Drought_P Parameter: Tissue Value: Whole Plant
  misc_feature: MA Experiment 20000437 PARAMETER Experiment Name: At_Drought_P Parameter: Treatment Value: Drought vs. No Drought
  misc_feature: MA Experiment ID: 20001248 Result: Up-regulated in Transcription
  misc_feature: MA Experiment 20001248 PARAMETER Experiment Name: At_Far-red-induction_P Parameter: Age (day) Value: 7
  misc_feature: MA Experiment 20001248 PARAMETER Experiment Name: At_Far-red-induction_P Parameter: Light Value: Far-red vs. White
  misc_feature: MA Experiment 20001248 PARAMETER Experiment Name: At_Far-red-induction_P Parameter: Organism Value: A. thaliana
  misc_feature: MA Experiment 20001248 PARAMETER Experiment Name: At_Far-red-induction_P Parameter: Plant Line Value: Columbia
  misc_feature: MA Experiment 20001248 PARAMETER Experiment Name: At_Far-red-induction_P Parameter: Timepoint (hr) Value: 4
  misc_feature: MA Experiment 20001248 PARAMETER Experiment Name: At_Far-red-induction_P Parameter: Tissue Value: Whole Plant
  misc_feature: MA Experiment ID: 20001451 Result: Up-regulated in Transcription
  misc_feature: MA Experiment 20001451 PARAMETER Experiment Name: At_Far-red-induction_P Parameter: Age (day) Value: 7
  misc_feature: MA Experiment 20001451 PARAMETER Experiment Name: At_Far-red-induction_P Parameter: Light Value: Far-red vs. White
  misc_feature: MA Experiment 20001451 PARAMETER Experiment Name: At_Far-red-induction_P Parameter: Organism Value: A. thaliana
  misc_feature: MA Experiment 20001451 PARAMETER Experiment Name: At_Far-red-induction_P Parameter: Plant Line Value: Columbia
  misc_feature: MA Experiment 20001451 PARAMETER Experiment Name: At_Far-red-induction_P Parameter: Timepoint (hr) Value: 24
  misc_feature: MA Experiment 20001451 PARAMETER Experiment Name: At_Far-red-induction_P Parameter: Tissue Value: Whole Plant
agctatagacagacacacccaaaccctagatctaaccccagccgtcagatcagattgatcgggcaatcgcttctagaccgttggaatcaagcaatggtagaggtagaatcgtatttgtgggtatctagaagaggcgttaggattgtctccaagctgggtgttttttcatcttgatggccaactaatcgaatctcctactctaaagatatttttgtttatttctgtcatgtgtgatttggtcgcgcgtacgggtcgtctccagcagcggtacgaggatggctctcgtctcgtcgccgggtgtattccgtttaggtatgtaaattctgacaaagatggtaattctgaatctgggaaagtgattcaagtgttgatgatcagctcgtctagtggacctggacttttgtttcccaagggaggatgggagaatgatgagacagtcagggaggctgcagcgagggaagcagtggaagaagcaggagtccgtgggattcttatggattttttggggaattatgagttcaagagcaaatcacaccaagatgagtttagcccagaaggtttatgtaaagcggcaatgtacgcgttgtatgtgaaagaagagctagcgacgtggccggaacatgagacgagaacacgtaaatggctgacaattgaagaagcggtagagagttgcaggcacccttggatgaaggacgcattggtggaaggattctgtaaatggcataaggagaagatggttaaaggagaggagataactggtgaacattgaagcaaatgtgcataaacctctgagcgttggtttcattcctttcgattttgtttttacctttttgtttttgtttttgaagtcttatgcatggataatctcttgtgactgcgaaacgtaatagtttcgaagatttaaagttcaattattgccctattttcac

SEQ ID NO: 39173 - protein, 180 aa, Arabidopsis thaliana
  peptide (1)..(180): Ceres Seq. ID no. 12599909
  misc_feature (19)..(166): Pfam Name: NUDIX domain Pfam Description: NUDIX domain
  misc_feature (1)..(158): Homolog of NCBI NO: 21595695 NR Description: unknown [Arabidopsis thaliana]
  misc_feature (1)..(158): Homolog of NCBI NO: 18379275 NR Description: expressed protein
  misc_feature (1)..(158): Homolog of NCBI NO: 15223919 NR Description: hypothetical protein; protein id: At1g14860.1
  misc_feature (1)..(162): Homolog of NCBI NO: 15221055 NR Description: unknown protein; protein id: At1g18300.1
  misc_feature (1)..(180): Homolog of NCBI NO: 25518008 NR Description: F13K23.14 protein - Arabidopsis thaliana
  misc_feature (1)..(180): Homolog of NCBI NO: 18391450 NR Description: expressed protein
  misc_feature (1)..(180): Homolog of NCBI NO: 15231598 NR Description: MutT-like protein; protein id: At3g26690.1
  misc_feature (1)..(175): Homolog of NCBI NO: 34900054 NR Description: MutT-like protein~contains ESTs
  misc_feature (1)..(175): Homolog of NCBI NO: 38175436 NR Description: MutT-like protein [Oryza sativa (japonica
  misc_feature (1)..(180): Homolog of NCBI NO: 18399682 NR Description: expressed protein; protein id: At3g12600.1
MCDLVARTGRLQQRYEDGSRLVAGCIPFRYVNSDKDGNSESGKVIQVLMISSSSGPGLLFPKGGWENDETVREAAAREAVEEAGVRGILMDFLGNYEFKSKSHQDEFSPEGLCKAAMYALYVKEELATWPEHETRTRKWLTIEEAVESCRHPWMKDALVEGFCKWHKEKMVKGEEITGEH

SEQ ID NO: 39174 - protein, 132 aa, Arabidopsis thaliana
  peptide (1)..(132): Ceres Seq. ID no. 12599910
  misc_feature (1)..(118): Pfam Name: NUDIX domain Pfam Description: NUDIX domain
  misc_feature (1)..(110): Homolog of NCBI NO: 21595695 NR Description: unknown [Arabidopsis thaliana]
  misc_feature (1)..(110): Homolog of NCBI NO: 18379275 NR Description: expressed protein
  misc_feature (1)..(110): Homolog of NCBI NO: 15223919 NR Description: hypothetical protein; protein id: At1g14860.1
  misc_feature (1)..(114): Homolog of NCBI NO: 15221055 NR Description: unknown protein; protein id: At1g18300.1
  misc_feature (1)..(132): Homolog of NCBI NO: 25518008 NR Description: F13K23.14 protein - Arabidopsis thaliana
  misc_feature (1)..(132): Homolog of NCBI NO: 18391450 NR Description: expressed protein
  misc_feature (1)..(132): Homolog of NCBI NO: 15231598 NR Description: MutT-like protein; protein id: At3g26690.1
  misc_feature (1)..(127): Homolog of NCBI NO: 34900054 NR Description: MutT-like protein~contains ESTs
  misc_feature (1)..(127): Homolog of NCBI NO: 38175436 NR Description: MutT-like protein [Oryza sativa (japonica
  misc_feature (1)..(132): Homolog of NCBI NO: 18399682 NR Description: expressed protein; protein id: At3g12600.1
MISSSSGPGLLFPKGGWENDETVREAAAREAVEEAGVRGILMDFLGNYEFKSKSHQDEFSPEGLCKAAMYALYVKEELATWPEHETRTRKWLTIEEAVESCRHPWMKDALVEGFCKWHKEKMVKGEEITGEH

SEQ ID NO: 39175 - protein, 91 aa, Arabidopsis thaliana
  peptide (1)..(91): Ceres Seq. ID no. 12599911
  misc_feature (1)..(77): Pfam Name: NUDIX domain Pfam Description: NUDIX domain
  misc_feature (1)..(69): Homolog of NCBI NO: 21595695 NR Description: unknown [Arabidopsis thaliana]
  misc_feature (1)..(69): Homolog of NCBI NO: 18379275 NR Description: expressed protein
  misc_feature (1)..(69): Homolog of NCBI NO: 15223919 NR Description: hypothetical protein; protein id: At1g14860.1
  misc_feature (1)..(73): Homolog of NCBI NO: 15221055 NR Description: unknown protein; protein id: At1g18300.1
  misc_feature (1)..(91): Homolog of NCBI NO: 25518008 NR Description: F13K23.14 protein - Arabidopsis thaliana
  misc_feature (1)..(91): Homolog of NCBI NO: 18391450 NR Description: expressed protein
  misc_feature (1)..(91): Homolog of NCBI NO: 15231598 NR Description: MutT-like protein; protein id: At3g26690.1
  misc_feature (1)..(86): Homolog of NCBI NO: 34900054 NR Description: MutT-like protein~contains ESTs
  misc_feature (1)..(86): Homolog of NCBI NO: 38175436 NR Description: MutT-like protein [Oryza sativa (japonica
  misc_feature (1)..(91): Homolog of NCBI NO: 18399682 NR Description: expressed protein; protein id: At3g12600.1
MDFLGNYEFKSKSHQDEFSPEGLCKAAMYALYVKEELATWPEHETRTRKWLTIEEAVESCRHPWMKDALVEGFCKWHKEKMVKGEEITGEH

SEQ ID NO: 39176 - DNA, 490 bp, Arabidopsis thaliana
  misc_feature (1)..(490): Ceres Seq. ID no. 12476432
  misc_feature: MA Experiment ID: 108501 Result: Up-regulated in Transcription
  misc_feature: MA Experiment 108501 PARAMETER Experiment Name: At_ap2_floral_buds_cDNA_P Parameter: Plant Line Value: ap2 (Ler.)
  misc_feature: MA Experiment 108501 PARAMETER Experiment Name: At_ap2_floral_buds_cDNA_P Parameter: Tissue Value: Closed Flower
  misc_feature: MA Experiment ID: 108576 Result: Up-regulated in Transcription
  misc_feature: MA Experiment 108576 PARAMETER Experiment Name: At_42deg_Heat_cDNA_P Parameter: Temperature (deg C) Value: 42 vs. 22
  misc_feature: MA Experiment 108576 PARAMETER Experiment Name: At_42deg_Heat_cDNA_P Parameter: Timepoint (hr) Value: 1
  misc_feature: MA Experiment 108576 PARAMETER Experiment Name: At_42deg_Heat_cDNA_P Parameter: Tissue Value: Aerial
  misc_feature: MA Experiment ID: 108577 Result: Up-regulated in Transcription
  misc_feature: MA Experiment 108577 PARAMETER Experiment Name: At_42deg_Heat_cDNA_P Parameter: Temperature (deg C) Value: 42 vs. 22
  misc_feature: MA Experiment 108577 PARAMETER Experiment Name: At_42deg_Heat_cDNA_P Parameter: Timepoint (hr) Value: 6
  misc_feature: MA Experiment 108577 PARAMETER Experiment Name: At_42deg_Heat_cDNA_P Parameter: Tissue Value: Aerial
  misc_feature: MA Experiment ID: 108668 Result: Up-regulated in Transcription
  misc_feature: MA Experiment 108668 PARAMETER Experiment Name: At_2mM_SA_cDNA_P Parameter: Plant Line Value: WS
  misc_feature: MA Experiment 108668 PARAMETER Experiment Name: At_2mM_SA_cDNA_P Parameter: Timepoint (hr) Value: 6
  misc_feature: MA Experiment 108668 PARAMETER Experiment Name: At_2mM_SA_cDNA_P Parameter: Treatment Value: 2mM SA vs. No Treatment
  misc_feature: MA Experiment ID: 20000087 Result: Down-regulated in Transcription
  misc_feature: MA Experiment 20000087 PARAMETER Experiment Name: At_100uM_ABA_Mutants_cDNA_P Parameter: Plant Line Value: WS
  misc_feature: MA Experiment 20000087 PARAMETER Experiment Name: At_100uM_ABA_Mutants_cDNA_P Parameter: Timepoint (hr) Value: 6
  misc_feature: MA Experiment 20000087 PARAMETER Experiment Name: At_100uM_ABA_Mutants_cDNA_P Parameter: Tissue Value: Aerial
  misc_feature: MA Experiment 20000087 PARAMETER Experiment Name: At_100uM_ABA_Mutants_cDNA_P Parameter: Treatment Value: 100uM ABA vs. No Treatment
  misc_feature: MA Experiment ID: 20000111 Result: Up-regulated in Transcription
  misc_feature: MA Experiment 20000111 PARAMETER Experiment Name: At_42deg_Heat_cDNA_P Parameter: Temperature (deg C) Value: 42 vs. 22
  misc_feature: MA Experiment 20000111 PARAMETER Experiment Name: At_42deg_Heat_cDNA_P Parameter: Timepoint (hr) Value: 6
  misc_feature: MA Experiment 20000111 PARAMETER Experiment Name: At_42deg_Heat_cDNA_P Parameter: Tissue Value: Aerial
  misc_feature: MA Experiment ID: 20000112 Result: Up-regulated in Transcription
  misc_feature: MA Experiment 20000112 PARAMETER Experiment Name: At_42deg_Heat_cDNA_P Parameter: Temperature (deg C) Value: 42 vs. 22
  misc_feature: MA Experiment 20000112 PARAMETER Experiment Name: At_42deg_Heat_cDNA_P Parameter: Timepoint (hr) Value: 2
  misc_feature: MA Experiment 20000112 PARAMETER Experiment Name: At_42deg_Heat_cDNA_P Parameter: Tissue Value: Aerial
  misc_feature: MA Experiment ID: 20000113 Result: Up-regulated in Transcription
  misc_feature: MA Experiment 20000113 PARAMETER Experiment Name: At_42deg_Heat_cDNA_P Parameter: Temperature (deg C) Value: 42 vs. 22
  misc_feature: MA Experiment 20000113 PARAMETER Experiment Name: At_42deg_Heat_cDNA_P Parameter: Timepoint (hr) Value: 8
  misc_feature: MA Experiment 20000113 PARAMETER Experiment Name: At_42deg_Heat_cDNA_P Parameter: Tissue Value: Aerial
  misc_feature: MA Experiment ID: 20000144 Result: Up-regulated in Transcription
  misc_feature: MA Experiment 20000144 PARAMETER Experiment Name: At_42deg_Heat_cDNA_P Parameter: Temperature (deg C) Value: 42 vs. 22
  misc_feature: MA Experiment 20000144 PARAMETER Experiment Name: At_42deg_Heat_cDNA_P Parameter: Timepoint (hr) Value: 1
  misc_feature: MA Experiment 20000144 PARAMETER Experiment Name: At_42deg_Heat_cDNA_P Parameter: Tissue Value: Aerial
aagaaatctttcagatttgcgcatatcgacaattttccgagcggccagtttaagtattttgtttgtagttaacgtgtttcaagaactttgacaatggctgaggaagcgcataaggtaacattgaatgtctatgatttaagccaaggcttggcacgccagctctcacaatcactcctgggaaaggttattgaaggtgtatggcatacaggaatagttgtctatgggaatgagtacttttttggaggagggatacaacatttaccagttggaagaactccatatggaacaccaattcgaacgatagagttgggtctatcacatgtgcctaaagatgtattcgagatgtacttggaagaaatcagtcctcgttacactgctgaatcctacaatttacttactcacaactgcaacaacttcagcaacgaggtcgctcagtttttggtgttccatatggagttcttccaactggtaaatgttgtatccctcctcc

SEQ ID NO: 39177 - protein, 132 aa, Arabidopsis thaliana
  peptide (1)..(132): Ceres Seq. ID no. 12476433
  misc_feature (6)..(117): Pfam Name: Eukaryotic protein of unknown function (DUF862) Pfam Description: Eukaryotic protein of unknown function (DUF862)
  misc_feature (4)..(117): Homolog of NCBI NO: 19173191 NR Description: hypothetical protein [Encephalitozoon cuniculi]
  misc_feature (8)..(117): Homolog of NCBI NO: 40738408 NR Description: hypothetical protein AN6915.2 [Aspergillus
  misc_feature (6)..(116): Homolog of NCBI NO: 20162548 NR Description: D15Wsu75e protein [Mus musculus]
  misc_feature (1)..(116): Homolog of NCBI NO: 34867307 NR Description: similar to D15Wsu75e protein [Rattus norvegicus]
  misc_feature (6)..(116): Homolog of NCBI NO: 14779199 NR Description: similar to LD11371p [Drosophila melanogaster]
  misc_feature (8)..(116): Homolog of NCBI NO: 37589651 NR Description: Unknown (protein for MGC:73066) [Danio rerio]
  misc_feature (7)..(116): Homolog of NCBI NO: 29246854 NR Description: GLP_191_9337_10773 [Giardia lamblia ATCC 50803]
  misc_feature (5)..(116): Homolog of NCBI NO: 28277916 NR Description: Similar to DNA segment, Chr 15, Wayne State
  misc_feature (1)..(117): Homolog of NCBI NO: 37535296 NR Description: unknown protein [Oryza sativa (japonica
  misc_feature (1)..(117): Homolog of NCBI NO: 15231383 NR Description: unknown protein
MAEEAHKVTLNVYDLSQGLARQLSQSLLGKVIEGVWHTGIVVYGNEYFFGGGIQHLPVGRTPYGTPIRTIELGLSHVPKDVFEMYLEEISPRYTAESYNLLTHNCNNFSNEVAQFLVFHMEFFQLVNVVSLL

SEQ ID NO: 39178 - DNA, 1677 bp, Arabidopsis thaliana
  misc_feature (1)..(1677): Ceres Seq. ID no. 12370844
  misc_feature: MA Experiment ID: 108434 Result: Down-regulated in Transcription
  misc_feature: MA Experiment 108434 PARAMETER Experiment Name: At_Root_Tips_cDNA_P Parameter: Tissue Value: Root Tips
  misc_feature: MA Experiment ID: 108569 Result: Up-regulated in Transcription
  misc_feature: MA Experiment 108569 PARAMETER Experiment Name: At_0.001%_MeJA__cDNA_P Parameter: Timepoint (hr) Value: 6
  misc_feature: MA Experiment 108569 PARAMETER Experiment Name: At_0.001%_MeJA__cDNA_P Parameter: Tissue Value: Aerial
  misc_feature: MA Experiment 108569 PARAMETER Experiment Name: At_0.001%_MeJA__cDNA_P Parameter: Treatment Value: 0.001% MeJA vs. No Treatment
  misc_feature: MA Experiment ID: 20000069 Result: Up-regulated in Transcription
  misc_feature: MA Experiment 20000069 PARAMETER Experiment Name: At_100uM_ABA_Mutants_cDNA_P Parameter: Plant Line Value: CS23
  misc_feature: MA Experiment 20000069 PARAMETER Experiment Name: At_100uM_ABA_Mutants_cDNA_P Parameter: Timepoint (hr) Value: 6
  misc_feature: MA Experiment 20000069 PARAMETER Experiment Name: At_100uM_ABA_Mutants_cDNA_P Parameter: Tissue Value: Aerial
  misc_feature: MA Experiment 20000069 PARAMETER Experiment Name: At_100uM_ABA_Mutants_cDNA_P Parameter: Treatment Value: 100uM ABA vs. No Treatment
  misc_feature: MA Experiment ID: 20000070 Result: Up-regulated in Transcription
  misc_feature: MA Experiment 20000070 PARAMETER Experiment Name: At_100uM_ABA_Mutants_cDNA_P Parameter: Plant Line Value: CS24
  misc_feature: MA Experiment 20000070 PARAMETER Experiment Name: At_100uM_ABA_Mutants_cDNA_P Parameter: Timepoint (hr) Value: 6
  misc_feature: MA Experiment 20000070 PARAMETER Experiment Name: At_100uM_ABA_Mutants_cDNA_P Parameter: Tissue Value: Aerial
  misc_feature: MA Experiment 20000070 PARAMETER Experiment Name: At_100uM_ABA_Mutants_cDNA_P Parameter: Treatment Value: 100uM ABA vs. No Treatment
  misc_feature: MA Experiment ID: 20000072 Result: Up-regulated in Transcription
  misc_feature: MA Experiment 20000072 PARAMETER Experiment Name: At_100uM_ABA_Mutants_cDNA_P Parameter: Plant Line Value: CS8105
  misc_feature: MA Experiment 20000072 PARAMETER Experiment Name: At_100uM_ABA_Mutants_cDNA_P Parameter: Timepoint (hr) Value: 6
  misc_feature: MA Experiment 20000072 PARAMETER Experiment Name: At_100uM_ABA_Mutants_cDNA_P Parameter: Tissue Value: Aerial
  misc_feature: MA Experiment 20000072 PARAMETER Experiment Name: At_100uM_ABA_Mutants_cDNA_P Parameter: Treatment Value: 100uM ABA vs. No Treatment
  misc_feature: MA Experiment ID: 20000088 Result: Up-regulated in Transcription
  misc_feature: MA Experiment 20000088 PARAMETER Experiment Name: At_100uM_ABA_Mutants_cDNA_P Parameter: Plant Line Value: Landsberg
  misc_feature: MA Experiment 20000088 PARAMETER Experiment Name: At_100uM_ABA_Mutants_cDNA_P Parameter: Timepoint (hr) Value: 6
  misc_feature: MA Experiment 20000088 PARAMETER Experiment Name: At_100uM_ABA_Mutants_cDNA_P Parameter: Tissue Value: Aerial
  misc_feature: MA Experiment 20000088 PARAMETER Experiment Name: At_100uM_ABA_Mutants_cDNA_P Parameter: Treatment Value: 100uM ABA vs. No Treatment
  misc_feature: MA Experiment ID: 20000451 Result: Up-regulated in Transcription
  misc_feature: MA Experiment 20000451 PARAMETER Experiment Name: At_CS6879_Shoots-Roots_P Parameter: Age (day) Value: 14
  misc_feature: MA Experiment 20000451 PARAMETER Experiment Name: At_CS6879_Shoots-Roots_P Parameter: Organism Value: A. thaliana
  misc_feature: MA Experiment 20000451 PARAMETER Experiment Name: At_CS6879_Shoots-Roots_P Parameter: Plant Line Value: CS6879 vs. WS
  misc_feature: MA Experiment 20000451 PARAMETER Experiment Name: At_CS6879_Shoots-Roots_P Parameter: Tissue Value: Roots
  misc_feature: MA Experiment ID: 20000573 Result: Up-regulated in Transcription
  misc_feature: MA Experiment 20000573 PARAMETER Experiment Name: At_100uM_ABA_Mutants__P Parameter: Organism Value: A. thaliana
  misc_feature: MA Experiment 20000573 PARAMETER Experiment Name: At_100uM_ABA_Mutants__P Parameter: Plant Line Value: CS22 vs. Ler wt
  misc_feature: MA Experiment 20000573 PARAMETER Experiment Name: At_100uM_ABA_Mutants__P Parameter: Timepoint (hr) Value: N/A
  misc_feature: MA Experiment 20000573 PARAMETER Experiment Name: At_100uM_ABA_Mutants__P Parameter: Tissue Value: Whole Plant
  misc_feature: MA Experiment 20000573 PARAMETER Experiment Name: At_100uM_ABA_Mutants__P Parameter: Treatment Value: None
  misc_feature: MA Experiment ID: 20000574 Result: Up-regulated in Transcription
  misc_feature: MA Experiment 20000574 PARAMETER Experiment Name: At_100uM_ABA_Mutants__P Parameter: Organism Value: A. thaliana
  misc_feature: MA Experiment 20000574 PARAMETER Experiment Name: At_100uM_ABA_Mutants__P Parameter: Plant Line Value: CS23 vs. Ler wt
  misc_feature: MA Experiment 20000574 PARAMETER Experiment Name: At_100uM_ABA_Mutants__P Parameter: Timepoint (hr) Value: N/A
  misc_feature: MA Experiment 20000574 PARAMETER Experiment Name: At_100uM_ABA_Mutants__P Parameter: Tissue Value: Whole Plant
  misc_feature: MA Experiment 20000574 PARAMETER Experiment Name: At_100uM_ABA_Mutants__P Parameter: Treatment Value: None
  misc_feature: MA Experiment ID: 20001248 Result: Down-regulated in Transcription
  misc_feature: MA Experiment 20001248 PARAMETER Experiment Name: At_Far-red-induction_P Parameter: Age (day) Value: 7
  misc_feature: MA Experiment 20001248 PARAMETER Experiment Name: At_Far-red-induction_P Parameter: Light Value: Far-red vs. White
  misc_feature: MA Experiment 20001248 PARAMETER Experiment Name: At_Far-red-induction_P Parameter: Organism Value: A. thaliana
  misc_feature: MA Experiment 20001248 PARAMETER Experiment Name: At_Far-red-induction_P Parameter: Plant Line Value: Columbia
  misc_feature: MA Experiment 20001248 PARAMETER Experiment Name: At_Far-red-induction_P Parameter: Timepoint (hr) Value: 4
  misc_feature: MA Experiment 20001248 PARAMETER Experiment Name: At_Far-red-induction_P Parameter: Tissue Value: Whole Plant
  misc_feature: MA Experiment ID: 20001905 Result: Down-regulated in Transcription
  misc_feature: MA Experiment 20001905 PARAMETER Experiment Name: At_Drought_Reproduction_P Parameter: Age (day) Value: 40
  misc_feature: MA Experiment 20001905 PARAMETER Experiment Name: At_Drought_Reproduction_P Parameter: Organism Value: A. thaliana
  misc_feature: MA Experiment 20001905 PARAMETER Experiment Name: At_Drought_Reproduction_P Parameter: Plant Line Value: WS
  misc_feature: MA Experiment 20001905 PARAMETER Experiment Name: At_Drought_Reproduction_P Parameter: Timepoint (day) Value: 10
  misc_feature: MA Experiment 20001905 PARAMETER Experiment Name: At_Drought_Reproduction_P Parameter: Tissue Value: Rosettes
  misc_feature: MA Experiment 20001905 PARAMETER Experiment Name: At_Drought_Reproduction_P Parameter: Treatment Value: Drought vs. No Drought
agcaaaacatttgtcttcgtgtttgaaagctagataaaagattcactaaatggccaccgcaagcaccgctgctactttcagaccctcctccgtttcagcttcttccgaattaacccatctgagatcaccctccaaactccccaaatttacgcctctgccatcggctcgctcacggtcctcttcttcgttctccgtctcctgcaccatcgctaaggacccagctgttgtcatggcggactcggagaagattaaggccgctggatctgatccgactatgtggcaacgacctgattcattcggtcgtttcgggaagtttggcggcaagtacgtccccgaaactctaatgcacgccctctctgaactcgaaacggctttctattcgctcgccaccgacgaagatttccagagagaattagcagagatcttgaaagactacgttggtcgggaaagtcctctttactttgcagagaggctcacggagcattaccgccgtgaaaacggtgaagggccgctcatatacctcaaaagggaagacttgaaccacaccggtgctcacaagatcaacaacgctgtggctcaggctcttctcgccaagcgtctaggaaagaaacgaattattgctgagacaggggctggtcaacatggtgtagccacagctactgtgtgtgcacgtttcggtttgcagtgcattatctacatgggtgctcaagacatggagagacaagctcttaatgtgttcagaatgcgtcttctcggtgctgaggtaaggggagtccactctggaacagccactttaaaggacgcaacttctgaagctataagggattgggtgaccaatgtggagactacacattacatattgggatccgttgcgggtcctcatccttatcctatgatggtcagagactttcacgcggtgattggtaaagaaacaaggaaacaagcgatggagaaatggggcgggaagcctgatgttctggttgcttgtgtcggtggtggttcaaatgctatgggactcttccatgaatttgtcgatgacacagaggttcgaatgattggtgtggaagccgctggatttggattggacagcggcaaacatgctgccacattgacaaaaggagatgtcggtgtactccacggagctatgagttacttgctgcaagatgatgatggccaaatcattgaaccacactccatcagtgccggattggactaccctggagtcggacctgagcatagtttccttaaagacgtgggaagggctgaatactttagcgttactgatgaagaagcattagaagctttcaagagagtgtctcggttggagggaataatcccggcattggagacatcgcacgcattggcccatctggagaagctttgtccgacgttacctgatggagccagagtggtattaaacttcagtgggagaggcgacaaggatgttcagactgcaatcaagtatctcgaagtttaaagagtgtagattactttcattttcacacagtgctatttcttttatgtagtttgttagttctccttgcttatggtcgggaatccaaaagtttggatcaaagggttaagaagagaataagtgttatgaatgtatcatataaataaaaatgttctatggaacgtttgatgttcttataagcaattcgaactgttttgttcttg

SEQ ID NO: 39179 - protein, 475 aa, Arabidopsis thaliana
  peptide (1)..(475): Ceres Seq. ID no. 12370845
  misc_feature (127)..(461): Pfam Name: Pyridoxal-phosphate dependent enzyme Pfam Description: Pyridoxal-phosphate dependent enzyme
  misc_feature (73)..(474): Homolog of NCBI NO: 23041317 NR Description: hypothetical protein [Trichodesmium erythraeum
  misc_feature (87)..(475): Homolog of NCBI NO: 1174778 NR Description: Tryptophan synthase beta chain 1 (Orange pericarp
  misc_feature (78)..(475): Homolog of NCBI NO: 1174780 NR Description: Tryptophan synthase beta chain 2, chloroplast
  misc_feature (7)..(475): Homolog of NCBI NO: 38636821 NR Description: putative tryptophan synthase beta-subunit
  misc_feature (36)..(475): Homolog of NCBI NO: 7437014 NR Description: probable tryptophan synthase (EC 4.2.1.20) beta
  misc_feature (38)..(475): Homolog of NCBI NO: 18481702 NR Description: tryptophan synthase beta-subunit [Sorghum bicolor]
  misc_feature (30)..(475): Homolog of NCBI NO: 3915165 NR Description: Tryptophan synthase beta chain 2, chloroplast
  misc_feature (1)..(475): Homolog of NCBI NO: 15239755 NR Description: tryptophan synthase beta chain 1 precursor
  misc_feature (1)..(475): Homolog of NCBI NO: 81661 NR Description: tryptophan synthase (EC 4.2.1.20) beta-2 chain
  misc_feature (1)..(475): Homolog of NCBI NO: 15236977 NR Description: tryptophan synthase beta-subunit (TSB2)
MATASTAATFRPSSVSASSELTHLRSPSKLPKFTPLPSARSRSSSSFSVSCTIAKDPAVVMADSEKIKAAGSDPTMWQRPDSFGRFGKFGGKYVPETLMHALSELETAFYSLATDEDFQRELAEILKDYVGRESPLYFAERLTEHYRRENGEGPLIYLKREDLNHTGAHKINNAVAQALLAKRLGKKRIIAETGAGQHGVATATVCARFGLQCIIYMGAQDMERQALNVFRMRLLGAEVRGVHSGTATLKDATSEAIRDWVTNVETTHYILGSVAGPHPYPMMVRDFHAVIGKETRKQAMEKWGGKPDVLVACVGGGSNAMGLFHEFVDDTEVRMIGVEAAGFGLDSGKHAATLTKGDVGVLHGAMSYLLQDDDGQIIEPHSISAGLDYPGVGPEHSFLKDVGRAEYFSVTDEEALEAFKRVSRLEGIIPALETSHALAHLEKLCPTLPDGARVVLNFSGRGDKDVQTAIKYLEV

SEQ ID NO: 39180 - protein, 415 aa, Arabidopsis thaliana
  peptide (1)..(415): Ceres Seq. ID no. 12370846
  misc_feature (67)..(401): Pfam Name: Pyridoxal-phosphate dependent enzyme Pfam Description: Pyridoxal-phosphate dependent enzyme
  misc_feature (13)..(414): Homolog of NCBI NO: 23041317 NR Description: hypothetical protein [Trichodesmium erythraeum
  misc_feature (27)..(415): Homolog of NCBI NO: 1174778 NR Description: Tryptophan synthase beta chain 1 (Orange pericarp
  misc_feature (18)..(415): Homolog of NCBI NO: 1174780 NR Description: Tryptophan synthase beta chain 2, chloroplast
  misc_feature (1)..(415): Homolog of NCBI NO: 38636821 NR Description: putative tryptophan synthase beta-subunit
  misc_feature (1)..(415): Homolog of NCBI NO: 7437014 NR Description: probable tryptophan synthase (EC 4.2.1.20) beta
  misc_feature (1)..(415): Homolog of NCBI NO: 18481702 NR Description: tryptophan synthase beta-subunit [Sorghum bicolor]
  misc_feature (1)..(415): Homolog of NCBI NO: 3915165 NR Description: Tryptophan synthase beta chain 2, chloroplast
  misc_feature (1)..(415): Homolog of NCBI NO: 15239755 NR Description: tryptophan synthase beta chain 1 precursor
  misc_feature (1)..(415): Homolog of NCBI NO: 81661 NR Description: tryptophan synthase (EC 4.2.1.20) beta-2 chain
  misc_feature (1)..(415): Homolog of NCBI NO: 15236977 NR Description: tryptophan synthase beta-subunit (TSB2)
MADSEKIKAAGSDPTMWQRPDSFGRFGKFGGKYVPETLMHALSELETAFYSLATDEDFQRELAEILKDYVGRESPLYFAERLTEHYRRENGEGPLIYLKREDLNHTGAHKINNAVAQALLAKRLGKKRIIAETGAGQHGVATATVCARFGLQCIIYMGAQDMERQALNVFRMRLLGAEVRGVHSGTATLKDATSEAIRDWVTNVETTHYILGSVAGPHPYPMMVRDFHAVIGKETRKQAMEKWGGKPDVLVACVGGGSNAMGLFHEFVDDTEVRMIGVEAAGFGLDSGKHAATLTKGDVGVLHGAMSYLLQDDDGQIIEPHSISAGLDYPGVGPEHSFLKDVGRAEYFSVTDEEALEAFKRVSRLEGIIPALETSHALAHLEKLCPTLPDGARVVLNFSGRGDKDVQTAIKYLEV

SEQ ID NO: 39181 - protein, 400 aa, Arabidopsis thaliana
  peptide (1)..(400): Ceres Seq. ID no. 12370847
  misc_feature (52)..(386): Pfam Name: Pyridoxal-phosphate dependent enzyme Pfam Description: Pyridoxal-phosphate dependent enzyme
  misc_feature (1)..(399): Homolog of NCBI NO: 23041317 NR Description: hypothetical protein [Trichodesmium erythraeum
  misc_feature (12)..(400): Homolog of NCBI NO: 1174778 NR Description: Tryptophan synthase beta chain 1 (Orange pericarp
  misc_feature (3)..(400): Homolog of NCBI NO: 1174780 NR Description: Tryptophan synthase beta chain 2, chloroplast
  misc_feature (1)..(400): Homolog of NCBI NO: 38636821 NR Description: putative tryptophan synthase beta-subunit
  misc_feature (1)..(400): Homolog of NCBI NO: 7437014 NR Description: probable tryptophan synthase (EC 4.2.1.20) beta
  misc_feature (1)..(400): Homolog of NCBI NO: 18481702 NR Description: tryptophan synthase beta-subunit [Sorghum bicolor]
  misc_feature (1)..(400): Homolog of NCBI NO: 3915165 NR Description: Tryptophan synthase beta chain 2, chloroplast
  misc_feature (1)..(400): Homolog of NCBI NO: 15239755 NR Description: tryptophan synthase beta chain 1 precursor
  misc_feature (1)..(400): Homolog of NCBI NO: 81661 NR Description: tryptophan synthase (EC 4.2.1.20) beta-2 chain
  misc_feature (1)..(400): Homolog of NCBI NO: 15236977 NR Description: tryptophan synthase beta-subunit (TSB2)
MWQRPDSFGRFGKFGGKYVPETLMHALSELETAFYSLATDEDFQRELAEILKDYVGRESPLYFAERLTEHYRRENGEGPLIYLKREDLNHTGAHKINNAVAQALLAKRLGKKRIIAETGAGQHGVATATVCARFGLQCIIYMGAQDMERQALNVFRMRLLGAEVRGVHSGTATLKDATSEAIRDWVTNVETTHYILGSVAGPHPYPMMVRDFHAVIGKETRKQAMEKWGGKPDVLVACVGGGSNAMGLFHEFVDDTEVRMIGVEAAGFGLDSGKHAATLTKGDVGVLHGAMSYLLQDDDGQIIEPHSISAGLDYPGVGPEHSFLKDVGRAEYFSVTDEEALEAFKRVSRLEGIIPALETSHALAHLEKLCPTLPDGARVVLNFSGRGDKDVQTAIKYLEV

SEQ ID NO: 39182 - DNA, 1150 bp, Arabidopsis thaliana
  misc_feature (1)..(1150): Ceres Seq. ID no. 13509011
  misc_feature: MA Experiment ID: 108434 Result: Down-regulated in Transcription
  misc_feature: MA Experiment 108434 PARAMETER Experiment Name: At_Root_Tips_cDNA_P Parameter: Tissue Value: Root Tips
  misc_feature: MA Experiment ID: 108488 Result: Down-regulated in Transcription
  misc_feature: MA Experiment ID: 108501 Result: Down-regulated in Transcription
  misc_feature: MA Experiment 108501 PARAMETER Experiment Name: At_ap2_floral_buds_cDNA_P Parameter: Plant Line Value: ap2 (Ler.)
  misc_feature: MA Experiment 108501 PARAMETER Experiment Name: At_ap2_floral_buds_cDNA_P Parameter: Tissue Value: Closed Flower
  misc_feature: MA Experiment ID: 108561 Result: Up-regulated in Transcription
  misc_feature: MA Experiment 108561 PARAMETER Experiment Name: At_100uM_ABA_cDNA_P Parameter: Timepoint (hr) Value: 6
  misc_feature: MA Experiment 108561 PARAMETER Experiment Name: At_100uM_ABA_cDNA_P Parameter: Tissue Value: Aerial
  misc_feature: MA Experiment 108561 PARAMETER Experiment Name: At_100uM_ABA_cDNA_P Parameter: Treatment Value: 100uM ABA vs. No Treatment
  misc_feature: MA Experiment ID: 108569 Result: Up-regulated in Transcription
  misc_feature: MA Experiment 108569 PARAMETER Experiment Name: At_0.001%_MeJA__cDNA_P Parameter: Timepoint (hr) Value: 6
  misc_feature: MA Experiment 108569 PARAMETER Experiment Name: At_0.001%_MeJA__cDNA_P Parameter: Tissue Value: Aerial
  misc_feature: MA Experiment 108569 PARAMETER Experiment Name: At_0.001%_MeJA__cDNA_P Parameter: Treatment Value: 0.001% MeJA vs. No Treatment
  misc_feature: MA Experiment ID: 108573 Result: Up-regulated in Transcription
  misc_feature: MA Experiment 108573 PARAMETER Experiment Name: At_Drought_cDNA_P Parameter: Timepoint (hr) Value: 6
  misc_feature: MA Experiment 108573 PARAMETER Experiment Name: At_Drought_cDNA_P Parameter: Tissue Value: Aerial
  misc_feature: MA Experiment 108573 PARAMETER Experiment Name: At_Drought_cDNA_P Parameter: Treatment Value: Drought vs. No Drought
  misc_feature: MA Experiment ID: 108585 Result: Up-regulated in Transcription
  misc_feature: MA Experiment 108585 PARAMETER Experiment Name: At_5mM_NaNP_cDNA_P Parameter: Timepoint (hr) Value: 6
  misc_feature: MA Experiment 108585 PARAMETER Experiment Name: At_5mM_NaNP_cDNA_P Parameter: Tissue Value: Aerial
  misc_feature: MA Experiment 108585 PARAMETER Experiment Name: At_5mM_NaNP_cDNA_P Parameter: Treatment Value: null
  misc_feature: MA Experiment ID: 108605 Result: Up-regulated in Transcription
  misc_feature: MA Experiment 108605 PARAMETER Experiment Name: At_100uM_ABA_cDNA_P Parameter: Timepoint (hr) Value: 6
  misc_feature: MA Experiment 108605 PARAMETER Experiment Name: At_100uM_ABA_cDNA_P Parameter: Tissue Value: Aerial
  misc_feature: MA Experiment 108605 PARAMETER Experiment Name: At_100uM_ABA_cDNA_P Parameter: Treatment Value: 100uM ABA vs. No Treatment
  misc_feature: MA Experiment ID: 108607 Result: Up-regulated in Transcription
  misc_feature: MA Experiment 108607 PARAMETER Experiment Name: At_100uM_ABA_cDNA_P Parameter: Timepoint (hr) Value: 4
  misc_feature: MA Experiment 108607 PARAMETER Experiment Name: At_100uM_ABA_cDNA_P Parameter: Tissue Value: Aerial
  misc_feature: MA Experiment 108607 PARAMETER Experiment Name: At_100uM_ABA_cDNA_P Parameter: Treatment Value: 100uM ABA vs. No Treatment
  misc_feature: MA Experiment ID: 108609 Result: Up-regulated in Transcription
  misc_feature: MA Experiment 108609 PARAMETER Experiment Name: At_100uM_ABA_cDNA_P Parameter: Timepoint (hr) Value: 24
  misc_feature: MA Experiment 108609 PARAMETER Experiment Name: At_100uM_ABA_cDNA_P Parameter: Tissue Value: Aerial
  misc_feature: MA Experiment 108609 PARAMETER Experiment Name: At_100uM_ABA_cDNA_P Parameter: Treatment Value: 100uM ABA vs. No Treatment
  misc_feature: MA Experiment ID: 108668 Result: Up-regulated in Transcription
  misc_feature: MA Experiment 108668 PARAMETER Experiment Name: At_2mM_SA_cDNA_P Parameter: Plant Line Value: WS
  misc_feature: MA Experiment 108668 PARAMETER Experiment Name: At_2mM_SA_cDNA_P Parameter: Timepoint (hr) Value: 6
  misc_feature: MA Experiment 108668 PARAMETER Experiment Name: At_2mM_SA_cDNA_P Parameter: Treatment Value: 2mM SA vs. No Treatment
  misc_feature: MA Experiment ID: 20000069 Result: Up-regulated in Transcription
  misc_feature: MA Experiment 20000069 PARAMETER Experiment Name: At_100uM_ABA_Mutants_cDNA_P Parameter: Plant Line Value: CS23
  misc_feature: MA Experiment 20000069 PARAMETER Experiment Name: At_100uM_ABA_Mutants_cDNA_P Parameter: Timepoint (hr) Value: 6
  misc_feature: MA Experiment 20000069 PARAMETER Experiment Name: At_100uM_ABA_Mutants_cDNA_P Parameter: Tissue Value: Aerial
  misc_feature: MA Experiment 20000069 PARAMETER Experiment Name: At_100uM_ABA_Mutants_cDNA_P Parameter: Treatment Value: 100uM ABA vs. No Treatment
  misc_feature: MA Experiment ID: 20000070 Result: Up-regulated in Transcription
  misc_feature: MA Experiment 20000070 PARAMETER Experiment Name: At_100uM_ABA_Mutants_cDNA_P Parameter: Plant Line Value: CS24
  misc_feature: MA Experiment 20000070 PARAMETER Experiment Name: At_100uM_ABA_Mutants_cDNA_P Parameter: Timepoint (hr) Value: 6
  misc_feature: MA Experiment 20000070 PARAMETER Experiment Name: At_100uM_ABA_Mutants_cDNA_P Parameter: Tissue Value: Aerial
  misc_feature: MA Experiment 20000070 PARAMETER Experiment Name: At_100uM_ABA_Mutants_cDNA_P Parameter: Treatment Value: 100uM ABA vs. No Treatment
  misc_feature: MA Experiment ID: 20000071 Result: Up-regulated in Transcription
  misc_feature: MA Experiment 20000071 PARAMETER Experiment Name: At_100uM_ABA_Mutants_cDNA_P Parameter: Plant Line Value: CS8104
  misc_feature: MA Experiment 20000071 PARAMETER Experiment Name: At_100uM_ABA_Mutants_cDNA_P Parameter: Timepoint (hr) Value: 6
  misc_feature: MA Experiment 20000071 PARAMETER Experiment Name: At_100uM_ABA_Mutants_cDNA_P Parameter: Tissue Value: Aerial
  misc_feature: MA Experiment 20000071 PARAMETER Experiment Name: At_100uM_ABA_Mutants_cDNA_P Parameter: Treatment Value: 100uM ABA vs. No Treatment
  misc_feature: MA Experiment ID: 20000072 Result: Up-regulated in Transcription
  misc_feature: MA Experiment 20000072 PARAMETER Experiment Name: At_100uM_ABA_Mutants_cDNA_P Parameter: Plant Line Value: CS8105
  misc_feature: MA Experiment 20000072 PARAMETER Experiment Name: At_100uM_ABA_Mutants_cDNA_P Parameter: Timepoint (hr) Value: 6
  misc_feature: MA Experiment 20000072 PARAMETER Experiment Name: At_100uM_ABA_Mutants_cDNA_P Parameter: Tissue Value: Aerial
  misc_feature: MA Experiment 20000072 PARAMETER Experiment Name: At_100uM_ABA_Mutants_cDNA_P Parameter: Treatment Value: 100uM ABA vs. No Treatment
  misc_feature: MA Experiment ID: 20000086 Result: Up-regulated in Transcription
  misc_feature: MA Experiment 20000086 PARAMETER Experiment Name: At_100uM_ABA_Mutants_cDNA_P Parameter: Plant Line Value: CS22
  misc_feature: MA Experiment 20000086 PARAMETER Experiment Name: At_100uM_ABA_Mutants_cDNA_P Parameter: Timepoint (hr) Value: 6
  misc_feature: MA Experiment 20000086 PARAMETER Experiment Name: At_100uM_ABA_Mutants_cDNA_P Parameter: Tissue Value: Aerial
  misc_feature: MA Experiment 20000086 PARAMETER Experiment Name: At_100uM_ABA_Mutants_cDNA_P Parameter: Treatment Value: 100uM ABA vs. No Treatment
  misc_feature: MA Experiment ID: 20000087 Result: Up-regulated in Transcription
  misc_feature: MA Experiment 20000087 PARAMETER Experiment Name: At_100uM_ABA_Mutants_cDNA_P Parameter: Plant Line Value: WS
  misc_feature: MA Experiment 20000087 PARAMETER Experiment Name: At_100uM_ABA_Mutants_cDNA_P Parameter: Timepoint (hr) Value: 6
  misc_feature: MA Experiment 20000087 PARAMETER Experiment Name: At_100uM_ABA_Mutants_cDNA_P Parameter: Tissue Value: Aerial
  misc_feature: MA Experiment 20000087 PARAMETER Experiment Name: At_100uM_ABA_Mutants_cDNA_P Parameter: Treatment Value: 100uM ABA vs. No Treatment
  misc_feature: MA Experiment ID: 20000117 Result: Up-regulated in Transcription
  misc_feature: MA Experiment 20000117 PARAMETER Experiment Name: At_100uM_ABA_Mutants_cDNA_P Parameter: Plant Line Value: Columbia
  misc_feature: MA Experiment 20000117 PARAMETER Experiment Name: At_100uM_ABA_Mutants_cDNA_P Parameter: Timepoint (hr) Value: 6
  misc_feature: MA Experiment 20000117 PARAMETER Experiment Name: At_100uM_ABA_Mutants_cDNA_P Parameter: Tissue Value: Aerial
  misc_feature: MA Experiment 20000117 PARAMETER Experiment Name: At_100uM_ABA_Mutants_cDNA_P Parameter: Treatment Value: 100uM ABA vs. No Treatment
  misc_feature: MA Experiment ID: 20000169 Result: Up-regulated in Transcription
  misc_feature: MA Experiment 20000169 PARAMETER Experiment Name: At_100uM_ABA_P Parameter: Age (day) Value: 14
  misc_feature: MA Experiment 20000169 PARAMETER Experiment Name: At_100uM_ABA_P Parameter: Organism Value: A. thaliana
  misc_feature: MA Experiment 20000169 PARAMETER Experiment Name: At_100uM_ABA_P Parameter: Plant Line Value: WS
  misc_feature: MA Experiment 20000169 PARAMETER Experiment Name: At_100uM_ABA_P Parameter: Timepoint (hr) Value: 6
  misc_feature: MA Experiment 20000169 PARAMETER Experiment Name: At_100uM_ABA_P Parameter: Tissue Value: Aerial
  misc_feature: MA Experiment 20000169 PARAMETER Experiment Name: At_100uM_ABA_P Parameter: Treatment Value: 100uM ABA vs. No Treatment
  misc_feature: MA Experiment ID: 20000179 Result: Up-regulated in Transcription
  misc_feature: MA Experiment 20000179 PARAMETER Experiment Name: At_Germinating_Seeds_P Parameter: Age (hr) Value: 6 vs. 0
  misc_feature: MA Experiment 20000179 PARAMETER Experiment Name: At_Germinating_Seeds_P Parameter: Tissue Value: Germinating Seeds
  misc_feature: MA Experiment ID: 20000180 Result: Up-regulated in Transcription
  misc_feature: MA Experiment 20000180 PARAMETER Experiment Name: At_Germinating_Seeds_P Parameter: Age (hr) Value: 24 vs. 0
  misc_feature: MA Experiment 20000180 PARAMETER Experiment Name: At_Germinating_Seeds_P Parameter: Tissue Value: Germinating Seeds
  misc_feature: MA Experiment ID: 20000182 Result: Up-regulated in Transcription
  misc_feature: MA Experiment 20000182 PARAMETER Experiment Name: At_2mM_SA_P Parameter: Age (day) Value: 14
  misc_feature: MA Experiment 20000182 PARAMETER Experiment Name: At_2mM_SA_P Parameter: Organism Value: A. thaliana
  misc_feature: MA Experiment 20000182 PARAMETER Experiment Name: At_2mM_SA_P Parameter: Plant Line Value: WS
  misc_feature: MA Experiment 20000182 PARAMETER Experiment Name: At_2mM_SA_P Parameter: Timepoint (hr) Value: 6
  misc_feature: MA Experiment 20000182 PARAMETER Experiment Name: At_2mM_SA_P Parameter: Tissue Value: Aerial
  misc_feature: MA Experiment 20000182 PARAMETER Experiment Name: At_2mM_SA_P Parameter: Treatment Value: 2mM SA vs. No Treatment
  misc_feature: MA Experiment ID: 20000185 Result: Up-regulated in Transcription
  misc_feature: MA Experiment 20000185 PARAMETER Experiment Name: At_Roots__P Parameter: Age (day) Value: 7 vs. 21
  misc_feature: MA Experiment 20000185 PARAMETER Experiment Name: At_Roots__P Parameter: Organism Value: A. thaliana
  misc_feature: MA Experiment 20000185 PARAMETER Experiment Name: At_Roots__P Parameter: Tissue Value: Roots vs. Whole Plant
  misc_feature: MA Experiment ID: 20000227 Result: Down-regulated in Transcription
  misc_feature: MA Experiment 20000227 PARAMETER Experiment Name: At_Root-Tips-vs-Tops_P Parameter: Tissue Value: Root Tips vs. Root Tops
  misc_feature: MA Experiment ID: 20000234 Result: Down-regulated in Transcription
  misc_feature: MA Experiment 20000234 PARAMETER Experiment Name: At_Siliques_P Parameter: Age (day) Value: 21
  misc_feature: MA Experiment 20000234 PARAMETER Experiment Name: At_Siliques_P Parameter: Organism Value: A. thaliana
  misc_feature: MA Experiment 20000234 PARAMETER Experiment Name: At_Siliques_P Parameter: Plant Line Value: WS
  misc_feature: MA Experiment 20000234 PARAMETER Experiment Name: At_Siliques_P Parameter: Tissue Value: Less Than 5mm Siliques vs. Whole Plant
  misc_feature: MA Experiment ID: 20000235 Result: Down-regulated in Transcription
  misc_feature: MA Experiment 20000235 PARAMETER Experiment Name: At_Siliques_P Parameter: Age (day) Value: 21
  misc_feature: MA Experiment 20000235 PARAMETER Experiment Name: At_Siliques_P Parameter: Organism Value: A. thaliana
  misc_feature: MA Experiment 20000235 PARAMETER Experiment Name: At_Siliques_P Parameter: Plant Line Value: WS
  misc_feature: MA Experiment 20000235 PARAMETER Experiment Name: At_Siliques_P Parameter: Tissue Value: 5-10mm Siliques vs. Whole Plant
  misc_feature: MA Experiment ID: 20000436 Result: Up-regulated in Transcription
  misc_feature: MA Experiment 20000436 PARAMETER Experiment Name: At_Drought_P Parameter: Age (day) Value: 7
  misc_feature: MA Experiment 20000436 PARAMETER Experiment Name: At_Drought_P Parameter: Organism Value: A. thaliana
  misc_feature: MA Experiment 20000436 PARAMETER Experiment Name: At_Drought_P Parameter: Plant Line Value: WS
  misc_feature: MA Experiment 20000436 PARAMETER Experiment Name: At_Drought_P Parameter: Timepoint (hr) Value: 12
  misc_feature: MA Experiment 20000436 PARAMETER Experiment Name: At_Drought_P Parameter: Tissue Value: Whole Plant
  misc_feature: MA Experiment 20000436 PARAMETER Experiment Name: At_Drought_P Parameter: Treatment Value: Drought vs. No Drought
  misc_feature: MA Experiment ID: 20000437 Result: Up-regulated in Transcription
  misc_feature: MA Experiment 20000437 PARAMETER Experiment Name: At_Drought_P Parameter: Age (day) Value: 8
  misc_feature: MA Experiment 20000437 PARAMETER Experiment Name: At_Drought_P Parameter: Organism Value: A. thaliana
  misc_feature: MA Experiment 20000437 PARAMETER Experiment Name: At_Drought_P Parameter: Plant Line Value: WS
  misc_feature: MA Experiment 20000437 PARAMETER Experiment Name: At_Drought_P Parameter: Timepoint (hr) Value: 24
  misc_feature: MA Experiment 20000437 PARAMETER Experiment Name: At_Drought_P Parameter: Tissue Value: Whole Plant
  misc_feature: MA Experiment 20000437 PARAMETER Experiment Name: At_Drought_P Parameter: Treatment Value: Drought vs. No Drought
  misc_feature: MA Experiment ID: 20000438 Result: Down-regulated in Transcription
  misc_feature: MA Experiment 20000438 PARAMETER Experiment Name: At_Shoots__P Parameter: Age (day) Value: 14
  misc_feature: MA Experiment 20000438 PARAMETER Experiment Name: At_Shoots__P Parameter: Tissue Value: Shoots vs. Whole Plant
  misc_feature: MA Experiment ID: 20000439 Result: Up-regulated in Transcription
  misc_feature: MA Experiment 20000439 PARAMETER Experiment Name: At_Roots__P Parameter: Age (day) Value: 14 vs. 21
  misc_feature: MA Experiment 20000439 PARAMETER Experiment Name: At_Roots__P Parameter: Organism Value: A. thaliana
  misc_feature: MA Experiment 20000439 PARAMETER Experiment Name: At_Roots__P Parameter: Tissue Value: Roots vs. Whole Plant
  misc_feature: MA Experiment ID: 20000453 Result: Up-regulated in Transcription
  misc_feature: MA Experiment 20000453 PARAMETER Experiment Name: At_100uM_ABA_P Parameter: Age (day) Value: 15
  misc_feature: MA Experiment 20000453 PARAMETER Experiment Name: At_100uM_ABA_P Parameter: Organism Value: A. thaliana
  misc_feature: MA Experiment 20000453 PARAMETER Experiment Name: At_100uM_ABA_P Parameter: Plant Line Value: WS
  misc_feature: MA Experiment 20000453 PARAMETER Experiment Name: At_100uM_ABA_P Parameter: Timepoint (hr) Value: 24
  misc_feature: MA Experiment 20000453 PARAMETER Experiment Name: At_100uM_ABA_P Parameter: Tissue Value: Aerial
  misc_feature: MA Experiment 20000453 PARAMETER Experiment Name: At_100uM_ABA_P Parameter: Treatment Value: 100uM ABA vs. No Treatment
  misc_feature: MA Experiment ID: 20000455 Result: Up-regulated in Transcription
  misc_feature: MA Experiment 20000455 PARAMETER Experiment Name: At_100uM_ABA_P Parameter: Age (day) Value: 16
  misc_feature: MA Experiment 20000455 PARAMETER Experiment Name: At_100uM_ABA_P Parameter: Organism Value: A. thaliana
  misc_feature: MA Experiment 20000455 PARAMETER Experiment Name: At_100uM_ABA_P Parameter: Plant Line Value: WS
  misc_feature: MA Experiment 20000455 PARAMETER Experiment Name: At_100uM_ABA_P Parameter: Timepoint (hr) Value: 48
  misc_feature: MA Experiment 20000455 PARAMETER Experiment Name: At_100uM_ABA_P Parameter: Tissue Value: Aerial
  misc_feature: MA Experiment 20000455 PARAMETER Experiment Name: At_100uM_ABA_P Parameter: Treatment Value: 100uM ABA vs. No Treatment
  misc_feature: MA Experiment ID: 20000527 Result: Down-regulated in Transcription
  misc_feature: MA Experiment 20000527 PARAMETER Experiment Name: At_10percent_PEG_P Parameter: Age (day) Value: 20
  misc_feature: MA Experiment 20000527 PARAMETER Experiment Name: At_10percent_PEG_P Parameter: Organism Value: A. thaliana
  misc_feature: MA Experiment 20000527 PARAMETER Experiment Name: At_10percent_PEG_P Parameter: Plant Line Value: WS
  misc_feature: MA Experiment 20000527 PARAMETER Experiment Name: At_10percent_PEG_P Parameter: Timepoint (day) Value: 20
  misc_feature: MA Experiment 20000527 PARAMETER Experiment Name: At_10percent_PEG_P Parameter: Tissue Value: Whole Plant
  misc_feature: MA Experiment 20000527 PARAMETER Experiment Name: At_10percent_PEG_P Parameter: Treatment Value: 10percent PEG vs. No Treatment
  misc_feature: MA Experiment ID: 20001556 Result: Up-regulated in Transcription
  misc_feature: MA Experiment 20001556 PARAMETER Experiment Name: At_Drought_Soil_Dry_P Parameter: Age (day) Value: 26
  misc_feature: MA Experiment 20001556 PARAMETER Experiment Name: At_Drought_Soil_Dry_P Parameter: Organism Value: A. thaliana
  misc_feature: MA Experiment 20001556 PARAMETER Experiment Name: At_Drought_Soil_Dry_P Parameter: Plant Line Value: WS
  misc_feature: MA Experiment 20001556 PARAMETER Experiment Name: At_Drought_Soil_Dry_P Parameter: Post Timepoint (hr) Value: None
  misc_feature: MA Experiment 20001556 PARAMETER Experiment Name: At_Drought_Soil_Dry_P Parameter: Post-Treatment Value: None
  misc_feature: MA Experiment 20001556 PARAMETER Experiment Name: At_Drought_Soil_Dry_P Parameter: Timepoint (day) Value: 12
  misc_feature: MA Experiment 20001556 PARAMETER Experiment Name: At_Drought_Soil_Dry_P Parameter: Treatment Value: Drought vs. No Drought
  misc_feature: MA Experiment ID: 20001557 Result: Up-regulated in Transcription
  misc_feature: MA Experiment 20001557 PARAMETER Experiment Name: At_Drought_Soil_Dry_P Parameter: Age (day) Value: 27
  misc_feature: MA Experiment 20001557 PARAMETER Experiment Name: At_Drought_Soil_Dry_P Parameter: Organism Value: A. thaliana
  misc_feature: MA Experiment 20001557 PARAMETER Experiment Name: At_Drought_Soil_Dry_P Parameter: Plant Line Value: WS
  misc_feature: MA Experiment 20001557 PARAMETER Experiment Name: At_Drought_Soil_Dry_P Parameter: Post Timepoint (hr) Value: 3
  misc_feature: MA Experiment 20001557 PARAMETER Experiment Name: At_Drought_Soil_Dry_P Parameter: Post-Treatment Value: Re-Water vs. No Drought
  misc_feature: MA Experiment 20001557 PARAMETER Experiment Name: At_Drought_Soil_Dry_P Parameter: Timepoint (day) Value: 13
  misc_feature: MA Experiment 20001557 PARAMETER Experiment Name: At_Drought_Soil_Dry_P Parameter: Treatment Value: Drought vs. No Drought
  misc_feature: MA Experiment ID: 20001559 Result: Up-regulated in Transcription
  misc_feature: MA Experiment 20001559 PARAMETER Experiment Name: At_Drought_Soil_Dry_P Parameter: Age (day) Value: 28
  misc_feature: MA Experiment 20001559 PARAMETER Experiment Name: At_Drought_Soil_Dry_P Parameter: Organism Value: A. thaliana
  misc_feature: MA Experiment 20001559 PARAMETER Experiment Name: At_Drought_Soil_Dry_P Parameter: Plant Line Value: WS
  misc_feature: MA Experiment 20001559 PARAMETER Experiment Name: At_Drought_Soil_Dry_P Parameter: Post Timepoint (hr) Value: 29
  misc_feature: MA Experiment 20001559 PARAMETER Experiment Name: At_Drought_Soil_Dry_P Parameter: Post-Treatment Value: Re-Water vs. No Drought
  misc_feature: MA Experiment 20001559 PARAMETER Experiment Name: At_Drought_Soil_Dry_P Parameter: Timepoint (day) Value: 14
  misc_feature: MA Experiment 20001559 PARAMETER Experiment Name: At_Drought_Soil_Dry_P Parameter: Treatment Value: Drought vs. No Drought
  misc_feature: MA Experiment ID: 20001904 Result: Up-regulated in Transcription
  misc_feature: MA Experiment 20001904 PARAMETER Experiment Name: At_Drought_Reproduction_P Parameter: Age (day) Value: 37
  misc_feature: MA Experiment 20001904 PARAMETER Experiment Name: At_Drought_Reproduction_P Parameter: Organism Value: A. thaliana
  misc_feature: MA Experiment 20001904 PARAMETER Experiment Name: At_Drought_Reproduction_P Parameter: Plant Line Value: WS
  misc_feature: MA Experiment 20001904 PARAMETER Experiment Name: At_Drought_Reproduction_P Parameter: Timepoint (day) Value: 7
  misc_feature: MA Experiment 20001904 PARAMETER Experiment Name: At_Drought_Reproduction_P Parameter: Tissue Value: Rosettes
  misc_feature: MA Experiment 20001904 PARAMETER Experiment Name: At_Drought_Reproduction_P Parameter: Treatment Value: Drought vs. No Drought
  misc_feature: MA Experiment ID: 20001905 Result: Up-regulated in Transcription
  misc_feature: MA Experiment 20001905 PARAMETER Experiment Name: At_Drought_Reproduction_P Parameter: Age (day) Value: 40
  misc_feature: MA Experiment 20001905 PARAMETER Experiment Name: At_Drought_Reproduction_P Parameter: Organism Value: A. thaliana
  misc_feature: MA Experiment 20001905 PARAMETER Experiment Name: At_Drought_Reproduction_P Parameter: Plant Line Value: WS
  misc_feature: MA Experiment 20001905 PARAMETER Experiment Name: At_Drought_Reproduction_P Parameter: Timepoint (day) Value: 10
  misc_feature: MA Experiment 20001905 PARAMETER Experiment Name: At_Drought_Reproduction_P Parameter: Tissue Value: Rosettes
  misc_feature: MA Experiment 20001905 PARAMETER Experiment Name: At_Drought_Reproduction_P Parameter: Treatment Value: Drought vs. No Drought
  misc_feature: MA Experiment ID: 20001911 Result: Up-regulated in Transcription
  misc_feature: MA Experiment 20001911 PARAMETER Experiment Name: At_Drought_Reproduction_P Parameter: Age (day) Value: 40
  misc_feature: MA Experiment 20001911 PARAMETER Experiment Name: At_Drought_Reproduction_P Parameter: Organism Value: A. thaliana
  misc_feature: MA Experiment 20001911 PARAMETER Experiment Name: At_Drought_Reproduction_P Parameter: Plant Line Value: WS
  misc_feature: MA Experiment 20001911 PARAMETER Experiment Name: At_Drought_Reproduction_P Parameter: Timepoint (day) Value: 10
  misc_feature: MA Experiment 20001911 PARAMETER Experiment Name: At_Drought_Reproduction_P Parameter: Tissue Value: Flowers
  misc_feature: MA Experiment 20001911 PARAMETER Experiment Name: At_Drought_Reproduction_P Parameter: Treatment Value: Drought vs. No Drought
acgactacaaagtacaagaaagtctcatttgagaataattgagcgataaagaaacggtatgacgtcgttttgctccatgatttctcttcttcttcttctctctctttcatcggcggttttctccgatgacgcttctttccagaaacttccggtgccggaaactaggtcaggtcccgaagctttcgcttttgattccaccggtaaagggttctataccggtgtctccggtggtaaaatcctcaagtacctccccgagacgggttatgttgactttgcccagatcactgaatcctcgaactcttcatggtgcgatggtactattggaacggctttagccggacgctgtggtcgaccagcaggaatagcattcaacgagaaaacaggtgatctttacgtcgccgatgctccgttgggtcttcacgttatttctcccgccggtggtttggctacgaagatcaccgacagtgttgacggaaagcctttcaagtttcttgacggtcttgacgttgatcccactactggtgtcgtctacttcacttccttcagctcacgcttctccccaatccaagtgttgattgcattggggttaaaggacgcgaccggaaagctctacaaatacgacccatcgaccaaagtcgtgactgtactgatggaagggctaagtggttcagccgggtgtgcagtgagctcagatggttcgtttgtgctggttagtcagttcacaaaaagtaacatcaagaggtattggatcaagggacccaaagctggttcttctgaagacttcaccaactcagtctcaaaccctgacaatatcaaaagaattggctctactggaaacttttgggtcgcttcagtggtgaacaagatcatcgtacctacgaacccatcagcagtcaaagttaactctaatggtgaagttcttcaaacaattcctctcaaagataaatttggagacactctgctcagcgaagtcaacgaattcgagggcaatttatatataggaactctcaccggaccatttgctggaattcttaagctcgaaaagggttcttgtcctgccacttagatctcttatttgaatgcatccgatgtgttacaataatatatatatatgagctttttatttatttctgaataaaataaccactta

SEQ ID NO: 39183 - protein, 335 aa, Arabidopsis thaliana
  peptide (1)..(335): Ceres Seq. ID no. 13509012
  misc_feature (2)..(322): Pfam Name: Strictosidine synthase Pfam Description: Strictosidine synthase
  misc_feature (272)..(327): Homolog of NCBI NO: 30694556 NR Description: strictosidine synthase-related [Arabidopsis
  misc_feature (272)..(327): Homolog of NCBI NO: 11280567 NR Description: hypothetical protein F24I3.110 - Arabidopsis
  misc_feature (37)..(264): Homolog of NCBI NO: 30694556 NR Description: strictosidine synthase-related [Arabidopsis
  misc_feature (37)..(264): Homolog of NCBI NO: 11280567 NR Description: hypothetical protein F24I3.110 - Arabidopsis
  misc_feature (1)..(313): Homolog of NCBI NO: 1754987 NR Description: strictosidine synthase
  misc_feature (1)..(327): Homolog of NCBI NO: 30698979 NR Description: strictosidine synthase family [Arabidopsis
  misc_feature (1)..(327): Homolog of NCBI NO: 21431845 NR Description: Strictosidine synthase 3 precursor (SS-3)
  misc_feature (1)..(327): Homolog of NCBI NO: 15221105 NR Description: strictosidine synthase family [Arabidopsis
  misc_feature (1)..(335): Homolog of NCBI NO: 1754983 NR Description: strictosidine synthase
  misc_feature (1)..(335): Homolog of NCBI NO: 15221106 NR Description: strictosidine synthase family [Arabidopsis
MTSFCSMISLLLLLSLSSAVFSDDASFQKLPVPETRSGPEAFAFDSTGKGFYTGVSGGKILKYLPETGYVDFAQITESSNSSWCDGTIGTALAGRCGRPAGIAFNEKTGDLYVADAPLGLHVISPAGGLATKITDSVDGKPFKFLDGLDVDPTTGVVYFTSFSSRFSPIQVLIALGLKDATGKLYKYDPSTKVVTVLMEGLSGSAGCAVSSDGSFVLVSQFTKSNIKRYWIKGPKAGSSEDFTNSVSNPDNIKRIGSTGNFWVASVVNKIIVPTNPSAVKVNSNGEVLQTIPLKDKFGDTLLSEVNEFEGNLYIGTLTGPFAGILKLEKGSCPAT

SEQ ID NO: 39184 - protein, 329 aa, Arabidopsis thaliana
  peptide (1)..(329): Ceres Seq. ID no. 13509013
  misc_feature (1)..(316): Pfam Name: Strictosidine synthase Pfam Description: Strictosidine synthase
  misc_feature (266)..(321): Homolog of NCBI NO: 30694556 NR Description: strictosidine synthase-related [Arabidopsis
  misc_feature (266)..(321): Homolog of NCBI NO: 11280567 NR Description: hypothetical protein F24I3.110 - Arabidopsis
  misc_feature (31)..(258): Homolog of NCBI NO: 30694556 NR Description: strictosidine synthase-related [Arabidopsis
  misc_feature (31)..(258): Homolog of NCBI NO: 11280567 NR Description: hypothetical protein F24I3.110 - Arabidopsis
  misc_feature (1)..(307): Homolog of NCBI NO: 1754987 NR Description: strictosidine synthase
  misc_feature (1)..(321): Homolog of NCBI NO: 30698979 NR Description: strictosidine synthase family [Arabidopsis
  misc_feature (1)..(321): Homolog of NCBI NO: 21431845 NR Description: Strictosidine synthase 3 precursor (SS-3)
  misc_feature (1)..(321): Homolog of NCBI NO: 15221105 NR Description: strictosidine synthase family [Arabidopsis
  misc_feature (1)..(329): Homolog of NCBI NO: 1754983 NR Description: strictosidine synthase
  misc_feature (1)..(329): Homolog of NCBI NO: 15221106 NR Description: strictosidine synthase family [Arabidopsis
MISLLLLLSLSSAVFSDDASFQKLPVPETRSGPEAFAFDSTGKGFYTGVSGGKILKYLPETGYVDFAQITESSNSSWCDGTIGTALAGRCGRPAGIAFNEKTGDLYVADAPLGLHVISPAGGLATKITDSVDGKPFKFLDGLDVDPTTGVVYFTSFSSRFSPIQVLIALGLKDATGKLYKYDPSTKVVTVLMEGLSGSAGCAVSSDGSFVLVSQFTKSNIKRYWIKGPKAGSSEDFTNSVSNPDNIKRIGSTGNFWVASVVNKIIVPTNPSAVKVNSNGEVLQTIPLKDKFGDTLLSEVNEFEGNLYIGTLTGPFAGILKLEKGSCPAT

SEQ ID NO: 39185 - DNA, 2016 bp, Arabidopsis thaliana
  misc_feature (1)..(2016): Ceres Seq. ID no. 13489529
  misc_feature: MA Experiment ID: 108433 Result: Down-regulated in Transcription
  misc_feature: MA Experiment 108433 PARAMETER Experiment Name: At_rhl_Mutant2_cDNA_P Parameter: Age (day) Value: 7
  misc_feature: MA Experiment 108433 PARAMETER Experiment Name: At_rhl_Mutant2_cDNA_P Parameter: Organism Value: A. thaliana
  misc_feature: MA Experiment 108433 PARAMETER Experiment Name: At_rhl_Mutant2_cDNA_P Parameter: Plant Line Value: rhl Mutant vs. wt landsburg
  misc_feature: MA Experiment 108433 PARAMETER Experiment Name: At_rhl_Mutant2_cDNA_P Parameter: Tissue Value: Roots
  misc_feature: MA Experiment ID: 108461 Result: Up-regulated in Transcription
  misc_feature: MA Experiment 108461 PARAMETER Experiment Name: At_Germinating_Seeds_cDNA_P Parameter: Age (day) Value: 1 vs. 0
  misc_feature: MA Experiment 108461 PARAMETER Experiment Name: At_Germinating_Seeds_cDNA_P Parameter: Tissue Value: Germinating Seeds
  misc_feature: MA Experiment ID: 108462 Result: Up-regulated in Transcription
  misc_feature: MA Experiment 108462 PARAMETER Experiment Name: At_Germinating_Seeds_cDNA_P Parameter: Age (day) Value: 2 vs. 0
  misc_feature: MA Experiment 108462 PARAMETER Experiment Name: At_Germinating_Seeds_cDNA_P Parameter: Tissue Value: Germinating Seeds
  misc_feature: MA Experiment ID: 108463 Result: Up-regulated in Transcription
  misc_feature: MA Experiment 108463 PARAMETER Experiment Name: At_Germinating_Seeds_cDNA_P Parameter: Age (day) Value: 3 vs. 0
  misc_feature: MA Experiment 108463 PARAMETER Experiment Name: At_Germinating_Seeds_cDNA_P Parameter: Tissue Value: Germinating Seeds
  misc_feature: MA Experiment ID: 108464 Result: Up-regulated in Transcription
  misc_feature: MA Experiment 108464 PARAMETER Experiment Name: At_Germinating_Seeds_cDNA_P Parameter: Age (day) Value: 4 vs. 0
  misc_feature: MA Experiment 108464 PARAMETER Experiment Name: At_Germinating_Seeds_cDNA_P Parameter: Tissue Value: Germinating Seeds
  misc_feature: MA Experiment ID: 108577 Result: Down-regulated in Transcription
  misc_feature: MA Experiment 108577 PARAMETER Experiment Name: At_42deg_Heat_cDNA_P Parameter: Temperature (deg C) Value: 42 vs. 22
  misc_feature: MA Experiment 108577 PARAMETER Experiment Name: At_42deg_Heat_cDNA_P Parameter: Timepoint (hr) Value: 6
  misc_feature: MA Experiment 108577 PARAMETER Experiment Name: At_42deg_Heat_cDNA_P Parameter: Tissue Value: Aerial
  misc_feature: MA Experiment ID: 108585 Result: Up-regulated in Transcription
  misc_feature: MA Experiment 108585 PARAMETER Experiment Name: At_5mM_NaNP_cDNA_P Parameter: Timepoint (hr) Value: 6
  misc_feature: MA Experiment 108585 PARAMETER Experiment Name: At_5mM_NaNP_cDNA_P Parameter: Tissue Value: Aerial
  misc_feature: MA Experiment 108585 PARAMETER Experiment Name: At_5mM_NaNP_cDNA_P Parameter: Treatment Value: null
  misc_feature: MA Experiment ID: 108595 Result: Down-regulated in Transcription
  misc_feature: MA Experiment 108595 PARAMETER Experiment Name: At_Ler-pi_Ovule_cDNA_P Parameter: Plant Line Value: null
  misc_feature: MA Experiment ID: 108668 Result: Down-regulated in Transcription
  misc_feature: MA Experiment 108668 PARAMETER Experiment Name: At_2mM_SA_cDNA_P Parameter: Plant Line Value: WS
  misc_feature: MA Experiment 108668 PARAMETER Experiment Name: At_2mM_SA_cDNA_P Parameter: Timepoint (hr) Value: 6
  misc_feature: MA Experiment 108668 PARAMETER Experiment Name: At_2mM_SA_cDNA_P Parameter: Treatment Value: 2mM SA vs. No Treatment
  misc_feature: MA Experiment ID: 20000180 Result: Up-regulated in Transcription
  misc_feature: MA Experiment 20000180 PARAMETER Experiment Name: At_Germinating_Seeds_P Parameter: Age (hr) Value: 24 vs. 0
  misc_feature: MA Experiment 20000180 PARAMETER Experiment Name: At_Germinating_Seeds_P Parameter: Tissue Value: Germinating Seeds
  misc_feature: MA Experiment ID: 20000224 Result: Down-regulated in Transcription
  misc_feature: MA Experiment ID: 20000451 Result: Up-regulated in Transcription
  misc_feature: MA Experiment 20000451 PARAMETER Experiment Name: At_CS6879_Shoots-Roots_P Parameter: Age (day) Value: 14
  misc_feature: MA Experiment 20000451 PARAMETER Experiment Name: At_CS6879_Shoots-Roots_P Parameter: Organism Value: A. thaliana
  misc_feature: MA Experiment 20000451 PARAMETER Experiment Name: At_CS6879_Shoots-Roots_P Parameter: Plant Line Value: CS6879 vs. WS
  misc_feature: MA Experiment 20000451 PARAMETER Experiment Name: At_CS6879_Shoots-Roots_P Parameter: Tissue Value: Roots
  misc_feature: MA Experiment ID: 20000573 Result: Down-regulated in Transcription
  misc_feature: MA Experiment 20000573 PARAMETER Experiment Name: At_100uM_ABA_Mutants__P Parameter: Organism Value: A. thaliana
  misc_feature: MA Experiment 20000573 PARAMETER Experiment Name: At_100uM_ABA_Mutants__P Parameter: Plant Line Value: CS22 vs. Ler wt
  misc_feature: MA Experiment 20000573 PARAMETER Experiment Name: At_100uM_ABA_Mutants__P Parameter: Timepoint (hr) Value: N/A
  misc_feature: MA Experiment 20000573 PARAMETER Experiment Name: At_100uM_ABA_Mutants__P Parameter: Tissue Value: Whole Plant
  misc_feature: MA Experiment 20000573 PARAMETER Experiment Name: At_100uM_ABA_Mutants__P Parameter: Treatment Value: None
  misc_feature: MA Experiment ID: 20000574 Result: Down-regulated in Transcription
  misc_feature: MA Experiment 20000574 PARAMETER Experiment Name: At_100uM_ABA_Mutants__P Parameter: Organism Value: A. thaliana
  misc_feature: MA Experiment 20000574 PARAMETER Experiment Name: At_100uM_ABA_Mutants__P Parameter: Plant Line Value: CS23 vs. Ler wt
  misc_feature: MA Experiment 20000574 PARAMETER Experiment Name: At_100uM_ABA_Mutants__P Parameter: Timepoint (hr) Value: N/A
  misc_feature: MA Experiment 20000574 PARAMETER Experiment Name: At_100uM_ABA_Mutants__P Parameter: Tissue Value: Whole Plant
  misc_feature: MA Experiment 20000574 PARAMETER Experiment Name: At_100uM_ABA_Mutants__P Parameter: Treatment Value: None
  misc_feature: MA Experiment ID: 20000794 Result: Down-regulated in Transcription
  misc_feature: MA Experiment 20000794 PARAMETER Experiment Name: At_Petals_P Parameter: Age (day) Value: 23-25 days
  misc_feature: MA Experiment 20000794 PARAMETER Experiment Name: At_Petals_P Parameter: Plant Line Value: WS
  misc_feature: MA Experiment 20000794 PARAMETER Experiment Name: At_Petals_P Parameter: Tissue Value: Petals vs. Whole plant
  misc_feature: MA Experiment ID: 20001451 Result: Down-regulated in Transcription
  misc_feature: MA Experiment 20001451 PARAMETER Experiment Name: At_Far-red-induction_P Parameter: Age (day) Value: 7
  misc_feature: MA Experiment 20001451 PARAMETER Experiment Name: At_Far-red-induction_P Parameter: Light Value: Far-red vs. White
  misc_feature: MA Experiment 20001451 PARAMETER Experiment Name: At_Far-red-induction_P Parameter: Organism Value: A. thaliana
  misc_feature: MA Experiment 20001451 PARAMETER Experiment Name: At_Far-red-induction_P Parameter: Plant Line Value: Columbia
  misc_feature: MA Experiment 20001451 PARAMETER Experiment Name: At_Far-red-induction_P Parameter: Timepoint (hr) Value: 24
  misc_feature: MA Experiment 20001451 PARAMETER Experiment Name: At_Far-red-induction_P Parameter: Tissue Value: Whole Plant
  misc_feature: MA Experiment ID: 20001906 Result: Down-regulated in Transcription
  misc_feature: MA Experiment 20001906 PARAMETER Experiment Name: At_Drought_Reproduction_P Parameter: Age (day) Value: 35
  misc_feature: MA Experiment 20001906 PARAMETER Experiment Name: At_Drought_Reproduction_P Parameter: Organism Value: A. thaliana
  misc_feature: MA Experiment 20001906 PARAMETER Experiment Name: At_Drought_Reproduction_P Parameter: Plant Line Value: WS
  misc_feature: MA Experiment 20001906 PARAMETER Experiment Name: At_Drought_Reproduction_P Parameter: Timepoint (day) Value: 5
  misc_feature: MA Experiment 20001906 PARAMETER Experiment Name: At_Drought_Reproduction_P Parameter: Tissue Value: Siliques
  misc_feature: MA Experiment 20001906 PARAMETER Experiment Name: At_Drought_Reproduction_P Parameter: Treatment Value: Drought vs. No Drought
tctttttttcctgagacttttccttgaatcctcttccctcctccttcttctctctctctcgtttctcaactaccgtctctctgcttcttctgttcccaaaaccggaaactttacttcgtggaattttcccttgtttctgaaatggaagacacaacatttaccaaagtgttcgttggaggattagcttgggaaacacacaaagtctctctcaggaattactttgaacagtttggtgacattgttgaagctgtcgttatcactgataaatctagtggtagatctaaaggctatggctttgttactttttgtgatccggaagcagctcagaaagcttgtgtagatccagctcctgttattgatggaagaagagctaattgtaatcttgctgcttttggtgttcagagatccaaaccttcttctcctattcatggacatgtaggaggaagaggcatgaaggtgactagccctttcaagacacactttgggaccgcggctactgctattccttccccacttccattctcccactacacacttccttacactaatccttttgggttctcttcatactcaatggattacaattaccccacgcagagctattacaatgtttatggaggggcaactgctcagcatccaatgtatggaagcggaccaatgactggtgtagcagcagcaccagcagcagggttctacccatatctccagtttgctgaaggaaatggacctgtcactggttatgctcccctccactaccccaaccacatgtttcactattctgctcccgggggaaactacccgcatcacaatggttcaccagtgtctcttgcaccttcaccagtcataccatcagtttgctttgcagttccacaggcttgaccatgaaggctcgtggttcatagttccatgatgctatgtaggggaccaattcatttaaatccttaaggcaaagctttgtttactactttcatccacatgcctctgaagtttcacaagacctgtggcctaaccatggttgcccttttccctttatgcttctaacccattagacaaagaagcccataatttggagtttgggcgtctttgcaagttctagttaagtctcacataggggtttaactaggaccatcttcatacacattactcatcttttcattttattcattgcattacctgctttctgaacgaaggtttcgttcaagatagcttgttcgagctgtagaagtaaacagttaccgtcttttgcacagtgcctcgcaaaggcaagcaattttgtagaaaaacttaaaaacttaggattggctgatcaacaagaaaggaaataaggatttcccgggaaaggcacaagaagtgaattgccaccacctggaagtgttgaagtagtgtgtgcaaaggtgtgcacactacttcacgctatatccattttaatgtgcagtcttaggattattagatctaggaccatgttgttacacattgtcttgtagtagaacgctagaacataaacttcctttgaggataaaggaattgctaacacatgtatattctcggtggctaagctttggagttatagccacacttgagctaacttagattaagatcatttttaagattcaaaatttagattgctcatcatatcttgaaccaaccccactaatggattgtggggttcttgcatttgcatgtatttttgcctcttgggagatattttggttccctttaggttcttctcataacaatcaaccaaaccagttgaccaaccatggttaggaatttcaggtgagaggtattcatcacctctttatctctcttttgtacttctttcctctatttcttcaagactaaaaactctctttttatgtaatttgttgttatatcttgtaagctgtgtgtttctgattctatgtaagaaaactaaaagctttcagtttccatcctcggtggttggaaaatgaaactgtgattgcaatattttactttgatctgatatataatcctcttgtatgaggttatgacaag

SEQ ID NO: 39186 - protein, 245 aa, Arabidopsis thaliana
  peptide (1)..(245): Ceres Seq. ID no. 13489530
  misc_feature (9)..(64): Pfam Name: RNA recognition motif. (a.k.a. RRM, RBD, or RNP domain) Pfam Description: RNA recognition motif. (a.k.a. RRM, RBD, or RNP
  misc_feature (9)..(64): Pfam Name: RNA recognition motif. (a.k.a. RRM, RBD, or RNP domain) Pfam Description: RNA recognition motif. (a.k.a. RRM, RBD, or RNP
  misc_feature (1)..(237): Homolog of NCBI NO: 23505939 NR Description: At1g20880/F9H16_14 [Arabidopsis thaliana]
  misc_feature (1)..(237): Homolog of NCBI NO: 18394923 NR Description: RNA recognition motif (RRM)-containing protein
  misc_feature (1)..(237): Homolog of NCBI NO: 15010636 NR Description: At1g20880/F9H16_14 [Arabidopsis thaliana]
  misc_feature (3)..(186): Homolog of NCBI NO: 25518372 NR Description: hypothetical protein F19G10.13 - Arabidopsis
  misc_feature (1)..(97): Homolog of NCBI NO: 15217552 NR Description: RNA recognition motif (RRM)-containing protein
  misc_feature (1)..(237): Homolog of NCBI NO: 23505939 NR Description: At1g20880/F9H16_14 [Arabidopsis thaliana]
  misc_feature (1)..(237): Homolog of NCBI NO: 15010636 NR Description: At1g20880/F9H16_14 [Arabidopsis thaliana]
  misc_feature (1)..(97): Homolog of NCBI NO: 15217552 NR Description: RNA recognition motif (RRM)-containing protein
  misc_feature (1)..(245): Homolog of NCBI NO: 14532532 NR Description: At1g33470/F10C21_14 [Arabidopsis thaliana]
  misc_feature (104)..(245): Homolog of NCBI NO: 30692876 NR Description: RRM-containing protein -related [Arabidopsis
  misc_feature (1)..(233): Homolog of NCBI NO: 34907334 NR Description: P0698A10.29 [Oryza sativa (japonica
  misc_feature (3)..(226): Homolog of NCBI NO: 18395177 NR Description: RNA recognition motif (RRM)-containing protein
  misc_feature (3)..(214): Homolog of NCBI NO: 34905758 NR Description: similar to RNA-binding protein
  misc_feature (3)..(186): Homolog of NCBI NO: 25518372 NR Description: hypothetical protein F19G10.13 - Arabidopsis
  misc_feature (1)..(237): Homolog of NCBI NO: 18394923 NR Description: RNA recognition motif (RRM)-containing protein
  misc_feature (3)..(214): Homolog of NCBI NO: 34905758 NR Description: similar to RNA-binding protein
  misc_feature (3)..(226): Homolog of NCBI NO: 18395177 NR Description: RNA recognition motif (RRM)-containing protein
  misc_feature (1)..(233): Homolog of NCBI NO: 34907334 NR Description: P0698A10.29 [Oryza sativa (japonica
  misc_feature (104)..(245): Homolog of NCBI NO: 30692876 NR Description: RRM-containing protein -related [Arabidopsis
  misc_feature (1)..(245): Homolog of NCBI NO: 14532532 NR Description: At1g33470/F10C21_14 [Arabidopsis thaliana]
MEDTTFTKVFVGGLAWETHKVSLRNYFEQFGDIVEAVVITDKSSGRSKGYGFVTFCDPEAAQKACVDPAPVIDGRRANCNLAAFGVQRSKPSSPIHGHVGGRGMKVTSPFKTHFGTAATAIPSPLPFSHYTLPYTNPFGFSSYSMDYNYPTQSYYNVYGGATAQHPMYGSGPMTGVAAAPAAGFYPYLQFAEGNGPVTGYAPLHYPNHMFHYSAPGGNYPHHNGSPVSLAPSPVIPSVCFAVPQA

SEQ ID NO: 39187 - protein, 142 aa, Arabidopsis thaliana
  peptide (1)..(142): Ceres Seq. ID no. 13489531
  misc_feature (1)..(142): Homolog of NCBI NO: 22330665 NR Description: RNA recognition motif (RRM)-containing protein
  misc_feature (1)..(134): Homolog of NCBI NO: 23505939 NR Description: At1g20880/F9H16_14 [Arabidopsis thaliana]
  misc_feature (1)..(134): Homolog of NCBI NO: 18394923 NR Description: RNA recognition motif (RRM)-containing protein
  misc_feature (1)..(134): Homolog of NCBI NO: 15010636 NR Description: At1g20880/F9H16_14 [Arabidopsis thaliana]
  misc_feature (1)..(83): Homolog of NCBI NO: 25518372 NR Description: hypothetical protein F19G10.13 - Arabidopsis
  misc_feature (1)..(111): Homolog of NCBI NO: 34905758 NR Description: similar to RNA-binding protein
  misc_feature (1)..(123): Homolog of NCBI NO: 18395177 NR Description: RNA recognition motif (RRM)-containing protein
  misc_feature (1)..(130): Homolog of NCBI NO: 34907334 NR Description: P0698A10.29 [Oryza sativa (japonica
  misc_feature (1)..(142): Homolog of NCBI NO: 30692876 NR Description: RRM-containing protein -related [Arabidopsis
  misc_feature (1)..(142): Homolog of NCBI NO: 14532532 NR Description: At1g33470/F10C21_14 [Arabidopsis thaliana]
  misc_feature (1)..(142): Homolog of NCBI NO: 22330665 NR Description: RNA recognition motif (RRM)-containing protein
  misc_feature (1)..(134): Homolog of NCBI NO: 23505939 NR Description: At1g20880/F9H16_14 [Arabidopsis thaliana]
  misc_feature (1)..(134): Homolog of NCBI NO: 18394923 NR Description: RNA recognition motif (RRM)-containing protein
  misc_feature (1)..(134): Homolog of NCBI NO: 15010636 NR Description: At1g20880/F9H16_14 [Arabidopsis thaliana]
  misc_feature (1)..(83): Homolog of NCBI NO: 25518372 NR Description: hypothetical protein F19G10.13 - Arabidopsis
  misc_feature (1)..(111): Homolog of NCBI NO: 34905758 NR Description: similar to RNA-binding protein
  misc_feature (1)..(123): Homolog of NCBI NO: 18395177 NR Description: RNA recognition motif (RRM)-containing protein
  misc_feature (1)..(130): Homolog of NCBI NO: 34907334 NR Description: P0698A10.29 [Oryza sativa (japonica
  misc_feature (1)..(142): Homolog of NCBI NO: 30692876 NR Description: RRM-containing protein -related [Arabidopsis
  misc_feature (1)..(142): Homolog of NCBI NO: 14532532 NR Description: At1g33470/F10C21_14 [Arabidopsis thaliana]
MKVTSPFKTHFGTAATAIPSPLPFSHYTLPYTNPFGFSSYSMDYNYPTQSYYNVYGGATAQHPMYGSGPMTGVAAAPAAGFYPYLQFAEGNGPVTGYAPLHYPNHMFHYSAPGGNYPHHNGSPVSLAPSPVIPSVCFAVPQA

SEQ ID NO: 39188 - DNA, 1419 bp, Arabidopsis thaliana
  misc_feature (1)..(1419): Ceres Seq. ID no. 12325621
  misc_feature: MA Experiment ID: 108576 Result: Up-regulated in Transcription
  misc_feature: MA Experiment 108576 PARAMETER Experiment Name: At_42deg_Heat_cDNA_P Parameter: Temperature (deg C) Value: 42 vs. 22
  misc_feature: MA Experiment 108576 PARAMETER Experiment Name: At_42deg_Heat_cDNA_P Parameter: Timepoint (hr) Value: 1
  misc_feature: MA Experiment 108576 PARAMETER Experiment Name: At_42deg_Heat_cDNA_P Parameter: Tissue Value: Aerial
  misc_feature: MA Experiment ID: 108577 Result: Up-regulated in Transcription
  misc_feature: MA Experiment 108577 PARAMETER Experiment Name: At_42deg_Heat_cDNA_P Parameter: Temperature (deg C) Value: 42 vs. 22
  misc_feature: MA Experiment 108577 PARAMETER Experiment Name: At_42deg_Heat_cDNA_P Parameter: Timepoint (hr) Value: 6
  misc_feature: MA Experiment 108577 PARAMETER Experiment Name: At_42deg_Heat_cDNA_P Parameter: Tissue Value: Aerial
  misc_feature: MA Experiment ID: 108595 Result: Down-regulated in Transcription
  misc_feature: MA Experiment 108595 PARAMETER Experiment Name: At_Ler-pi_Ovule_cDNA_P Parameter: Plant Line Value: null
  misc_feature: MA Experiment ID: 20000093 Result: Up-regulated in Transcription
  misc_feature: MA Experiment 20000093 PARAMETER Experiment Name: At_42deg_Heat_cDNA_P Parameter: Temperature (deg C) Value: 42 vs. 22
  misc_feature: MA Experiment 20000093 PARAMETER Experiment Name: At_42deg_Heat_cDNA_P Parameter: Timepoint (hr) Value: 0.5
  misc_feature: MA Experiment 20000093 PARAMETER Experiment Name: At_42deg_Heat_cDNA_P Parameter: Tissue Value: Aerial
  misc_feature: MA Experiment ID: 20000112 Result: Up-regulated in Transcription
  misc_feature: MA Experiment 20000112 PARAMETER Experiment Name: At_42deg_Heat_cDNA_P Parameter: Temperature (deg C) Value: 42 vs. 22
  misc_feature: MA Experiment 20000112 PARAMETER Experiment Name: At_42deg_Heat_cDNA_P Parameter: Timepoint (hr) Value: 2
  misc_feature: MA Experiment 20000112 PARAMETER Experiment Name: At_42deg_Heat_cDNA_P Parameter: Tissue Value: Aerial
  misc_feature: MA Experiment ID: 20000144 Result: Up-regulated in Transcription
  misc_feature: MA Experiment 20000144 PARAMETER Experiment Name: At_42deg_Heat_cDNA_P Parameter: Temperature (deg C) Value: 42 vs. 22
  misc_feature: MA Experiment 20000144 PARAMETER Experiment Name: At_42deg_Heat_cDNA_P Parameter: Timepoint (hr) Value: 1
  misc_feature: MA Experiment 20000144 PARAMETER Experiment Name: At_42deg_Heat_cDNA_P Parameter: Tissue Value: Aerial
  misc_feature: MA Experiment ID: 20000171 Result: Up-regulated in Transcription
  misc_feature: MA Experiment 20000171 PARAMETER Experiment Name: At_42deg_Heat_P Parameter: Age (day) Value: 14
  misc_feature: MA Experiment 20000171 PARAMETER Experiment Name: At_42deg_Heat_P Parameter: Organism Value: A. thaliana
  misc_feature: MA Experiment 20000171 PARAMETER Experiment Name: At_42deg_Heat_P Parameter: Plant Line Value: WS
  misc_feature: MA Experiment 20000171 PARAMETER Experiment Name: At_42deg_Heat_P Parameter: Temperature (deg C) Value: 42 vs. 22
  misc_feature: MA Experiment 20000171 PARAMETER Experiment Name: At_42deg_Heat_P Parameter: Timepoint (hr) Value: 1
  misc_feature: MA Experiment 20000171 PARAMETER Experiment Name: At_42deg_Heat_P Parameter: Tissue Value: Aerial
  misc_feature: MA Experiment ID: 20000173 Result: Up-regulated in Transcription
  misc_feature: MA Experiment 20000173 PARAMETER Experiment Name: At_42deg_Heat_P Parameter: Age (day) Value: 14
  misc_feature: MA Experiment 20000173 PARAMETER Experiment Name: At_42deg_Heat_P Parameter: Organism Value: A. thaliana
  misc_feature: MA Experiment 20000173 PARAMETER Experiment Name: At_42deg_Heat_P Parameter: Plant Line Value: WS
  misc_feature: MA Experiment 20000173 PARAMETER Experiment Name: At_42deg_Heat_P Parameter: Temperature (deg C) Value: 42 vs. 22
  misc_feature: MA Experiment 20000173 PARAMETER Experiment Name: At_42deg_Heat_P Parameter: Timepoint (hr) Value: 6
  misc_feature: MA Experiment 20000173 PARAMETER Experiment Name: At_42deg_Heat_P Parameter: Tissue Value: Aerial
  misc_feature: MA Experiment ID: 20000794 Result: Up-regulated in Transcription
  misc_feature: MA Experiment 20000794 PARAMETER Experiment Name: At_Petals_P Parameter: Age (day) Value: 23-25 days
  misc_feature: MA Experiment 20000794 PARAMETER Experiment Name: At_Petals_P Parameter: Plant Line Value: WS
  misc_feature: MA Experiment 20000794 PARAMETER Experiment Name: At_Petals_P Parameter: Tissue Value: Petals vs. Whole plant
  misc_feature: MA Experiment ID: 20001910 Result: Up-regulated in Transcription
  misc_feature: MA Experiment 20001910 PARAMETER Experiment Name: At_Drought_Reproduction_P Parameter: Age (day) Value: 37
  misc_feature: MA Experiment 20001910 PARAMETER Experiment Name: At_Drought_Reproduction_P Parameter: Organism Value: A. thaliana
  misc_feature: MA Experiment 20001910 PARAMETER Experiment Name: At_Drought_Reproduction_P Parameter: Plant Line Value: WS
  misc_feature: MA Experiment 20001910 PARAMETER Experiment Name: At_Drought_Reproduction_P Parameter: Timepoint (day) Value: 7
  misc_feature: MA Experiment 20001910 PARAMETER Experiment Name: At_Drought_Reproduction_P Parameter: Tissue Value: Flowers
  misc_feature: MA Experiment 20001910 PARAMETER Experiment Name: At_Drought_Reproduction_P Parameter: Treatment Value: Drought vs. No Drought
cttttctattttattggcttctcaaaacgaaataacgaaatcgcctcctcttcttctcctcctcgacctggaaatcaatctttcgccgccgagttcttctctctgcggcggagaatcaattagcaatctccaggtttttcacttcaaaacctttccttttattatcaaattttgttcctttttagctttaggatttcatatttctagaacccagaagaaactcttgcccataacatctctatatttattggtatagaattaggtgagggaaaagaggatggctttgatcggaaaatccgagagattctctgctgattttgtgatgggtggtgctgcagccattgttgccaaatctgcagctgctccaatcgaaagggtgaagcttttactgcagaatcaaggggagatgataaagactggacatctcataagaccttacactggtttgggtaattgctttaccagaatctatagagaagaaggtgttttgtccttttggagaggaaaccaagccaatgtcatacgatatttccctacacaggcttccaactttgcatttaaaggttacttcaagaaccttcttggatgttcgaaagagaaagatggttacttgaagtggtttgctggaaatgtagcttcgggaagtgctgctggagcaacaacttccttgtttctgtaccatttggattatgcgcggacccgtttaggcactgatgcaaaggaatgttctgttaatggcaagagacagtttaaagggatgatcgatgtgtatcgtaaaactttgtcaagtgacggtattaaaggtctttaccgtggatttggtgtgtcaatagtgggaatcactctttaccgaggaatgtattttgggatgtacgacaccatcaaacccattgtgttagtcggttccttagagggaaacttcttggctagttttctattgggttggagtattactacctctgcaggcgtcattgcttacccttttgacacacttaggaggagaatgatgcttacatcaggacaacctgttaaataccggaacaccattcatgccttaagagagatattgaagtcggaagggttctatgcgctatatagaggagttactgcgaacatgcttcttggagtagcaggagcaggagtgcttgcgggatatgatcagcttcaccagattgcttataagcattgggttcagtagttttgaaccaaacccgaaacgatgacaatgaaagctgagctcaaaaagagaaggttagtaaacaccaagaagtctcacttgctttccaatgtattgtgttagttaacagaatctcggaatcattaaccgattgaaccagcagaagatagggaaaattgttcatagttcttgtgcagtaacattgttatatcaataatccaagaaaggcctatttgattttg

SEQ ID NO: 39189 - protein, 306 aa, Arabidopsis thaliana; identical to SEQ ID NO: 23275
  peptide (1)..(306): Ceres Seq. ID no. 12325622
  misc_feature (10)..(301): Homolog of NCBI NO: 3334115 NR Description: ADP,ATP carrier protein 1, mitochondrial (ADP/ATP translocase 1) (Adenine nucleotide translocator 1) (ANT
  misc_feature (10)..(301): Homolog of NCBI NO: 2780194 NR Description: adenine nucleotide translocator [Lupinus albus]
  misc_feature (8)..(301): Homolog of NCBI NO: 113460 NR Description: ADP,ATP carrier protein 2, mitochondrial (ADP/ATP translocase 2) (Adenine nucleotide translocator 2) (ANT
  misc_feature (8)..(301): Homolog of NCBI NO: 485517 NR Description: ADP,ATP carrier protein - rice
  misc_feature (8)..(301): Homolog of NCBI NO: 399015 NR Description: ADP,ATP carrier protein, mitochondrial precursor
  misc_feature (10)..(299): Homolog of NCBI NO: 15235280 NR Description: mitochondrial ADP,ATP carrier protein, putative
  misc_feature (6)..(301): Homolog of NCBI NO: 19112115 NR Description: adp,atp carrier protein [Schizosaccharomyces
  misc_feature (1)..(304): Homolog of NCBI NO: 11357161 NR Description: ADP/ATP translocase-like protein - Arabidopsis
  misc_feature (16)..(306): Homolog of NCBI NO: 21593088 NR Description: ADP/ATP translocase-like protein [Arabidopsis
  misc_feature (1)..(306): Homolog of NCBI NO: 18418286 NR Description: ADP/ATP translocase-like protein

SEQ ID NO: 39190 - protein, 291 aa, Arabidopsis thaliana; identical to SEQ ID NO: 23276
  peptide (1)..(291): Ceres Seq. ID no. 12325623
  misc_feature (1)..(286): Homolog of NCBI NO: 3334115 NR Description: ADP,ATP carrier protein 1, mitochondrial (ADP/ATP translocase 1) (Adenine nucleotide translocator 1) (ANT
  misc_feature (1)..(286): Homolog of NCBI NO: 2780194 NR Description: adenine nucleotide translocator [Lupinus albus]
  misc_feature (1)..(286): Homolog of NCBI NO: 113460 NR Description: ADP,ATP carrier protein 2, mitochondrial (ADP/ATP translocase 2) (Adenine nucleotide translocator 2) (ANT
  misc_feature (1)..(286): Homolog of NCBI NO: 485517 NR Description: ADP,ATP carrier protein - rice
  misc_feature (1)..(286): Homolog of NCBI NO: 399015 NR Description: ADP,ATP carrier protein, mitochondrial precursor
  misc_feature (1)..(284): Homolog of NCBI NO: 15235280 NR Description: mitochondrial ADP,ATP carrier protein, putative
  misc_feature (1)..(286): Homolog of NCBI NO: 19112115 NR Description: adp,atp carrier protein [Schizosaccharomyces
  misc_feature (1)..(289): Homolog of NCBI NO: 11357161 NR Description: ADP/ATP translocase-like protein - Arabidopsis
  misc_feature (1)..(291): Homolog of NCBI NO: 21593088 NR Description: ADP/ATP translocase-like protein [Arabidopsis
  misc_feature (1)..(291): Homolog of NCBI NO: 18418286 NR Description: ADP/ATP translocase-like protein

SEQ ID NO: 39191 - protein, 263 aa, Arabidopsis thaliana; identical to SEQ ID NO: 23277
  peptide (1)..(263): Ceres Seq. ID no. 12325624
  misc_feature (1)..(258): Homolog of NCBI NO: 3334115 NR Description: ADP,ATP carrier protein 1, mitochondrial (ADP/ATP translocase 1) (Adenine nucleotide translocator 1) (ANT
  misc_feature (1)..(258): Homolog of NCBI NO: 2780194 NR Description: adenine nucleotide translocator [Lupinus albus]
  misc_feature (1)..(258): Homolog of NCBI NO: 113460 NR Description: ADP,ATP carrier protein 2, mitochondrial (ADP/ATP translocase 2) (Adenine nucleotide translocator 2) (ANT
  misc_feature (1)..(258): Homolog of NCBI NO: 485517 NR Description: ADP,ATP carrier protein - rice
  misc_feature (1)..(258): Homolog of NCBI NO: 399015 NR Description: ADP,ATP carrier protein, mitochondrial precursor
  misc_feature (1)..(256): Homolog of NCBI NO: 15235280 NR Description: mitochondrial ADP,ATP carrier protein, putative
  misc_feature (1)..(258): Homolog of NCBI NO: 19112115 NR Description: adp,atp carrier protein [Schizosaccharomyces
  misc_feature (1)..(261): Homolog of NCBI NO: 11357161 NR Description: ADP/ATP translocase-like protein - Arabidopsis
  misc_feature (1)..(263): Homolog of NCBI NO: 21593088 NR Description: ADP/ATP translocase-like protein [Arabidopsis
  misc_feature (1)..(263): Homolog of NCBI NO: 18418286 NR Description: ADP/ATP translocase-like protein

SEQ ID NO: 39192 - DNA, 885 bp, Arabidopsis thaliana
  misc_feature (1)..(885): Ceres Seq. ID no. 12558291
  misc_feature: MA Experiment ID: 20000113 Result: Down-regulated in Transcription
  misc_feature: MA Experiment 20000113 PARAMETER Experiment Name: At_42deg_Heat_cDNA_P Parameter: Temperature (deg C) Value: 42 vs. 22
  misc_feature: MA Experiment 20000113 PARAMETER Experiment Name: At_42deg_Heat_cDNA_P Parameter: Timepoint (hr) Value: 8
  misc_feature: MA Experiment 20000113 PARAMETER Experiment Name: At_42deg_Heat_cDNA_P Parameter: Tissue Value: Aerial
  misc_feature: MA Experiment ID: 20000173 Result: Down-regulated in Transcription
  misc_feature: MA Experiment 20000173 PARAMETER Experiment Name: At_42deg_Heat_P Parameter: Age (day) Value: 14
  misc_feature: MA Experiment 20000173 PARAMETER Experiment Name: At_42deg_Heat_P Parameter: Organism Value: A. thaliana
  misc_feature: MA Experiment 20000173 PARAMETER Experiment Name: At_42deg_Heat_P Parameter: Plant Line Value: WS
  misc_feature: MA Experiment 20000173 PARAMETER Experiment Name: At_42deg_Heat_P Parameter: Temperature (deg C) Value: 42 vs. 22
  misc_feature: MA Experiment 20000173 PARAMETER Experiment Name: At_42deg_Heat_P Parameter: Timepoint (hr) Value: 6
  misc_feature: MA Experiment 20000173 PARAMETER Experiment Name: At_42deg_Heat_P Parameter: Tissue Value: Aerial
  misc_feature: MA Experiment ID: 20000439 Result: Up-regulated in Transcription
  misc_feature: MA Experiment 20000439 PARAMETER Experiment Name: At_Roots__P Parameter: Age (day) Value: 14 vs. 21
  misc_feature: MA Experiment 20000439 PARAMETER Experiment Name: At_Roots__P Parameter: Organism Value: A. thaliana
  misc_feature: MA Experiment 20000439 PARAMETER Experiment Name: At_Roots__P Parameter: Tissue Value: Roots vs. Whole Plant
  misc_feature: MA Experiment ID: 20000495 Result: Up-regulated in Transcription
  misc_feature: MA Experiment 20000495 PARAMETER Experiment Name: At_Guard_Cells_P Parameter: Harvest Date Value: 8/2/2002
  misc_feature: MA Experiment 20000495 PARAMETER Experiment Name: At_Guard_Cells_P Parameter: Organism Value: A. thaliana
  misc_feature: MA Experiment 20000495 PARAMETER Experiment Name: At_Guard_Cells_P Parameter: Tissue Value: Guard Cells vs. Leaves
  misc_feature: MA Experiment ID: 20000496 Result: Up-regulated in Transcription
  misc_feature: MA Experiment 20000496 PARAMETER Experiment Name: At_Guard_Cells_P Parameter: Harvest Date Value: 7/19/2002
  misc_feature: MA Experiment 20000496 PARAMETER Experiment Name: At_Guard_Cells_P Parameter: Organism Value: Canola
  misc_feature: MA Experiment 20000496 PARAMETER Experiment Name: At_Guard_Cells_P Parameter: Tissue Value: Guard Cells vs. Leaves
  misc_feature: MA Experiment ID: 20001451 Result: Up-regulated in Transcription
  misc_feature: MA Experiment 20001451 PARAMETER Experiment Name: At_Far-red-induction_P Parameter: Age (day) Value: 7
  misc_feature: MA Experiment 20001451 PARAMETER Experiment Name: At_Far-red-induction_P Parameter: Light Value: Far-red vs. White
  misc_feature: MA Experiment 20001451 PARAMETER Experiment Name: At_Far-red-induction_P Parameter: Organism Value: A. thaliana
  misc_feature: MA Experiment 20001451 PARAMETER Experiment Name: At_Far-red-induction_P Parameter: Plant Line Value: Columbia
  misc_feature: MA Experiment 20001451 PARAMETER Experiment Name: At_Far-red-induction_P Parameter: Timepoint (hr) Value: 24
  misc_feature: MA Experiment 20001451 PARAMETER Experiment Name: At_Far-red-induction_P Parameter: Tissue Value: Whole Plant
  misc_feature: MA Experiment ID: 20001905 Result: Down-regulated in Transcription
  misc_feature: MA Experiment 20001905 PARAMETER Experiment Name: At_Drought_Reproduction_P Parameter: Age (day) Value: 40
  misc_feature: MA Experiment 20001905 PARAMETER Experiment Name: At_Drought_Reproduction_P Parameter: Organism Value: A. thaliana
  misc_feature: MA Experiment 20001905 PARAMETER Experiment Name: At_Drought_Reproduction_P Parameter: Plant Line Value: WS
  misc_feature: MA Experiment 20001905 PARAMETER Experiment Name: At_Drought_Reproduction_P Parameter: Timepoint (day) Value: 10
  misc_feature: MA Experiment 20001905 PARAMETER Experiment Name: At_Drought_Reproduction_P Parameter: Tissue Value: Rosettes
  misc_feature: MA Experiment 20001905 PARAMETER Experiment Name: At_Drought_Reproduction_P Parameter: Treatment Value: Drought vs. No Drought
attagagagatctgatctttccccaattccataacccgaaaaatggaagaaatcgccgataaaaccttcttccgatactgtctcctcactcttattttcgccggcccaccaaccgccgtccttctgaaattcctccaagctccttacggtaaacacaaccgtaccggatggggtcccaccgtatctccaccgattgcttggttcgtcatggagagcccaaccttgtggctcactctcctcctcttcccctttggtcgtcacgctctcaaccctaaatctctacttctattctctccttatctcattcattacttccaccgcaccatcatttaccctcttcgcctcttccgcagctccttccccgccggtaaaaacggatttccgatcaccatcgccgccttggctttcacctttaatctcctcaatggttatatccaggcgaggtgggtttcgcattacaaggatgactacgaagacggaaactggttctggtggcggtttgttatcggtatggtggttttcataaccggcatgtatataaatatcacgtcggaccggactttggtacgattgaagaaagagaaccggggaggttatgtgataccgagaggaggctggttcgagttggtaagctgtccgaattattttggagaggcgattgagtggttgggctgggctgttatgacttggtcttgggccggtattggattttttctgtacacgtgttccaatttgtttccgcgtgcacgtgcgagtcacaagtggtacattgccaagttcaaggaagagtatcccaagactcgtaaagctgttattccttttgtgtactgagaattgagaaagttgaaaactagtttatcatatgttatgtgtcaatttgtttcc

SEQ ID NO: 39193 - protein, 262 aa, Arabidopsis thaliana
  peptide (1)..(262): Ceres Seq. ID no. 12558292
  misc_feature (111)..(262): Pfam Name: 3-oxo-5-alpha-steroid 4-dehydrogenase Pfam Description: 3-oxo-5-alpha-steroid 4-dehydrogenase
  misc_feature (5)..(262): Homolog of NCBI NO: 23476464 NR Description: steroid 5-alpha-reductase [Gossypium hirsutum]
  misc_feature (1)..(262): Homolog of NCBI NO: 1280611 NR Description: steroid reductase DET2 [Arabidopsis thaliana]
  misc_feature (1)..(262): Homolog of NCBI NO: 15224430 NR Description: 3-oxo-5-alpha-steroid 4-dehydrogenase
MEEIADKTFFRYCLLTLIFAGPPTAVLLKFLQAPYGKHNRTGWGPTVSPPIAWFVMESPTLWLTLLLFPFGRHALNPKSLLLFSPYLIHYFHRTIIYPLRLFRSSFPAGKNGFPITIAALAFTFNLLNGYIQARWVSHYKDDYEDGNWFWWRFVIGMVVFITGMYINITSDRTLVRLKKENRGGYVIPRGGWFELVSCPNYFGEAIEWLGWAVMTWSWAGIGFFLYTCSNLFPRARASHKWYIAKFKEEYPKTRKAVIPFVY

SEQ ID NO: 39194 - protein, 207 aa, Arabidopsis thaliana
  peptide (1)..(207): Ceres Seq. ID no. 12558293
  misc_feature (56)..(207): Pfam Name: 3-oxo-5-alpha-steroid 4-dehydrogenase Pfam Description: 3-oxo-5-alpha-steroid 4-dehydrogenase
  misc_feature (1)..(207): Homolog of NCBI NO: 23476464 NR Description: steroid 5-alpha-reductase [Gossypium hirsutum]
  misc_feature (1)..(207): Homolog of NCBI NO: 1280611 NR Description: steroid reductase DET2 [Arabidopsis thaliana]
  misc_feature (1)..(207): Homolog of NCBI NO: 15224430 NR Description: 3-oxo-5-alpha-steroid 4-dehydrogenase
MESPTLWLTLLLFPFGRHALNPKSLLLFSPYLIHYFHRTIIYPLRLFRSSFPAGKNGFPITIAALAFTFNLLNGYIQARWVSHYKDDYEDGNWFWWRFVIGMVVFITGMYINITSDRTLVRLKKENRGGYVIPRGGWFELVSCPNYFGEAIEWLGWAVMTWSWAGIGFFLYTCSNLFPRARASHKWYIAKFKEEYPKTRKAVIPFVY

SEQ ID NO: 39195 - DNA, 1251 bp, Arabidopsis thaliana
  misc_feature (1)..(1251): Ceres Seq. ID no. 13488723
  misc_feature: MA Experiment ID: 108585 Result: Up-regulated in Transcription
  misc_feature: MA Experiment 108585 PARAMETER Experiment Name: At_5mM_NaNP_cDNA_P Parameter: Timepoint (hr) Value: 6
  misc_feature: MA Experiment 108585 PARAMETER Experiment Name: At_5mM_NaNP_cDNA_P Parameter: Tissue Value: Aerial
  misc_feature: MA Experiment 108585 PARAMETER Experiment Name: At_5mM_NaNP_cDNA_P Parameter: Treatment Value: null
  misc_feature: MA Experiment ID: 108668 Result: Up-regulated in Transcription
  misc_feature: MA Experiment 108668 PARAMETER Experiment Name: At_2mM_SA_cDNA_P Parameter: Plant Line Value: WS
  misc_feature: MA Experiment 108668 PARAMETER Experiment Name: At_2mM_SA_cDNA_P Parameter: Timepoint (hr) Value: 6
  misc_feature: MA Experiment 108668 PARAMETER Experiment Name: At_2mM_SA_cDNA_P Parameter: Treatment Value: 2mM SA vs. No Treatment
  misc_feature: MA Experiment ID: 20000112 Result: Up-regulated in Transcription
  misc_feature: MA Experiment 20000112 PARAMETER Experiment Name: At_42deg_Heat_cDNA_P Parameter: Temperature (deg C) Value: 42 vs. 22
  misc_feature: MA Experiment 20000112 PARAMETER Experiment Name: At_42deg_Heat_cDNA_P Parameter: Timepoint (hr) Value: 2
  misc_feature: MA Experiment 20000112 PARAMETER Experiment Name: At_42deg_Heat_cDNA_P Parameter: Tissue Value: Aerial
  misc_feature: MA Experiment ID: 20000144 Result: Up-regulated in Transcription
  misc_feature: MA Experiment 20000144 PARAMETER Experiment Name: At_42deg_Heat_cDNA_P Parameter: Temperature (deg C) Value: 42 vs. 22
  misc_feature: MA Experiment 20000144 PARAMETER Experiment Name: At_42deg_Heat_cDNA_P Parameter: Timepoint (hr) Value: 1
  misc_feature: MA Experiment 20000144 PARAMETER Experiment Name: At_42deg_Heat_cDNA_P Parameter: Tissue Value: Aerial
  misc_feature: MA Experiment ID: 20000182 Result: Up-regulated in Transcription
  misc_feature: MA Experiment 20000182 PARAMETER Experiment Name: At_2mM_SA_P Parameter: Age (day) Value: 14
  misc_feature: MA Experiment 20000182 PARAMETER Experiment Name: At_2mM_SA_P Parameter: Organism Value: A. thaliana
  misc_feature: MA Experiment 20000182 PARAMETER Experiment Name: At_2mM_SA_P Parameter: Plant Line Value: WS
  misc_feature: MA Experiment 20000182 PARAMETER Experiment Name: At_2mM_SA_P Parameter: Timepoint (hr) Value: 6
  misc_feature: MA Experiment 20000182 PARAMETER Experiment Name: At_2mM_SA_P Parameter: Tissue Value: Aerial
  misc_feature: MA Experiment 20000182 PARAMETER Experiment Name: At_2mM_SA_P Parameter: Treatment Value: 2mM SA vs. No Treatment
  misc_feature: MA Experiment ID: 20000235 Result: Down-regulated in Transcription
  misc_feature: MA Experiment 20000235 PARAMETER Experiment Name: At_Siliques_P Parameter: Age (day) Value: 21
  misc_feature: MA Experiment 20000235 PARAMETER Experiment Name: At_Siliques_P Parameter: Organism Value: A. thaliana
  misc_feature: MA Experiment 20000235 PARAMETER Experiment Name: At_Siliques_P Parameter: Plant Line Value: WS
  misc_feature: MA Experiment 20000235 PARAMETER Experiment Name: At_Siliques_P Parameter: Tissue Value: 5-10mm Siliques vs. Whole Plant
  misc_feature: MA Experiment ID: 20000264 Result: Down-regulated in Transcription
  misc_feature: MA Experiment 20000264 PARAMETER Experiment Name: At_Open_Flower_P Parameter: Age (day) Value: 21
  misc_feature: MA Experiment 20000264 PARAMETER Experiment Name: At_Open_Flower_P Parameter: Plant Line Value: WS
  misc_feature: MA Experiment 20000264 PARAMETER Experiment Name: At_Open_Flower_P Parameter: Tissue Value: Open Flower vs. Whole Plant
  misc_feature: MA Experiment ID: 20000286 Result: Down-regulated in Transcription
  misc_feature: MA Experiment 20000286 PARAMETER Experiment Name: At_Open_Flower_P Parameter: Age (day) Value: 21
  misc_feature: MA Experiment 20000286 PARAMETER Experiment Name: At_Open_Flower_P Parameter: Plant Line Value: WS
  misc_feature: MA Experiment 20000286 PARAMETER Experiment Name: At_Open_Flower_P Parameter: Tissue Value: Half Open vs. Whole Plant
  misc_feature: MA Experiment ID: 20000438 Result: Down-regulated in Transcription
  misc_feature: MA Experiment 20000438 PARAMETER Experiment Name: At_Shoots__P Parameter: Age (day) Value: 14
  misc_feature: MA Experiment 20000438 PARAMETER Experiment Name: At_Shoots__P Parameter: Tissue Value: Shoots vs. Whole Plant
  misc_feature: MA Experiment ID: 20000439 Result: Down-regulated in Transcription
  misc_feature: MA Experiment 20000439 PARAMETER Experiment Name: At_Roots__P Parameter: Age (day) Value: 14 vs. 21
  misc_feature: MA Experiment 20000439 PARAMETER Experiment Name: At_Roots__P Parameter: Organism Value: A. thaliana
  misc_feature: MA Experiment 20000439 PARAMETER Experiment Name: At_Roots__P Parameter: Tissue Value: Roots vs. Whole Plant
  misc_feature: MA Experiment ID: 20001247 Result: Up-regulated in Transcription
  misc_feature: MA Experiment 20001247 PARAMETER Experiment Name: At_Far-red-induction_P Parameter: Age (day) Value: 7
  misc_feature: MA Experiment 20001247 PARAMETER Experiment Name: At_Far-red-induction_P Parameter: Light Value: Far-red vs. White
  misc_feature: MA Experiment 20001247 PARAMETER Experiment Name: At_Far-red-induction_P Parameter: Organism Value: A. thaliana
  misc_feature: MA Experiment 20001247 PARAMETER Experiment Name: At_Far-red-induction_P Parameter: Plant Line Value: Columbia
  misc_feature: MA Experiment 20001247 PARAMETER Experiment Name: At_Far-red-induction_P Parameter: Timepoint (hr) Value: 1
  misc_feature: MA Experiment 20001247 PARAMETER Experiment Name: At_Far-red-induction_P Parameter: Tissue Value: Whole Plant
  misc_feature: MA Experiment ID: 20001248 Result: Up-regulated in Transcription
  misc_feature: MA Experiment 20001248 PARAMETER Experiment Name: At_Far-red-induction_P Parameter: Age (day) Value: 7
  misc_feature: MA Experiment 20001248 PARAMETER Experiment Name: At_Far-red-induction_P Parameter: Light Value: Far-red vs. White
  misc_feature: MA Experiment 20001248 PARAMETER Experiment Name: At_Far-red-induction_P Parameter: Organism Value: A. thaliana
  misc_feature: MA Experiment 20001248 PARAMETER Experiment Name: At_Far-red-induction_P Parameter: Plant Line Value: Columbia
  misc_feature: MA Experiment 20001248 PARAMETER Experiment Name: At_Far-red-induction_P Parameter: Timepoint (hr) Value: 4
  misc_feature: MA Experiment 20001248 PARAMETER Experiment Name: At_Far-red-induction_P Parameter: Tissue Value: Whole Plant
aaagaaagaaagaaaaaaaagaagagaaacggccgaatcttcataaattccgccatctgttaagctcaatcgccgcctaaactccggcgactctctcgaagatatttggtgattgaggtgactcggaagagagtgagagagagagatggatgatagaggaggatcgttcgtagcagtgagaaggatttcacaaggtctagaacgaggaagtgtttatcattcttcttctgctgaggttgtagctggatcggcagcgtggttaggccgtggcctttcctgtgtttgtgttcagggtagagacggtgaccctcgtccttcatttgatctaacgcctgctcaggaggaatgcctgcagaggttgcaaagccgcattgatgttgcttatgacagctcaatacctcagcatcaggaagctctaaaggatctttggaaacttgcatttcctgaagaagagctacacggaattgtatctgatcagtggaaggaaatgggttggcagggaaaagatccatcgacagattttaggggtggtggttttatttctctcgaaaacttgttgtacttcgctaggaaattcccgaaatctttccacggccttctgcggaaacaggttggcgatcgttctgtgtgggaatacccctttgctgttgctggcatcaatataacattcatgctcatccagatgcttgaccttgaagcagtgaaaccacgaagtattgttggggaaacatttctaagattcctttcggtgaacgagtctgcgtttgaccttctttattgcattgccttcaagctaatggatcagcaatggctatccatgcgtgcttcatacatggagtttaacactgtgatgaaatcaacaaggcggcaactggagagagagattatgattgaagacattacaagtctcgaagatttgccatcatacagtcttctcagtcaatagcaaatagcttaccaaaaactactttgtaagtagaaagatctaacagctcagaaaccctatatcaaagctaaaacaacagcagagcaagtaagcaagcaaaaaagaagacaaggtttctctctctctcgctcttcactccatcttcctcgatattagtgttggttccatgaaatttgggttgttatttctatgaaaccagggtcagattttgtttcttatggggtcagattttctaacttgtggtgcttgtaaaacgttgttggttagttggtgttttgggctaataaatcatttggttacatttc

SEQ ID NO: 39196 - protein, 266 aa, Arabidopsis thaliana
  peptide (1)..(266): Ceres Seq. ID no. 13488724
  misc_feature (85)..(246): Pfam Name: Protein of unknown function, DUF609 Pfam Description: Protein of unknown function, DUF609
  misc_feature (29)..(264): Homolog of NCBI NO: 18396599 NR Description: expressed protein [Arabidopsis thaliana]
  misc_feature (28)..(266): Homolog of NCBI NO: 15218859 NR Description: hypothetical protein [Arabidopsis thaliana]
  misc_feature (33)..(265): Homolog of NCBI NO: 18408759 NR Description: expressed protein [Arabidopsis thaliana]
  misc_feature (1)..(266): Homolog of NCBI NO: 38345956 NR Description: OSJNBb0038F03.14 [Oryza sativa (japonica
  misc_feature (1)..(266): Homolog of NCBI NO: 14140119 NR Description: putative protein [Oryza sativa]
  misc_feature (1)..(266): Homolog of NCBI NO: 7485547 NR Description: hypothetical protein At2g44770 [imported] -
  misc_feature (1)..(266): Homolog of NCBI NO: 15810014 NR Description: At2g44770/F16B22.26 [Arabidopsis thaliana]
  misc_feature (1)..(266): Homolog of NCBI NO: 18406626 NR Description: expressed protein [Arabidopsis thaliana]
  misc_feature (1)..(266): Homolog of NCBI NO: 11288393 NR Description: hypothetical protein F27H5.50 - Arabidopsis
  misc_feature (1)..(266): Homolog of NCBI NO: 18411543 NR Description: expressed protein [Arabidopsis thaliana]
MDDRGGSFVAVRRISQGLERGSVYHSSSAEVVAGSAAWLGRGLSCVCVQGRDGDPRPSFDLTPAQEECLQRLQSRIDVAYDSSIPQHQEALKDLWKLAFPEEELHGIVSDQWKEMGWQGKDPSTDFRGGGFISLENLLYFARKFPKSFHGLLRKQVGDRSVWEYPFAVAGINITFMLIQMLDLEAVKPRSIVGETFLRFLSVNESAFDLLYCIAFKLMDQQWLSMRASYMEFNTVMKSTRRQLEREIMIEDITSLEDLPSYSLLSQ

SEQ ID NO: 39197 - protein, 152 aa, Arabidopsis thaliana
  peptide (1)..(152): Ceres Seq. ID no. 13488725
  misc_feature (1)..(132): Pfam Name: Protein of unknown function, DUF609 Pfam Description: Protein of unknown function, DUF609
  misc_feature (1)..(150): Homolog of NCBI NO: 18396599 NR Description: expressed protein [Arabidopsis thaliana]
  misc_feature (1)..(152): Homolog of NCBI NO: 15218859 NR Description: hypothetical protein [Arabidopsis thaliana]
  misc_feature (1)..(151): Homolog of NCBI NO: 18408759 NR Description: expressed protein [Arabidopsis thaliana]
  misc_feature (1)..(152): Homolog of NCBI NO: 38345956 NR Description: OSJNBb0038F03.14 [Oryza sativa (japonica
  misc_feature (1)..(152): Homolog of NCBI NO: 14140119 NR Description: putative protein [Oryza sativa]
  misc_feature (1)..(152): Homolog of NCBI NO: 7485547 NR Description: hypothetical protein At2g44770 [imported] -
  misc_feature (1)..(152): Homolog of NCBI NO: 15810014 NR Description: At2g44770/F16B22.26 [Arabidopsis thaliana]
  misc_feature (1)..(152): Homolog of NCBI NO: 18406626 NR Description: expressed protein [Arabidopsis thaliana]
  misc_feature (1)..(152): Homolog of NCBI NO: 11288393 NR Description: hypothetical protein F27H5.50 - Arabidopsis
  misc_feature (1)..(152): Homolog of NCBI NO: 18411543 NR Description: expressed protein [Arabidopsis thaliana]
MGWQGKDPSTDFRGGGFISLENLLYFARKFPKSFHGLLRKQVGDRSVWEYPFAVAGINITFMLIQMLDLEAVKPRSIVGETFLRFLSVNESAFDLLYCIAFKLMDQQWLSMRASYMEFNTVMKSTRRQLEREIMIEDITSLEDLPSYSLLSQ

SEQ ID NO: 39198 - DNA, 1026 bp, Arabidopsis thaliana
  misc_feature (1)..(1026): Ceres Seq. ID no. 13494105
  misc_feature: MA Experiment ID: 108461 Result: Up-regulated in Transcription
  misc_feature: MA Experiment 108461 PARAMETER Experiment Name: At_Germinating_Seeds_cDNA_P Parameter: Age (day) Value: 1 vs. 0
  misc_feature: MA Experiment 108461 PARAMETER Experiment Name: At_Germinating_Seeds_cDNA_P Parameter: Tissue Value: Germinating Seeds
  misc_feature: MA Experiment ID: 108462 Result: Up-regulated in Transcription
  misc_feature: MA Experiment 108462 PARAMETER Experiment Name: At_Germinating_Seeds_cDNA_P Parameter: Age (day) Value: 2 vs. 0
  misc_feature: MA Experiment 108462 PARAMETER Experiment Name: At_Germinating_Seeds_cDNA_P Parameter: Tissue Value: Germinating Seeds
  misc_feature: MA Experiment ID: 108463 Result: Up-regulated in Transcription
  misc_feature: MA Experiment 108463 PARAMETER Experiment Name: At_Germinating_Seeds_cDNA_P Parameter: Age (day) Value: 3 vs. 0
  misc_feature: MA Experiment 108463 PARAMETER Experiment Name: At_Germinating_Seeds_cDNA_P Parameter: Tissue Value: Germinating Seeds
  misc_feature: MA Experiment ID: 108579 Result: Down-regulated in Transcription
  misc_feature: MA Experiment 108579 PARAMETER Experiment Name: At_4deg_Cold_cDNA_P Parameter: Temperature (deg C) Value: 4 vs. 22
  misc_feature: MA Experiment 108579 PARAMETER Experiment Name: At_4deg_Cold_cDNA_P Parameter: Timepoint (hr) Value: 6
  misc_feature: MA Experiment 108579 PARAMETER Experiment Name: At_4deg_Cold_cDNA_P Parameter: Tissue Value: Aerial
  misc_feature: MA Experiment ID: 108585 Result: Down-regulated in Transcription
  misc_feature: MA Experiment 108585 PARAMETER Experiment Name: At_5mM_NaNP_cDNA_P Parameter: Timepoint (hr) Value: 6
  misc_feature: MA Experiment 108585 PARAMETER Experiment Name: At_5mM_NaNP_cDNA_P Parameter: Tissue Value: Aerial
  misc_feature: MA Experiment 108585 PARAMETER Experiment Name: At_5mM_NaNP_cDNA_P Parameter: Treatment Value: null
  misc_feature: MA Experiment ID: 108595 Result: Down-regulated in Transcription
  misc_feature: MA Experiment 108595 PARAMETER Experiment Name: At_Ler-pi_Ovule_cDNA_P Parameter: Plant Line Value: null
  misc_feature: MA Experiment ID: 20000180 Result: Up-regulated in Transcription
  misc_feature: MA Experiment 20000180 PARAMETER Experiment Name: At_Germinating_Seeds_P Parameter: Age (hr) Value: 24 vs. 0
  misc_feature: MA Experiment 20000180 PARAMETER Experiment Name: At_Germinating_Seeds_P Parameter: Tissue Value: Germinating Seeds
  misc_feature: MA Experiment ID: 20000185 Result: Down-regulated in Transcription
  misc_feature: MA Experiment 20000185 PARAMETER Experiment Name: At_Roots__P Parameter: Age (day) Value: 7 vs. 21
  misc_feature: MA Experiment 20000185 PARAMETER Experiment Name: At_Roots__P Parameter: Organism Value: A. thaliana
  misc_feature: MA Experiment 20000185 PARAMETER Experiment Name: At_Roots__P Parameter: Tissue Value: Roots vs. Whole Plant
  misc_feature: MA Experiment ID: 20000439 Result: Down-regulated in Transcription
  misc_feature: MA Experiment 20000439 PARAMETER Experiment Name: At_Roots__P Parameter: Age (day) Value: 14 vs. 21
  misc_feature: MA Experiment 20000439 PARAMETER Experiment Name: At_Roots__P Parameter: Organism Value: A. thaliana
  misc_feature: MA Experiment 20000439 PARAMETER Experiment Name: At_Roots__P Parameter: Tissue Value: Roots vs. Whole Plant
gcgggtggcattgattcatctgatcaatgacaaaggataagaaaaactaaaagagagcaaattcagaagctgagaatatgaagacggagcttgaagaagaagaagaagaagaatggagatccgttcacgaggttttattaatcgttcttccttatcttcattctctgttcgagcttctctctatgattcgcgtttcgcgatctctcagagacgcgatcagagacgaaaccgcgttatggacaaaactcgttattgaaccaccgttgagctctcgtctaaccgatgatattctatcggagttcagttccaaatccgccggaaagctgaaaactctgattctccggcaatgtcttatggtcaccaacaagggactccgtcgtgttgtggatgctaatcctctcatcactaagataattgtgcctggatgctctggattgactcctgaaggaatcatggaatgtgttgaaagcttgtctaagaacaatcataaactagagacacttcacatcaatggcgtcaatggctttaccaaacaacatctctcagcactgtatacttacctttcttccgagggaacgattgacctcgaggtctgtcccaaatgcgatgaagtaaggatgattccgtcttgctcaagagaatcatgtaaccagaagcaacgcaagtgccgtggatgctggctttgtatccctagatgtgcagagtgcgcagtgtgccttgttggttcagatactgagagtcaagaagcagcgtgtggtaatgatgatgttctgtgtcttgaatgttggcttgtgcttcccaagtgcagattctgcaataaaccatattgcactaatcacagtagtcgtcgacatgagattgcaatcactgatgctgcatctcggccttcgtttgaatgtgaagcttgttactatagggcaggtacaaacccatatgaagtcgactatcaaatctaaacaaacactttgttgtctgcaactttgtctattttgtatatgacaagcttggattgtgaaatattcagcc

SEQ ID NO: 39199 - protein, 292 aa, Arabidopsis thaliana
  peptide (1)..(292): Ceres Seq. ID no. 13494106
  misc_feature (66)..(242): Homolog of NCBI NO: 22655121 NR Description: expressed protein [Arabidopsis thaliana]
  misc_feature (66)..(242): Homolog of NCBI NO: 18404757 NR Description: F-box protein family [Arabidopsis thaliana]
  misc_feature (17)..(167): Homolog of NCBI NO: 38345348 NR Description: OSJNBa0081L15.21 [Oryza sativa (japonica
  misc_feature (1)..(248): Homolog of NCBI NO: 22655121 NR Description: expressed protein [Arabidopsis thaliana]
  misc_feature (1)..(248): Homolog of NCBI NO: 18404757 NR Description: F-box protein family [Arabidopsis thaliana]
  misc_feature (17)..(251): Homolog of NCBI NO: 18405307 NR Description: expressed protein [Arabidopsis thaliana]
  misc_feature (17)..(158): Homolog of NCBI NO: 38175497 NR Description: F-box protein family-like protein
  misc_feature (65)..(277): Homolog of NCBI NO: 38175497 NR Description: F-box protein family-like protein
  misc_feature (1)..(292): Homolog of NCBI NO: 21536590 NR Description: unknown [Arabidopsis thaliana]
  misc_feature (1)..(292): Homolog of NCBI NO: 18379265 NR Description: expressed protein [Arabidopsis thaliana]
MKTELEEEEEEEWRSVHEVLLIVLPYLHSLFELLSMIRVSRSLRDAIRDETALWTKLVIEPPLSSRLTDDILSEFSSKSAGKLKTLILRQCLMVTNKGLRRVVDANPLITKIIVPGCSGLTPEGIMECVESLSKNNHKLETLHINGVNGFTKQHLSALYTYLSSEGTIDLEVCPKCDEVRMIPSCSRESCNQKQRKCRGCWLCIPRCAECAVCLVGSDTESQEAACGNDDVLCLECWLVLPKCRFCNKPYCTNHSSRRHEIAITDAASRPSFECEACYYRAGTNPYEVDYQI

SEQ ID NO: 39200 - protein, 257 aa, Arabidopsis thaliana
  peptide (1)..(257): Ceres Seq. ID no. 13494107
  misc_feature (31)..(207): Homolog of NCBI NO: 22655121 NR Description: expressed protein [Arabidopsis thaliana]
  misc_feature (31)..(207): Homolog of NCBI NO: 18404757 NR Description: F-box protein family [Arabidopsis thaliana]
  misc_feature (1)..(132): Homolog of NCBI NO: 38345348 NR Description: OSJNBa0081L15.21 [Oryza sativa (japonica
  misc_feature (1)..(213): Homolog of NCBI NO: 22655121 NR Description: expressed protein [Arabidopsis thaliana]
  misc_feature (1)..(213): Homolog of NCBI NO: 18404757 NR Description: F-box protein family [Arabidopsis thaliana]
  misc_feature (1)..(216): Homolog of NCBI NO: 18405307 NR Description: expressed protein [Arabidopsis thaliana]
  misc_feature (1)..(123): Homolog of NCBI NO: 38175497 NR Description: F-box protein family-like protein
  misc_feature (30)..(242): Homolog of NCBI NO: 38175497 NR Description: F-box protein family-like protein
  misc_feature (1)..(257): Homolog of NCBI NO: 21536590 NR Description: unknown [Arabidopsis thaliana]
  misc_feature (1)..(257): Homolog of NCBI NO: 18379265 NR Description: expressed protein [Arabidopsis thaliana]
MIRVSRSLRDAIRDETALWTKLVIEPPLSSRLTDDILSEFSSKSAGKLKTLILRQCLMVTNKGLRRVVDANPLITKIIVPGCSGLTPEGIMECVESLSKNNHKLETLHINGVNGFTKQHLSALYTYLSSEGTIDLEVCPKCDEVRMIPSCSRESCNQKQRKCRGCWLCIPRCAECAVCLVGSDTESQEAACGNDDVLCLECWLVLPKCRFCNKPYCTNHSSRRHEIAITDAASRPSFECEACYYRAGTNPYEVDYQI

SEQ ID NO: 39201 - protein, 200 aa, Arabidopsis thaliana
  peptide (1)..(200): Ceres Seq. ID no. 13494108
  misc_feature (1)..(150): Homolog of NCBI NO: 22655121 NR Description: expressed protein [Arabidopsis thaliana]
  misc_feature (1)..(150): Homolog of NCBI NO: 18404757 NR Description: F-box protein family [Arabidopsis thaliana]
  misc_feature (1)..(75): Homolog of NCBI NO: 38345348 NR Description: OSJNBa0081L15.21 [Oryza sativa (japonica
  misc_feature (1)..(156): Homolog of NCBI NO: 22655121 NR Description: expressed protein [Arabidopsis thaliana]
  misc_feature (1)..(156): Homolog of NCBI NO: 18404757 NR Description: F-box protein family [Arabidopsis thaliana]
  misc_feature (1)..(159): Homolog of NCBI NO: 18405307 NR Description: expressed protein [Arabidopsis thaliana]
  misc_feature (1)..(66): Homolog of NCBI NO: 38175497 NR Description: F-box protein family-like protein
  misc_feature (1)..(185): Homolog of NCBI NO: 38175497 NR Description: F-box protein family-like protein
  misc_feature (1)..(200): Homolog of NCBI NO: 21536590 NR Description: unknown [Arabidopsis thaliana]
  misc_feature (1)..(200): Homolog of NCBI NO: 18379265 NR Description: expressed protein [Arabidopsis thaliana]
MVTNKGLRRVVDANPLITKIIVPGCSGLTPEGIMECVESLSKNNHKLETLHINGVNGFTKQHLSALYTYLSSEGTIDLEVCPKCDEVRMIPSCSRESCNQKQRKCRGCWLCIPRCAECAVCLVGSDTESQEAACGNDDVLCLECWLVLPKCRFCNKPYCTNHSSRRHEIAITDAASRPSFECEACYYRAGTNPYEVDYQI

SEQ ID NO: 39202 - DNA, 1285 bp, Arabidopsis thaliana
  misc_feature (1)..(1285): Ceres Seq. ID no. 12558302
  misc_feature: MA Experiment ID: 20000180 Result: Down-regulated in Transcription
  misc_feature: MA Experiment 20000180 PARAMETER Experiment Name: At_Germinating_Seeds_P Parameter: Age (hr) Value: 24 vs. 0
  misc_feature: MA Experiment 20000180 PARAMETER Experiment Name: At_Germinating_Seeds_P Parameter: Tissue Value: Germinating Seeds
  misc_feature: MA Experiment ID: 20001247 Result: Down-regulated in Transcription
  misc_feature: MA Experiment 20001247 PARAMETER Experiment Name: At_Far-red-induction_P Parameter: Age (day) Value: 7
  misc_feature: MA Experiment 20001247 PARAMETER Experiment Name: At_Far-red-induction_P Parameter: Light Value: Far-red vs. White
  misc_feature: MA Experiment 20001247 PARAMETER Experiment Name: At_Far-red-induction_P Parameter: Organism Value: A. thaliana
  misc_feature: MA Experiment 20001247 PARAMETER Experiment Name: At_Far-red-induction_P Parameter: Plant Line Value: Columbia
  misc_feature: MA Experiment 20001247 PARAMETER Experiment Name: At_Far-red-induction_P Parameter: Timepoint (hr) Value: 1
  misc_feature: MA Experiment 20001247 PARAMETER Experiment Name: At_Far-red-induction_P Parameter: Tissue Value: Whole Plant
  misc_feature: MA Experiment ID: 20001557 Result: Up-regulated in Transcription
  misc_feature: MA Experiment 20001557 PARAMETER Experiment Name: At_Drought_Soil_Dry_P Parameter: Age (day) Value: 27
  misc_feature: MA Experiment 20001557 PARAMETER Experiment Name: At_Drought_Soil_Dry_P Parameter: Organism Value: A. thaliana
  misc_feature: MA Experiment 20001557 PARAMETER Experiment Name: At_Drought_Soil_Dry_P Parameter: Plant Line Value: WS
  misc_feature: MA Experiment 20001557 PARAMETER Experiment Name: At_Drought_Soil_Dry_P Parameter: Post Timepoint (hr) Value: 3
  misc_feature: MA Experiment 20001557 PARAMETER Experiment Name: At_Drought_Soil_Dry_P Parameter: Post-Treatment Value: Re-Water vs. No Drought
  misc_feature: MA Experiment 20001557 PARAMETER Experiment Name: At_Drought_Soil_Dry_P Parameter: Timepoint (day) Value: 13
  misc_feature: MA Experiment 20001557 PARAMETER Experiment Name: At_Drought_Soil_Dry_P Parameter: Treatment Value: Drought vs. No Drought
  misc_feature: MA Experiment ID: 20001558 Result: Up-regulated in Transcription
  misc_feature: MA Experiment 20001558 PARAMETER Experiment Name: At_Drought_Soil_Dry_P Parameter: Age (day) Value: 27
  misc_feature: MA Experiment 20001558 PARAMETER Experiment Name: At_Drought_Soil_Dry_P Parameter: Organism Value: A. thaliana
  misc_feature: MA Experiment 20001558 PARAMETER Experiment Name: At_Drought_Soil_Dry_P Parameter: Plant Line Value: WS
  misc_feature: MA Experiment 20001558 PARAMETER Experiment Name: At_Drought_Soil_Dry_P Parameter: Post Timepoint (hr) Value: 6
  misc_feature: MA Experiment 20001558 PARAMETER Experiment Name: At_Drought_Soil_Dry_P Parameter: Post-Treatment Value: Re-Water vs. No Drought
  misc_feature: MA Experiment 20001558 PARAMETER Experiment Name: At_Drought_Soil_Dry_P Parameter: Timepoint (day) Value: 13
  misc_feature: MA Experiment 20001558 PARAMETER Experiment Name: At_Drought_Soil_Dry_P Parameter: Treatment Value: Drought vs. No Drought
agattgaagtctcgcgaacagtcttgttgggttttgggttttgagagacagagaggttttggcttccgggtcgttagtgtttgatcatcttcgtatctcagaagggtgaactttgttgttttggcttttgcgtactgttgaatcagcttttccagatgcctcgaagaccatcatcaggaagaagagtgttaaagcatcagcctttaacattttcaccgtttatgcggttactttcctttgcttcaatggctaggcgtgatttgtctcatcctgaagattgtcaatgttctgatgaagatatatcttttgatgaaaagcaaaagatccctaatttaccaagaaaagggaaagaagaacaagtctcggactcgtctgatgaagaagattctcaggaagatgtccaagcagactttgagttctttgatcctaaacctacagactttcatggtgttaagatcctgttacaaaactatctcgatgacaaggagtgggatttgagcagttttgttgattgcatattggagcaaacaactgtaggaactgttgtgaaagtagctgatgatgaggatgagtcagtatttgctcttgtcactgctcttaacatggcaagagataaggacaacaagtgttttagagagttaaaagagtttcttcgtaaagtttgttctgaaaagaatatagcgaataatctagaaatgctcttagagaaaaaggcacaagatgttggtttattggtatctcaaagagtgatgaatcttcctccacaacttcttcctccactttatgatggattgttcgatgaagtctcatgggcaatcgaagatgagcctacagaaaagcttcgaagatcattccgttttaagtcatatcttctagttaccaagatttacaagctgaagaatcctaagcagagaaaacctcgacatggtgaagaagacattgaagacacagtatttcttaagcctgaagatgaactctttctcgagcttagctcttggtccttcacattccctatgcgctcacagctcgttacttcccaagaaatgaagaattatcagctgatgggtttagtgatggccgtggaagcaaacaagattcctaaattcagacagatgttgaactctctcattgattaacaatgatgaacatcttcttcttaaagattcaattaacggtttagttgtaatcgattcccgccagttttgtttgattcggttaaggattattgaggcttgttattacccaaactgtggtttgttttgtctaaaacgatgaggttcttatt

SEQ ID NO: 39203 - protein, 326 aa, Arabidopsis thaliana
  peptide (1)..(326): Ceres Seq. ID no. 12558303
  misc_feature (64)..(305): Homolog of NCBI NO: 40739074 NR Description: hypothetical protein AN6865.2 [Aspergillus
  misc_feature (48)..(305): Homolog of NCBI NO: 19075196 NR Description: hypothetical protein [Schizosaccharomyces pombe]
  misc_feature (70)..(249): Homolog of NCBI NO: 29126339 NR Description: putative p21 C-terminal-binding protein,
  misc_feature (277)..(326): Homolog of NCBI NO: 15237534 NR Description: putative protein; protein id: At5g03830.1
  misc_feature (48)..(249): Homolog of NCBI NO: 15237534 NR Description: putative protein; protein id: At5g03830.1
  misc_feature (55)..(86): Homolog of NCBI NO: 20258819 NR Description: unknown protein [Arabidopsis thaliana]
  misc_feature (108)..(247): Homolog of NCBI NO: 20258819 NR Description: unknown protein [Arabidopsis thaliana]
  misc_feature (70)..(325): Homolog of NCBI NO: 29126338 NR Description: putative p21 C-terminal-binding protein
  misc_feature (1)..(326): Homolog of NCBI NO: 7486435 NR Description: hypothetical protein At2g44510 [imported] -
  misc_feature (1)..(326): Homolog of NCBI NO: 18406554 NR Description: Expressed protein
MPRRPSSGRRVLKHQPLTFSPFMRLLSFASMARRDLSHPEDCQCSDEDISFDEKQKIPNLPRKGKEEQVSDSSDEEDSQEDVQADFEFFDPKPTDFHGVKILLQNYLDDKEWDLSSFVDCILEQTTVGTVVKVADDEDESVFALVTALNMARDKDNKCFRELKEFLRKVCSEKNIANNLEMLLEKKAQDVGLLVSQRVMNLPPQLLPPLYDGLFDEVSWAIEDEPTEKLRRSFRFKSYLLVTKIYKLKNPKQRKPRHGEEDIEDTVFLKPEDELFLELSSWSFTFPMRSQLVTSQEMKNYQLMGLVMAVEANKIPKFRQMLNSLID

SEQ ID NO: 39204 - protein, 304 aa, Arabidopsis thaliana
  peptide (1)..(304): Ceres Seq. ID no. 12558304
  misc_feature (42)..(283): Homolog of NCBI NO: 40739074 NR Description: hypothetical protein AN6865.2 [Aspergillus
  misc_feature (26)..(283): Homolog of NCBI NO: 19075196 NR Description: hypothetical protein [Schizosaccharomyces pombe]
  misc_feature (48)..(227): Homolog of NCBI NO: 29126339 NR Description: putative p21 C-terminal-binding protein,
  misc_feature (255)..(304): Homolog of NCBI NO: 15237534 NR Description: putative protein; protein id: At5g03830.1
  misc_feature (26)..(227): Homolog of NCBI NO: 15237534 NR Description: putative protein; protein id: At5g03830.1
  misc_feature (33)..(64): Homolog of NCBI NO: 20258819 NR Description: unknown protein [Arabidopsis thaliana]
  misc_feature (86)..(225): Homolog of NCBI NO: 20258819 NR Description: unknown protein [Arabidopsis thaliana]
  misc_feature (48)..(303): Homolog of NCBI NO: 29126338 NR Description: putative p21 C-terminal-binding protein
  misc_feature (1)..(304): Homolog of NCBI NO: 7486435 NR Description: hypothetical protein At2g44510 [imported] -
  misc_feature (1)..(304): Homolog of NCBI NO: 18406554 NR Description: Expressed protein
MRLLSFASMARRDLSHPEDCQCSDEDISFDEKQKIPNLPRKGKEEQVSDSSDEEDSQEDVQADFEFFDPKPTDFHGVKILLQNYLDDKEWDLSSFVDCILEQTTVGTVVKVADDEDESVFALVTALNMARDKDNKCFRELKEFLRKVCSEKNIANNLEMLLEKKAQDVGLLVSQRVMNLPPQLLPPLYDGLFDEVSWAIEDEPTEKLRRSFRFKSYLLVTKIYKLKNPKQRKPRHGEEDIEDTVFLKPEDELFLELSSWSFTFPMRSQLVTSQEMKNYQLMGLVMAVEANKIPKFRQMLNSLID

SEQ ID NO: 39205 - protein, 296 aa, Arabidopsis thaliana
  peptide (1)..(296): Ceres Seq. ID no. 12558305
  misc_feature (34)..(275): Homolog of NCBI NO: 40739074 NR Description: hypothetical protein AN6865.2 [Aspergillus
  misc_feature (18)..(275): Homolog of NCBI NO: 19075196 NR Description: hypothetical protein [Schizosaccharomyces pombe]
  misc_feature (40)..(219): Homolog of NCBI NO: 29126339 NR Description: putative p21 C-terminal-binding protein,
  misc_feature (247)..(296): Homolog of NCBI NO: 15237534 NR Description: putative protein; protein id: At5g03830.1
  misc_feature (18)..(219): Homolog of NCBI NO: 15237534 NR Description: putative protein; protein id: At5g03830.1
  misc_feature (25)..(56): Homolog of NCBI NO: 20258819 NR Description: unknown protein [Arabidopsis thaliana]
  misc_feature (78)..(217): Homolog of NCBI NO: 20258819 NR Description: unknown protein [Arabidopsis thaliana]
  misc_feature (40)..(295): Homolog of NCBI NO: 29126338 NR Description: putative p21 C-terminal-binding protein
  misc_feature (1)..(296): Homolog of NCBI NO: 7486435 NR Description: hypothetical protein At2g44510 [imported] -
  misc_feature (1)..(296): Homolog of NCBI NO: 18406554 NR Description: Expressed protein
MARRDLSHPEDCQCSDEDISFDEKQKIPNLPRKGKEEQVSDSSDEEDSQEDVQADFEFFDPKPTDFHGVKILLQNYLDDKEWDLSSFVDCILEQTTVGTVVKVADDEDESVFALVTALNMARDKDNKCFRELKEFLRKVCSEKNIANNLEMLLEKKAQDVGLLVSQRVMNLPPQLLPPLYDGLFDEVSWAIEDEPTEKLRRSFRFKSYLLVTKIYKLKNPKQRKPRHGEEDIEDTVFLKPEDELFLELSSWSFTFPMRSQLVTSQEMKNYQLMGLVMAVEANKIPKFRQMLNSLID

SEQ ID NO: 39206 - DNA, 1547 bp, Arabidopsis thaliana
  misc_feature (1)..(1547): Ceres Seq. ID no. 12703922
  misc_feature: MA Experiment ID: 108434 Result: Down-regulated in Transcription
  misc_feature: MA Experiment 108434 PARAMETER Experiment Name: At_Root_Tips_cDNA_P Parameter: Tissue Value: Root Tips
  misc_feature: MA Experiment ID: 108435 Result: Up-regulated in Transcription
  misc_feature: MA Experiment 108435 PARAMETER Experiment Name: At_stm_Mutants_cDNA_P Parameter: Plant Line Value: wt Landsburg vs stm
  misc_feature: MA Experiment 108435 PARAMETER Experiment Name: At_stm_Mutants_cDNA_P Parameter: Tissue Value: Shoot Apical Meristem Region
  misc_feature: MA Experiment ID: 108462 Result: Up-regulated in Transcription
  misc_feature: MA Experiment 108462 PARAMETER Experiment Name: At_Germinating_Seeds_cDNA_P Parameter: Age (day) Value: 2 vs. 0
  misc_feature: MA Experiment 108462 PARAMETER Experiment Name: At_Germinating_Seeds_cDNA_P Parameter: Tissue Value: Germinating Seeds
  misc_feature: MA Experiment ID: 108463 Result: Up-regulated in Transcription
  misc_feature: MA Experiment 108463 PARAMETER Experiment Name: At_Germinating_Seeds_cDNA_P Parameter: Age (day) Value: 3 vs. 0
  misc_feature: MA Experiment 108463 PARAMETER Experiment Name: At_Germinating_Seeds_cDNA_P Parameter: Tissue Value: Germinating Seeds
  misc_feature: MA Experiment ID: 108464 Result: Up-regulated in Transcription
  misc_feature: MA Experiment 108464 PARAMETER Experiment Name: At_Germinating_Seeds_cDNA_P Parameter: Age (day) Value: 4 vs. 0
  misc_feature: MA Experiment 108464 PARAMETER Experiment Name: At_Germinating_Seeds_cDNA_P Parameter: Tissue Value: Germinating Seeds
  misc_feature: MA Experiment ID: 108569 Result: Up-regulated in Transcription
  misc_feature: MA Experiment 108569 PARAMETER Experiment Name: At_0.001%_MeJA__cDNA_P Parameter: Timepoint (hr) Value: 6
  misc_feature: MA Experiment 108569 PARAMETER Experiment Name: At_0.001%_MeJA__cDNA_P Parameter: Tissue Value: Aerial
  misc_feature: MA Experiment 108569 PARAMETER Experiment Name: At_0.001%_MeJA__cDNA_P Parameter: Treatment Value: 0.001% MeJA vs. No Treatment
  misc_feature: MA Experiment ID: 108576 Result: Down-regulated in Transcription
  misc_feature: MA Experiment 108576 PARAMETER Experiment Name: At_42deg_Heat_cDNA_P Parameter: Temperature (deg C) Value: 42 vs. 22
  misc_feature: MA Experiment 108576 PARAMETER Experiment Name: At_42deg_Heat_cDNA_P Parameter: Timepoint (hr) Value: 1
  misc_feature: MA Experiment 108576 PARAMETER Experiment Name: At_42deg_Heat_cDNA_P Parameter: Tissue Value: Aerial
  misc_feature: MA Experiment ID: 108585 Result: Up-regulated in Transcription
  misc_feature: MA Experiment 108585 PARAMETER Experiment Name: At_5mM_NaNP_cDNA_P Parameter: Timepoint (hr) Value: 6
  misc_feature: MA Experiment 108585 PARAMETER Experiment Name: At_5mM_NaNP_cDNA_P Parameter: Tissue Value: Aerial
  misc_feature: MA Experiment 108585 PARAMETER Experiment Name: At_5mM_NaNP_cDNA_P Parameter: Treatment Value: null
  misc_feature: MA Experiment ID: 108595 Result: Down-regulated in Transcription
  misc_feature: MA Experiment 108595 PARAMETER Experiment Name: At_Ler-pi_Ovule_cDNA_P Parameter: Plant Line Value: null
  misc_feature: MA Experiment ID: 108608 Result: Down-regulated in Transcription
  misc_feature: MA Experiment 108608 PARAMETER Experiment Name: At_100uM_ABA_cDNA_P Parameter: Timepoint (hr) Value: 1
  misc_feature: MA Experiment 108608 PARAMETER Experiment Name: At_100uM_ABA_cDNA_P Parameter: Tissue Value: Aerial
  misc_feature: MA Experiment 108608 PARAMETER Experiment Name: At_100uM_ABA_cDNA_P Parameter: Treatment Value: 100uM ABA vs. No Treatment
  misc_feature: MA Experiment ID: 108668 Result: Up-regulated in Transcription
  misc_feature: MA Experiment 108668 PARAMETER Experiment Name: At_2mM_SA_cDNA_P Parameter: Plant Line Value: WS
  misc_feature: MA Experiment 108668 PARAMETER Experiment Name: At_2mM_SA_cDNA_P Parameter: Timepoint (hr) Value: 6
  misc_feature: MA Experiment 108668 PARAMETER Experiment Name: At_2mM_SA_cDNA_P Parameter: Treatment Value: 2mM SA vs. No Treatment
  misc_feature: MA Experiment ID: 20000111 Result: Down-regulated in Transcription
  misc_feature: MA Experiment 20000111 PARAMETER Experiment Name: At_42deg_Heat_cDNA_P Parameter: Temperature (deg C) Value: 42 vs. 22
  misc_feature: MA Experiment 20000111 PARAMETER Experiment Name: At_42deg_Heat_cDNA_P Parameter: Timepoint (hr) Value: 6
  misc_feature: MA Experiment 20000111 PARAMETER Experiment Name: At_42deg_Heat_cDNA_P Parameter: Tissue Value: Aerial
  misc_feature: MA Experiment ID: 20000113 Result: Down-regulated in Transcription
  misc_feature: MA Experiment 20000113 PARAMETER Experiment Name: At_42deg_Heat_cDNA_P Parameter: Temperature (deg C) Value: 42 vs. 22
  misc_feature: MA Experiment 20000113 PARAMETER Experiment Name: At_42deg_Heat_cDNA_P Parameter: Timepoint (hr) Value: 8
  misc_feature: MA Experiment 20000113 PARAMETER Experiment Name: At_42deg_Heat_cDNA_P Parameter: Tissue Value: Aerial
  misc_feature: MA Experiment ID: 20000224 Result: Up-regulated in Transcription
  misc_feature: MA Experiment ID: 20001451 Result: Down-regulated in Transcription
  misc_feature: MA Experiment 20001451 PARAMETER Experiment Name: At_Far-red-induction_P Parameter: Age (day) Value: 7
  misc_feature: MA Experiment 20001451 PARAMETER Experiment Name: At_Far-red-induction_P Parameter: Light Value: Far-red vs. White
  misc_feature: MA Experiment 20001451 PARAMETER Experiment Name: At_Far-red-induction_P Parameter: Organism Value: A. thaliana
  misc_feature: MA Experiment 20001451 PARAMETER Experiment Name: At_Far-red-induction_P Parameter: Plant Line Value: Columbia
  misc_feature: MA Experiment 20001451 PARAMETER Experiment Name: At_Far-red-induction_P Parameter: Timepoint (hr) Value: 24
  misc_feature: MA Experiment 20001451 PARAMETER Experiment Name: At_Far-red-induction_P Parameter: Tissue Value: Whole Plant
  misc_feature: MA Experiment ID: 20001905 Result: Down-regulated in Transcription
  misc_feature: MA Experiment 20001905 PARAMETER Experiment Name: At_Drought_Reproduction_P Parameter: Age (day) Value: 40
  misc_feature: MA Experiment 20001905 PARAMETER Experiment Name: At_Drought_Reproduction_P Parameter: Organism Value: A. thaliana
  misc_feature: MA Experiment 20001905 PARAMETER Experiment Name: At_Drought_Reproduction_P Parameter: Plant Line Value: WS
  misc_feature: MA Experiment 20001905 PARAMETER Experiment Name: At_Drought_Reproduction_P Parameter: Timepoint (day) Value: 10
  misc_feature: MA Experiment 20001905 PARAMETER Experiment Name: At_Drought_Reproduction_P Parameter: Tissue Value: Rosettes
  misc_feature: MA Experiment 20001905 PARAMETER Experiment Name: At_Drought_Reproduction_P Parameter: Treatment Value: Drought vs. No Drought
aagtcagcaactcacttccgtctctctccccctcaaaaccagcagaaccagtctcactcgatccttaatccaccatggcaacgacttctcgccggtttaccaccggtttattcgcctcgatcacctcggtcaaatcccattccgcaaaccgacctcaatccatctccctaatccgtcgaaaccacatcgatcatcgtctaccgttgatcgttccaagttccaggcggtggattatccaagcggcgagatcctgggatggatttgacgacggagctgaggcggagattaagaagccaggcgcgtatggttacgcgatcggcgataacgagatcgaagggagcagtagtagtactgtccatgtgatcgacggagagcatgttaagacggcggagatagtgatatgggcggcggttacggcggcgtttggcgtcggaaacagagtgatgtataagctcgcgttagttccactcaaggagtatcctttcttccttgcgcaactctccaccttcgggtatgtagctgtatattatactatcttgtattttcgatatcgtgctggaactgtcacagatgcaatgctctcggtgccaaaatctccatttttaattgttggcatcttagaggctctagctgcagctgctggcatggcagccgcagcgaatctttcggggccatcaacgacagttttatctcagacatttcttgtctggcaaattttcttctccattatttttctcgggaggagatatagcgtaaaccaaatactcggatgtactcttgtagctctcggtgtaatcgtcagtgtggcaagtggatcaggtgctgctcattcattgaatgaagccggagtattatggattcttctaatggttctctctttcttgcttcaaggagcaggtacagtattgaaggaagtcatctttatagatagccaaagacgattaaagggtgcttcactcgatctatttatagtaaattcatatggttcagctttccaagccatctgcattgcgttgcttcttccatttctttcaaaactttggggcataccgtttaaccaactcggtacctacctaaaagatggtgcggtttgttttctcaacaatgggacaataacaaaaggatgtgatggggctccgtttttgcctctgttgtttgtgataatgaacattggctataacattgctcttttaagactcctcaagatttcatccgcggtggtttcatgtcttgcatcaacagtctcagtgccaattgcagtgtttctgttcacaatgccattaccgtaccttggagttgcatcatcactaccaaaagggttcatgggaggaacaatcatacttgtattgggaatgattctttatagttggacaccacacggagctaactcttctcatactgattcagtcattccttcacctcctccaacatagagagggcttaactaaggggttttgcttttatataaagatttgagagatttatgcaaattcggtttgtgtttaaataaacttatatttgatcatatgatgttaatggaaaagttg

SEQ ID NO: 39207 - protein, 452 aa, Arabidopsis thaliana
  peptide (1)..(452): Ceres Seq. ID no. 12703923
  misc_feature (107)..(245): Homolog of NCBI NO: 28973717 NR Description: unknown protein [Arabidopsis thaliana]
  misc_feature (1)..(146): Homolog of NCBI NO: 15239886 NR Description: putative protein; protein id: At5g12160.1
  misc_feature (107)..(194): Homolog of NCBI NO: 7487326 NR Description: hypothetical protein T22A6.290 - Arabidopsis
  misc_feature (222)..(393): Homolog of NCBI NO: 7487326 NR Description: hypothetical protein T22A6.290 - Arabidopsis
  misc_feature (107)..(442): Homolog of NCBI NO: 30686536 NR Description: expressed protein [Arabidopsis thaliana]
  misc_feature (168)..(452): Homolog of NCBI NO: 15239887 NR Description: putative protein; protein id: At5g12170.1
  misc_feature (1)..(452): Homolog of NCBI NO: 21553716 NR Description: unknown [Arabidopsis thaliana]
  misc_feature (1)..(452): Homolog of NCBI NO: 18419900 NR Description: putative protein
  misc_feature (1)..(452): Homolog of NCBI NO: 21536591 NR Description: unknown [Arabidopsis thaliana]
  misc_feature (1)..(452): Homolog of NCBI NO: 20260240 NR Description: unknown protein [Arabidopsis thaliana]
MATTSRRFTTGLFASITSVKSHSANRPQSISLIRRNHIDHRLPLIVPSSRRWIIQAARSWDGFDDGAEAEIKKPGAYGYAIGDNEIEGSSSSTVHVIDGEHVKTAEIVIWAAVTAAFGVGNRVMYKLALVPLKEYPFFLAQLSTFGYVAVYYTILYFRYRAGTVTDAMLSVPKSPFLIVGILEALAAAAGMAAAANLSGPSTTVLSQTFLVWQIFFSIIFLGRRYSVNQILGCTLVALGVIVSVASGSGAAHSLNEAGVLWILLMVLSFLLQGAGTVLKEVIFIDSQRRLKGASLDLFIVNSYGSAFQAICIALLLPFLSKLWGIPFNQLGTYLKDGAVCFLNNGTITKGCDGAPFLPLLFVIMNIGYNIALLRLLKISSAVVSCLASTVSVPIAVFLFTMPLPYLGVASSLPKGFMGGTIILVLGMILYSWTPHGANSSHTDSVIPSPPPT

SEQ ID NO: 39208 - protein, 329 aa, Arabidopsis thaliana
  peptide (1)..(329): Ceres Seq. ID no. 12703924
  misc_feature (1)..(122): Homolog of NCBI NO: 28973717 NR Description: unknown protein [Arabidopsis thaliana]
  misc_feature (1)..(23): Homolog of NCBI NO: 15239886 NR Description: putative protein; protein id: At5g12160.1
  misc_feature (1)..(71): Homolog of NCBI NO: 7487326 NR Description: hypothetical protein T22A6.290 - Arabidopsis
  misc_feature (99)..(270): Homolog of NCBI NO: 7487326 NR Description: hypothetical protein T22A6.290 - Arabidopsis
  misc_feature (1)..(319): Homolog of NCBI NO: 30686536 NR Description: expressed protein [Arabidopsis thaliana]
  misc_feature (45)..(329): Homolog of NCBI NO: 15239887 NR Description: putative protein; protein id: At5g12170.1
  misc_feature (1)..(329): Homolog of NCBI NO: 21553716 NR Description: unknown [Arabidopsis thaliana]
  misc_feature (1)..(329): Homolog of NCBI NO: 18419900 NR Description: putative protein
  misc_feature (1)..(329): Homolog of NCBI NO: 21536591 NR Description: unknown [Arabidopsis thaliana]
  misc_feature (1)..(329): Homolog of NCBI NO: 20260240 NR Description: unknown protein [Arabidopsis thaliana]
MYKLALVPLKEYPFFLAQLSTFGYVAVYYTILYFRYRAGTVTDAMLSVPKSPFLIVGILEALAAAAGMAAAANLSGPSTTVLSQTFLVWQIFFSIIFLGRRYSVNQILGCTLVALGVIVSVASGSGAAHSLNEAGVLWILLMVLSFLLQGAGTVLKEVIFIDSQRRLKGASLDLFIVNSYGSAFQAICIALLLPFLSKLWGIPFNQLGTYLKDGAVCFLNNGTITKGCDGAPFLPLLFVIMNIGYNIALLRLLKISSAVVSCLASTVSVPIAVFLFTMPLPYLGVASSLPKGFMGGTIILVLGMILYSWTPHGANSSHTDSVIPSPPPT

SEQ ID NO: 39209 - protein, 285 aa, Arabidopsis thaliana
  peptide (1)..(285): Ceres Seq. ID no. 12703925
  misc_feature (1)..(28): Homolog of NCBI NO: 20161872 NR Description: B1139B11.13 [Oryza sativa (japonica
  misc_feature (1)..(78): Homolog of NCBI NO: 28973717 NR Description: unknown protein [Arabidopsis thaliana]
  misc_feature (1)..(27): Homolog of NCBI NO: 7487326 NR Description: hypothetical protein T22A6.290 - Arabidopsis
  misc_feature (55)..(226): Homolog of NCBI NO: 7487326 NR Description: hypothetical protein T22A6.290 - Arabidopsis
  misc_feature (1)..(275): Homolog of NCBI NO: 30686536 NR Description: expressed protein [Arabidopsis thaliana]
  misc_feature (1)..(285): Homolog of NCBI NO: 15239887 NR Description: putative protein; protein id: At5g12170.1
  misc_feature (1)..(285): Homolog of NCBI NO: 21553716 NR Description: unknown [Arabidopsis thaliana]
  misc_feature (1)..(285): Homolog of NCBI NO: 18419900 NR Description: putative protein
  misc_feature (1)..(285): Homolog of NCBI NO: 21536591 NR Description: unknown [Arabidopsis thaliana]
  misc_feature (1)..(285): Homolog of NCBI NO: 20260240 NR Description: unknown protein [Arabidopsis thaliana]
MLSVPKSPFLIVGILEALAAAAGMAAAANLSGPSTTVLSQTFLVWQIFFSIIFLGRRYSVNQILGCTLVALGVIVSVASGSGAAHSLNEAGVLWILLMVLSFLLQGAGTVLKEVIFIDSQRRLKGASLDLFIVNSYGSAFQAICIALLLPFLSKLWGIPFNQLGTYLKDGAVCFLNNGTITKGCDGAPFLPLLFVIMNIGYNIALLRLLKISSAVVSCLASTVSVPIAVFLFTMPLPYLGVASSLPKGFMGGTIILVLGMILYSWTPHGANSSHTDSVIPSPPPT

SEQ ID NO: 39210 - DNA, 1718 bp, Arabidopsis thaliana
  misc_feature (1)..(1718): Ceres Seq. ID no. 12562559
  misc_feature: MA Experiment ID: 20000171 Result: Down-regulated in Transcription
  misc_feature: MA Experiment 20000171 PARAMETER Experiment Name: At_42deg_Heat_P Parameter: Age (day) Value: 14
  misc_feature: MA Experiment 20000171 PARAMETER Experiment Name: At_42deg_Heat_P Parameter: Organism Value: A. thaliana
  misc_feature: MA Experiment 20000171 PARAMETER Experiment Name: At_42deg_Heat_P Parameter: Plant Line Value: WS
  misc_feature: MA Experiment 20000171 PARAMETER Experiment Name: At_42deg_Heat_P Parameter: Temperature (deg C) Value: 42 vs. 22
  misc_feature: MA Experiment 20000171 PARAMETER Experiment Name: At_42deg_Heat_P Parameter: Timepoint (hr) Value: 1
  misc_feature: MA Experiment 20000171 PARAMETER Experiment Name: At_42deg_Heat_P Parameter: Tissue Value: Aerial
  misc_feature: MA Experiment ID: 20000794 Result: Up-regulated in Transcription
  misc_feature: MA Experiment 20000794 PARAMETER Experiment Name: At_Petals_P Parameter: Age (day) Value: 23-25 days
  misc_feature: MA Experiment 20000794 PARAMETER Experiment Name: At_Petals_P Parameter: Plant Line Value: WS
  misc_feature: MA Experiment 20000794 PARAMETER Experiment Name: At_Petals_P Parameter: Tissue Value: Petals vs. Whole plant
  misc_feature: MA Experiment ID: 20001451 Result: Up-regulated in Transcription
  misc_feature: MA Experiment 20001451 PARAMETER Experiment Name: At_Far-red-induction_P Parameter: Age (day) Value: 7
  misc_feature: MA Experiment 20001451 PARAMETER Experiment Name: At_Far-red-induction_P Parameter: Light Value: Far-red vs. White
  misc_feature: MA Experiment 20001451 PARAMETER Experiment Name: At_Far-red-induction_P Parameter: Organism Value: A. thaliana
  misc_feature: MA Experiment 20001451 PARAMETER Experiment Name: At_Far-red-induction_P Parameter: Plant Line Value: Columbia
  misc_feature: MA Experiment 20001451 PARAMETER Experiment Name: At_Far-red-induction_P Parameter: Timepoint (hr) Value: 24
  misc_feature: MA Experiment 20001451 PARAMETER Experiment Name: At_Far-red-induction_P Parameter: Tissue Value: Whole Plant
ctattgcattgagattgatatcttgttgcaggggaactctggttccatgtgttaggtattttcctttcgtcgacctgattcatcttgtgcatgtcgattctgaataatgaacgaagaaggctgcgtcccgcacaactctgatgttgttaaacaaaagtctatagatcaaagagcccctctttccggggaacctaaatgtgttatctgcagtcgttatggtgagtacatatgtgacgagaccaatgatgacgtctgcagcctcgagtgtaagcaagcactcctgagaagggttgacagcgctagagtttttcctgccacagatgagtgcttctatgttagagacccaggatcttcttcccacgatgctcaactacttagaagaaagcttgatattcatgtccaaggacaaggatcagcagtccctccacctgtcttgactttcacttcatgtggacttcctcctaagcttcttctcaacttagaaacggctggctatgactttcctactcctatccagatgcaagcaattccagctgctttaaccggcaaaagtctgctcgcctcagccgacaccggctctgggaaaacagcttcttttcttgttcctattatttctcgttgcacaacgtatcactctgagcatccctcagaccagaggaggaaccccttggctatggttttggctccaacgagagagctctgtgtccaagttgaagatcaggcaaaaatgctcggaaagggactgccatttaagactgcactcgttgtaggtggtgatcccatgtctggacaactctaccgcattcagcaaggtgttgaattgatcattggtaccccaggccgggtggtggaccttctatcaaagcacaccattgaactagataacatcatgacgtttgtgctggatgaagttgactgcatgcttcagagaggcttcagagatcaggtgatgcagatatttcaggccttgtcacaaccacaggtcttgctgttctctgcgacgatctcaagagaggtggagaaggtgggagggtctctagccaaggaaatcattttggtatccataggtaatcccaacaagcctaacaaggctgtcaaccaattggccatctgggtagatgcaaagcaaaagaaacagaagctgtttgatatactcagaagtcaaaaccatttcaagccccccgctgttgtttatgtgagttcgagagttggagcagatctcctggctaatgccataactgttgtcacgggggtaaaagctctatcgatccatggggagaagccaatgaaggagaggagagacgtaatgggatcgtttttgggtggagaggtgccagttcttgtatcaacgggagttctaggccgaggagttgacctattggtggtaaggcaggtgatagtgtttgacatgcctagtaccatcaaggagtacatacatgtaattggcagggcctctaggatgggagagaagggcactgccattgtgtttgtgaatgaggacgacaggaacctattccctgatttagttgccgctttaaaaagtagtggagcagccatacctaaggaacttatcaatttgacatccagggaaatgcacaacaagaagagaagggttgggtactgagatgtatgacctggatccgaatgttgttgtaaattaagaaagaaaggaagacttgagagcattgacgaatagaaaaaattaagggtttaactct

SEQ ID NO: 39211 - protein, 505 aa, Arabidopsis thaliana
  peptide (1)..(505): Ceres Seq. ID no. 12562560
  misc_feature (139)..(333): Pfam Name: DEAD/DEAH box helicase Pfam Description: DEAD/DEAH box helicase
  misc_feature (95)..(504): Homolog of NCBI NO: 28393424 NR Description: putative DEAD/DEAH box RNA helicase [Arabidopsis
  misc_feature (95)..(504): Homolog of NCBI NO: 15227951 NR Description: DEAD/DEAH box RNA helicase, putative; protein id:
  misc_feature (95)..(504): Homolog of NCBI NO: 19528473 NR Description: RE28061p [Drosophila melanogaster]
  misc_feature (95)..(504): Homolog of NCBI NO: 17985987 NR Description: belle CG9748-PA
  misc_feature (3)..(444): Homolog of NCBI NO: 13775232 NR Description: hypothetical protein DKFZp564B1023 [Homo sapiens]
  misc_feature (3)..(502): Homolog of NCBI NO: 27469538 NR Description: Similar to hypothetical protein DKFZp564B1023
  misc_feature (10)..(502): Homolog of NCBI NO: 13385988 NR Description: RIKEN cDNA 1210002B07 [Mus musculus]
  misc_feature (10)..(184): Homolog of NCBI NO: 34880424 NR Description: similar to RIKEN cDNA 1210002B07 [Rattus
  misc_feature (185)..(502): Homolog of NCBI NO: 34880424 NR Description: similar to RIKEN cDNA 1210002B07 [Rattus
  misc_feature (138)..(505): Homolog of NCBI NO: 30678477 NR Description: ATP dependent RNA helicase GB:227525 [Arabidopsis
MNEEGCVPHNSDVVKQKSIDQRAPLSGEPKCVICSRYGEYICDETNDDVCSLECKQALLRRVDSARVFPATDECFYVRDPGSSSHDAQLLRRKLDIHVQGQGSAVPPPVLTFTSCGLPPKLLLNLETAGYDFPTPIQMQAIPAALTGKSLLASADTGSGKTASFLVPIISRCTTYHSEHPSDQRRNPLAMVLAPTRELCVQVEDQAKMLGKGLPFKTALVVGGDPMSGQLYRIQQGVELIIGTPGRVVDLLSKHTIELDNIMTFVLDEVDCMLQRGFRDQVMQIFQALSQPQVLLFSATISREVEKVGGSLAKEIILVSIGNPNKPNKAVNQLAIWVDAKQKKQKLFDILRSQNHFKPPAVVYVSSRVGADLLANAITVVTGVKALSIHGEKPMKERRDVMGSFLGGEVPVLVSTGVLGRGVDLLVVRQVIVFDMPSTIKEYIHVIGRASRMGEKGTAIVFVNEDDRNLFPDLVAALKSSGAAIPKELINLTSREMHNKKRRVGY

SEQ ID NO: 39212 - protein, 368 aa, Arabidopsis thaliana
  peptide (1)..(368): Ceres Seq. ID no. 12562561
  misc_feature (2)..(196): Pfam Name: DEAD/DEAH box helicase Pfam Description: DEAD/DEAH box helicase
  misc_feature (1)..(367): Homolog of NCBI NO: 28393424 NR Description: putative DEAD/DEAH box RNA helicase [Arabidopsis
  misc_feature (1)..(367): Homolog of NCBI NO: 15227951 NR Description: DEAD/DEAH box RNA helicase, putative; protein id:
  misc_feature (1)..(367): Homolog of NCBI NO: 19528473 NR Description: RE28061p [Drosophila melanogaster]
  misc_feature (1)..(367): Homolog of NCBI NO: 17985987 NR Description: belle CG9748-PA
  misc_feature (1)..(307): Homolog of NCBI NO: 13775232 NR Description: hypothetical protein DKFZp564B1023 [Homo sapiens]
  misc_feature (1)..(365): Homolog of NCBI NO: 27469538 NR Description: Similar to hypothetical protein DKFZp564B1023
  misc_feature (1)..(365): Homolog of NCBI NO: 13385988 NR Description: RIKEN cDNA 1210002B07 [Mus musculus]
  misc_feature (1)..(47): Homolog of NCBI NO: 34880424 NR Description: similar to RIKEN cDNA 1210002B07 [Rattus
  misc_feature (48)..(365): Homolog of NCBI NO: 34880424 NR Description: similar to RIKEN cDNA 1210002B07 [Rattus
  misc_feature (1)..(368): Homolog of NCBI NO: 30678477 NR Description: ATP dependent RNA helicase GB:227525 [Arabidopsis
MQAIPAALTGKSLLASADTGSGKTASFLVPIISRCTTYHSEHPSDQRRNPLAMVLAPTRELCVQVEDQAKMLGKGLPFKTALVVGGDPMSGQLYRIQQGVELIIGTPGRVVDLLSKHTIELDNIMTFVLDEVDCMLQRGFRDQVMQIFQALSQPQVLLFSATISREVEKVGGSLAKEIILVSIGNPNKPNKAVNQLAIWVDAKQKKQKLFDILRSQNHFKPPAVVYVSSRVGADLLANAITVVTGVKALSIHGEKPMKERRDVMGSFLGGEVPVLVSTGVLGRGVDLLVVRQVIVFDMPSTIKEYIHVIGRASRMGEKGTAIVFVNEDDRNLFPDLVAALKSSGAAIPKELINLTSREMHNKKRRVGY

SEQ ID NO: 39213 - protein, 316 aa, Arabidopsis thaliana
  peptide (1)..(316): Ceres Seq. ID no. 12562562
  misc_feature (1)..(144): Pfam Name: DEAD/DEAH box helicase Pfam Description: DEAD/DEAH box helicase
  misc_feature (1)..(315): Homolog of NCBI NO: 15231074 NR Description: DEAD/DEAH box RNA helicase protein, putative
  misc_feature (1)..(315): Homolog of NCBI NO: 28393424 NR Description: putative DEAD/DEAH box RNA helicase [Arabidopsis
  misc_feature (1)..(315): Homolog of NCBI NO: 15227951 NR Description: DEAD/DEAH box RNA helicase, putative; protein id:
  misc_feature (1)..(315): Homolog of NCBI NO: 19528473 NR Description: RE28061p [Drosophila melanogaster]
  misc_feature (1)..(315): Homolog of NCBI NO: 17985987 NR Description: belle CG9748-PA
  misc_feature (1)..(255): Homolog of NCBI NO: 13775232 NR Description: hypothetical protein DKFZp564B1023 [Homo sapiens]
  misc_feature (1)..(313): Homolog of NCBI NO: 27469538 NR Description: Similar to hypothetical protein DKFZp564B1023
  misc_feature (1)..(313): Homolog of NCBI NO: 13385988 NR Description: RIKEN cDNA 1210002B07 [Mus musculus]
  misc_feature (1)..(313): Homolog of NCBI NO: 34880424 NR Description: similar to RIKEN cDNA 1210002B07 [Rattus
  misc_feature (1)..(316): Homolog of NCBI NO: 30678477 NR Description: ATP dependent RNA helicase GB:227525 [Arabidopsis
MVLAPTRELCVQVEDQAKMLGKGLPFKTALVVGGDPMSGQLYRIQQGVELIIGTPGRVVDLLSKHTIELDNIMTFVLDEVDCMLQRGFRDQVMQIFQALSQPQVLLFSATISREVEKVGGSLAKEIILVSIGNPNKPNKAVNQLAIWVDAKQKKQKLFDILRSQNHFKPPAVVYVSSRVGADLLANAITVVTGVKALSIHGEKPMKERRDVMGSFLGGEVPVLVSTGVLGRGVDLLVVRQVIVFDMPSTIKEYIHVIGRASRMGEKGTAIVFVNEDDRNLFPDLVAALKSSGAAIPKELINLTSREMHNKKRRVGY

SEQ ID NO: 39214 - DNA, 1179 bp, Arabidopsis thaliana
  misc_feature (1)..(1179): Ceres Seq. ID no. 12370969
  misc_feature: MA Experiment ID: 108434 Result: Up-regulated in Transcription
  misc_feature: MA Experiment 108434 PARAMETER Experiment Name: At_Root_Tips_cDNA_P Parameter: Tissue Value: Root Tips
  misc_feature: MA Experiment ID: 108569 Result: Up-regulated in Transcription
  misc_feature: MA Experiment 108569 PARAMETER Experiment Name: At_0.001%_MeJA__cDNA_P Parameter: Timepoint (hr) Value: 6
  misc_feature: MA Experiment 108569 PARAMETER Experiment Name: At_0.001%_MeJA__cDNA_P Parameter: Tissue Value: Aerial
  misc_feature: MA Experiment 108569 PARAMETER Experiment Name: At_0.001%_MeJA__cDNA_P Parameter: Treatment Value: 0.001% MeJA vs. No Treatment
  misc_feature: MA Experiment ID: 108573 Result: Up-regulated in Transcription
  misc_feature: MA Experiment 108573 PARAMETER Experiment Name: At_Drought_cDNA_P Parameter: Timepoint (hr) Value: 6
  misc_feature: MA Experiment 108573 PARAMETER Experiment Name: At_Drought_cDNA_P Parameter: Tissue Value: Aerial
  misc_feature: MA Experiment 108573 PARAMETER Experiment Name: At_Drought_cDNA_P Parameter: Treatment Value: Drought vs. No Drought
  misc_feature: MA Experiment ID: 108576 Result: Up-regulated in Transcription
  misc_feature: MA Experiment 108576 PARAMETER Experiment Name: At_42deg_Heat_cDNA_P Parameter: Temperature (deg C) Value: 42 vs. 22
  misc_feature: MA Experiment 108576 PARAMETER Experiment Name: At_42deg_Heat_cDNA_P Parameter: Timepoint (hr) Value: 1
  misc_feature: MA Experiment 108576 PARAMETER Experiment Name: At_42deg_Heat_cDNA_P Parameter: Tissue Value: Aerial
  misc_feature: MA Experiment ID: 108577 Result: Up-regulated in Transcription
  misc_feature: MA Experiment 108577 PARAMETER Experiment Name: At_42deg_Heat_cDNA_P Parameter: Temperature (deg C) Value: 42 vs. 22
  misc_feature: MA Experiment 108577 PARAMETER Experiment Name: At_42deg_Heat_cDNA_P Parameter: Timepoint (hr) Value: 6
  misc_feature: MA Experiment 108577 PARAMETER Experiment Name: At_42deg_Heat_cDNA_P Parameter: Tissue Value: Aerial
  misc_feature: MA Experiment ID: 108579 Result: Down-regulated in Transcription
  misc_feature: MA Experiment 108579 PARAMETER Experiment Name: At_4deg_Cold_cDNA_P Parameter: Temperature (deg C) Value: 4 vs. 22
  misc_feature: MA Experiment 108579 PARAMETER Experiment Name: At_4deg_Cold_cDNA_P Parameter: Timepoint (hr) Value: 6
  misc_feature: MA Experiment 108579 PARAMETER Experiment Name: At_4deg_Cold_cDNA_P Parameter: Tissue Value: Aerial
  misc_feature: MA Experiment ID: 108595 Result: Down-regulated in Transcription
  misc_feature: MA Experiment 108595 PARAMETER Experiment Name: At_Ler-pi_Ovule_cDNA_P Parameter: Plant Line Value: null
  misc_feature: MA Experiment ID: 20000111 Result: Up-regulated in Transcription
  misc_feature: MA Experiment 20000111 PARAMETER Experiment Name: At_42deg_Heat_cDNA_P Parameter: Temperature (deg C) Value: 42 vs. 22
  misc_feature: MA Experiment 20000111 PARAMETER Experiment Name: At_42deg_Heat_cDNA_P Parameter: Timepoint (hr) Value: 6
  misc_feature: MA Experiment 20000111 PARAMETER Experiment Name: At_42deg_Heat_cDNA_P Parameter: Tissue Value: Aerial
  misc_feature: MA Experiment ID: 20000112 Result: Up-regulated in Transcription
  misc_feature: MA Experiment 20000112 PARAMETER Experiment Name: At_42deg_Heat_cDNA_P Parameter: Temperature (deg C) Value: 42 vs. 22
  misc_feature: MA Experiment 20000112 PARAMETER Experiment Name: At_42deg_Heat_cDNA_P Parameter: Timepoint (hr) Value: 2
  misc_feature: MA Experiment 20000112 PARAMETER Experiment Name: At_42deg_Heat_cDNA_P Parameter: Tissue Value: Aerial
  misc_feature: MA Experiment ID: 20000171 Result: Up-regulated in Transcription
  misc_feature: MA Experiment 20000171 PARAMETER Experiment Name: At_42deg_Heat_P Parameter: Age (day) Value: 14
  misc_feature: MA Experiment 20000171 PARAMETER Experiment Name: At_42deg_Heat_P Parameter: Organism Value: A. thaliana
  misc_feature: MA Experiment 20000171 PARAMETER Experiment Name: At_42deg_Heat_P Parameter: Plant Line Value: WS
  misc_feature: MA Experiment 20000171 PARAMETER Experiment Name: At_42deg_Heat_P Parameter: Temperature (deg C) Value: 42 vs. 22
  misc_feature: MA Experiment 20000171 PARAMETER Experiment Name: At_42deg_Heat_P Parameter: Timepoint (hr) Value: 1
  misc_feature: MA Experiment 20000171 PARAMETER Experiment Name: At_42deg_Heat_P Parameter: Tissue Value: Aerial
  misc_feature: MA Experiment ID: 20000173 Result: Up-regulated in Transcription
  misc_feature: MA Experiment 20000173 PARAMETER Experiment Name: At_42deg_Heat_P Parameter: Age (day) Value: 14
  misc_feature: MA Experiment 20000173 PARAMETER Experiment Name: At_42deg_Heat_P Parameter: Organism Value: A. thaliana
  misc_feature: MA Experiment 20000173 PARAMETER Experiment Name: At_42deg_Heat_P Parameter: Plant Line Value: WS
  misc_feature: MA Experiment 20000173 PARAMETER Experiment Name: At_42deg_Heat_P Parameter: Temperature (deg C) Value: 42 vs. 22
  misc_feature: MA Experiment 20000173 PARAMETER Experiment Name: At_42deg_Heat_P Parameter: Timepoint (hr) Value: 6
  misc_feature: MA Experiment 20000173 PARAMETER Experiment Name: At_42deg_Heat_P Parameter: Tissue Value: Aerial
  misc_feature: MA Experiment ID: 20000213 Result: Down-regulated in Transcription
  misc_feature: MA Experiment 20000213 PARAMETER Experiment Name: At_4deg_Cold_P Parameter: Timepoint (hr) Value: 2
  misc_feature: MA Experiment ID: 20000224 Result: Down-regulated in Transcription
  misc_feature: MA Experiment ID: 20000234 Result: Down-regulated in Transcription
  misc_feature: MA Experiment 20000234 PARAMETER Experiment Name: At_Siliques_P Parameter: Age (day) Value: 21
  misc_feature: MA Experiment 20000234 PARAMETER Experiment Name: At_Siliques_P Parameter: Organism Value: A. thaliana
  misc_feature: MA Experiment 20000234 PARAMETER Experiment Name: At_Siliques_P Parameter: Plant Line Value: WS
  misc_feature: MA Experiment 20000234 PARAMETER Experiment Name: At_Siliques_P Parameter: Tissue Value: Less Than 5mm Siliques vs. Whole Plant
  misc_feature: MA Experiment ID: 20000235 Result: Down-regulated in Transcription
  misc_feature: MA Experiment 20000235 PARAMETER Experiment Name: At_Siliques_P Parameter: Age (day) Value: 21
  misc_feature: MA Experiment 20000235 PARAMETER Experiment Name: At_Siliques_P Parameter: Organism Value: A. thaliana
  misc_feature: MA Experiment 20000235 PARAMETER Experiment Name: At_Siliques_P Parameter: Plant Line Value: WS
  misc_feature: MA Experiment 20000235 PARAMETER Experiment Name: At_Siliques_P Parameter: Tissue Value: 5-10mm Siliques vs. Whole Plant
  misc_feature: MA Experiment ID: 20000264 Result: Down-regulated in Transcription
  misc_feature: MA Experiment 20000264 PARAMETER Experiment Name: At_Open_Flower_P Parameter: Age (day) Value: 21
  misc_feature: MA Experiment 20000264 PARAMETER Experiment Name: At_Open_Flower_P Parameter: Plant Line Value: WS
  misc_feature: MA Experiment 20000264 PARAMETER Experiment Name: At_Open_Flower_P Parameter: Tissue Value: Open Flower vs. Whole Plant
  misc_feature: MA Experiment ID: 20000265 Result: Down-regulated in Transcription
  misc_feature: MA Experiment 20000265 PARAMETER Experiment Name: At_Open_Flower_P Parameter: Age (day) Value: 21
  misc_feature: MA Experiment 20000265 PARAMETER Experiment Name: At_Open_Flower_P Parameter: Plant Line Value: WS
  misc_feature: MA Experiment 20000265 PARAMETER Experiment Name: At_Open_Flower_P Parameter: Tissue Value: Closed Flower vs. Whole Plant
  misc_feature: MA Experiment ID: 20000286 Result: Down-regulated in Transcription
  misc_feature: MA Experiment 20000286 PARAMETER Experiment Name: At_Open_Flower_P Parameter: Age (day) Value: 21
  misc_feature: MA Experiment 20000286 PARAMETER Experiment Name: At_Open_Flower_P Parameter: Plant Line Value: WS
  misc_feature: MA Experiment 20000286 PARAMETER Experiment Name: At_Open_Flower_P Parameter: Tissue Value: Half Open vs. Whole Plant
  misc_feature: MA Experiment ID: 20000794 Result: Down-regulated in Transcription
  misc_feature: MA Experiment 20000794 PARAMETER Experiment Name: At_Petals_P Parameter: Age (day) Value: 23-25 days
  misc_feature: MA Experiment 20000794 PARAMETER Experiment Name: At_Petals_P Parameter: Plant Line Value: WS
  misc_feature: MA Experiment 20000794 PARAMETER Experiment Name: At_Petals_P Parameter: Tissue Value: Petals vs. Whole plant
gaatcttcgagaagactcttcttttgattcaatcactcaccggagaagaagaagaagctatgccggtgttcaaagctccgttcaatggctactctgtgaaattcagtccattctacgagtcacgcctcgccgtcgctacagctcagaacttcggaattctcggaaacggccgaatccatgtcctcgagctcgctcctggagctccaggcgtaactgaatccgtctcgtacgatacagccgacgctgtatacgacgtatgttggtcagaatctcatgactctgtgctcatcgccgcaattggtgacggctcagtgaagatttacgacacagctcttcctcctccttctaatccgattagatcattccaagagcacgcgcgtgaggttcaatctgtggattacaatcccacgcggcgcgattcgtttctcacttcttcgtgggatgatacggttaagctttgggctatggatcgtccggcgagtgtaaggacttttaaggaacatgcttattgcgtttatcaagcagtttggaatcctaaacatggtgatgtgtttgcttctgcttctggagattgtactttaaggatttgggatgttagagaacctggatcaactatgatcatccctgctcatgattttgagattttgtcttgtgattggaataagtatgatgattgtattttagctacttcttcagtggataagacagttaaggtttgggatgttaggagttatagagttcctttggctgtgcttaatggtcatggatatgcggtgaggaaggtgaaattctcgccgcataggaggagtttgatagcttcttgctcttatgatatgagtgtttgtctttgggactatatggtggaagatgctttggttggtaggtatgatcatcatacagagtttgctgttgggatcgatatgagtgttcttgttgaaggtttaatggcgagtactggttgggatgagcttgtttatgtttggcagcaagggatggatcctagagccagttgattcataagtaagtttgtgattgcaaaacagtttcatctttatttgttgtggaattggtttggtttttgttaaaggaatgtagttggaataaagttgggatcttgcttaagaagaaatgtaagttactgagagtttcacatatgaacaaggttatctttcgaattgt

SEQ ID NO: 39215 - protein, 336 aa, Arabidopsis thaliana
  peptide (1)..(336): Ceres Seq. ID no. 12370970
  misc_feature (27)..(210): Homolog of NCBI NO: 40746753 NR Description: hypothetical protein AN0880.2 [Aspergillus
  misc_feature (28)..(328): Homolog of NCBI NO: 31216935 NR Description: ENSANGP00000020634 [Anopheles gambiae]
  misc_feature (28)..(327): Homolog of NCBI NO: 25090901 NR Description: Peroxisomal targeting signal 2 receptor (PTS2
  misc_feature (28)..(327): Homolog of NCBI NO: 6679283 NR Description: peroxisome biogenesis factor 7 [Mus musculus]
  misc_feature (28)..(327): Homolog of NCBI NO: 34852639 NR Description: similar to peroxisomal PTS2 receptor [Rattus
  misc_feature (28)..(327): Homolog of NCBI NO: 4505731 NR Description: peroxisomal biogenesis factor 7; peroxisome
  misc_feature (20)..(336): Homolog of NCBI NO: 28195239 NR Description: peroxisomal targeting signal type 2 receptor
  misc_feature (20)..(336): Homolog of NCBI NO: 16611997 NR Description: peroxisomal targeting signal 2 receptor
  misc_feature (20)..(336): Homolog of NCBI NO: 4689316 NR Description: peroxisomal targeting signal type 2 receptor
  misc_feature (20)..(336): Homolog of NCBI NO: 15218882 NR Description: peroxisomal targeting signal type 2 receptor Pex7p
IFEKTLLLIQSLTGEEEEAMPVFKAPFNGYSVKFSPFYESRLAVATAQNFGILGNGRIHVLELAPGAPGVTESVSYDTADAVYDVCWSESHDSVLIAAIGDGSVKIYDTALPPPSNPIRSFQEHAREVQSVDYNPTRRDSFLTSSWDDTVKLWAMDRPASVRTFKEHAYCVYQAVWNPKHGDVFASASGDCTLRIWDVREPGSTMIIPAHDFEILSCDWNKYDDCILATSSVDKTVKVWDVRSYRVPLAVLNGHGYAVRKVKFSPHRRSLIASCSYDMSVCLWDYMVEDALVGRYDHHTEFAVGIDMSVLVEGLMASTGWDELVYVWQQGMDPRAS

SEQ ID NO: 39216 - protein, 317 aa, Arabidopsis thaliana
  peptide (1)..(317): Ceres Seq. ID no. 12370971
  misc_feature (8)..(191): Homolog of NCBI NO: 40746753 NR Description: hypothetical protein AN0880.2 [Aspergillus
  misc_feature (9)..(309): Homolog of NCBI NO: 31216935 NR Description: ENSANGP00000020634 [Anopheles gambiae]
  misc_feature (9)..(308): Homolog of NCBI NO: 25090901 NR Description: Peroxisomal targeting signal 2 receptor (PTS2
  misc_feature (9)..(308): Homolog of NCBI NO: 6679283 NR Description: peroxisome biogenesis factor 7 [Mus musculus]
  misc_feature (9)..(308): Homolog of NCBI NO: 34852639 NR Description: similar to peroxisomal PTS2 receptor [Rattus
  misc_feature (9)..(308): Homolog of NCBI NO: 4505731 NR Description: peroxisomal biogenesis factor 7; peroxisome
  misc_feature (1)..(317): Homolog of NCBI NO: 28195239 NR Description: peroxisomal targeting signal type 2 receptor
  misc_feature (1)..(317): Homolog of NCBI NO: 16611997 NR Description: peroxisomal targeting signal 2 receptor
  misc_feature (1)..(317): Homolog of NCBI NO: 4689316 NR Description: peroxisomal targeting signal type 2 receptor
  misc_feature (1)..(317): Homolog of NCBI NO: 15218882 NR Description: peroxisomal targeting signal type 2 receptor Pex7p
MPVFKAPFNGYSVKFSPFYESRLAVATAQNFGILGNGRIHVLELAPGAPGVTESVSYDTADAVYDVCWSESHDSVLIAAIGDGSVKIYDTALPPPSNPIRSFQEHAREVQSVDYNPTRRDSFLTSSWDDTVKLWAMDRPASVRTFKEHAYCVYQAVWNPKHGDVFASASGDCTLRIWDVREPGSTMIIPAHDFEILSCDWNKYDDCILATSSVDKTVKVWDVRSYRVPLAVLNGHGYAVRKVKFSPHRRSLIASCSYDMSVCLWDYMVEDALVGRYDHHTEFAVGIDMSVLVEGLMASTGWDELVYVWQQGMDPRAS

SEQ ID NO: 39217 - protein, 182 aa, Arabidopsis thaliana
  peptide (1)..(182): Ceres Seq. ID no. 12370972
  misc_feature (1)..(56): Homolog of NCBI NO: 40746753 NR Description: hypothetical protein AN0880.2 [Aspergillus
  misc_feature (1)..(174): Homolog of NCBI NO: 31216935 NR Description: ENSANGP00000020634 [Anopheles gambiae]
  misc_feature (1)..(173): Homolog of NCBI NO: 25090901 NR Description: Peroxisomal targeting signal 2 receptor (PTS2
  misc_feature (1)..(173): Homolog of NCBI NO: 6679283 NR Description: peroxisome biogenesis factor 7 [Mus musculus]
  misc_feature (1)..(173): Homolog of NCBI NO: 34852639 NR Description: similar to peroxisomal PTS2 receptor [Rattus
  misc_feature (1)..(173): Homolog of NCBI NO: 4505731 NR Description: peroxisomal biogenesis factor 7; peroxisome
  misc_feature (1)..(182): Homolog of NCBI NO: 28195239 NR Description: peroxisomal targeting signal type 2 receptor
  misc_feature (1)..(182): Homolog of NCBI NO: 16611997 NR Description: peroxisomal targeting signal 2 receptor
  misc_feature (1)..(182): Homolog of NCBI NO: 4689316 NR Description: peroxisomal targeting signal type 2 receptor
  misc_feature (1)..(182): Homolog of NCBI NO: 15218882 NR Description: peroxisomal targeting signal type 2 receptor Pex7p
MDRPASVRTFKEHAYCVYQAVWNPKHGDVFASASGDCTLRIWDVREPGSTMIIPAHDFEILSCDWNKYDDCILATSSVDKTVKVWDVRSYRVPLAVLNGHGYAVRKVKFSPHRRSLIASCSYDMSVCLWDYMVEDALVGRYDHHTEFAVGIDMSVLVEGLMASTGWDELVYVWQQGMDPRAS

SEQ ID NO: 39218 - DNA, 1153 bp, Arabidopsis thaliana
  misc_feature (1)..(1153): Ceres Seq. ID no. 13497349
  misc_feature: MA Experiment ID: 108569 Result: Up-regulated in Transcription
  misc_feature: MA Experiment 108569 PARAMETER Experiment Name: At_0.001%_MeJA__cDNA_P Parameter: Timepoint (hr) Value: 6
  misc_feature: MA Experiment 108569 PARAMETER Experiment Name: At_0.001%_MeJA__cDNA_P Parameter: Tissue Value: Aerial
  misc_feature: MA Experiment 108569 PARAMETER Experiment Name: At_0.001%_MeJA__cDNA_P Parameter: Treatment Value: 0.001% MeJA vs. No Treatment
  misc_feature: MA Experiment ID: 108573 Result: Up-regulated in Transcription
  misc_feature: MA Experiment 108573 PARAMETER Experiment Name: At_Drought_cDNA_P Parameter: Timepoint (hr) Value: 6
  misc_feature: MA Experiment 108573 PARAMETER Experiment Name: At_Drought_cDNA_P Parameter: Tissue Value: Aerial
  misc_feature: MA Experiment 108573 PARAMETER Experiment Name: At_Drought_cDNA_P Parameter: Treatment Value: Drought vs. No Drought
  misc_feature: MA Experiment ID: 108577 Result: Down-regulated in Transcription
  misc_feature: MA Experiment 108577 PARAMETER Experiment Name: At_42deg_Heat_cDNA_P Parameter: Temperature (deg C) Value: 42 vs. 22
  misc_feature: MA Experiment 108577 PARAMETER Experiment Name: At_42deg_Heat_cDNA_P Parameter: Timepoint (hr) Value: 6
  misc_feature: MA Experiment 108577 PARAMETER Experiment Name: At_42deg_Heat_cDNA_P Parameter: Tissue Value: Aerial
  misc_feature: MA Experiment ID: 20001451 Result: Down-regulated in Transcription
  misc_feature: MA Experiment 20001451 PARAMETER Experiment Name: At_Far-red-induction_P Parameter: Age (day) Value: 7
  misc_feature: MA Experiment 20001451 PARAMETER Experiment Name: At_Far-red-induction_P Parameter: Light Value: Far-red vs. White
  misc_feature: MA Experiment 20001451 PARAMETER Experiment Name: At_Far-red-induction_P Parameter: Organism Value: A. thaliana
  misc_feature: MA Experiment 20001451 PARAMETER Experiment Name: At_Far-red-induction_P Parameter: Plant Line Value: Columbia
  misc_feature: MA Experiment 20001451 PARAMETER Experiment Name: At_Far-red-induction_P Parameter: Timepoint (hr) Value: 24
  misc_feature: MA Experiment 20001451 PARAMETER Experiment Name: At_Far-red-induction_P Parameter: Tissue Value: Whole Plant
aaaattgaaattcgaaaacagaacaaaaaaaaaaatctctctcaatctctctcagatctgaatccatccatcaccgatctctaatggcggcaccaccagcatcatcctcggcgagggaagagttcgtgtacctcgcaaagctcgcagagcaagcggaacgttacgaagaaatggttgaattcatggaaaaagtcgctgaagccgttgacaaagacgaactcaccgtcgaagaacgtaatctcctctccgtcgcttacaaaaacgtaatcggcgctcgtcgtgcttcctggagaatcatctcttccattgaacaaaaagaagagagtcgtggtaacgatgaccatgtgaccacgatccgtgattacagaagcaagatcgaatctgagttatcgaaaatctgtgacggtattcttaagcttcttgatactagacttgttcctgcttctgctaatggagattctaaggttttttaccttaagatgaagggagattatcataggtatttggctgagtttaagactggtcaagagaggaaagatgctgctgaacatactctcaccgcttacaaagctgctcaggatattgctaatgctgaattggctccaacgcatccgattcgtcttggtttggctttgaatttctctgtgttttactatgagattcttaattctccagatcgtgcttgtaatctcgctaagcaggcgtttgatgaagccattgctgagttagatactcttggagaggagtcatacaaggatagtaccttgatcatgcagcttcttcgtgacaatcttactctctggacttctgacatgcaggacgaaagtccggaggagattaaagaagcagcagcaccaaagcctgctgaagaacagaaggagatctaagtttgtggtttcttttttcagtattcttaagttatgcaattataattatgtttctgcttggtgtttattttctaatctttcctttgctatccccgaagcttctaaggccgtctaattcttgtcctttgtttgcttttctcaatcgtggatgctactggatttctgttttgttttacttcttctcttgattgattgcatttcccggcttatgccttgtacttgaaactcagttttctctcttattaatgatttgccattcacctggt

SEQ ID NO: 39219 - protein, 267 aa, Arabidopsis thaliana
  peptide (1)..(267): Ceres Seq. ID no. 13497350
  misc_feature (11)..(248): Pfam Name: 14-3-3 protein Pfam Description: 14-3-3 protein
  misc_feature (1)..(265): Homolog of NCBI NO: 8099063 NR Description: 14-3-3 protein [Populus x canescens]
  misc_feature (8)..(265): Homolog of NCBI NO: 1361987 NR Description: 14-3-3 protein homolog GF14 chi chain -
  misc_feature (9)..(265): Homolog of NCBI NO: 13447104 NR Description: GF14 omega [Brassica napus]
  misc_feature (4)..(266): Homolog of NCBI NO: 20340229 NR Description: 14-3-3-like protein [Thellungiella halophila]
  misc_feature (8)..(265): Homolog of NCBI NO: 487791 NR Description: GF14omega isoform
  misc_feature (3)..(265): Homolog of NCBI NO: 1702986 NR Description: 14-3-3-like protein GF14 chi (General regulatory
  misc_feature (8)..(265): Homolog of NCBI NO: 18411901 NR Description: 14-3-3 protein GF14 omega (grf2) [Arabidopsis
  misc_feature (3)..(265): Homolog of NCBI NO: 18413181 NR Description: 14-3-3 protein GF14 chi (grf1) [Arabidopsis
  misc_feature (1)..(267): Homolog of NCBI NO: 14532442 NR Description: At1g35160/T32G9_30 [Arabidopsis thaliana]
  misc_feature (1)..(267): Homolog of NCBI NO: 18399524 NR Description: 14-3-3 protein GF14 phi (grf4) [Arabidopsis
MAAPPASSSAREEFVYLAKLAEQAERYEEMVEFMEKVAEAVDKDELTVEERNLLSVAYKNVIGARRASWRIISSIEQKEESRGNDDHVTTIRDYRSKIESELSKICDGILKLLDTRLVPASANGDSKVFYLKMKGDYHRYLAEFKTGQERKDAAEHTLTAYKAAQDIANAELAPTHPIRLGLALNFSVFYYEILNSPDRACNLAKQAFDEAIAELDTLGEESYKDSTLIMQLLRDNLTLWTSDMQDESPEEIKEAAAPKPAEEQKEI

SEQ ID NO: 39220 - protein, 238 aa, Arabidopsis thaliana
  peptide (1)..(238): Ceres Seq. ID no. 13497351
  misc_feature (1)..(219): Pfam Name: 14-3-3 protein Pfam Description: 14-3-3 protein
  misc_feature (1)..(236): Homolog of NCBI NO: 8099063 NR Description: 14-3-3 protein [Populus x canescens]
  misc_feature (1)..(236): Homolog of NCBI NO: 1361987 NR Description: 14-3-3 protein homolog GF14 chi chain -
  misc_feature (1)..(236): Homolog of NCBI NO: 13447104 NR Description: GF14 omega [Brassica napus]
  misc_feature (1)..(237): Homolog of NCBI NO: 20340229 NR Description: 14-3-3-like protein [Thellungiella halophila]
  misc_feature (1)..(236): Homolog of NCBI NO: 487791 NR Description: GF14omega isoform
  misc_feature (1)..(236): Homolog of NCBI NO: 1702986 NR Description: 14-3-3-like protein GF14 chi (General regulatory
  misc_feature (1)..(236): Homolog of NCBI NO: 18411901 NR Description: 14-3-3 protein GF14 omega (grf2) [Arabidopsis
  misc_feature (1)..(236): Homolog of NCBI NO: 18413181 NR Description: 14-3-3 protein GF14 chi (grf1) [Arabidopsis
  misc_feature (1)..(238): Homolog of NCBI NO: 14532442 NR Description: At1g35160/T32G9_30 [Arabidopsis thaliana]
  misc_feature (1)..(238): Homolog of NCBI NO: 18399524 NR Description: 14-3-3 protein GF14 phi (grf4) [Arabidopsis
MVEFMEKVAEAVDKDELTVEERNLLSVAYKNVIGARRASWRIISSIEQKEESRGNDDHVTTIRDYRSKIESELSKICDGILKLLDTRLVPASANGDSKVFYLKMKGDYHRYLAEFKTGQERKDAAEHTLTAYKAAQDIANAELAPTHPIRLGLALNFSVFYYEILNSPDRACNLAKQAFDEAIAELDTLGEESYKDSTLIMQLLRDNLTLWTSDMQDESPEEIKEAAAPKPAEEQKEI

SEQ ID NO: 39221 - protein, 234 aa, Arabidopsis thaliana
  peptide (1)..(234): Ceres Seq. ID no. 13497352
  misc_feature (1)..(215): Pfam Name: 14-3-3 protein Pfam Description: 14-3-3 protein
  misc_feature (1)..(232): Homolog of NCBI NO: 8099063 NR Description: 14-3-3 protein [Populus x canescens]
  misc_feature (1)..(232): Homolog of NCBI NO: 1361987 NR Description: 14-3-3 protein homolog GF14 chi chain -
  misc_feature (1)..(232): Homolog of NCBI NO: 13447104 NR Description: GF14 omega [Brassica napus]
  misc_feature (1)..(233): Homolog of NCBI NO: 20340229 NR Description: 14-3-3-like protein [Thellungiella halophila]
  misc_feature (1)..(232): Homolog of NCBI NO: 487791 NR Description: GF14omega isoform
  misc_feature (1)..(232): Homolog of NCBI NO: 1702986 NR Description: 14-3-3-like protein GF14 chi (General regulatory
  misc_feature (1)..(232): Homolog of NCBI NO: 18411901 NR Description: 14-3-3 protein GF14 omega (grf2) [Arabidopsis
  misc_feature (1)..(232): Homolog of NCBI NO: 18413181 NR Description: 14-3-3 protein GF14 chi (grf1) [Arabidopsis
  misc_feature (1)..(234): Homolog of NCBI NO: 14532442 NR Description: At1g35160/T32G9_30 [Arabidopsis thaliana]
  misc_feature (1)..(234): Homolog of NCBI NO: 18399524 NR Description: 14-3-3 protein GF14 phi (grf4) [Arabidopsis
MEKVAEAVDKDELTVEERNLLSVAYKNVIGARRASWRIISSIEQKEESRGNDDHVTTIRDYRSKIESELSKICDGILKLLDTRLVPASANGDSKVFYLKMKGDYHRYLAEFKTGQERKDAAEHTLTAYKAAQDIANAELAPTHPIRLGLALNFSVFYYEILNSPDRACNLAKQAFDEAIAELDTLGEESYKDSTLIMQLLRDNLTLWTSDMQDESPEEIKEAAAPKPAEEQKEI

SEQ ID NO: 39222 - DNA, 1238 bp, Arabidopsis thaliana
  misc_feature (1)..(1238): Ceres Seq. ID no. 13488953
  misc_feature: MA Experiment ID: 108434 Result: Down-regulated in Transcription
  misc_feature: MA Experiment 108434 PARAMETER Experiment Name: At_Root_Tips_cDNA_P Parameter: Tissue Value: Root Tips
  misc_feature: MA Experiment ID: 108595 Result: Up-regulated in Transcription
  misc_feature: MA Experiment 108595 PARAMETER Experiment Name: At_Ler-pi_Ovule_cDNA_P Parameter: Plant Line Value: null
  misc_feature: MA Experiment ID: 20000495 Result: Down-regulated in Transcription
  misc_feature: MA Experiment 20000495 PARAMETER Experiment Name: At_Guard_Cells_P Parameter: Harvest Date Value: 8/2/2002
  misc_feature: MA Experiment 20000495 PARAMETER Experiment Name: At_Guard_Cells_P Parameter: Organism Value: A. thaliana
  misc_feature: MA Experiment 20000495 PARAMETER Experiment Name: At_Guard_Cells_P Parameter: Tissue Value: Guard Cells vs. Leaves
  misc_feature: MA Experiment ID: 20001757 Result: Down-regulated in Transcription
  misc_feature: MA Experiment 20001757 PARAMETER Experiment Name: At_50mM_NH4NO3_L-to-H_P Parameter: Timepoint (hr) Value: 6
  misc_feature: MA Experiment 20001757 PARAMETER Experiment Name: At_50mM_NH4NO3_L-to-H_P Parameter: Tissue Value: Leaf
  misc_feature: MA Experiment 20001757 PARAMETER Experiment Name: At_50mM_NH4NO3_L-to-H_P Parameter: Treatment Value: 50mM NH4NO3 vs 100mM Mannitol
agtgagtattcaatctcatagactcatagcaatggcgaatcacaacagtttcacttacatggaccatagcttcagcgatataagtctcaactttgattcctctgctttcagcgattgtaacagtgacatatcctgcgagtttccaacaactacctccgagagccgtcaacgaaaactcttcctctcttgcgccgttgataattccgatgacgtgatcagaaatctcataacgcatcttgagtcatcttcttcgatcgaggaacagaagcaagctgctatggagattagactcttatcaaagaacaaaccagagaatcgtatcaaactcgctaaagccggtgctattaaaccgttggtttctttaatctcgtcttcggatcttcagcttcaagagtatggagtcactgcggtgttgaatctatctctctgcgatgagaacaaagagatgattgtttcttccggtgcggttaaaccgctcgttaatgcgttgagattaggaacaccgacgacgaaagagaacgctgcttgtgctctgctccggttatctcaagtggaggaaaacaaaatcacgattgggagatcaggagcgattcctttactagtgaaccttctagaaaatggcggattcagagcgaagaaagacgcgtcgacggctttatactcgttgtgttcgacgaacgagaacaaaaccagagctgttgaatctgggattatgaagccgttagtggagttaatgattgattttgaatcggatatggttgataaatcagcgtttgttatgaatctgttaatgtcggcgccggaatcgaagccggcggttgtggaagaaggaggagttccggtgttggttgagattgttgaagcgggaacacagagacagaaggagataagtgtgtcgatattgttgcagctttgtgaggagagtgttgtgtatcgaaccatggtggctcgtgaaggagcggttcctccgctcgtggctttatcgcagggtagtgcgagtcgtggtgctaaggtaaaggctgaggcgttgatagagcttcttaggcaacccagacaacaacaacaacaacaacactttgaatctaacgacaacgagagataacactttagtttgggctttttattaatgggcctttgtagaatacatatcttgttaattatttgggcggcccaagctgaacacatatcttgttaattattggtcgatgtgttttgcatcaaagttgcattacttgcgc

SEQ ID NO: 39223 - protein, 366 aa, Arabidopsis thaliana
  peptide (1)..(366): Ceres Seq. ID no. 13488954
  misc_feature (143)..(183): Pfam Name: Armadillo/beta-catenin-like repeat Pfam Description: Armadillo/beta-catenin-like repeat
  misc_feature (86)..(352): Homolog of NCBI NO: 34393717 NR Description: arm repeat containing protein homolog-like
  misc_feature (47)..(351): Homolog of NCBI NO: 28974687 NR Description: arm repeat-containing protein [Nicotiana tabacum]
  misc_feature (82)..(353): Homolog of NCBI NO: 26452478 NR Description: unknown protein [Arabidopsis thaliana]
  misc_feature (24)..(351): Homolog of NCBI NO: 34393600 NR Description: arm repeat-containing protein-like protein
  misc_feature (11)..(351): Homolog of NCBI NO: 16226454 NR Description: AT3g01400/T13O15_4 [Arabidopsis thaliana]
  misc_feature (11)..(351): Homolog of NCBI NO: 21592960 NR Description: unknown [Arabidopsis thaliana]
  misc_feature (11)..(351): Homolog of NCBI NO: 18395805 NR Description: expressed protein [Arabidopsis thaliana]
  misc_feature (38)..(366): Homolog of NCBI NO: 8843789 NR Description: phosphoinositide-specific phospholipase C-line
  misc_feature (11)..(366): Homolog of NCBI NO: 15237730 NR Description: expressed protein [Arabidopsis thaliana]
  misc_feature (11)..(366): Homolog of NCBI NO: 26452835 NR Description: unknown protein [Arabidopsis thaliana]
VSIQSHRLIAMANHNSFTYMDHSFSDISLNFDSSAFSDCNSDISCEFPTTTSESRQRKLFLSCAVDNSDDVIRNLITHLESSSSIEEQKQAAMEIRLLSKNKPENRIKLAKAGAIKPLVSLISSSDLQLQEYGVTAVLNLSLCDENKEMIVSSGAVKPLVNALRLGTPTTKENAACALLRLSQVEENKITIGRSGAIPLLVNLLENGGFRAKKDASTALYSLCSTNENKTRAVESGIMKPLVELMIDFESDMVDKSAFVMNLLMSAPESKPAVVEEGGVPVLVEIVEAGTQRQKEISVSILLQLCEESVVYRTMVAREGAVPPLVALSQGSASRGAKVKAEALIELLRQPRQQQQQQHFESNDNER

SEQ ID NO: 39224 - protein, 356 aa, Arabidopsis thaliana
  peptide (1)..(356): Ceres Seq. ID no. 13488955
  misc_feature (133)..(173): Pfam Name: Armadillo/beta-catenin-like repeat Pfam Description: Armadillo/beta-catenin-like repeat
  misc_feature (76)..(342): Homolog of NCBI NO: 34393717 NR Description: arm repeat containing protein homolog-like
  misc_feature (37)..(341): Homolog of NCBI NO: 28974687 NR Description: arm repeat-containing protein [Nicotiana tabacum]
  misc_feature (72)..(343): Homolog of NCBI NO: 26452478 NR Description: unknown protein [Arabidopsis thaliana]
  misc_feature (14)..(341): Homolog of NCBI NO: 34393600 NR Description: arm repeat-containing protein-like protein
  misc_feature (1)..(341): Homolog of NCBI NO: 16226454 NR Description: AT3g01400/T13O15_4 [Arabidopsis thaliana]
  misc_feature (1)..(341): Homolog of NCBI NO: 21592960 NR Description: unknown [Arabidopsis thaliana]
  misc_feature (1)..(341): Homolog of NCBI NO: 18395805 NR Description: expressed protein [Arabidopsis thaliana]
  misc_feature (28)..(356): Homolog of NCBI NO: 8843789 NR Description: phosphoinositide-specific phospholipase C-line
  misc_feature (1)..(356): Homolog of NCBI NO: 15237730 NR Description: expressed protein [Arabidopsis thaliana]
  misc_feature (1)..(356): Homolog of NCBI NO: 26452835 NR Description: unknown protein [Arabidopsis thaliana]
MANHNSFTYMDHSFSDISLNFDSSAFSDCNSDISCEFPTTTSESRQRKLFLSCAVDNSDDVIRNLITHLESSSSIEEQKQAAMEIRLLSKNKPENRIKLAKAGAIKPLVSLISSSDLQLQEYGVTAVLNLSLCDENKEMIVSSGAVKPLVNALRLGTPTTKENAACALLRLSQVEENKITIGRSGAIPLLVNLLENGGFRAKKDASTALYSLCSTNENKTRAVESGIMKPLVELMIDFESDMVDKSAFVMNLLMSAPESKPAVVEEGGVPVLVEIVEAGTQRQKEISVSILLQLCEESVVYRTMVAREGAVPPLVALSQGSASRGAKVKAEALIELLRQPRQQQQQQHFESNDNER

SEQ ID NO: 39225 - protein, 347 aa, Arabidopsis thaliana
  peptide (1)..(347): Ceres Seq. ID no. 13488956
  misc_feature (124)..(164): Pfam Name: Armadillo/beta-catenin-like repeat Pfam Description: Armadillo/beta-catenin-like repeat
  misc_feature (67)..(333): Homolog of NCBI NO: 34393717 NR Description: arm repeat containing protein homolog-like
  misc_feature (28)..(332): Homolog of NCBI NO: 28974687 NR Description: arm repeat-containing protein [Nicotiana tabacum]
  misc_feature (63)..(334): Homolog of NCBI NO: 26452478 NR Description: unknown protein [Arabidopsis thaliana]
  misc_feature (5)..(332): Homolog of NCBI NO: 34393600 NR Description: arm repeat-containing protein-like protein
  misc_feature (1)..(332): Homolog of NCBI NO: 16226454 NR Description: AT3g01400/T13O15_4 [Arabidopsis thaliana]
  misc_feature (1)..(332): Homolog of NCBI NO: 21592960 NR Description: unknown [Arabidopsis thaliana]
  misc_feature (1)..(332): Homolog of NCBI NO: 18395805 NR Description: expressed protein [Arabidopsis thaliana]
  misc_feature (19)..(347): Homolog of NCBI NO: 8843789 NR Description: phosphoinositide-specific phospholipase C-line
  misc_feature (1)..(347): Homolog of NCBI NO: 15237730 NR Description: expressed protein [Arabidopsis thaliana]
  misc_feature (1)..(347): Homolog of NCBI NO: 26452835 NR Description: unknown protein [Arabidopsis thaliana]
MDHSFSDISLNFDSSAFSDCNSDISCEFPTTTSESRQRKLFLSCAVDNSDDVIRNLITHLESSSSIEEQKQAAMEIRLLSKNKPENRIKLAKAGAIKPLVSLISSSDLQLQEYGVTAVLNLSLCDENKEMIVSSGAVKPLVNALRLGTPTTKENAACALLRLSQVEENKITIGRSGAIPLLVNLLENGGFRAKKDASTALYSLCSTNENKTRAVESGIMKPLVELMIDFESDMVDKSAFVMNLLMSAPESKPAVVEEGGVPVLVEIVEAGTQRQKEISVSILLQLCEESVVYRTMVAREGAVPPLVALSQGSASRGAKVKAEALIELLRQPRQQQQQQHFESNDNER

SEQ ID NO: 39226 - DNA, 825 bp, Arabidopsis thaliana
  misc_feature (1)..(825): Ceres Seq. ID no. 12325920
  misc_feature: MA Experiment ID: 108434 Result: Up-regulated in Transcription
  misc_feature: MA Experiment 108434 PARAMETER Experiment Name: At_Root_Tips_cDNA_P Parameter: Tissue Value: Root Tips
  misc_feature: MA Experiment ID: 108463 Result: Down-regulated in Transcription
  misc_feature: MA Experiment 108463 PARAMETER Experiment Name: At_Germinating_Seeds_cDNA_P Parameter: Age (day) Value: 3 vs. 0
  misc_feature: MA Experiment 108463 PARAMETER Experiment Name: At_Germinating_Seeds_cDNA_P Parameter: Tissue Value: Germinating Seeds
  misc_feature: MA Experiment ID: 108464 Result: Down-regulated in Transcription
  misc_feature: MA Experiment 108464 PARAMETER Experiment Name: At_Germinating_Seeds_cDNA_P Parameter: Age (day) Value: 4 vs. 0
  misc_feature: MA Experiment 108464 PARAMETER Experiment Name: At_Germinating_Seeds_cDNA_P Parameter: Tissue Value: Germinating Seeds
  misc_feature: MA Experiment ID: 108561 Result: Down-regulated in Transcription
  misc_feature: MA Experiment 108561 PARAMETER Experiment Name: At_100uM_ABA_cDNA_P Parameter: Timepoint (hr) Value: 6
  misc_feature: MA Experiment 108561 PARAMETER Experiment Name: At_100uM_ABA_cDNA_P Parameter: Tissue Value: Aerial
  misc_feature: MA Experiment 108561 PARAMETER Experiment Name: At_100uM_ABA_cDNA_P Parameter: Treatment Value: 100uM ABA vs. No Treatment
  misc_feature: MA Experiment ID: 108573 Result: Down-regulated in Transcription
  misc_feature: MA Experiment 108573 PARAMETER Experiment Name: At_Drought_cDNA_P Parameter: Timepoint (hr) Value: 6
  misc_feature: MA Experiment 108573 PARAMETER Experiment Name: At_Drought_cDNA_P Parameter: Tissue Value: Aerial
  misc_feature: MA Experiment 108573 PARAMETER Experiment Name: At_Drought_cDNA_P Parameter: Treatment Value: Drought vs. No Drought
  misc_feature: MA Experiment ID: 108577 Result: Down-regulated in Transcription
  misc_feature: MA Experiment 108577 PARAMETER Experiment Name: At_42deg_Heat_cDNA_P Parameter: Temperature (deg C) Value: 42 vs. 22
  misc_feature: MA Experiment 108577 PARAMETER Experiment Name: At_42deg_Heat_cDNA_P Parameter: Timepoint (hr) Value: 6
  misc_feature: MA Experiment 108577 PARAMETER Experiment Name: At_42deg_Heat_cDNA_P Parameter: Tissue Value: Aerial
  misc_feature: MA Experiment ID: 108585 Result: Down-regulated in Transcription
  misc_feature: MA Experiment 108585 PARAMETER Experiment Name: At_5mM_NaNP_cDNA_P Parameter: Timepoint (hr) Value: 6
  misc_feature: MA Experiment 108585 PARAMETER Experiment Name: At_5mM_NaNP_cDNA_P Parameter: Tissue Value: Aerial
  misc_feature: MA Experiment 108585 PARAMETER Experiment Name: At_5mM_NaNP_cDNA_P Parameter: Treatment Value: null
  misc_feature: MA Experiment ID: 108668 Result: Down-regulated in Transcription
  misc_feature: MA Experiment 108668 PARAMETER Experiment Name: At_2mM_SA_cDNA_P Parameter: Plant Line Value: WS
  misc_feature: MA Experiment 108668 PARAMETER Experiment Name: At_2mM_SA_cDNA_P Parameter: Timepoint (hr) Value: 6
  misc_feature: MA Experiment 108668 PARAMETER Experiment Name: At_2mM_SA_cDNA_P Parameter: Treatment Value: 2mM SA vs. No Treatment
  misc_feature: MA Experiment ID: 20000071 Result: Down-regulated in Transcription
  misc_feature: MA Experiment 20000071 PARAMETER Experiment Name: At_100uM_ABA_Mutants_cDNA_P Parameter: Plant Line Value: CS8104
  misc_feature: MA Experiment 20000071 PARAMETER Experiment Name: At_100uM_ABA_Mutants_cDNA_P Parameter: Timepoint (hr) Value: 6
  misc_feature: MA Experiment 20000071 PARAMETER Experiment Name: At_100uM_ABA_Mutants_cDNA_P Parameter: Tissue Value: Aerial
  misc_feature: MA Experiment 20000071 PARAMETER Experiment Name: At_100uM_ABA_Mutants_cDNA_P Parameter: Treatment Value: 100uM ABA vs. No Treatment
  misc_feature: MA Experiment ID: 20000072 Result: Down-regulated in Transcription
  misc_feature: MA Experiment 20000072 PARAMETER Experiment Name: At_100uM_ABA_Mutants_cDNA_P Parameter: Plant Line Value: CS8105
  misc_feature: MA Experiment 20000072 PARAMETER Experiment Name: At_100uM_ABA_Mutants_cDNA_P Parameter: Timepoint (hr) Value: 6
  misc_feature: MA Experiment 20000072 PARAMETER Experiment Name: At_100uM_ABA_Mutants_cDNA_P Parameter: Tissue Value: Aerial
  misc_feature: MA Experiment 20000072 PARAMETER Experiment Name: At_100uM_ABA_Mutants_cDNA_P Parameter: Treatment Value: 100uM ABA vs. No Treatment
  misc_feature: MA Experiment ID: 20000111 Result: Down-regulated in Transcription
  misc_feature: MA Experiment 20000111 PARAMETER Experiment Name: At_42deg_Heat_cDNA_P Parameter: Temperature (deg C) Value: 42 vs. 22
  misc_feature: MA Experiment 20000111 PARAMETER Experiment Name: At_42deg_Heat_cDNA_P Parameter: Timepoint (hr) Value: 6
  misc_feature: MA Experiment 20000111 PARAMETER Experiment Name: At_42deg_Heat_cDNA_P Parameter: Tissue Value: Aerial
  misc_feature: MA Experiment ID: 20000113 Result: Down-regulated in Transcription
  misc_feature: MA Experiment 20000113 PARAMETER Experiment Name: At_42deg_Heat_cDNA_P Parameter: Temperature (deg C) Value: 42 vs. 22
  misc_feature: MA Experiment 20000113 PARAMETER Experiment Name: At_42deg_Heat_cDNA_P Parameter: Timepoint (hr) Value: 8
  misc_feature: MA Experiment 20000113 PARAMETER Experiment Name: At_42deg_Heat_cDNA_P Parameter: Tissue Value: Aerial
  misc_feature: MA Experiment ID: 20000117 Result: Down-regulated in Transcription
  misc_feature: MA Experiment 20000117 PARAMETER Experiment Name: At_100uM_ABA_Mutants_cDNA_P Parameter: Plant Line Value: Columbia
  misc_feature: MA Experiment 20000117 PARAMETER Experiment Name: At_100uM_ABA_Mutants_cDNA_P Parameter: Timepoint (hr) Value: 6
  misc_feature: MA Experiment 20000117 PARAMETER Experiment Name: At_100uM_ABA_Mutants_cDNA_P Parameter: Tissue Value: Aerial
  misc_feature: MA Experiment 20000117 PARAMETER Experiment Name: At_100uM_ABA_Mutants_cDNA_P Parameter: Treatment Value: 100uM ABA vs. No Treatment
  misc_feature: MA Experiment ID: 20000182 Result: Down-regulated in Transcription
  misc_feature: MA Experiment 20000182 PARAMETER Experiment Name: At_2mM_SA_P Parameter: Age (day) Value: 14
  misc_feature: MA Experiment 20000182 PARAMETER Experiment Name: At_2mM_SA_P Parameter: Organism Value: A. thaliana
  misc_feature: MA Experiment 20000182 PARAMETER Experiment Name: At_2mM_SA_P Parameter: Plant Line Value: WS
  misc_feature: MA Experiment 20000182 PARAMETER Experiment Name: At_2mM_SA_P Parameter: Timepoint (hr) Value: 6
  misc_feature: MA Experiment 20000182 PARAMETER Experiment Name: At_2mM_SA_P Parameter: Tissue Value: Aerial
  misc_feature: MA Experiment 20000182 PARAMETER Experiment Name: At_2mM_SA_P Parameter: Treatment Value: 2mM SA vs. No Treatment
  misc_feature: MA Experiment ID: 20000234 Result: Up-regulated in Transcription
  misc_feature: MA Experiment 20000234 PARAMETER Experiment Name: At_Siliques_P Parameter: Age (day) Value: 21
  misc_feature: MA Experiment 20000234 PARAMETER Experiment Name: At_Siliques_P Parameter: Organism Value: A. thaliana
  misc_feature: MA Experiment 20000234 PARAMETER Experiment Name: At_Siliques_P Parameter: Plant Line Value: WS
  misc_feature: MA Experiment 20000234 PARAMETER Experiment Name: At_Siliques_P Parameter: Tissue Value: Less Than 5mm Siliques vs. Whole Plant
  misc_feature: MA Experiment ID: 20000235 Result: Up-regulated in Transcription
  misc_feature: MA Experiment 20000235 PARAMETER Experiment Name: At_Siliques_P Parameter: Age (day) Value: 21
  misc_feature: MA Experiment 20000235 PARAMETER Experiment Name: At_Siliques_P Parameter: Organism Value: A. thaliana
  misc_feature: MA Experiment 20000235 PARAMETER Experiment Name: At_Siliques_P Parameter: Plant Line Value: WS
  misc_feature: MA Experiment 20000235 PARAMETER Experiment Name: At_Siliques_P Parameter: Tissue Value: 5-10mm Siliques vs. Whole Plant
  misc_feature: MA Experiment ID: 20000265 Result: Up-regulated in Transcription
  misc_feature: MA Experiment 20000265 PARAMETER Experiment Name: At_Open_Flower_P Parameter: Age (day) Value: 21
  misc_feature: MA Experiment 20000265 PARAMETER Experiment Name: At_Open_Flower_P Parameter: Plant Line Value: WS
  misc_feature: MA Experiment 20000265 PARAMETER Experiment Name: At_Open_Flower_P Parameter: Tissue Value: Closed Flower vs. Whole Plant
  misc_feature: MA Experiment ID: 20000437 Result: Down-regulated in Transcription
  misc_feature: MA Experiment 20000437 PARAMETER Experiment Name: At_Drought_P Parameter: Age (day) Value: 8
  misc_feature: MA Experiment 20000437 PARAMETER Experiment Name: At_Drought_P Parameter: Organism Value: A. thaliana
  misc_feature: MA Experiment 20000437 PARAMETER Experiment Name: At_Drought_P Parameter: Plant Line Value: WS
  misc_feature: MA Experiment 20000437 PARAMETER Experiment Name: At_Drought_P Parameter: Timepoint (hr) Value: 24
  misc_feature: MA Experiment 20000437 PARAMETER Experiment Name: At_Drought_P Parameter: Tissue Value: Whole Plant
  misc_feature: MA Experiment 20000437 PARAMETER Experiment Name: At_Drought_P Parameter: Treatment Value: Drought vs. No Drought
  misc_feature: MA Experiment ID: 20000495 Result: Down-regulated in Transcription
  misc_feature: MA Experiment 20000495 PARAMETER Experiment Name: At_Guard_Cells_P Parameter: Harvest Date Value: 8/2/2002
  misc_feature: MA Experiment 20000495 PARAMETER Experiment Name: At_Guard_Cells_P Parameter: Organism Value: A. thaliana
  misc_feature: MA Experiment 20000495 PARAMETER Experiment Name: At_Guard_Cells_P Parameter: Tissue Value: Guard Cells vs. Leaves
  misc_feature: MA Experiment ID: 20001248 Result: Down-regulated in Transcription
  misc_feature: MA Experiment 20001248 PARAMETER Experiment Name: At_Far-red-induction_P Parameter: Age (day) Value: 7
  misc_feature: MA Experiment 20001248 PARAMETER Experiment Name: At_Far-red-induction_P Parameter: Light Value: Far-red vs. White
  misc_feature: MA Experiment 20001248 PARAMETER Experiment Name: At_Far-red-induction_P Parameter: Organism Value: A. thaliana
  misc_feature: MA Experiment 20001248 PARAMETER Experiment Name: At_Far-red-induction_P Parameter: Plant Line Value: Columbia
  misc_feature: MA Experiment 20001248 PARAMETER Experiment Name: At_Far-red-induction_P Parameter: Timepoint (hr) Value: 4
  misc_feature: MA Experiment 20001248 PARAMETER Experiment Name: At_Far-red-induction_P Parameter: Tissue Value: Whole Plant
  misc_feature: MA Experiment ID: 20001450 Result: Down-regulated in Transcription
  misc_feature: MA Experiment 20001450 PARAMETER Experiment Name: At_Far-red-induction_P Parameter: Age (day) Value: 7
  misc_feature: MA Experiment 20001450 PARAMETER Experiment Name: At_Far-red-induction_P Parameter: Light Value: Far-red vs. White
  misc_feature: MA Experiment 20001450 PARAMETER Experiment Name: At_Far-red-induction_P Parameter: Organism Value: A. thaliana
  misc_feature: MA Experiment 20001450 PARAMETER Experiment Name: At_Far-red-induction_P Parameter: Plant Line Value: Columbia
  misc_feature: MA Experiment 20001450 PARAMETER Experiment Name: At_Far-red-induction_P Parameter: Timepoint (hr) Value: 8
  misc_feature: MA Experiment 20001450 PARAMETER Experiment Name: At_Far-red-induction_P Parameter: Tissue Value: Whole Plant
  misc_feature: MA Experiment ID: 20001558 Result: Up-regulated in Transcription
  misc_feature: MA Experiment 20001558 PARAMETER Experiment Name: At_Drought_Soil_Dry_P Parameter: Age (day) Value: 27
  misc_feature: MA Experiment 20001558 PARAMETER Experiment Name: At_Drought_Soil_Dry_P Parameter: Organism Value: A. thaliana
  misc_feature: MA Experiment 20001558 PARAMETER Experiment Name: At_Drought_Soil_Dry_P Parameter: Plant Line Value: WS
  misc_feature: MA Experiment 20001558 PARAMETER Experiment Name: At_Drought_Soil_Dry_P Parameter: Post Timepoint (hr) Value: 6
  misc_feature: MA Experiment 20001558 PARAMETER Experiment Name: At_Drought_Soil_Dry_P Parameter: Post-Treatment Value: Re-Water vs. No Drought
  misc_feature: MA Experiment 20001558 PARAMETER Experiment Name: At_Drought_Soil_Dry_P Parameter: Timepoint (day) Value: 13
  misc_feature: MA Experiment 20001558 PARAMETER Experiment Name: At_Drought_Soil_Dry_P Parameter: Treatment Value: Drought vs. No Drought
  misc_feature: MA Experiment ID: 20001560 Result: Up-regulated in Transcription
  misc_feature: MA Experiment 20001560 PARAMETER Experiment Name: At_Drought_Soil_Dry_P Parameter: Age (day) Value: 28
  misc_feature: MA Experiment 20001560 PARAMETER Experiment Name: At_Drought_Soil_Dry_P Parameter: Organism Value: A. thaliana
  misc_feature: MA Experiment 20001560 PARAMETER Experiment Name: At_Drought_Soil_Dry_P Parameter: Plant Line Value: WS
  misc_feature: MA Experiment 20001560 PARAMETER Experiment Name: At_Drought_Soil_Dry_P Parameter: Post Timepoint (hr) Value: None
  misc_feature: MA Experiment 20001560 PARAMETER Experiment Name: At_Drought_Soil_Dry_P Parameter: Post-Treatment Value: None
  misc_feature: MA Experiment 20001560 PARAMETER Experiment Name: At_Drought_Soil_Dry_P Parameter: Timepoint (day) Value: 14
  misc_feature: MA Experiment 20001560 PARAMETER Experiment Name: At_Drought_Soil_Dry_P Parameter: Treatment Value: Drought vs. No Drought
actgttaaggaaggtcttgctgcgctaagaaagaaaagaagaagaaagatgccaggagcaattgtggaggaagagaaatctcagattgaatccatcaaagagcaattgaaactcgagaaggaagatgatgttgttgtggaggatgtgaaagacggagaggaagaagacgatgatgaagacgatgaggacgtcgaagttgaaggggaaggtggaaatgagaatgcaaagcaaagtagaagcgagaagaaaagtcgcaaagctgttctaaagcttggcatgaaacctgtctcagatgtcagcagagtgacaatcaaaagagccaagaatgtgttatttgtcatctcgaagccagatgtttacaagagtcccaatgcagagacttacgtcatttttggagaggccaaggtcgacgatttgagctctcagctacagactcaagctgctcagaggtttaagatgcctgatgtgacatccatgctacctaacgccggttctgaagctaccatggctccactagcagaggaagaagacgaagacgatgttgatgacactggtgttgaagccagagacattgatcttgtcatgacccaagcaggtgtctccaaggccaaagccgtcagtgctctaaaggctaatgatggggatatcgtttcagccattatggaactcactacatagagttgagtagtagagccacctaaattgtgcttttgtttcattgtttcttgtctcagctaccattttctttgaacattattaattatgtctccccttgatttgaagtcattatctgtctactctgatcaaagtatttaatttgcggcc

SEQ ID NO: 39227 - protein, 225 aa, Arabidopsis thaliana
  peptide (1)..(225): Ceres Seq. ID no. 12325921
  misc_feature (79)..(138): Pfam Name: NAC domain Pfam Description: NAC domain
  misc_feature (17)..(224): Homolog of NCBI NO: 34907258 NR Description: putative nascent polypeptide associated complex
  misc_feature (17)..(225): Homolog of NCBI NO: 32352154 NR Description: nascent polypeptide associated complex alpha
  misc_feature (17)..(225): Homolog of NCBI NO: 6752882 NR Description: nascent polypeptide associated complex alpha
  misc_feature (20)..(224): Homolog of NCBI NO: 34902238 NR Description: Putative nascent polypeptide associated complex
  misc_feature (20)..(225): Homolog of NCBI NO: 4115918 NR Description: similar to nascent polypeptide associated complex
  misc_feature (23)..(225): Homolog of NCBI NO: 15229149 NR Description: alpha NAC-like protein
  misc_feature (23)..(225): Homolog of NCBI NO: 13899101 NR Description: alpha NAC-like protein [Arabidopsis thaliana]
  misc_feature (17)..(225): Homolog of NCBI NO: 15235122 NR Description: putative alpha NAC
  misc_feature (17)..(225): Homolog of NCBI NO: 21536597 NR Description: putative alpha NAC [Arabidopsis thaliana]
  misc_feature (17)..(225): Homolog of NCBI NO: 18398710 NR Description: expressed protein
TVKEGLAALRKKRRRKMPGAIVEEEKSQIESIKEQLKLEKEDDVVVEDVKDGEEEDDDEDDEDVEVEGEGGNENAKQSRSEKKSRKAVLKLGMKPVSDVSRVTIKRAKNVLFVISKPDVYKSPNAETYVIFGEAKVDDLSSQLQTQAAQRFKMPDVTSMLPNAGSEATMAPLAEEEDEDDVDDTGVEARDIDLVMTQAGVSKAKAVSALKANDGDIVSAIMELTT

SEQ ID NO: 39228 - protein, 209 aa, Arabidopsis thaliana
  peptide (1)..(209): Ceres Seq. ID no. 12325922
  misc_feature (63)..(122): Pfam Name: NAC domain Pfam Description: NAC domain
  misc_feature (1)..(208): Homolog of NCBI NO: 34907258 NR Description: putative nascent polypeptide associated complex
  misc_feature (1)..(209): Homolog of NCBI NO: 32352154 NR Description: nascent polypeptide associated complex alpha
  misc_feature (1)..(209): Homolog of NCBI NO: 6752882 NR Description: nascent polypeptide associated complex alpha
  misc_feature (4)..(208): Homolog of NCBI NO: 34902238 NR Description: Putative nascent polypeptide associated complex
  misc_feature (4)..(209): Homolog of NCBI NO: 4115918 NR Description: similar to nascent polypeptide associated complex
  misc_feature (7)..(209): Homolog of NCBI NO: 15229149 NR Description: alpha NAC-like protein
  misc_feature (7)..(209): Homolog of NCBI NO: 13899101 NR Description: alpha NAC-like protein [Arabidopsis thaliana]
  misc_feature (1)..(209): Homolog of NCBI NO: 15235122 NR Description: putative alpha NAC
  misc_feature (1)..(209): Homolog of NCBI NO: 21536597 NR Description: putative alpha NAC [Arabidopsis thaliana]
  misc_feature (1)..(209): Homolog of NCBI NO: 18398710 NR Description: expressed protein
MPGAIVEEEKSQIESIKEQLKLEKEDDVVVEDVKDGEEEDDDEDDEDVEVEGEGGNENAKQSRSEKKSRKAVLKLGMKPVSDVSRVTIKRAKNVLFVISKPDVYKSPNAETYVIFGEAKVDDLSSQLQTQAAQRFKMPDVTSMLPNAGSEATMAPLAEEEDEDDVDDTGVEARDIDLVMTQAGVSKAKAVSALKANDGDIVSAIMELTT

SEQ ID NO: 39229 - protein, 133 aa, Arabidopsis thaliana
  peptide (1)..(133): Ceres Seq. ID no. 12325923
  misc_feature (1)..(46): Pfam Name: NAC domain Pfam Description: NAC domain
  misc_feature (1)..(132): Homolog of NCBI NO: 34907258 NR Description: putative nascent polypeptide associated complex
  misc_feature (1)..(133): Homolog of NCBI NO: 32352154 NR Description: nascent polypeptide associated complex alpha
  misc_feature (1)..(133): Homolog of NCBI NO: 6752882 NR Description: nascent polypeptide associated complex alpha
  misc_feature (1)..(132): Homolog of NCBI NO: 34902238 NR Description: Putative nascent polypeptide associated complex
  misc_feature (1)..(133): Homolog of NCBI NO: 4115918 NR Description: similar to nascent polypeptide associated complex
  misc_feature (1)..(133): Homolog of NCBI NO: 15229149 NR Description: alpha NAC-like protein
  misc_feature (1)..(133): Homolog of NCBI NO: 13899101 NR Description: alpha NAC-like protein [Arabidopsis thaliana]
  misc_feature (1)..(133): Homolog of NCBI NO: 15235122 NR Description: putative alpha NAC
  misc_feature (1)..(133): Homolog of NCBI NO: 21536597 NR Description: putative alpha NAC [Arabidopsis thaliana]
  misc_feature (1)..(133): Homolog of NCBI NO: 18398710 NR Description: expressed protein
MKPVSDVSRVTIKRAKNVLFVISKPDVYKSPNAETYVIFGEAKVDDLSSQLQTQAAQRFKMPDVTSMLPNAGSEATMAPLAEEEDEDDVDDTGVEARDIDLVMTQAGVSKAKAVSALKANDGDIVSAIMELTT

SEQ ID NO: 39230 - DNA, 1620 bp, Arabidopsis thaliana
  misc_feature (1)..(1620): Ceres Seq. ID no. 12330906
  misc_feature: MA Experiment ID: 108434 Result: Down-regulated in Transcription
  misc_feature: MA Experiment 108434 PARAMETER Experiment Name: At_Root_Tips_cDNA_P Parameter: Tissue Value: Root Tips
  misc_feature: MA Experiment ID: 108462 Result: Up-regulated in Transcription
  misc_feature: MA Experiment 108462 PARAMETER Experiment Name: At_Germinating_Seeds_cDNA_P Parameter: Age (day) Value: 2 vs. 0
  misc_feature: MA Experiment 108462 PARAMETER Experiment Name: At_Germinating_Seeds_cDNA_P Parameter: Tissue Value: Germinating Seeds
  misc_feature: MA Experiment ID: 108463 Result: Up-regulated in Transcription
  misc_feature: MA Experiment 108463 PARAMETER Experiment Name: At_Germinating_Seeds_cDNA_P Parameter: Age (day) Value: 3 vs. 0
  misc_feature: MA Experiment 108463 PARAMETER Experiment Name: At_Germinating_Seeds_cDNA_P Parameter: Tissue Value: Germinating Seeds
  misc_feature: MA Experiment ID: 108464 Result: Up-regulated in Transcription
  misc_feature: MA Experiment 108464 PARAMETER Experiment Name: At_Germinating_Seeds_cDNA_P Parameter: Age (day) Value: 4 vs. 0
  misc_feature: MA Experiment 108464 PARAMETER Experiment Name: At_Germinating_Seeds_cDNA_P Parameter: Tissue Value: Germinating Seeds
  misc_feature: MA Experiment ID: 108469 Result: Up-regulated in Transcription
  misc_feature: MA Experiment ID: 108488 Result: Down-regulated in Transcription
  misc_feature: MA Experiment ID: 108561 Result: Up-regulated in Transcription
  misc_feature: MA Experiment 108561 PARAMETER Experiment Name: At_100uM_ABA_cDNA_P Parameter: Timepoint (hr) Value: 6
  misc_feature: MA Experiment 108561 PARAMETER Experiment Name: At_100uM_ABA_cDNA_P Parameter: Tissue Value: Aerial
  misc_feature: MA Experiment 108561 PARAMETER Experiment Name: At_100uM_ABA_cDNA_P Parameter: Treatment Value: 100uM ABA vs. No Treatment
  misc_feature: MA Experiment ID: 108585 Result: Up-regulated in Transcription
  misc_feature: MA Experiment 108585 PARAMETER Experiment Name: At_5mM_NaNP_cDNA_P Parameter: Timepoint (hr) Value: 6
  misc_feature: MA Experiment 108585 PARAMETER Experiment Name: At_5mM_NaNP_cDNA_P Parameter: Tissue Value: Aerial
  misc_feature: MA Experiment 108585 PARAMETER Experiment Name: At_5mM_NaNP_cDNA_P Parameter: Treatment Value: null
  misc_feature: MA Experiment ID: 108594 Result: Down-regulated in Transcription
  misc_feature: MA Experiment 108594 PARAMETER Experiment Name: At_Ler-rhl_Root_cDNA_P Parameter: Plant Line Value: null
  misc_feature: MA Experiment ID: 108605 Result: Up-regulated in Transcription
  misc_feature: MA Experiment 108605 PARAMETER Experiment Name: At_100uM_ABA_cDNA_P Parameter: Timepoint (hr) Value: 6
  misc_feature: MA Experiment 108605 PARAMETER Experiment Name: At_100uM_ABA_cDNA_P Parameter: Tissue Value: Aerial
  misc_feature: MA Experiment 108605 PARAMETER Experiment Name: At_100uM_ABA_cDNA_P Parameter: Treatment Value: 100uM ABA vs. No Treatment
  misc_feature: MA Experiment ID: 108607 Result: Up-regulated in Transcription
  misc_feature: MA Experiment 108607 PARAMETER Experiment Name: At_100uM_ABA_cDNA_P Parameter: Timepoint (hr) Value: 4
  misc_feature: MA Experiment 108607 PARAMETER Experiment Name: At_100uM_ABA_cDNA_P Parameter: Tissue Value: Aerial
  misc_feature: MA Experiment 108607 PARAMETER Experiment Name: At_100uM_ABA_cDNA_P Parameter: Treatment Value: 100uM ABA vs. No Treatment
  misc_feature: MA Experiment ID: 108609 Result: Up-regulated in Transcription
  misc_feature: MA Experiment 108609 PARAMETER Experiment Name: At_100uM_ABA_cDNA_P Parameter: Timepoint (hr) Value: 24
  misc_feature: MA Experiment 108609 PARAMETER Experiment Name: At_100uM_ABA_cDNA_P Parameter: Tissue Value: Aerial
  misc_feature: MA Experiment 108609 PARAMETER Experiment Name: At_100uM_ABA_cDNA_P Parameter: Treatment Value: 100uM ABA vs. No Treatment
  misc_feature: MA Experiment ID: 108667 Result: Up-regulated in Transcription
  misc_feature: MA Experiment 108667 PARAMETER Experiment Name: At_2mM_SA_cDNA_P Parameter: Plant Line Value: WS
  misc_feature: MA Experiment 108667 PARAMETER Experiment Name: At_2mM_SA_cDNA_P Parameter: Timepoint (hr) Value: 1
  misc_feature: MA Experiment 108667 PARAMETER Experiment Name: At_2mM_SA_cDNA_P Parameter: Treatment Value: 2mM SA vs. No Treatment
  misc_feature: MA Experiment ID: 108668 Result: Up-regulated in Transcription
  misc_feature: MA Experiment 108668 PARAMETER Experiment Name: At_2mM_SA_cDNA_P Parameter: Plant Line Value: WS
  misc_feature: MA Experiment 108668 PARAMETER Experiment Name: At_2mM_SA_cDNA_P Parameter: Timepoint (hr) Value: 6
  misc_feature: MA Experiment 108668 PARAMETER Experiment Name: At_2mM_SA_cDNA_P Parameter: Treatment Value: 2mM SA vs. No Treatment
  misc_feature: MA Experiment ID: 20000070 Result: Up-regulated in Transcription
  misc_feature: MA Experiment 20000070 PARAMETER Experiment Name: At_100uM_ABA_Mutants_cDNA_P Parameter: Plant Line Value: CS24
  misc_feature: MA Experiment 20000070 PARAMETER Experiment Name: At_100uM_ABA_Mutants_cDNA_P Parameter: Timepoint (hr) Value: 6
  misc_feature: MA Experiment 20000070 PARAMETER Experiment Name: At_100uM_ABA_Mutants_cDNA_P Parameter: Tissue Value: Aerial
  misc_feature: MA Experiment 20000070 PARAMETER Experiment Name: At_100uM_ABA_Mutants_cDNA_P Parameter: Treatment Value: 100uM ABA vs. No Treatment
  misc_feature: MA Experiment ID: 20000071 Result: Up-regulated in Transcription
  misc_feature: MA Experiment 20000071 PARAMETER Experiment Name: At_100uM_ABA_Mutants_cDNA_P Parameter: Plant Line Value: CS8104
  misc_feature: MA Experiment 20000071 PARAMETER Experiment Name: At_100uM_ABA_Mutants_cDNA_P Parameter: Timepoint (hr) Value: 6
  misc_feature: MA Experiment 20000071 PARAMETER Experiment Name: At_100uM_ABA_Mutants_cDNA_P Parameter: Tissue Value: Aerial
  misc_feature: MA Experiment 20000071 PARAMETER Experiment Name: At_100uM_ABA_Mutants_cDNA_P Parameter: Treatment Value: 100uM ABA vs. No Treatment
  misc_feature: MA Experiment ID: 20000072 Result: Up-regulated in Transcription
  misc_feature: MA Experiment 20000072 PARAMETER Experiment Name: At_100uM_ABA_Mutants_cDNA_P Parameter: Plant Line Value: CS8105
  misc_feature: MA Experiment 20000072 PARAMETER Experiment Name: At_100uM_ABA_Mutants_cDNA_P Parameter: Timepoint (hr) Value: 6
  misc_feature: MA Experiment 20000072 PARAMETER Experiment Name: At_100uM_ABA_Mutants_cDNA_P Parameter: Tissue Value: Aerial
  misc_feature: MA Experiment 20000072 PARAMETER Experiment Name: At_100uM_ABA_Mutants_cDNA_P Parameter: Treatment Value: 100uM ABA vs. No Treatment
  misc_feature: MA Experiment ID: 20000087 Result: Up-regulated in Transcription
  misc_feature: MA Experiment 20000087 PARAMETER Experiment Name: At_100uM_ABA_Mutants_cDNA_P Parameter: Plant Line Value: WS
  misc_feature: MA Experiment 20000087 PARAMETER Experiment Name: At_100uM_ABA_Mutants_cDNA_P Parameter: Timepoint (hr) Value: 6
  misc_feature: MA Experiment 20000087 PARAMETER Experiment Name: At_100uM_ABA_Mutants_cDNA_P Parameter: Tissue Value: Aerial
  misc_feature: MA Experiment 20000087 PARAMETER Experiment Name: At_100uM_ABA_Mutants_cDNA_P Parameter: Treatment Value: 100uM ABA vs. No Treatment
  misc_feature: MA Experiment ID: 20000089 Result: Up-regulated in Transcription
  misc_feature: MA Experiment ID: 20000169 Result: Up-regulated in Transcription
  misc_feature: MA Experiment 20000169 PARAMETER Experiment Name: At_100uM_ABA_P Parameter: Age (day) Value: 14
  misc_feature: MA Experiment 20000169 PARAMETER Experiment Name: At_100uM_ABA_P Parameter: Organism Value: A. thaliana
  misc_feature: MA Experiment 20000169 PARAMETER Experiment Name: At_100uM_ABA_P Parameter: Plant Line Value: WS
  misc_feature: MA Experiment 20000169 PARAMETER Experiment Name: At_100uM_ABA_P Parameter: Timepoint (hr) Value: 6
  misc_feature: MA Experiment 20000169 PARAMETER Experiment Name: At_100uM_ABA_P Parameter: Tissue Value: Aerial
  misc_feature: MA Experiment 20000169 PARAMETER Experiment Name: At_100uM_ABA_P Parameter: Treatment Value: 100uM ABA vs. No Treatment
  misc_feature: MA Experiment ID: 20000179 Result: Down-regulated in Transcription
  misc_feature: MA Experiment 20000179 PARAMETER Experiment Name: At_Germinating_Seeds_P Parameter: Age (hr) Value: 6 vs. 0
  misc_feature: MA Experiment 20000179 PARAMETER Experiment Name: At_Germinating_Seeds_P Parameter: Tissue Value: Germinating Seeds
  misc_feature: MA Experiment ID: 20000182 Result: Up-regulated in Transcription
  misc_feature: MA Experiment 20000182 PARAMETER Experiment Name: At_2mM_SA_P Parameter: Age (day) Value: 14
  misc_feature: MA Experiment 20000182 PARAMETER Experiment Name: At_2mM_SA_P Parameter: Organism Value: A. thaliana
  misc_feature: MA Experiment 20000182 PARAMETER Experiment Name: At_2mM_SA_P Parameter: Plant Line Value: WS
  misc_feature: MA Experiment 20000182 PARAMETER Experiment Name: At_2mM_SA_P Parameter: Timepoint (hr) Value: 6
  misc_feature: MA Experiment 20000182 PARAMETER Experiment Name: At_2mM_SA_P Parameter: Tissue Value: Aerial
  misc_feature: MA Experiment 20000182 PARAMETER Experiment Name: At_2mM_SA_P Parameter: Treatment Value: 2mM SA vs. No Treatment
  misc_feature: MA Experiment ID: 20000184 Result: Up-regulated in Transcription
  misc_feature: MA Experiment 20000184 PARAMETER Experiment Name: At_Shoots__P Parameter: Age (day) Value: 7
  misc_feature: MA Experiment 20000184 PARAMETER Experiment Name: At_Shoots__P Parameter: Tissue Value: Shoots vs. Whole Plant
  misc_feature: MA Experiment ID: 20000185 Result: Up-regulated in Transcription
  misc_feature: MA Experiment 20000185 PARAMETER Experiment Name: At_Roots__P Parameter: Age (day) Value: 7 vs. 21
  misc_feature: MA Experiment 20000185 PARAMETER Experiment Name: At_Roots__P Parameter: Organism Value: A. thaliana
  misc_feature: MA Experiment 20000185 PARAMETER Experiment Name: At_Roots__P Parameter: Tissue Value: Roots vs. Whole Plant
  misc_feature: MA Experiment ID: 20000264 Result: Up-regulated in Transcription
  misc_feature: MA Experiment 20000264 PARAMETER Experiment Name: At_Open_Flower_P Parameter: Age (day) Value: 21
  misc_feature: MA Experiment 20000264 PARAMETER Experiment Name: At_Open_Flower_P Parameter: Plant Line Value: WS
  misc_feature: MA Experiment 20000264 PARAMETER Experiment Name: At_Open_Flower_P Parameter: Tissue Value: Open Flower vs. Whole Plant
  misc_feature: MA Experiment ID: 20000286 Result: Up-regulated in Transcription
  misc_feature: MA Experiment 20000286 PARAMETER Experiment Name: At_Open_Flower_P Parameter: Age (day) Value: 21
  misc_feature: MA Experiment 20000286 PARAMETER Experiment Name: At_Open_Flower_P Parameter: Plant Line Value: WS
  misc_feature: MA Experiment 20000286 PARAMETER Experiment Name: At_Open_Flower_P Parameter: Tissue Value: Half Open vs. Whole Plant
  misc_feature: MA Experiment ID: 20000438 Result: Up-regulated in Transcription
  misc_feature: MA Experiment 20000438 PARAMETER Experiment Name: At_Shoots__P Parameter: Age (day) Value: 14
  misc_feature: MA Experiment 20000438 PARAMETER Experiment Name: At_Shoots__P Parameter: Tissue Value: Shoots vs. Whole Plant
  misc_feature: MA Experiment ID: 20000439 Result: Up-regulated in Transcription
  misc_feature: MA Experiment 20000439 PARAMETER Experiment Name: At_Roots__P Parameter: Age (day) Value: 14 vs. 21
  misc_feature: MA Experiment 20000439 PARAMETER Experiment Name: At_Roots__P Parameter: Organism Value: A. thaliana
  misc_feature: MA Experiment 20000439 PARAMETER Experiment Name: At_Roots__P Parameter: Tissue Value: Roots vs. Whole Plant
  misc_feature: MA Experiment ID: 20000445 Result: Up-regulated in Transcription
  misc_feature: MA Experiment 20000445 PARAMETER Experiment Name: At_100uM_NAA__P Parameter: Age (day) Value: 14
  misc_feature: MA Experiment 20000445 PARAMETER Experiment Name: At_100uM_NAA__P Parameter: Organism Value: A. thaliana
  misc_feature: MA Experiment 20000445 PARAMETER Experiment Name: At_100uM_NAA__P Parameter: Plant Line Value: WS
  misc_feature: MA Experiment 20000445 PARAMETER Experiment Name: At_100uM_NAA__P Parameter: Timepoint (hr) Value: 6
  misc_feature: MA Experiment 20000445 PARAMETER Experiment Name: At_100uM_NAA__P Parameter: Tissue Value: Aerial
  misc_feature: MA Experiment 20000445 PARAMETER Experiment Name: At_100uM_NAA__P Parameter: Treatment Value: 100uM NAA vs. No Treatment
  misc_feature: MA Experiment ID: 20000453 Result: Up-regulated in Transcription
  misc_feature: MA Experiment 20000453 PARAMETER Experiment Name: At_100uM_ABA_P Parameter: Age (day) Value: 15
  misc_feature: MA Experiment 20000453 PARAMETER Experiment Name: At_100uM_ABA_P Parameter: Organism Value: A. thaliana
  misc_feature: MA Experiment 20000453 PARAMETER Experiment Name: At_100uM_ABA_P Parameter: Plant Line Value: WS
  misc_feature: MA Experiment 20000453 PARAMETER Experiment Name: At_100uM_ABA_P Parameter: Timepoint (hr) Value: 24
  misc_feature: MA Experiment 20000453 PARAMETER Experiment Name: At_100uM_ABA_P Parameter: Tissue Value: Aerial
  misc_feature: MA Experiment 20000453 PARAMETER Experiment Name: At_100uM_ABA_P Parameter: Treatment Value: 100uM ABA vs. No Treatment
  misc_feature: MA Experiment ID: 20000527 Result: Down-regulated in Transcription
  misc_feature: MA Experiment 20000527 PARAMETER Experiment Name: At_10percent_PEG_P Parameter: Age (day) Value: 20
  misc_feature: MA Experiment 20000527 PARAMETER Experiment Name: At_10percent_PEG_P Parameter: Organism Value: A. thaliana
  misc_feature: MA Experiment 20000527 PARAMETER Experiment Name: At_10percent_PEG_P Parameter: Plant Line Value: WS
  misc_feature: MA Experiment 20000527 PARAMETER Experiment Name: At_10percent_PEG_P Parameter: Timepoint (day) Value: 20
  misc_feature: MA Experiment 20000527 PARAMETER Experiment Name: At_10percent_PEG_P Parameter: Tissue Value: Whole Plant
  misc_feature: MA Experiment 20000527 PARAMETER Experiment Name: At_10percent_PEG_P Parameter: Treatment Value: 10percent PEG vs. No Treatment
  misc_feature: MA Experiment ID: 20000709 Result: Up-regulated in Transcription
  misc_feature: MA Experiment 20000709 PARAMETER Experiment Name: At_15mM_NH4NO3_L-to-H_P Parameter: Age (hr) Value: 14
  misc_feature: MA Experiment 20000709 PARAMETER Experiment Name: At_15mM_NH4NO3_L-to-H_P Parameter: Organism Value: A. thaliana
  misc_feature: MA Experiment 20000709 PARAMETER Experiment Name: At_15mM_NH4NO3_L-to-H_P Parameter: Plant Line Value: WS
  misc_feature: MA Experiment 20000709 PARAMETER Experiment Name: At_15mM_NH4NO3_L-to-H_P Parameter: Timepoint (hr) Value: 4
  misc_feature: MA Experiment 20000709 PARAMETER Experiment Name: At_15mM_NH4NO3_L-to-H_P Parameter: Tissue Value: Aerial
  misc_feature: MA Experiment 20000709 PARAMETER Experiment Name: At_15mM_NH4NO3_L-to-H_P Parameter: Treatment Value: 15mM NH4NO3 vs. 30mM Mannitol
  misc_feature: MA Experiment ID: 20000794 Result: Up-regulated in Transcription
  misc_feature: MA Experiment 20000794 PARAMETER Experiment Name: At_Petals_P Parameter: Age (day) Value: 23-25 days
  misc_feature: MA Experiment 20000794 PARAMETER Experiment Name: At_Petals_P Parameter: Plant Line Value: WS
  misc_feature: MA Experiment 20000794 PARAMETER Experiment Name: At_Petals_P Parameter: Tissue Value: Petals vs. Whole plant
  misc_feature: MA Experiment ID: 20001560 Result: Up-regulated in Transcription
  misc_feature: MA Experiment 20001560 PARAMETER Experiment Name: At_Drought_Soil_Dry_P Parameter: Age (day) Value: 28
  misc_feature: MA Experiment 20001560 PARAMETER Experiment Name: At_Drought_Soil_Dry_P Parameter: Organism Value: A. thaliana
  misc_feature: MA Experiment 20001560 PARAMETER Experiment Name: At_Drought_Soil_Dry_P Parameter: Plant Line Value: WS
  misc_feature: MA Experiment 20001560 PARAMETER Experiment Name: At_Drought_Soil_Dry_P Parameter: Post Timepoint (hr) Value: None
  misc_feature: MA Experiment 20001560 PARAMETER Experiment Name: At_Drought_Soil_Dry_P Parameter: Post-Treatment Value: None
  misc_feature: MA Experiment 20001560 PARAMETER Experiment Name: At_Drought_Soil_Dry_P Parameter: Timepoint (day) Value: 14
  misc_feature: MA Experiment 20001560 PARAMETER Experiment Name: At_Drought_Soil_Dry_P Parameter: Treatment Value: Drought vs. No Drought
  misc_feature: MA Experiment ID: 20001904 Result: Up-regulated in Transcription
  misc_feature: MA Experiment 20001904 PARAMETER Experiment Name: At_Drought_Reproduction_P Parameter: Age (day) Value: 37
  misc_feature: MA Experiment 20001904 PARAMETER Experiment Name: At_Drought_Reproduction_P Parameter: Organism Value: A. thaliana
  misc_feature: MA Experiment 20001904 PARAMETER Experiment Name: At_Drought_Reproduction_P Parameter: Plant Line Value: WS
  misc_feature: MA Experiment 20001904 PARAMETER Experiment Name: At_Drought_Reproduction_P Parameter: Timepoint (day) Value: 7
  misc_feature: MA Experiment 20001904 PARAMETER Experiment Name: At_Drought_Reproduction_P Parameter: Tissue Value: Rosettes
  misc_feature: MA Experiment 20001904 PARAMETER Experiment Name: At_Drought_Reproduction_P Parameter: Treatment Value: Drought vs. No Drought
  misc_feature: MA Experiment ID: 20001905 Result: Up-regulated in Transcription
  misc_feature: MA Experiment 20001905 PARAMETER Experiment Name: At_Drought_Reproduction_P Parameter: Age (day) Value: 40
  misc_feature: MA Experiment 20001905 PARAMETER Experiment Name: At_Drought_Reproduction_P Parameter: Organism Value: A. thaliana
  misc_feature: MA Experiment 20001905 PARAMETER Experiment Name: At_Drought_Reproduction_P Parameter: Plant Line Value: WS
  misc_feature: MA Experiment 20001905 PARAMETER Experiment Name: At_Drought_Reproduction_P Parameter: Timepoint (day) Value: 10
  misc_feature: MA Experiment 20001905 PARAMETER Experiment Name: At_Drought_Reproduction_P Parameter: Tissue Value: Rosettes
  misc_feature: MA Experiment 20001905 PARAMETER Experiment Name: At_Drought_Reproduction_P Parameter: Treatment Value: Drought vs. No Drought
  misc_feature: MA Experiment ID: 20001906 Result: Up-regulated in Transcription
  misc_feature: MA Experiment 20001906 PARAMETER Experiment Name: At_Drought_Reproduction_P Parameter: Age (day) Value: 35
  misc_feature: MA Experiment 20001906 PARAMETER Experiment Name: At_Drought_Reproduction_P Parameter: Organism Value: A. thaliana
  misc_feature: MA Experiment 20001906 PARAMETER Experiment Name: At_Drought_Reproduction_P Parameter: Plant Line Value: WS
  misc_feature: MA Experiment 20001906 PARAMETER Experiment Name: At_Drought_Reproduction_P Parameter: Timepoint (day) Value: 5
  misc_feature: MA Experiment 20001906 PARAMETER Experiment Name: At_Drought_Reproduction_P Parameter: Tissue Value: Siliques
  misc_feature: MA Experiment 20001906 PARAMETER Experiment Name: At_Drought_Reproduction_P Parameter: Treatment Value: Drought vs. No Drought
acaacgtgaaaacacaggttcgtgctactactccaatgatacgggtctcaaaatactcaaaactctggcatgtctcaattccacaaattattgtttaatcattctgcttcttctataactgcagaagaaagaagaaagaagaagaagaagagattagagcttgagccataatatataatcccttgatcattagtctaaagaaccacataaaaagatgggattctggtcgttgttggaggtggcttctatgccggttattcaagttcttttcatgagtctcgtgggagctttcatggcctctgatcgttgcaagctcttccctgttgaagcccgtaattccatgaacaaggtggtgtttgtactatttgcaccggctctcatgtttgccaatctagctcagacggttacacttgaagacatcatctcatggtggtttatgccggtgaacatgggacttacatttctaatcggaggacttcttgggtggttggttgttaagattttgaaaccacctccttatcttgaaggtcttattgttgcaacttgttctgcaggaaatatggggaacctaccaatcatacttgtcccagcaatctgcgatgaggacaaaagtccttttggtaaccgaagtgtatgtagaaccgtcgggctctcttacgcgtctttctccatggcgctagggggtttctacatatggacatacacattccggctgattaaagggtccgcaatgaaagttcaagccatagaagaatctgagaaaatagcaattaaatcatccaatagtgacttagaagctgatcataagacccatctcctcggtgcaccggaagacaaggaaaacaaagtggtaaaggaagagacagggttttggagaaaaggagtagacttcctccatgagatattggaggagcttcttgcaccacctacacttggtgcaattatcggtttcattttcggtgcagtaagatggctcagaaatcttatcataggtgatgatgctcctttacgaatagtacaaagcactgcaaaacttcttggagatgggaccattccctgtatgactattatactagggggaaacctcatacaaggtttacgttcttcggcagtcaaaccgatggttgtacttggaatagtctgtgctcggtacatagctatgccaattatcggtataggcattgtactancanntgcaaatctnggatttcttccagctgatcctttgtttcagtatgttttgatgcttcagttcaccctcccgcctgccatgaatatcggtaccatgacacagctgtacaatgttgctcaagacgaatgctcagtgctcatgctttggacctacttggtcgcgatactggccctcactgtatggtccaccatcttccttcacttgttagtctaaagaacctgcaactctgtatgagcacaagaagattctatctctctactactacagagaccgaagctctgtcaagggatcttaccattctttttgtctatcacataaaatttgatcataacttgatagatttttctggttgcatgcgtacctttctgcaaatcttcatttttctccatatcccgatttgtaaacgccaatattgtatcaagtattac

SEQ ID NO: 39231 - protein, 396 aa, Arabidopsis thaliana
  peptide (1)..(396): Ceres Seq. ID no. 12330907
  misc_feature (9)..(388): Pfam Name: Auxin Efflux Carrier Pfam Description: Auxin Efflux Carrier
  misc_feature (231)..(396): Homolog of NCBI NO: 18409758 NR Description: expressed protein
  misc_feature (12)..(214): Homolog of NCBI NO: 18409758 NR Description: expressed protein
  misc_feature (195)..(394): Homolog of NCBI NO: 34394344 NR Description: auxin efflux carrier protein family-like protein
  misc_feature (7)..(395): Homolog of NCBI NO: 15241659 NR Description: putative protein; protein id: At5g01990.1
  misc_feature (1)..(395): Homolog of NCBI NO: 22329697 NR Description: hypothetical protein; protein id: At1g20925.1
  misc_feature (6)..(395): Homolog of NCBI NO: 21553424 NR Description: unknown [Arabidopsis thaliana]
  misc_feature (6)..(395): Homolog of NCBI NO: 18411126 NR Description: expressed protein
  misc_feature (1)..(395): Homolog of NCBI NO: 15239215 NR Description: putative protein; protein id: At5g65980.1
  misc_feature (1)..(396): Homolog of NCBI NO: 18398448 NR Description: expressed protein
  misc_feature (1)..(396): Homolog of NCBI NO: 21536598 NR Description: unknown [Arabidopsis thaliana]
  misc_feature (326)..(326): Xaa is any aa, unknown or other
  misc_feature (327)..(327): Xaa is any aa, unknown or other
  misc_feature (330)..(330): Xaa is any aa, unknown or other
MGFWSLLEVASMPVIQVLFMSLVGAFMASDRCKLFPVEARNSMNKVVFVLFAPALMFANLAQTVTLEDIISWWFMPVNMGLTFLIGGLLGWLVVKILKPPPYLEGLIVATCSAGNMGNLPIILVPAICDEDKSPFGNRSVCRTVGLSYASFSMALGGFYIWTYTFRLIKGSAMKVQAIEESEKIAIKSSNSDLEADHKTHLLGAPEDKENKVVKEETGFWRKGVDFLHEILEELLAPPTLGAIIGFIFGAVRWLRNLIIGDDAPLRIVQSTAKLLGDGTIPCMTIILGGNLIQGLRSSAVKPMVVLGIVCARYIAMPIIGIGIVLXXANXGFLPADPLFQYVLMLQFTLPPAMNIGTMTQLYNVAQDECSVLMLWTYLVAILALTVWSTIFLHLLV

SEQ ID NO: 39232 - protein, 385 aa, Arabidopsis thaliana
  peptide (1)..(385): Ceres Seq. ID no. 12330908
  misc_feature (1)..(377): Pfam Name: Auxin Efflux Carrier Pfam Description: Auxin Efflux Carrier
  misc_feature (220)..(385): Homolog of NCBI NO: 18409758 NR Description: expressed protein
  misc_feature (1)..(203): Homolog of NCBI NO: 18409758 NR Description: expressed protein
  misc_feature (184)..(383): Homolog of NCBI NO: 34394344 NR Description: auxin efflux carrier protein family-like protein
  misc_feature (1)..(384): Homolog of NCBI NO: 15241659 NR Description: putative protein; protein id: At5g01990.1
  misc_feature (1)..(384): Homolog of NCBI NO: 22329697 NR Description: hypothetical protein; protein id: At1g20925.1
  misc_feature (1)..(384): Homolog of NCBI NO: 21553424 NR Description: unknown [Arabidopsis thaliana]
  misc_feature (1)..(384): Homolog of NCBI NO: 18411126 NR Description: expressed protein
  misc_feature (1)..(384): Homolog of NCBI NO: 15239215 NR Description: putative protein; protein id: At5g65980.1
  misc_feature (1)..(385): Homolog of NCBI NO: 18398448 NR Description: expressed protein
  misc_feature (1)..(385): Homolog of NCBI NO: 21536598 NR Description: unknown [Arabidopsis thaliana]
  misc_feature (315)..(315): Xaa is any aa, unknown or other
  misc_feature (316)..(316): Xaa is any aa, unknown or other
  misc_feature (319)..(319): Xaa is any aa, unknown or other
MPVIQVLFMSLVGAFMASDRCKLFPVEARNSMNKVVFVLFAPALMFANLAQTVTLEDIISWWFMPVNMGLTFLIGGLLGWLVVKILKPPPYLEGLIVATCSAGNMGNLPIILVPAICDEDKSPFGNRSVCRTVGLSYASFSMALGGFYIWTYTFRLIKGSAMKVQAIEESEKIAIKSSNSDLEADHKTHLLGAPEDKENKVVKEETGFWRKGVDFLHEILEELLAPPTLGAIIGFIFGAVRWLRNLIIGDDAPLRIVQSTAKLLGDGTIPCMTIILGGNLIQGLRSSAVKPMVVLGIVCARYIAMPIIGIGIVLXXANXGFLPADPLFQYVLMLQFTLPPAMNIGTMTQLYNVAQDECSVLMLWTYLVAILALTVWSTIFLHLLV

SEQ ID NO: 39233 - protein, 377 aa, Arabidopsis thaliana
  peptide (1)..(377): Ceres Seq. ID no. 12330909
  misc_feature (1)..(369): Pfam Name: Auxin Efflux Carrier Pfam Description: Auxin Efflux Carrier
  misc_feature (212)..(377): Homolog of NCBI NO: 18409758 NR Description: expressed protein
  misc_feature (1)..(195): Homolog of NCBI NO: 18409758 NR Description: expressed protein
  misc_feature (176)..(375): Homolog of NCBI NO: 34394344 NR Description: auxin efflux carrier protein family-like protein
  misc_feature (1)..(376): Homolog of NCBI NO: 15241659 NR Description: putative protein; protein id: At5g01990.1
  misc_feature (1)..(376): Homolog of NCBI NO: 22329697 NR Description: hypothetical protein; protein id: At1g20925.1
  misc_feature (1)..(376): Homolog of NCBI NO: 21553424 NR Description: unknown [Arabidopsis thaliana]
  misc_feature (1)..(376): Homolog of NCBI NO: 18411126 NR Description: expressed protein
  misc_feature (1)..(376): Homolog of NCBI NO: 15239215 NR Description: putative protein; protein id: At5g65980.1
  misc_feature (1)..(377): Homolog of NCBI NO: 18398448 NR Description: expressed protein
  misc_feature (1)..(377): Homolog of NCBI NO: 21536598 NR Description: unknown [Arabidopsis thaliana]
  misc_feature (307)..(307): Xaa is any aa, unknown or other
  misc_feature (308)..(308): Xaa is any aa, unknown or other
  misc_feature (311)..(311): Xaa is any aa, unknown or other
MSLVGAFMASDRCKLFPVEARNSMNKVVFVLFAPALMFANLAQTVTLEDIISWWFMPVNMGLTFLIGGLLGWLVVKILKPPPYLEGLIVATCSAGNMGNLPIILVPAICDEDKSPFGNRSVCRTVGLSYASFSMALGGFYIWTYTFRLIKGSAMKVQAIEESEKIAIKSSNSDLEADHKTHLLGAPEDKENKVVKEETGFWRKGVDFLHEILEELLAPPTLGAIIGFIFGAVRWLRNLIIGDDAPLRIVQSTAKLLGDGTIPCMTIILGGNLIQGLRSSAVKPMVVLGIVCARYIAMPIIGIGIVLXXANXGFLPADPLFQYVLMLQFTLPPAMNIGTMTQLYNVAQDECSVLMLWTYLVAILALTVWSTIFLHLLV

SEQ ID NO: 39234 - DNA, 1779 bp, Arabidopsis thaliana
  misc_feature (1)..(1779): Ceres Seq. ID no. 12343534
  misc_feature: MA Experiment ID: 20000227 Result: Up-regulated in Transcription
  misc_feature: MA Experiment 20000227 PARAMETER Experiment Name: At_Root-Tips-vs-Tops_P Parameter: Tissue Value: Root Tips vs. Root Tops
  misc_feature: MA Experiment ID: 20000234 Result: Up-regulated in Transcription
  misc_feature: MA Experiment 20000234 PARAMETER Experiment Name: At_Siliques_P Parameter: Age (day) Value: 21
  misc_feature: MA Experiment 20000234 PARAMETER Experiment Name: At_Siliques_P Parameter: Organism Value: A. thaliana
  misc_feature: MA Experiment 20000234 PARAMETER Experiment Name: At_Siliques_P Parameter: Plant Line Value: WS
  misc_feature: MA Experiment 20000234 PARAMETER Experiment Name: At_Siliques_P Parameter: Tissue Value: Less Than 5mm Siliques vs. Whole Plant
  misc_feature: MA Experiment ID: 20000265 Result: Up-regulated in Transcription
  misc_feature: MA Experiment 20000265 PARAMETER Experiment Name: At_Open_Flower_P Parameter: Age (day) Value: 21
  misc_feature: MA Experiment 20000265 PARAMETER Experiment Name: At_Open_Flower_P Parameter: Plant Line Value: WS
  misc_feature: MA Experiment 20000265 PARAMETER Experiment Name: At_Open_Flower_P Parameter: Tissue Value: Closed Flower vs. Whole Plant
  misc_feature: MA Experiment ID: 20000439 Result: Up-regulated in Transcription
  misc_feature: MA Experiment 20000439 PARAMETER Experiment Name: At_Roots__P Parameter: Age (day) Value: 14 vs. 21
  misc_feature: MA Experiment 20000439 PARAMETER Experiment Name: At_Roots__P Parameter: Organism Value: A. thaliana
  misc_feature: MA Experiment 20000439 PARAMETER Experiment Name: At_Roots__P Parameter: Tissue Value: Roots vs. Whole Plant
  misc_feature: MA Experiment ID: 20001911 Result: Down-regulated in Transcription
  misc_feature: MA Experiment 20001911 PARAMETER Experiment Name: At_Drought_Reproduction_P Parameter: Age (day) Value: 40
  misc_feature: MA Experiment 20001911 PARAMETER Experiment Name: At_Drought_Reproduction_P Parameter: Organism Value: A. thaliana
  misc_feature: MA Experiment 20001911 PARAMETER Experiment Name: At_Drought_Reproduction_P Parameter: Plant Line Value: WS
  misc_feature: MA Experiment 20001911 PARAMETER Experiment Name: At_Drought_Reproduction_P Parameter: Timepoint (day) Value: 10
  misc_feature: MA Experiment 20001911 PARAMETER Experiment Name: At_Drought_Reproduction_P Parameter: Tissue Value: Flowers
  misc_feature: MA Experiment 20001911 PARAMETER Experiment Name: At_Drought_Reproduction_P Parameter: Treatment Value: Drought vs. No Drought
cttcaatctctcgtctcttactaacgttatttcttcaatctcattgatcaaaaaaaccaaaaccctaatctcaatttcctccaaaagtttcagtttttaaaaatgggttttcttcttttgtaacgaaaaatgtgtcaaactttgaattgaccatttttttttataaggattcgatgaagaaattgagaagctattactcaaatgtgagacatcatcagaatcaccatcatcatcaccatcatcatagcaacattgtttcttcagagaggaaatggatatttttccctctattgattggttcaatcttcgctttgttcttactcttcctcacaacaaccctaacttcaccaaccggaggagtccggtttctcccttttacccgacccgttttgttaaccggatctggttcatcagctttcgttgaatccaaaatcaaacctcaacaaatctcatcactcccgtcgccaccgcgttttgcttacttgatttctggatccgccggtgacgggaaatctctccggcgaactcttttggctctttaccatccgaataatcggtatgttgttcatttagatagagaatcttccatggaagagagagaggagcttcatggatatatcaaaaactcgtctttgtttcgaaggtttatgaatgttcatatgattgagaaagctaatcttgtcacgtatcgtggacctactatggttgccaatacacttcacgctgcggcgattttgcttagagaaggagctgattgggattggtttattaatcttagctcttctgattatcctctagtgactcatgatgatttgttgcatatcttttcgcatttgccgcgggatttgaacttcattgatcatactagtaacattggatggaaagcatcacaaagagcaaaaccggtgattatagatcctggactgtatttgaacaagaaatctgatgttttttgggttacgcaaagacggagcatcccaacagcattcaagcttttcacaggctctgcttggatggcgttatctcggccattcgtcgactattgtatatggggttgggataatctacctcgtacggtcttaatgtattactcgaattttctctcttctccagaaggatattttcacactgttctctgcaacgctgaggaattcagaaacacaacggtaaatagcaacctgcacttcatatcgtgggacaatccgcctaagcagcatccacaccatctcactcttacagacatgaccaaaatggtaaatagcaatgccccgtttgctagaaagttcagaagagaagatcctgtccttgacaagatcgatgatgagctccttaacagaggtcctgggatgataacacctggcggttggtgcattggaagccatgagaatgggagtgacccttgtgctgttattggtgatactgatgttatcaggcctggtccaggcgctagacggctcgagaatctggtanttcgttattatccactgagaatttccgatcaaaacagtgtaagtgatctgatatatctagagaacgacatcacacagagatggaatgtagcagccttgattattggggttagatgtgatttaggatctgatagaaatccctcttttagtcaagaatataagtgaagaaatacagaacaattaggctatatgatgtgggaagtatttgtcttgttgctccacacaacatgccttaaggtcttgttgtagttctcagattggaattttgagattttgtactctgctgttttaaaattagtttcttcctttc

SEQ ID NO: 39235 - protein, 486 aa, Arabidopsis thaliana
  peptide (1)..(486): Ceres Seq. ID no. 12343535
  misc_feature (101)..(326): Pfam Name: Core-2/I-Branching enzyme Pfam Description: Core-2/I-Branching enzyme
  misc_feature (31)..(434): Homolog of NCBI NO: 15219202 NR Description: N-acetylglucosaminyltransferase family
  misc_feature (45)..(434): Homolog of NCBI NO: 34903664 NR Description: B1015E06.17 [Oryza sativa (japonica
  misc_feature (56)..(434): Homolog of NCBI NO: 7486258 NR Description: hypothetical protein F27G19.80 - Arabidopsis
  misc_feature (20)..(432): Homolog of NCBI NO: 15236287 NR Description: N-acetylglucosaminyltransferase family
  misc_feature (29)..(434): Homolog of NCBI NO: 30687610 NR Description: N-acetylglucosaminyltransferase family
  misc_feature (20)..(432): Homolog of NCBI NO: 15218824 NR Description: N-acetylglucosaminyltransferase family
  misc_feature (28)..(434): Homolog of NCBI NO: 15146308 NR Description: AT3g15350/K7L4_15 [Arabidopsis thaliana]
  misc_feature (28)..(434): Homolog of NCBI NO: 18400725 NR Description: N-acetylglucosaminyltransferase family
  misc_feature (1)..(432): Homolog of NCBI NO: 15242199 NR Description: N-acetylglucosaminyltransferase family
  misc_feature (1)..(432): Homolog of NCBI NO: 15242532 NR Description: N-acetylglucosaminyltransferase family
  misc_feature (433)..(433): Xaa is any aa, unknown or other
MKKLRSYYSNVRHHQNHHHHHHHHSNIVSSERKWIFFPLLIGSIFALFLLFLTTTLTSPTGGVRFLPFTRPVLLTGSGSSAFVESKIKPQQISSLPSPPRFAYLISGSAGDGKSLRRTLLALYHPNNRYVVHLDRESSMEEREELHGYIKNSSLFRRFMNVHMIEKANLVTYRGPTMVANTLHAAAILLREGADWDWFINLSSSDYPLVTHDDLLHIFSHLPRDLNFIDHTSNIGWKASQRAKPVIIDPGLYLNKKSDVFWVTQRRSIPTAFKLFTGSAWMALSRPFVDYCIWGWDNLPRTVLMYYSNFLSSPEGYFHTVLCNAEEFRNTTVNSNLHFISWDNPPKQHPHHLTLTDMTKMVNSNAPFARKFRREDPVLDKIDDELLNRGPGMITPGGWCIGSHENGSDPCAVIGDTDVIRPGPGARRLENLVXRYYPLRISDQNSVSDLIYLENDITQRWNVAALIIGVRCDLGSDRNPSFSQEYK

SEQ ID NO: 39236 - protein, 348 aa, Arabidopsis thaliana
  peptide (1)..(348): Ceres Seq. ID no. 12343536
  misc_feature (1)..(188): Pfam Name: Core-2/I-Branching enzyme Pfam Description: Core-2/I-Branching enzyme
  misc_feature (1)..(296): Homolog of NCBI NO: 15219202 NR Description: N-acetylglucosaminyltransferase family
  misc_feature (1)..(296): Homolog of NCBI NO: 34903664 NR Description: B1015E06.17 [Oryza sativa (japonica
  misc_feature (1)..(296): Homolog of NCBI NO: 7486258 NR Description: hypothetical protein F27G19.80 - Arabidopsis
  misc_feature (1)..(294): Homolog of NCBI NO: 15236287 NR Description: N-acetylglucosaminyltransferase family
  misc_feature (1)..(296): Homolog of NCBI NO: 30687610 NR Description: N-acetylglucosaminyltransferase family
  misc_feature (1)..(294): Homolog of NCBI NO: 15218824 NR Description: N-acetylglucosaminyltransferase family
  misc_feature (1)..(296): Homolog of NCBI NO: 15146308 NR Description: AT3g15350/K7L4_15 [Arabidopsis thaliana]
  misc_feature (1)..(296): Homolog of NCBI NO: 18400725 NR Description: N-acetylglucosaminyltransferase family
  misc_feature (1)..(294): Homolog of NCBI NO: 15242199 NR Description: N-acetylglucosaminyltransferase family
  misc_feature (1)..(294): Homolog of NCBI NO: 15242532 NR Description: N-acetylglucosaminyltransferase family
  misc_feature (295)..(295): Xaa is any aa, unknown or other
MEEREELHGYIKNSSLFRRFMNVHMIEKANLVTYRGPTMVANTLHAAAILLREGADWDWFINLSSSDYPLVTHDDLLHIFSHLPRDLNFIDHTSNIGWKASQRAKPVIIDPGLYLNKKSDVFWVTQRRSIPTAFKLFTGSAWMALSRPFVDYCIWGWDNLPRTVLMYYSNFLSSPEGYFHTVLCNAEEFRNTTVNSNLHFISWDNPPKQHPHHLTLTDMTKMVNSNAPFARKFRREDPVLDKIDDELLNRGPGMITPGGWCIGSHENGSDPCAVIGDTDVIRPGPGARRLENLVXRYYPLRISDQNSVSDLIYLENDITQRWNVAALIIGVRCDLGSDRNPSFSQEYK

SEQ ID NO: 39237 - protein, 328 aa, Arabidopsis thaliana
  peptide (1)..(328): Ceres Seq. ID no. 12343537
  misc_feature (1)..(168): Pfam Name: Core-2/I-Branching enzyme Pfam Description: Core-2/I-Branching enzyme
  misc_feature (1)..(276): Homolog of NCBI NO: 15219202 NR Description: N-acetylglucosaminyltransferase family
  misc_feature (1)..(276): Homolog of NCBI NO: 34903664 NR Description: B1015E06.17 [Oryza sativa (japonica
  misc_feature (1)..(276): Homolog of NCBI NO: 7486258 NR Description: hypothetical protein F27G19.80 - Arabidopsis
  misc_feature (1)..(274): Homolog of NCBI NO: 15236287 NR Description: N-acetylglucosaminyltransferase family
  misc_feature (1)..(276): Homolog of NCBI NO: 30687610 NR Description: N-acetylglucosaminyltransferase family
  misc_feature (1)..(274): Homolog of NCBI NO: 15218824 NR Description: N-acetylglucosaminyltransferase family
  misc_feature (1)..(276): Homolog of NCBI NO: 15146308 NR Description: AT3g15350/K7L4_15 [Arabidopsis thaliana]
  misc_feature (1)..(276): Homolog of NCBI NO: 18400725 NR Description: N-acetylglucosaminyltransferase family
  misc_feature (1)..(274): Homolog of NCBI NO: 15242199 NR Description: N-acetylglucosaminyltransferase family
  misc_feature (1)..(274): Homolog of NCBI NO: 15242532 NR Description: N-acetylglucosaminyltransferase family
  misc_feature (275)..(275): Xaa is any aa, unknown or other
MNVHMIEKANLVTYRGPTMVANTLHAAAILLREGADWDWFINLSSSDYPLVTHDDLLHIFSHLPRDLNFIDHTSNIGWKASQRAKPVIIDPGLYLNKKSDVFWVTQRRSIPTAFKLFTGSAWMALSRPFVDYCIWGWDNLPRTVLMYYSNFLSSPEGYFHTVLCNAEEFRNTTVNSNLHFISWDNPPKQHPHHLTLTDMTKMVNSNAPFARKFRREDPVLDKIDDELLNRGPGMITPGGWCIGSHENGSDPCAVIGDTDVIRPGPGARRLENLVXRYYPLRISDQNSVSDLIYLENDITQRWNVAALIIGVRCDLGSDRNPSFSQEYK

SEQ ID NO: 39238 - DNA, 1207 bp, Arabidopsis thaliana
  misc_feature (1)..(1207): Ceres Seq. ID no. 12395464
  misc_feature: MA Experiment ID: 108488 Result: Down-regulated in Transcription
  misc_feature: MA Experiment ID: 108573 Result: Up-regulated in Transcription
  misc_feature: MA Experiment 108573 PARAMETER Experiment Name: At_Drought_cDNA_P Parameter: Timepoint (hr) Value: 6
  misc_feature: MA Experiment 108573 PARAMETER Experiment Name: At_Drought_cDNA_P Parameter: Tissue Value: Aerial
  misc_feature: MA Experiment 108573 PARAMETER Experiment Name: At_Drought_cDNA_P Parameter: Treatment Value: Drought vs. No Drought
  misc_feature: MA Experiment ID: 20000265 Result: Down-regulated in Transcription
  misc_feature: MA Experiment 20000265 PARAMETER Experiment Name: At_Open_Flower_P Parameter: Age (day) Value: 21
  misc_feature: MA Experiment 20000265 PARAMETER Experiment Name: At_Open_Flower_P Parameter: Plant Line Value: WS
  misc_feature: MA Experiment 20000265 PARAMETER Experiment Name: At_Open_Flower_P Parameter: Tissue Value: Closed Flower vs. Whole Plant
  misc_feature: MA Experiment ID: 20000436 Result: Up-regulated in Transcription
  misc_feature: MA Experiment 20000436 PARAMETER Experiment Name: At_Drought_P Parameter: Age (day) Value: 7
  misc_feature: MA Experiment 20000436 PARAMETER Experiment Name: At_Drought_P Parameter: Organism Value: A. thaliana
  misc_feature: MA Experiment 20000436 PARAMETER Experiment Name: At_Drought_P Parameter: Plant Line Value: WS
  misc_feature: MA Experiment 20000436 PARAMETER Experiment Name: At_Drought_P Parameter: Timepoint (hr) Value: 12
  misc_feature: MA Experiment 20000436 PARAMETER Experiment Name: At_Drought_P Parameter: Tissue Value: Whole Plant
  misc_feature: MA Experiment 20000436 PARAMETER Experiment Name: At_Drought_P Parameter: Treatment Value: Drought vs. No Drought
  misc_feature: MA Experiment ID: 20000437 Result: Up-regulated in Transcription
  misc_feature: MA Experiment 20000437 PARAMETER Experiment Name: At_Drought_P Parameter: Age (day) Value: 8
  misc_feature: MA Experiment 20000437 PARAMETER Experiment Name: At_Drought_P Parameter: Organism Value: A. thaliana
  misc_feature: MA Experiment 20000437 PARAMETER Experiment Name: At_Drought_P Parameter: Plant Line Value: WS
  misc_feature: MA Experiment 20000437 PARAMETER Experiment Name: At_Drought_P Parameter: Timepoint (hr) Value: 24
  misc_feature: MA Experiment 20000437 PARAMETER Experiment Name: At_Drought_P Parameter: Tissue Value: Whole Plant
  misc_feature: MA Experiment 20000437 PARAMETER Experiment Name: At_Drought_P Parameter: Treatment Value: Drought vs. No Drought
atgacgacgacgacgacgattcagtctcctctctctacacgttgaatttcaatcggcttcacgaaccttcaatctcgtgcggatcgaaattcgatcagtttgtagtaaccgacaagttccgaagatttttcatctgctggatttcgtcgatcagattgaaaccgagcttttcaatcaggtgacttggatatttctctacgttatgctcgatctgaagaattgggattcaaatctagtctcatagatcgattctgattaaactcgtggagatccaatctctatcactagttcgattggattgttgtttgttatcttcaaggcctctctgtgtttgtgagtgagatggtatatttgcatagctcaatctcggtctgcaattccgtcgacccaatgatcatgtctcactcctcacctaaatccagaaacacccgtaataaatcttcatcatcaccaacctgttccaaattccctgtctgcgacggatctcagtccgctgctatcgacgtcgtgatccttatcgcggtcatcaccgcctgcggcttcctcttcttcccttacgtcaaactcatcaccctcaaatcgattgaggtcttttcagatctctctcttttagtcaaacaagagattttgcagaacccgattgtgtatggatcattagctttgagtatcttctgtgctgccatctctacttggcttgttatactcttgtgtactatgcagagatgcggcaaaccgaattgtaaaggccttaggaaagctgttgagtttgatattcagcttgagactgaggaatgcgtcaagagctccagcaacaagaggggaatgtttgagttgcctcgtgttcatcaccgtgaattggaagctgagctgaagaagatggctccgcctaatgggcgagccgtgcttgttttcagagcgaggtgtggttgttctgtaaggagattagtcgtttccgggccaaagaagcagcagaggaagatcaagaaatgaataagcgaacaaagttattatatatataaaaaaaggttcaatctttggaaatgagattggatcactacacttttcttcggttagttttattctctcatacacactcttttacaaaaacttatatatgttatagtccatgtgtttaaataatgtacaatgggaataagcattgtaaggatattgtgggaaccaggttatagtgaagaacattttggtc

SEQ ID NO: 39239 - protein, 215 aa, Arabidopsis thaliana
  peptide (1)..(215): Ceres Seq. ID no. 12395465
  misc_feature (106)..(214): Homolog of NCBI NO: 15239636 NR Description: putative protein; protein id: At5g19020.1
  misc_feature (9)..(214): Homolog of NCBI NO: 15230653 NR Description: unknown protein; protein id: At3g06180.1
  misc_feature (21)..(215): Homolog of NCBI NO: 11288897 NR Description: hypothetical protein F8M21.150 - Arabidopsis
  misc_feature (1)..(215): Homolog of NCBI NO: 22326823 NR Description: putative protein
  misc_feature (1)..(193): Homolog of NCBI NO: 6714471 NR Description: unknown protein [Arabidopsis thaliana]
  misc_feature (1)..(215): Homolog of NCBI NO: 18395728 NR Description: Expressed protein
MVYLHSSISVCNSVDPMIMSHSSPKSRNTRNKSSSSPTCSKFPVCDGSQSAAIDVVILIAVITACGFLFFPYVKLITLKSIEVFSDLSLLVKQEILQNPIVYGSLALSIFCAAISTWLVILLCTMQRCGKPNCKGLRKAVEFDIQLETEECVKSSSNKRGMFELPRVHHRELEAELKKMAPPNGRAVLVFRARCGCSVRRLVVSGPKKQQRKIKK

SEQ ID NO: 39240 - protein, 199 aa, Arabidopsis thaliana
  peptide (1)..(199): Ceres Seq. ID no. 12395466
  misc_feature (90)..(198): Homolog of NCBI NO: 15239636 NR Description: putative protein; protein id: At5g19020.1
  misc_feature (1)..(198): Homolog of NCBI NO: 15230653 NR Description: unknown protein; protein id: At3g06180.1
  misc_feature (5)..(199): Homolog of NCBI NO: 11288897 NR Description: hypothetical protein F8M21.150 - Arabidopsis
  misc_feature (1)..(199): Homolog of NCBI NO: 22326823 NR Description: putative protein
  misc_feature (1)..(177): Homolog of NCBI NO: 6714471 NR Description: unknown protein [Arabidopsis thaliana]
  misc_feature (1)..(199): Homolog of NCBI NO: 18395728 NR Description: Expressed protein
MIMSHSSPKSRNTRNKSSSSPTCSKFPVCDGSQSAAIDVVILIAVITACGFLFFPYVKLITLKSIEVFSDLSLLVKQEILQNPIVYGSLALSIFCAAISTWLVILLCTMQRCGKPNCKGLRKAVEFDIQLETEECVKSSSNKRGMFELPRVHHRELEAELKKMAPPNGRAVLVFRARCGCSVRRLVVSGPKKQQRKIKK

SEQ ID NO: 39241 - protein, 197 aa, Arabidopsis thaliana
  peptide (1)..(197): Ceres Seq. ID no. 12395467
  misc_feature (88)..(196): Homolog of NCBI NO: 15239636 NR Description: putative protein; protein id: At5g19020.1
  misc_feature (1)..(196): Homolog of NCBI NO: 15230653 NR Description: unknown protein; protein id: At3g06180.1
  misc_feature (3)..(197): Homolog of NCBI NO: 11288897 NR Description: hypothetical protein F8M21.150 - Arabidopsis
  misc_feature (1)..(197): Homolog of NCBI NO: 22326823 NR Description: putative protein
  misc_feature (1)..(175): Homolog of NCBI NO: 6714471 NR Description: unknown protein [Arabidopsis thaliana]
  misc_feature (1)..(197): Homolog of NCBI NO: 18395728 NR Description: Expressed protein
MSHSSPKSRNTRNKSSSSPTCSKFPVCDGSQSAAIDVVILIAVITACGFLFFPYVKLITLKSIEVFSDLSLLVKQEILQNPIVYGSLALSIFCAAISTWLVILLCTMQRCGKPNCKGLRKAVEFDIQLETEECVKSSSNKRGMFELPRVHHRELEAELKKMAPPNGRAVLVFRARCGCSVRRLVVSGPKKQQRKIKK

SEQ ID NO: 39242 - DNA, 1285 bp, Arabidopsis thaliana
  misc_feature (1)..(1285): Ceres Seq. ID no. 12395440
  misc_feature: MA Experiment ID: 108462 Result: Up-regulated in Transcription
  misc_feature: MA Experiment 108462 PARAMETER Experiment Name: At_Germinating_Seeds_cDNA_P Parameter: Age (day) Value: 2 vs. 0
  misc_feature: MA Experiment 108462 PARAMETER Experiment Name: At_Germinating_Seeds_cDNA_P Parameter: Tissue Value: Germinating Seeds
  misc_feature: MA Experiment ID: 108463 Result: Up-regulated in Transcription
  misc_feature: MA Experiment 108463 PARAMETER Experiment Name: At_Germinating_Seeds_cDNA_P Parameter: Age (day) Value: 3 vs. 0
  misc_feature: MA Experiment 108463 PARAMETER Experiment Name: At_Germinating_Seeds_cDNA_P Parameter: Tissue Value: Germinating Seeds
  misc_feature: MA Experiment ID: 108464 Result: Up-regulated in Transcription
  misc_feature: MA Experiment 108464 PARAMETER Experiment Name: At_Germinating_Seeds_cDNA_P Parameter: Age (day) Value: 4 vs. 0
  misc_feature: MA Experiment 108464 PARAMETER Experiment Name: At_Germinating_Seeds_cDNA_P Parameter: Tissue Value: Germinating Seeds
  misc_feature: MA Experiment ID: 108489 Result: Down-regulated in Transcription
  misc_feature: MA Experiment ID: 108607 Result: Down-regulated in Transcription
  misc_feature: MA Experiment 108607 PARAMETER Experiment Name: At_100uM_ABA_cDNA_P Parameter: Timepoint (hr) Value: 4
  misc_feature: MA Experiment 108607 PARAMETER Experiment Name: At_100uM_ABA_cDNA_P Parameter: Tissue Value: Aerial
  misc_feature: MA Experiment 108607 PARAMETER Experiment Name: At_100uM_ABA_cDNA_P Parameter: Treatment Value: 100uM ABA vs. No Treatment
  misc_feature: MA Experiment ID: 20000070 Result: Down-regulated in Transcription
  misc_feature: MA Experiment 20000070 PARAMETER Experiment Name: At_100uM_ABA_Mutants_cDNA_P Parameter: Plant Line Value: CS24
  misc_feature: MA Experiment 20000070 PARAMETER Experiment Name: At_100uM_ABA_Mutants_cDNA_P Parameter: Timepoint (hr) Value: 6
  misc_feature: MA Experiment 20000070 PARAMETER Experiment Name: At_100uM_ABA_Mutants_cDNA_P Parameter: Tissue Value: Aerial
  misc_feature: MA Experiment 20000070 PARAMETER Experiment Name: At_100uM_ABA_Mutants_cDNA_P Parameter: Treatment Value: 100uM ABA vs. No Treatment
  misc_feature: MA Experiment ID: 20000072 Result: Down-regulated in Transcription
  misc_feature: MA Experiment 20000072 PARAMETER Experiment Name: At_100uM_ABA_Mutants_cDNA_P Parameter: Plant Line Value: CS8105
  misc_feature: MA Experiment 20000072 PARAMETER Experiment Name: At_100uM_ABA_Mutants_cDNA_P Parameter: Timepoint (hr) Value: 6
  misc_feature: MA Experiment 20000072 PARAMETER Experiment Name: At_100uM_ABA_Mutants_cDNA_P Parameter: Tissue Value: Aerial
  misc_feature: MA Experiment 20000072 PARAMETER Experiment Name: At_100uM_ABA_Mutants_cDNA_P Parameter: Treatment Value: 100uM ABA vs. No Treatment
  misc_feature: MA Experiment ID: 20000087 Result: Down-regulated in Transcription
  misc_feature: MA Experiment 20000087 PARAMETER Experiment Name: At_100uM_ABA_Mutants_cDNA_P Parameter: Plant Line Value: WS
  misc_feature: MA Experiment 20000087 PARAMETER Experiment Name: At_100uM_ABA_Mutants_cDNA_P Parameter: Timepoint (hr) Value: 6
  misc_feature: MA Experiment 20000087 PARAMETER Experiment Name: At_100uM_ABA_Mutants_cDNA_P Parameter: Tissue Value: Aerial
  misc_feature: MA Experiment 20000087 PARAMETER Experiment Name: At_100uM_ABA_Mutants_cDNA_P Parameter: Treatment Value: 100uM ABA vs. No Treatment
  misc_feature: MA Experiment ID: 20000089 Result: Down-regulated in Transcription
  misc_feature: MA Experiment ID: 20000090 Result: Down-regulated in Transcription
  misc_feature: MA Experiment ID: 20000111 Result: Down-regulated in Transcription
  misc_feature: MA Experiment 20000111 PARAMETER Experiment Name: At_42deg_Heat_cDNA_P Parameter: Temperature (deg C) Value: 42 vs. 22
  misc_feature: MA Experiment 20000111 PARAMETER Experiment Name: At_42deg_Heat_cDNA_P Parameter: Timepoint (hr) Value: 6
  misc_feature: MA Experiment 20000111 PARAMETER Experiment Name: At_42deg_Heat_cDNA_P Parameter: Tissue Value: Aerial
  misc_feature: MA Experiment ID: 20000112 Result: Down-regulated in Transcription
  misc_feature: MA Experiment 20000112 PARAMETER Experiment Name: At_42deg_Heat_cDNA_P Parameter: Temperature (deg C) Value: 42 vs. 22
  misc_feature: MA Experiment 20000112 PARAMETER Experiment Name: At_42deg_Heat_cDNA_P Parameter: Timepoint (hr) Value: 2
  misc_feature: MA Experiment 20000112 PARAMETER Experiment Name: At_42deg_Heat_cDNA_P Parameter: Tissue Value: Aerial
  misc_feature: MA Experiment ID: 20000113 Result: Down-regulated in Transcription
  misc_feature: MA Experiment 20000113 PARAMETER Experiment Name: At_42deg_Heat_cDNA_P Parameter: Temperature (deg C) Value: 42 vs. 22
  misc_feature: MA Experiment 20000113 PARAMETER Experiment Name: At_42deg_Heat_cDNA_P Parameter: Timepoint (hr) Value: 8
  misc_feature: MA Experiment 20000113 PARAMETER Experiment Name: At_42deg_Heat_cDNA_P Parameter: Tissue Value: Aerial
accatttccaatggccggagcagtaagcctttggcggagagaggccgtgttcttgacggcgatgctggcaggcgaaaccagcatcgtcggactaagtactctgtttaaggtagcaacttcaaagggactcaacatttaccctttcctcagctattcttatcttcttgcttctcttctccttcttccttctctgttcttcaccaacaggtcaagatcacttcctccactaagtgcctcaatactctctaagattggacttcttggctttctaggatcaatgtatgttattacaggaggcataggcatcgaatacagcaacccaaccttagcctccgccataggcaatattgttcctgctcttaccttcatcctcgctgttatcttcaggatggagaaagtatcattcaaagaaaggagcagtgtagccaaagtgatggggacgatactgtcactaataggcgcatttgtggtgattttctaccacggtccacgtgtctttgtcgcatcttctccaccatatctaaacttccgtcagctttctccaccgttgtcatcgtcaaagtctgattggctcatcggaggagctattcttaccatacaaggcatcttcgtttctgtttcttttattctccaggcacatataatgagagaatatcctgaagcattcacagtctccattctctacattctatgtatttcaatcgtgacctcaatgattggactagtagtcgaaaagaacaacccaagcatttggatcattcatttcgatattacattgtttacaattgttactacgggaataataacttcagtatactatgtgattcattcatgggcaatacgtcacaaaggacctctatacttagcgatatttaagcctctatctattttgatagcagtggttatggggaccatttttctcaacgattctctctatctcggatgtttgattggaggaattttgataacattaggcttttatgctgtgatgtggggcaaatcaaacgaagagaaggacaagttgttatcattttcaggaaaagagaaaacccctcttctattgagcggcaaaaacgaacaagtttaaatgaaaaataaattataatcaaaggagttacaaactctcaaatagtatcttatatacatggcgtgcaaacttttagtgtatactgtgtattgctttgtatataacttagaaaatgactatctaattgtttttttaagttacgggtacgtaacgactatctaaattcgttagatcacgacatctaacgaattttggtcc

SEQ ID NO: 39243 - protein, 361 aa, Arabidopsis thaliana
  peptide (1)..(361): Ceres Seq. ID no. 12395441
  misc_feature (26)..(159): Pfam Name: Integral membrane protein DUF6 Pfam Description: Integral membrane protein DUF6
  misc_feature (181)..(353): Homolog of NCBI NO: 18421959 NR Description: putative protein
  misc_feature (92)..(353): Homolog of NCBI NO: 18405657 NR Description: expressed protein
  misc_feature (130)..(356): Homolog of NCBI NO: 15232901 NR Description: unknown protein; protein id: At3g28100.1
  misc_feature (4)..(264): Homolog of NCBI NO: 11994127 NR Description: contains similarity to nodulin~gene_id:MMG15.11
  misc_feature (93)..(361): Homolog of NCBI NO: 11994129 NR Description: contains similarity to nodulin~gene_id:MMG15.13
  misc_feature (4)..(356): Homolog of NCBI NO: 11994130 NR Description: contains similarity to integral membrane protein
  misc_feature (4)..(361): Homolog of NCBI NO: 22331380 NR Description: unknown protein
  misc_feature (4)..(361): Homolog of NCBI NO: 30689045 NR Description: nodulin MtN21 family protein [Arabidopsis
  misc_feature (4)..(361): Homolog of NCBI NO: 18405642 NR Description: expressed protein
  misc_feature (4)..(361): Homolog of NCBI NO: 21618226 NR Description: contains similarity to integral membrane protein
PFPMAGAVSLWRREAVFLTAMLAGETSIVGLSTLFKVATSKGLNIYPFLSYSYLLASLLLLPSLFFTNRSRSLPPLSASILSKIGLLGFLGSMYVITGGIGIEYSNPTLASAIGNIVPALTFILAVIFRMEKVSFKERSSVAKVMGTILSLIGAFVVIFYHGPRVFVASSPPYLNFRQLSPPLSSSKSDWLIGGAILTIQGIFVSVSFILQAHIMREYPEAFTVSILYILCISIVTSMIGLVVEKNNPSIWIIHFDITLFTIVTTGIITSVYYVIHSWAIRHKGPLYLAIFKPLSILIAVVMGTIFLNDSLYLGCLIGGILITLGFYAVMWGKSNEEKDKLLSFSGKEKTPLLLSGKNEQV

SEQ ID NO: 39244 - protein, 358 aa, Arabidopsis thaliana
  peptide (1)..(358): Ceres Seq. ID no. 12395442
  misc_feature (23)..(156): Pfam Name: Integral membrane protein DUF6 Pfam Description: Integral membrane protein DUF6
  misc_feature (178)..(350): Homolog of NCBI NO: 18421959 NR Description: putative protein
  misc_feature (89)..(350): Homolog of NCBI NO: 18405657 NR Description: expressed protein
  misc_feature (127)..(353): Homolog of NCBI NO: 15232901 NR Description: unknown protein; protein id: At3g28100.1
  misc_feature (1)..(261): Homolog of NCBI NO: 11994127 NR Description: contains similarity to nodulin~gene_id:MMG15.11
  misc_feature (90)..(358): Homolog of NCBI NO: 11994129 NR Description: contains similarity to nodulin~gene_id:MMG15.13
  misc_feature (1)..(353): Homolog of NCBI NO: 11994130 NR Description: contains similarity to integral membrane protein
  misc_feature (1)..(358): Homolog of NCBI NO: 22331380 NR Description: unknown protein
  misc_feature (1)..(358): Homolog of NCBI NO: 30689045 NR Description: nodulin MtN21 family protein [Arabidopsis
  misc_feature (1)..(358): Homolog of NCBI NO: 18405642 NR Description: expressed protein
  misc_feature (1)..(358): Homolog of NCBI NO: 21618226 NR Description: contains similarity to integral membrane protein
MAGAVSLWRREAVFLTAMLAGETSIVGLSTLFKVATSKGLNIYPFLSYSYLLASLLLLPSLFFTNRSRSLPPLSASILSKIGLLGFLGSMYVITGGIGIEYSNPTLASAIGNIVPALTFILAVIFRMEKVSFKERSSVAKVMGTILSLIGAFVVIFYHGPRVFVASSPPYLNFRQLSPPLSSSKSDWLIGGAILTIQGIFVSVSFILQAHIMREYPEAFTVSILYILCISIVTSMIGLVVEKNNPSIWIIHFDITLFTIVTTGIITSVYYVIHSWAIRHKGPLYLAIFKPLSILIAVVMGTIFLNDSLYLGCLIGGILITLGFYAVMWGKSNEEKDKLLSFSGKEKTPLLLSGKNEQV

SEQ ID NO: 39245 - protein, 341 aa, Arabidopsis thaliana
  peptide (1)..(341): Ceres Seq. ID no. 12395443
  misc_feature (6)..(139): Pfam Name: Integral membrane protein DUF6 Pfam Description: Integral membrane protein DUF6
  misc_feature (161)..(333): Homolog of NCBI NO: 18421959 NR Description: putative protein
  misc_feature (72)..(333): Homolog of NCBI NO: 18405657 NR Description: expressed protein
  misc_feature (110)..(336): Homolog of NCBI NO: 15232901 NR Description: unknown protein; protein id: At3g28100.1
  misc_feature (1)..(244): Homolog of NCBI NO: 11994127 NR Description: contains similarity to nodulin~gene_id:MMG15.11
  misc_feature (73)..(341): Homolog of NCBI NO: 11994129 NR Description: contains similarity to nodulin~gene_id:MMG15.13
  misc_feature (1)..(336): Homolog of NCBI NO: 11994130 NR Description: contains similarity to integral membrane protein
  misc_feature (1)..(341): Homolog of NCBI NO: 22331380 NR Description: unknown protein
  misc_feature (1)..(341): Homolog of NCBI NO: 30689045 NR Description: nodulin MtN21 family protein [Arabidopsis
  misc_feature (1)..(341): Homolog of NCBI NO: 18405642 NR Description: expressed protein
  misc_feature (1)..(341): Homolog of NCBI NO: 21618226 NR Description: contains similarity to integral membrane protein
MLAGETSIVGLSTLFKVATSKGLNIYPFLSYSYLLASLLLLPSLFFTNRSRSLPPLSASILSKIGLLGFLGSMYVITGGIGIEYSNPTLASAIGNIVPALTFILAVIFRMEKVSFKERSSVAKVMGTILSLIGAFVVIFYHGPRVFVASSPPYLNFRQLSPPLSSSKSDWLIGGAILTIQGIFVSVSFILQAHIMREYPEAFTVSILYILCISIVTSMIGLVVEKNNPSIWIIHFDITLFTIVTTGIITSVYYVIHSWAIRHKGPLYLAIFKPLSILIAVVMGTIFLNDSLYLGCLIGGILITLGFYAVMWGKSNEEKDKLLSFSGKEKTPLLLSGKNEQV

SEQ ID NO: 39246 - DNA, 2508 bp, Arabidopsis thaliana
  misc_feature (1)..(2508): Ceres Seq. ID no. 13494685
  misc_feature: MA Experiment ID: 20000173 Result: Up-regulated in Transcription
  misc_feature: MA Experiment 20000173 PARAMETER Experiment Name: At_42deg_Heat_P Parameter: Age (day) Value: 14
  misc_feature: MA Experiment 20000173 PARAMETER Experiment Name: At_42deg_Heat_P Parameter: Organism Value: A. thaliana
  misc_feature: MA Experiment 20000173 PARAMETER Experiment Name: At_42deg_Heat_P Parameter: Plant Line Value: WS
  misc_feature: MA Experiment 20000173 PARAMETER Experiment Name: At_42deg_Heat_P Parameter: Temperature (deg C) Value: 42 vs. 22
  misc_feature: MA Experiment 20000173 PARAMETER Experiment Name: At_42deg_Heat_P Parameter: Timepoint (hr) Value: 6
  misc_feature: MA Experiment 20000173 PARAMETER Experiment Name: At_42deg_Heat_P Parameter: Tissue Value: Aerial
  misc_feature: MA Experiment ID: 20000234 Result: Up-regulated in Transcription
  misc_feature: MA Experiment 20000234 PARAMETER Experiment Name: At_Siliques_P Parameter: Age (day) Value: 21
  misc_feature: MA Experiment 20000234 PARAMETER Experiment Name: At_Siliques_P Parameter: Organism Value: A. thaliana
  misc_feature: MA Experiment 20000234 PARAMETER Experiment Name: At_Siliques_P Parameter: Plant Line Value: WS
  misc_feature: MA Experiment 20000234 PARAMETER Experiment Name: At_Siliques_P Parameter: Tissue Value: Less Than 5mm Siliques vs. Whole Plant
  misc_feature: MA Experiment ID: 20000264 Result: Up-regulated in Transcription
  misc_feature: MA Experiment 20000264 PARAMETER Experiment Name: At_Open_Flower_P Parameter: Age (day) Value: 21
  misc_feature: MA Experiment 20000264 PARAMETER Experiment Name: At_Open_Flower_P Parameter: Plant Line Value: WS
  misc_feature: MA Experiment 20000264 PARAMETER Experiment Name: At_Open_Flower_P Parameter: Tissue Value: Open Flower vs. Whole Plant
  misc_feature: MA Experiment ID: 20000265 Result: Up-regulated in Transcription
  misc_feature: MA Experiment 20000265 PARAMETER Experiment Name: At_Open_Flower_P Parameter: Age (day) Value: 21
  misc_feature: MA Experiment 20000265 PARAMETER Experiment Name: At_Open_Flower_P Parameter: Plant Line Value: WS
  misc_feature: MA Experiment 20000265 PARAMETER Experiment Name: At_Open_Flower_P Parameter: Tissue Value: Closed Flower vs. Whole Plant
  misc_feature: MA Experiment ID: 20000286 Result: Up-regulated in Transcription
  misc_feature: MA Experiment 20000286 PARAMETER Experiment Name: At_Open_Flower_P Parameter: Age (day) Value: 21
  misc_feature: MA Experiment 20000286 PARAMETER Experiment Name: At_Open_Flower_P Parameter: Plant Line Value: WS
  misc_feature: MA Experiment 20000286 PARAMETER Experiment Name: At_Open_Flower_P Parameter: Tissue Value: Half Open vs. Whole Plant
  misc_feature: MA Experiment ID: 20000495 Result: Up-regulated in Transcription
  misc_feature: MA Experiment 20000495 PARAMETER Experiment Name: At_Guard_Cells_P Parameter: Harvest Date Value: 8/2/2002
  misc_feature: MA Experiment 20000495 PARAMETER Experiment Name: At_Guard_Cells_P Parameter: Organism Value: A. thaliana
  misc_feature: MA Experiment 20000495 PARAMETER Experiment Name: At_Guard_Cells_P Parameter: Tissue Value: Guard Cells vs. Leaves
  misc_feature: MA Experiment ID: 20001248 Result: Down-regulated in Transcription
  misc_feature: MA Experiment 20001248 PARAMETER Experiment Name: At_Far-red-induction_P Parameter: Age (day) Value: 7
  misc_feature: MA Experiment 20001248 PARAMETER Experiment Name: At_Far-red-induction_P Parameter: Light Value: Far-red vs. White
  misc_feature: MA Experiment 20001248 PARAMETER Experiment Name: At_Far-red-induction_P Parameter: Organism Value: A. thaliana
  misc_feature: MA Experiment 20001248 PARAMETER Experiment Name: At_Far-red-induction_P Parameter: Plant Line Value: Columbia
  misc_feature: MA Experiment 20001248 PARAMETER Experiment Name: At_Far-red-induction_P Parameter: Timepoint (hr) Value: 4
  misc_feature: MA Experiment 20001248 PARAMETER Experiment Name: At_Far-red-induction_P Parameter: Tissue Value: Whole Plant
  misc_feature: MA Experiment ID: 20001450 Result: Down-regulated in Transcription
  misc_feature: MA Experiment 20001450 PARAMETER Experiment Name: At_Far-red-induction_P Parameter: Age (day) Value: 7
  misc_feature: MA Experiment 20001450 PARAMETER Experiment Name: At_Far-red-induction_P Parameter: Light Value: Far-red vs. White
  misc_feature: MA Experiment 20001450 PARAMETER Experiment Name: At_Far-red-induction_P Parameter: Organism Value: A. thaliana
  misc_feature: MA Experiment 20001450 PARAMETER Experiment Name: At_Far-red-induction_P Parameter: Plant Line Value: Columbia
  misc_feature: MA Experiment 20001450 PARAMETER Experiment Name: At_Far-red-induction_P Parameter: Timepoint (hr) Value: 8
  misc_feature: MA Experiment 20001450 PARAMETER Experiment Name: At_Far-red-induction_P Parameter: Tissue Value: Whole Plant
  misc_feature: MA Experiment ID: 20001558 Result: Up-regulated in Transcription
  misc_feature: MA Experiment 20001558 PARAMETER Experiment Name: At_Drought_Soil_Dry_P Parameter: Age (day) Value: 27
  misc_feature: MA Experiment 20001558 PARAMETER Experiment Name: At_Drought_Soil_Dry_P Parameter: Organism Value: A. thaliana
  misc_feature: MA Experiment 20001558 PARAMETER Experiment Name: At_Drought_Soil_Dry_P Parameter: Plant Line Value: WS
  misc_feature: MA Experiment 20001558 PARAMETER Experiment Name: At_Drought_Soil_Dry_P Parameter: Post Timepoint (hr) Value: 6
  misc_feature: MA Experiment 20001558 PARAMETER Experiment Name: At_Drought_Soil_Dry_P Parameter: Post-Treatment Value: Re-Water vs. No Drought
  misc_feature: MA Experiment 20001558 PARAMETER Experiment Name: At_Drought_Soil_Dry_P Parameter: Timepoint (day) Value: 13
  misc_feature: MA Experiment 20001558 PARAMETER Experiment Name: At_Drought_Soil_Dry_P Parameter: Treatment Value: Drought vs. No Drought
  misc_feature: MA Experiment ID: 20001560 Result: Up-regulated in Transcription
  misc_feature: MA Experiment 20001560 PARAMETER Experiment Name: At_Drought_Soil_Dry_P Parameter: Age (day) Value: 28
  misc_feature: MA Experiment 20001560 PARAMETER Experiment Name: At_Drought_Soil_Dry_P Parameter: Organism Value: A. thaliana
  misc_feature: MA Experiment 20001560 PARAMETER Experiment Name: At_Drought_Soil_Dry_P Parameter: Plant Line Value: WS
  misc_feature: MA Experiment 20001560 PARAMETER Experiment Name: At_Drought_Soil_Dry_P Parameter: Post Timepoint (hr) Value: None
  misc_feature: MA Experiment 20001560 PARAMETER Experiment Name: At_Drought_Soil_Dry_P Parameter: Post-Treatment Value: None
  misc_feature: MA Experiment 20001560 PARAMETER Experiment Name: At_Drought_Soil_Dry_P Parameter: Timepoint (day) Value: 14
  misc_feature: MA Experiment 20001560 PARAMETER Experiment Name: At_Drought_Soil_Dry_P Parameter: Treatment Value: Drought vs. No Drought
ggttttaagccatttttttcccaccgcctctgcagctctgcttttttagctgctattttttttttttgcttttggtcttcttcttcttcttcaagaatgagctaatactcacagaagaagaagatttttctttggatttttcactactgaggcattgttgtgaaattggatggtagtagcattggaatggcagaacaaaagagtagtaacggaggaggaggaggaggagatgttgttatcaatgttccagttgaggaagcatcaaggcgttccaaggaaatggcttcaccagagtctgagaaaggagttccctttagtaaaagcccttctcctgaaatctctaagcttgttggtagtcctaacaagcctcctagagctccaaatcagaacaatgtgggtctaactcagaggaaatcttttgcaaggtcggtttactcaaaacccaagtcccggtttgttgatccatcttgtcctgtagacacaagtattctagaggaggaagttagggagcaacttggtgctggtttttcttttagtagagcttctccgaataacaaatctaataggagtgtcgggtcaccagcaccggttactccaagtaaagtcgttgttgagaaagatgaggatgaggaaatctacaagaaggttaagctgaacagagagatgcgcagtaagataagtacattggctttgatagagtcagctttctttgtggtgattttgagcgctttggttgcgagtttaaccattaatgtcctgaaacatcacaccttctgggggctagaagtctggaaatggtgtgtgcttgtgatggttatattcagtggaatgttggtgacaaactggttcatgcgtttgattgtgttcctcatagaaacaaactttcttttgaggagaaaagtgctctactttgtgcacggcttgaagaagagcgtccaagttttcatttggctctgcttgattcttgttgcttggatattgttgttcaaccacgacgtgaaacggtcccccgcagccaccaaagtcctcaaatgtattaccaggactcttatttccattcttacaggggcattcttttggctggtgaaaacactcttgttgaaaatccttgcagcgaatttcaacgtcaataactttttcgataggattcaagattctgttttccaccagtatgttctacaaacgctctcgggtcttccacttatggaagaggcagagagggtcgggcgtgagccaagcacaggccatttgagtttcgcgactgtagtgaaaaaaggaacggttaaagagaagaaagtgattgatatggggaaagttcataagatgaagcgggagaaagtttcggcttggactatgcgagttttgatggaagcggttagaacttcaggtctctctactatctctgacacattggacgaaacagcatacggcgaggggaaagagcaagctgacagagaaattactagtgagatggaggctttggctgctgcttaccatgtcttcagaaatgttgctcagcccttcttcaattacatagaggaagaggacttgcttaggtttatgattaaggaagaggttgatcttgtgttcccattgtttgatggtgccgctgagaccgggagaattacaagaaaagctttcacagaatgggtggttaaggtgtacacgagccggagagctttagcgcattccttaaacgacacaaaaacagcggttaagcagttaaacaaacttgtgacagcaatcttgatggtggttaccgttgtcatttggctgctccttctagaagtagcaacgactaaggttttgctgttcttctccacccaactcgtggctctggcttttataatcggaagcacatgcaaaaacctctttgaatccattgtgttcgtattcgtcatgcatccttatgatgtcggtgatcgatgtgttgttgacggtgtcgcgatgctggtggaagaaatgaatctcttaacgacagtgttcttgaagcttaacaacgagaaagtgtattatccgaacgctgttttggccacgaaaccgataagcaattacttcagaagtccgaatatgggagaaacagtggaattctctatctctttctcgacaccagtctctaagatagcacatctcaaagaaagaatcgccgagtacttggagcagaacccgcaacattgggcaccggttcactcggtggtggtgaaggagatagagaacatgaacaagctgaagatggccctatacagtgaccacaccatcacgtttcaggaaaacagagagaggaatcttagaagaaccgaactttctttggccattaagagaatgttggaggaccttcacatcgactacactctccttcctcaagacattaatctcacaaagaagaactgatgagaaccaatttaaaaccggtttggtgttttttctaaaccgttgttataagacattattattaccaaacgttgtgatactgttttgtttaaggcttttagagtagatgatgaaatc

SEQ ID NO: 39247 - protein, 734 aa, Arabidopsis thaliana
  peptide (1)..(734): Ceres Seq. ID no. 13494686
  misc_feature (514)..(722): Pfam Name: Mechanosensitive ion channel Pfam Description: Mechanosensitive ion channel
  misc_feature (84)..(730): Homolog of NCBI NO: 15231928 NR Description: hypothetical protein [Arabidopsis thaliana]
  misc_feature (379)..(444): Homolog of NCBI NO: 30679840 NR Description: expressed protein [Arabidopsis thaliana]
  misc_feature (145)..(273): Homolog of NCBI NO: 30679840 NR Description: expressed protein [Arabidopsis thaliana]
  misc_feature (476)..(730): Homolog of NCBI NO: 30679840 NR Description: expressed protein [Arabidopsis thaliana]
  misc_feature (142)..(349): Homolog of NCBI NO: 15227342 NR Description: hypothetical protein [Arabidopsis thaliana]
  misc_feature (298)..(730): Homolog of NCBI NO: 15227342 NR Description: hypothetical protein [Arabidopsis thaliana]
  misc_feature (84)..(343): Homolog of NCBI NO: 38345847 NR Description: OSJNBa0084K11.11 [Oryza sativa (japonica
  misc_feature (372)..(730): Homolog of NCBI NO: 38345847 NR Description: OSJNBa0084K11.11 [Oryza sativa (japonica
  misc_feature (35)..(731): Homolog of NCBI NO: 18390104 NR Description: putative protein T30F21.6 [Sorghum bicolor]
  misc_feature (1)..(731): Homolog of NCBI NO: 15239769 NR Description: expressed protein [Arabidopsis thaliana]
MAEQKSSNGGGGGGDVVINVPVEEASRRSKEMASPESEKGVPFSKSPSPEISKLVGSPNKPPRAPNQNNVGLTQRKSFARSVYSKPKSRFVDPSCPVDTSILEEEVREQLGAGFSFSRASPNNKSNRSVGSPAPVTPSKVVVEKDEDEEIYKKVKLNREMRSKISTLALIESAFFVVILSALVASLTINVLKHHTFWGLEVWKWCVLVMVIFSGMLVTNWFMRLIVFLIETNFLLRRKVLYFVHGLKKSVQVFIWLCLILVAWILLFNHDVKRSPAATKVLKCITRTLISILTGAFFWLVKTLLLKILAANFNVNNFFDRIQDSVFHQYVLQTLSGLPLMEEAERVGREPSTGHLSFATVVKKGTVKEKKVIDMGKVHKMKREKVSAWTMRVLMEAVRTSGLSTISDTLDETAYGEGKEQADREITSEMEALAAAYHVFRNVAQPFFNYIEEEDLLRFMIKEEVDLVFPLFDGAAETGRITRKAFTEWVVKVYTSRRALAHSLNDTKTAVKQLNKLVTAILMVVTVVIWLLLLEVATTKVLLFFSTQLVALAFIIGSTCKNLFESIVFVFVMHPYDVGDRCVVDGVAMLVEEMNLLTTVFLKLNNEKVYYPNAVLATKPISNYFRSPNMGETVEFSISFSTPVSKIAHLKERIAEYLEQNPQHWAPVHSVVVKEIENMNKLKMALYSDHTITFQENRERNLRRTELSLAIKRMLEDLHIDYTLLPQDINLTKKN

SEQ ID NO: 39248 - protein, 703 aa, Arabidopsis thaliana
  peptide (1)..(703): Ceres Seq. ID no. 13494687
  misc_feature (483)..(691): Pfam Name: Mechanosensitive ion channel Pfam Description: Mechanosensitive ion channel
  misc_feature (53)..(699): Homolog of NCBI NO: 15231928 NR Description: hypothetical protein [Arabidopsis thaliana]
  misc_feature (348)..(413): Homolog of NCBI NO: 30679840 NR Description: expressed protein [Arabidopsis thaliana]
  misc_feature (114)..(242): Homolog of NCBI NO: 30679840 NR Description: expressed protein [Arabidopsis thaliana]
  misc_feature (445)..(699): Homolog of NCBI NO: 30679840 NR Description: expressed protein [Arabidopsis thaliana]
  misc_feature (111)..(318): Homolog of NCBI NO: 15227342 NR Description: hypothetical protein [Arabidopsis thaliana]
  misc_feature (267)..(699): Homolog of NCBI NO: 15227342 NR Description: hypothetical protein [Arabidopsis thaliana]
  misc_feature (53)..(312): Homolog of NCBI NO: 38345847 NR Description: OSJNBa0084K11.11 [Oryza sativa (japonica
  misc_feature (341)..(699): Homolog of NCBI NO: 38345847 NR Description: OSJNBa0084K11.11 [Oryza sativa (japonica
  misc_feature (4)..(700): Homolog of NCBI NO: 18390104 NR Description: putative protein T30F21.6 [Sorghum bicolor]
  misc_feature (1)..(700): Homolog of NCBI NO: 15239769 NR Description: expressed protein [Arabidopsis thaliana]
MASPESEKGVPFSKSPSPEISKLVGSPNKPPRAPNQNNVGLTQRKSFARSVYSKPKSRFVDPSCPVDTSILEEEVREQLGAGFSFSRASPNNKSNRSVGSPAPVTPSKVVVEKDEDEEIYKKVKLNREMRSKISTLALIESAFFVVILSALVASLTINVLKHHTFWGLEVWKWCVLVMVIFSGMLVTNWFMRLIVFLIETNFLLRRKVLYFVHGLKKSVQVFIWLCLILVAWILLFNHDVKRSPAATKVLKCITRTLISILTGAFFWLVKTLLLKILAANFNVNNFFDRIQDSVFHQYVLQTLSGLPLMEEAERVGREPSTGHLSFATVVKKGTVKEKKVIDMGKVHKMKREKVSAWTMRVLMEAVRTSGLSTISDTLDETAYGEGKEQADREITSEMEALAAAYHVFRNVAQPFFNYIEEEDLLRFMIKEEVDLVFPLFDGAAETGRITRKAFTEWVVKVYTSRRALAHSLNDTKTAVKQLNKLVTAILMVVTVVIWLLLLEVATTKVLLFFSTQLVALAFIIGSTCKNLFESIVFVFVMHPYDVGDRCVVDGVAMLVEEMNLLTTVFLKLNNEKVYYPNAVLATKPISNYFRSPNMGETVEFSISFSTPVSKIAHLKERIAEYLEQNPQHWAPVHSVVVKEIENMNKLKMALYSDHTITFQENRERNLRRTELSLAIKRMLEDLHIDYTLLPQDINLTKKN

SEQ ID NO: 39249 - protein, 575 aa, Arabidopsis thaliana
  peptide (1)..(575): Ceres Seq. ID no. 13494688
  misc_feature (355)..(563): Pfam Name: Mechanosensitive ion channel Pfam Description: Mechanosensitive ion channel
  misc_feature (1)..(571): Homolog of NCBI NO: 15231928 NR Description: hypothetical protein [Arabidopsis thaliana]
  misc_feature (220)..(285): Homolog of NCBI NO: 30679840 NR Description: expressed protein [Arabidopsis thaliana]
  misc_feature (1)..(114): Homolog of NCBI NO: 30679840 NR Description: expressed protein [Arabidopsis thaliana]
  misc_feature (317)..(571): Homolog of NCBI NO: 30679840 NR Description: expressed protein [Arabidopsis thaliana]
  misc_feature (1)..(190): Homolog of NCBI NO: 15227342 NR Description: hypothetical protein [Arabidopsis thaliana]
  misc_feature (139)..(571): Homolog of NCBI NO: 15227342 NR Description: hypothetical protein [Arabidopsis thaliana]
  misc_feature (1)..(184): Homolog of NCBI NO: 38345847 NR Description: OSJNBa0084K11.11 [Oryza sativa (japonica
  misc_feature (213)..(571): Homolog of NCBI NO: 38345847 NR Description: OSJNBa0084K11.11 [Oryza sativa (japonica
  misc_feature (1)..(572): Homolog of NCBI NO: 18390104 NR Description: putative protein T30F21.6 [Sorghum bicolor]
  misc_feature (1)..(572): Homolog of NCBI NO: 15239769 NR Description: expressed protein [Arabidopsis thaliana]
MRSKISTLALIESAFFVVILSALVASLTINVLKHHTFWGLEVWKWCVLVMVIFSGMLVTNWFMRLIVFLIETNFLLRRKVLYFVHGLKKSVQVFIWLCLILVAWILLFNHDVKRSPAATKVLKCITRTLISILTGAFFWLVKTLLLKILAANFNVNNFFDRIQDSVFHQYVLQTLSGLPLMEEAERVGREPSTGHLSFATVVKKGTVKEKKVIDMGKVHKMKREKVSAWTMRVLMEAVRTSGLSTISDTLDETAYGEGKEQADREITSEMEALAAAYHVFRNVAQPFFNYIEEEDLLRFMIKEEVDLVFPLFDGAAETGRITRKAFTEWVVKVYTSRRALAHSLNDTKTAVKQLNKLVTAILMVVTVVIWLLLLEVATTKVLLFFSTQLVALAFIIGSTCKNLFESIVFVFVMHPYDVGDRCVVDGVAMLVEEMNLLTTVFLKLNNEKVYYPNAVLATKPISNYFRSPNMGETVEFSISFSTPVSKIAHLKERIAEYLEQNPQHWAPVHSVVVKEIENMNKLKMALYSDHTITFQENRERNLRRTELSLAIKRMLEDLHIDYTLLPQDINLTKKN

SEQ ID NO: 39250 - DNA, 573 bp, Arabidopsis thaliana
  misc_feature (1)..(573): Ceres Seq. ID no. 12393074
  misc_feature: MA Experiment ID: 108434 Result: Down-regulated in Transcription
  misc_feature: MA Experiment 108434 PARAMETER Experiment Name: At_Root_Tips_cDNA_P Parameter: Tissue Value: Root Tips
  misc_feature: MA Experiment ID: 108435 Result: Up-regulated in Transcription
  misc_feature: MA Experiment 108435 PARAMETER Experiment Name: At_stm_Mutants_cDNA_P Parameter: Plant Line Value: wt Landsburg vs stm
  misc_feature: MA Experiment 108435 PARAMETER Experiment Name: At_stm_Mutants_cDNA_P Parameter: Tissue Value: Shoot Apical Meristem Region
  misc_feature: MA Experiment ID: 108594 Result: Down-regulated in Transcription
  misc_feature: MA Experiment 108594 PARAMETER Experiment Name: At_Ler-rhl_Root_cDNA_P Parameter: Plant Line Value: null
  misc_feature: MA Experiment ID: 108609 Result: Up-regulated in Transcription
  misc_feature: MA Experiment 108609 PARAMETER Experiment Name: At_100uM_ABA_cDNA_P Parameter: Timepoint (hr) Value: 24
  misc_feature: MA Experiment 108609 PARAMETER Experiment Name: At_100uM_ABA_cDNA_P Parameter: Tissue Value: Aerial
  misc_feature: MA Experiment 108609 PARAMETER Experiment Name: At_100uM_ABA_cDNA_P Parameter: Treatment Value: 100uM ABA vs. No Treatment
  misc_feature: MA Experiment ID: 20000090 Result: Up-regulated in Transcription
  misc_feature: MA Experiment ID: 20000112 Result: Up-regulated in Transcription
  misc_feature: MA Experiment 20000112 PARAMETER Experiment Name: At_42deg_Heat_cDNA_P Parameter: Temperature (deg C) Value: 42 vs. 22
  misc_feature: MA Experiment 20000112 PARAMETER Experiment Name: At_42deg_Heat_cDNA_P Parameter: Timepoint (hr) Value: 2
  misc_feature: MA Experiment 20000112 PARAMETER Experiment Name: At_42deg_Heat_cDNA_P Parameter: Tissue Value: Aerial
  misc_feature: MA Experiment ID: 20000144 Result: Up-regulated in Transcription
  misc_feature: MA Experiment 20000144 PARAMETER Experiment Name: At_42deg_Heat_cDNA_P Parameter: Temperature (deg C) Value: 42 vs. 22
  misc_feature: MA Experiment 20000144 PARAMETER Experiment Name: At_42deg_Heat_cDNA_P Parameter: Timepoint (hr) Value: 1
  misc_feature: MA Experiment 20000144 PARAMETER Experiment Name: At_42deg_Heat_cDNA_P Parameter: Tissue Value: Aerial
  misc_feature: MA Experiment ID: 20000171 Result: Up-regulated in Transcription
  misc_feature: MA Experiment 20000171 PARAMETER Experiment Name: At_42deg_Heat_P Parameter: Age (day) Value: 14
  misc_feature: MA Experiment 20000171 PARAMETER Experiment Name: At_42deg_Heat_P Parameter: Organism Value: A. thaliana
  misc_feature: MA Experiment 20000171 PARAMETER Experiment Name: At_42deg_Heat_P Parameter: Plant Line Value: WS
  misc_feature: MA Experiment 20000171 PARAMETER Experiment Name: At_42deg_Heat_P Parameter: Temperature (deg C) Value: 42 vs. 22
  misc_feature: MA Experiment 20000171 PARAMETER Experiment Name: At_42deg_Heat_P Parameter: Timepoint (hr) Value: 1
  misc_feature: MA Experiment 20000171 PARAMETER Experiment Name: At_42deg_Heat_P Parameter: Tissue Value: Aerial
  misc_feature: MA Experiment ID: 20000184 Result: Up-regulated in Transcription
  misc_feature: MA Experiment 20000184 PARAMETER Experiment Name: At_Shoots__P Parameter: Age (day) Value: 7
  misc_feature: MA Experiment 20000184 PARAMETER Experiment Name: At_Shoots__P Parameter: Tissue Value: Shoots vs. Whole Plant
  misc_feature: MA Experiment ID: 20000185 Result: Up-regulated in Transcription
  misc_feature: MA Experiment 20000185 PARAMETER Experiment Name: At_Roots__P Parameter: Age (day) Value: 7 vs. 21
  misc_feature: MA Experiment 20000185 PARAMETER Experiment Name: At_Roots__P Parameter: Organism Value: A. thaliana
  misc_feature: MA Experiment 20000185 PARAMETER Experiment Name: At_Roots__P Parameter: Tissue Value: Roots vs. Whole Plant
  misc_feature: MA Experiment ID: 20000234 Result: Down-regulated in Transcription
  misc_feature: MA Experiment 20000234 PARAMETER Experiment Name: At_Siliques_P Parameter: Age (day) Value: 21
  misc_feature: MA Experiment 20000234 PARAMETER Experiment Name: At_Siliques_P Parameter: Organism Value: A. thaliana
  misc_feature: MA Experiment 20000234 PARAMETER Experiment Name: At_Siliques_P Parameter: Plant Line Value: WS
  misc_feature: MA Experiment 20000234 PARAMETER Experiment Name: At_Siliques_P Parameter: Tissue Value: Less Than 5mm Siliques vs. Whole Plant
  misc_feature: MA Experiment ID: 20000235 Result: Down-regulated in Transcription
  misc_feature: MA Experiment 20000235 PARAMETER Experiment Name: At_Siliques_P Parameter: Age (day) Value: 21
  misc_feature: MA Experiment 20000235 PARAMETER Experiment Name: At_Siliques_P Parameter: Organism Value: A. thaliana
  misc_feature: MA Experiment 20000235 PARAMETER Experiment Name: At_Siliques_P Parameter: Plant Line Value: WS
  misc_feature: MA Experiment 20000235 PARAMETER Experiment Name: At_Siliques_P Parameter: Tissue Value: 5-10mm Siliques vs. Whole Plant
  misc_feature: MA Experiment ID: 20000269 Result: Down-regulated in Transcription
  misc_feature: MA Experiment 20000269 PARAMETER Experiment Name: At_1mM_KNO3_L-vs-H_Roots_P Parameter: Age (day) Value: 7,10,12
  misc_feature: MA Experiment 20000269 PARAMETER Experiment Name: At_1mM_KNO3_L-vs-H_Roots_P Parameter: Organism Value: A. thaliana
  misc_feature: MA Experiment 20000269 PARAMETER Experiment Name: At_1mM_KNO3_L-vs-H_Roots_P Parameter: Plant Line Value: WS
  misc_feature: MA Experiment 20000269 PARAMETER Experiment Name: At_1mM_KNO3_L-vs-H_Roots_P Parameter: Timepoint (day) Value: 7,10,12
  misc_feature: MA Experiment 20000269 PARAMETER Experiment Name: At_1mM_KNO3_L-vs-H_Roots_P Parameter: Tissue Value: Roots
  misc_feature: MA Experiment 20000269 PARAMETER Experiment Name: At_1mM_KNO3_L-vs-H_Roots_P Parameter: Treatment Value: 1mM KNO3 vs. 50mM KNO3
  misc_feature: MA Experiment ID: 20000438 Result: Up-regulated in Transcription
  misc_feature: MA Experiment 20000438 PARAMETER Experiment Name: At_Shoots__P Parameter: Age (day) Value: 14
  misc_feature: MA Experiment 20000438 PARAMETER Experiment Name: At_Shoots__P Parameter: Tissue Value: Shoots vs. Whole Plant
  misc_feature: MA Experiment ID: 20000439 Result: Up-regulated in Transcription
  misc_feature: MA Experiment 20000439 PARAMETER Experiment Name: At_Roots__P Parameter: Age (day) Value: 14 vs. 21
  misc_feature: MA Experiment 20000439 PARAMETER Experiment Name: At_Roots__P Parameter: Organism Value: A. thaliana
  misc_feature: MA Experiment 20000439 PARAMETER Experiment Name: At_Roots__P Parameter: Tissue Value: Roots vs. Whole Plant
  misc_feature: MA Experiment ID: 20000451 Result: Down-regulated in Transcription
  misc_feature: MA Experiment 20000451 PARAMETER Experiment Name: At_CS6879_Shoots-Roots_P Parameter: Age (day) Value: 14
  misc_feature: MA Experiment 20000451 PARAMETER Experiment Name: At_CS6879_Shoots-Roots_P Parameter: Organism Value: A. thaliana
  misc_feature: MA Experiment 20000451 PARAMETER Experiment Name: At_CS6879_Shoots-Roots_P Parameter: Plant Line Value: CS6879 vs. WS
  misc_feature: MA Experiment 20000451 PARAMETER Experiment Name: At_CS6879_Shoots-Roots_P Parameter: Tissue Value: Roots
  misc_feature: MA Experiment ID: 20000452 Result: Down-regulated in Transcription
  misc_feature: MA Experiment 20000452 PARAMETER Experiment Name: At_CS6879_Shoots-Roots_P Parameter: Age (day) Value: 14
  misc_feature: MA Experiment 20000452 PARAMETER Experiment Name: At_CS6879_Shoots-Roots_P Parameter: Organism Value: A. thaliana
  misc_feature: MA Experiment 20000452 PARAMETER Experiment Name: At_CS6879_Shoots-Roots_P Parameter: Plant Line Value: CS6879 vs. WS
  misc_feature: MA Experiment 20000452 PARAMETER Experiment Name: At_CS6879_Shoots-Roots_P Parameter: Tissue Value: Shoots
  misc_feature: MA Experiment ID: 20000453 Result: Up-regulated in Transcription
  misc_feature: MA Experiment 20000453 PARAMETER Experiment Name: At_100uM_ABA_P Parameter: Age (day) Value: 15
  misc_feature: MA Experiment 20000453 PARAMETER Experiment Name: At_100uM_ABA_P Parameter: Organism Value: A. thaliana
  misc_feature: MA Experiment 20000453 PARAMETER Experiment Name: At_100uM_ABA_P Parameter: Plant Line Value: WS
  misc_feature: MA Experiment 20000453 PARAMETER Experiment Name: At_100uM_ABA_P Parameter: Timepoint (hr) Value: 24
  misc_feature: MA Experiment 20000453 PARAMETER Experiment Name: At_100uM_ABA_P Parameter: Tissue Value: Aerial
  misc_feature: MA Experiment 20000453 PARAMETER Experiment Name: At_100uM_ABA_P Parameter: Treatment Value: 100uM ABA vs. No Treatment
  misc_feature: MA Experiment ID: 20000455 Result: Up-regulated in Transcription
  misc_feature: MA Experiment 20000455 PARAMETER Experiment Name: At_100uM_ABA_P Parameter: Age (day) Value: 16
  misc_feature: MA Experiment 20000455 PARAMETER Experiment Name: At_100uM_ABA_P Parameter: Organism Value: A. thaliana
  misc_feature: MA Experiment 20000455 PARAMETER Experiment Name: At_100uM_ABA_P Parameter: Plant Line Value: WS
  misc_feature: MA Experiment 20000455 PARAMETER Experiment Name: At_100uM_ABA_P Parameter: Timepoint (hr) Value: 48
  misc_feature: MA Experiment 20000455 PARAMETER Experiment Name: At_100uM_ABA_P Parameter: Tissue Value: Aerial
  misc_feature: MA Experiment 20000455 PARAMETER Experiment Name: At_100uM_ABA_P Parameter: Treatment Value: 100uM ABA vs. No Treatment
  misc_feature: MA Experiment ID: 20000495 Result: Up-regulated in Transcription
  misc_feature: MA Experiment 20000495 PARAMETER Experiment Name: At_Guard_Cells_P Parameter: Harvest Date Value: 8/2/2002
  misc_feature: MA Experiment 20000495 PARAMETER Experiment Name: At_Guard_Cells_P Parameter: Organism Value: A. thaliana
  misc_feature: MA Experiment 20000495 PARAMETER Experiment Name: At_Guard_Cells_P Parameter: Tissue Value: Guard Cells vs. Leaves
  misc_feature: MA Experiment ID: 20000709 Result: Up-regulated in Transcription
  misc_feature: MA Experiment 20000709 PARAMETER Experiment Name: At_15mM_NH4NO3_L-to-H_P Parameter: Age (hr) Value: 14
  misc_feature: MA Experiment 20000709 PARAMETER Experiment Name: At_15mM_NH4NO3_L-to-H_P Parameter: Organism Value: A. thaliana
  misc_feature: MA Experiment 20000709 PARAMETER Experiment Name: At_15mM_NH4NO3_L-to-H_P Parameter: Plant Line Value: WS
  misc_feature: MA Experiment 20000709 PARAMETER Experiment Name: At_15mM_NH4NO3_L-to-H_P Parameter: Timepoint (hr) Value: 4
  misc_feature: MA Experiment 20000709 PARAMETER Experiment Name: At_15mM_NH4NO3_L-to-H_P Parameter: Tissue Value: Aerial
  misc_feature: MA Experiment 20000709 PARAMETER Experiment Name: At_15mM_NH4NO3_L-to-H_P Parameter: Treatment Value: 15mM NH4NO3 vs. 30mM Mannitol
  misc_feature: MA Experiment ID: 20001554 Result: Up-regulated in Transcription
  misc_feature: MA Experiment 20001554 PARAMETER Experiment Name: At_Drought_Soil_Dry_P Parameter: Age (day) Value: 21
  misc_feature: MA Experiment 20001554 PARAMETER Experiment Name: At_Drought_Soil_Dry_P Parameter: Organism Value: A. thaliana
  misc_feature: MA Experiment 20001554 PARAMETER Experiment Name: At_Drought_Soil_Dry_P Parameter: Plant Line Value: WS
  misc_feature: MA Experiment 20001554 PARAMETER Experiment Name: At_Drought_Soil_Dry_P Parameter: Post Timepoint (hr) Value: None
  misc_feature: MA Experiment 20001554 PARAMETER Experiment Name: At_Drought_Soil_Dry_P Parameter: Post-Treatment Value: None
  misc_feature: MA Experiment 20001554 PARAMETER Experiment Name: At_Drought_Soil_Dry_P Parameter: Timepoint (day) Value: 7
  misc_feature: MA Experiment 20001554 PARAMETER Experiment Name: At_Drought_Soil_Dry_P Parameter: Treatment Value: Drought vs. No Drought
  misc_feature: MA Experiment ID: 20001555 Result: Up-regulated in Transcription
  misc_feature: MA Experiment 20001555 PARAMETER Experiment Name: At_Drought_Soil_Dry_P Parameter: Age (day) Value: 24
  misc_feature: MA Experiment 20001555 PARAMETER Experiment Name: At_Drought_Soil_Dry_P Parameter: Organism Value: A. thaliana
  misc_feature: MA Experiment 20001555 PARAMETER Experiment Name: At_Drought_Soil_Dry_P Parameter: Plant Line Value: WS
  misc_feature: MA Experiment 20001555 PARAMETER Experiment Name: At_Drought_Soil_Dry_P Parameter: Post Timepoint (hr) Value: None
  misc_feature: MA Experiment 20001555 PARAMETER Experiment Name: At_Drought_Soil_Dry_P Parameter: Post-Treatment Value: None
  misc_feature: MA Experiment 20001555 PARAMETER Experiment Name: At_Drought_Soil_Dry_P Parameter: Timepoint (day) Value: 10
  misc_feature: MA Experiment 20001555 PARAMETER Experiment Name: At_Drought_Soil_Dry_P Parameter: Treatment Value: Drought vs. No Drought
  misc_feature: MA Experiment ID: 20001558 Result: Down-regulated in Transcription
  misc_feature: MA Experiment 20001558 PARAMETER Experiment Name: At_Drought_Soil_Dry_P Parameter: Age (day) Value: 27
  misc_feature: MA Experiment 20001558 PARAMETER Experiment Name: At_Drought_Soil_Dry_P Parameter: Organism Value: A. thaliana
  misc_feature: MA Experiment 20001558 PARAMETER Experiment Name: At_Drought_Soil_Dry_P Parameter: Plant Line Value: WS
  misc_feature: MA Experiment 20001558 PARAMETER Experiment Name: At_Drought_Soil_Dry_P Parameter: Post Timepoint (hr) Value: 6
  misc_feature: MA Experiment 20001558 PARAMETER Experiment Name: At_Drought_Soil_Dry_P Parameter: Post-Treatment Value: Re-Water vs. No Drought
  misc_feature: MA Experiment 20001558 PARAMETER Experiment Name: At_Drought_Soil_Dry_P Parameter: Timepoint (day) Value: 13
  misc_feature: MA Experiment 20001558 PARAMETER Experiment Name: At_Drought_Soil_Dry_P Parameter: Treatment Value: Drought vs. No Drought
atcacttacttaacatactaagagagttattagaacttgcaaaaaatggcttccaaggctttgattctgttaggtctcttctcagttcttctcgtcgtctccgaagtgtcttccgcaaggcaatcgggcatggtgaagccagagagtgaggaaactgtgcaacctgaaggttatggcggtggccacggaggacatggtggtcacggagggggaggaggccacggacatggaggacacaacggaggagggggccacggacttgacggatacggaggaggtggaggacactatggaggaggtggaggacactacggaggaggtggaggacactacggaggtggtggaggaggatacggaggtggaggaggacaccacggaggaggaggccacgggctaaacgaacctgttcagactaagccgggtgtttaaaactatataatatcttcactaccatgcatgattgcatatatatatatacgcttatgtattatctatatgcctataaataaaccatggtgagtttgtaacgcagtgccttcagaaatgttcggaataaatttccataatattagt

SEQ ID NO: 39251 - protein, 127 aa, Arabidopsis thaliana
  peptide (1)..(127): Ceres Seq. ID no. 12393075
  misc_feature (38)..(120): Pfam Name: Herpesvirus latent membrane protein 1 (LMP1) Pfam Description: Herpesvirus latent membrane protein 1 (LMP1)
  misc_feature (4)..(116): Homolog of NCBI NO: 7488799 NR Description: dormancy-associated protein 2 - garden pea
  misc_feature (1)..(114): Homolog of NCBI NO: 81625 NR Description: glycine-rich protein 3 precursor - Arabidopsis
  misc_feature (1)..(114): Homolog of NCBI NO: 259447 NR Description: glycine-rich protein; atGRP [Arabidopsis thaliana]
  misc_feature (1)..(116): Homolog of NCBI NO: 15224548 NR Description: putative glycine-rich protein
  misc_feature (42)..(127): Homolog of NCBI NO: 30678191 NR Description: glycine-rich protein [Arabidopsis thaliana]
  misc_feature (1)..(127): Homolog of NCBI NO: 9957568 NR Description: antimicrobial peptide shep-GRP [Capsella
  misc_feature (1)..(127): Homolog of NCBI NO: 15224547 NR Description: putative glycine-rich protein; protein id:
  misc_feature (1)..(116): Homolog of NCBI NO: 30678191 NR Description: glycine-rich protein [Arabidopsis thaliana]
  misc_feature (1)..(127): Homolog of NCBI NO: 15224540 NR Description: putative glycine-rich protein
  misc_feature (1)..(127): Homolog of NCBI NO: 21536606 NR Description: putative glycine-rich protein [Arabidopsis
MASKALILLGLFSVLLVVSEVSSARQSGMVKPESEETVQPEGYGGGHGGHGGHGGGGGHGHGGHNGGGGHGLDGYGGGGGHYGGGGGHYGGGGGHYGGGGGGYGGGGGHHGGGGHGLNEPVQTKPGV

SEQ ID NO: 39252 - protein, 99 aa, Arabidopsis thaliana
  peptide (1)..(99): Ceres Seq. ID no. 12393076
  misc_feature (10)..(92): Pfam Name: Herpesvirus latent membrane protein 1 (LMP1) Pfam Description: Herpesvirus latent membrane protein 1 (LMP1)
  misc_feature (1)..(88): Homolog of NCBI NO: 7488799 NR Description: dormancy-associated protein 2 - garden pea
  misc_feature (1)..(86): Homolog of NCBI NO: 81625 NR Description: glycine-rich protein 3 precursor - Arabidopsis
  misc_feature (1)..(86): Homolog of NCBI NO: 259447 NR Description: glycine-rich protein; atGRP [Arabidopsis thaliana]
  misc_feature (1)..(88): Homolog of NCBI NO: 15224548 NR Description: putative glycine-rich protein
  misc_feature (14)..(99): Homolog of NCBI NO: 30678191 NR Description: glycine-rich protein [Arabidopsis thaliana]
  misc_feature (1)..(99): Homolog of NCBI NO: 9957568 NR Description: antimicrobial peptide shep-GRP [Capsella
  misc_feature (1)..(99): Homolog of NCBI NO: 15224547 NR Description: putative glycine-rich protein; protein id:
  misc_feature (1)..(88): Homolog of NCBI NO: 30678191 NR Description: glycine-rich protein [Arabidopsis thaliana]
  misc_feature (1)..(99): Homolog of NCBI NO: 15224540 NR Description: putative glycine-rich protein
  misc_feature (1)..(99): Homolog of NCBI NO: 21536606 NR Description: putative glycine-rich protein [Arabidopsis
MVKPESEETVQPEGYGGGHGGHGGHGGGGGHGHGGHNGGGGHGLDGYGGGGGHYGGGGGHYGGGGGHYGGGGGGYGGGGGHHGGGGHGLNEPVQTKPGV

SEQ ID NO: 39253 - protein, 74 aa, Arabidopsis thaliana
  peptide (1)..(74): Ceres Seq. ID no. 12393077
  misc_feature (1)..(73): Pfam Name: Transferrin binding protein-like solute binding protein Pfam Description: Transferrin binding protein-like solute binding
MAVATEDMVVTEGEEATDMEDTTEEGATDLTDTEEVEDTMEEVEDTTEEVEDTTEVVEEDTEVEEDTTEEEATG

SEQ ID NO: 39254 - DNA, 1334 bp, Arabidopsis thaliana
  misc_feature (1)..(1334): Ceres Seq. ID no. 13494122
  misc_feature: MA Experiment ID: 108434 Result: Up-regulated in Transcription
  misc_feature: MA Experiment 108434 PARAMETER Experiment Name: At_Root_Tips_cDNA_P Parameter: Tissue Value: Root Tips
  misc_feature: MA Experiment ID: 108462 Result: Down-regulated in Transcription
  misc_feature: MA Experiment 108462 PARAMETER Experiment Name: At_Germinating_Seeds_cDNA_P Parameter: Age (day) Value: 2 vs. 0
  misc_feature: MA Experiment 108462 PARAMETER Experiment Name: At_Germinating_Seeds_cDNA_P Parameter: Tissue Value: Germinating Seeds
  misc_feature: MA Experiment ID: 108463 Result: Down-regulated in Transcription
  misc_feature: MA Experiment 108463 PARAMETER Experiment Name: At_Germinating_Seeds_cDNA_P Parameter: Age (day) Value: 3 vs. 0
  misc_feature: MA Experiment 108463 PARAMETER Experiment Name: At_Germinating_Seeds_cDNA_P Parameter: Tissue Value: Germinating Seeds
  misc_feature: MA Experiment ID: 108464 Result: Down-regulated in Transcription
  misc_feature: MA Experiment 108464 PARAMETER Experiment Name: At_Germinating_Seeds_cDNA_P Parameter: Age (day) Value: 4 vs. 0
  misc_feature: MA Experiment 108464 PARAMETER Experiment Name: At_Germinating_Seeds_cDNA_P Parameter: Tissue Value: Germinating Seeds
  misc_feature: MA Experiment ID: 108595 Result: Down-regulated in Transcription
  misc_feature: MA Experiment 108595 PARAMETER Experiment Name: At_Ler-pi_Ovule_cDNA_P Parameter: Plant Line Value: null
  misc_feature: MA Experiment ID: 20000185 Result: Up-regulated in Transcription
  misc_feature: MA Experiment 20000185 PARAMETER Experiment Name: At_Roots__P Parameter: Age (day) Value: 7 vs. 21
  misc_feature: MA Experiment 20000185 PARAMETER Experiment Name: At_Roots__P Parameter: Organism Value: A. thaliana
  misc_feature: MA Experiment 20000185 PARAMETER Experiment Name: At_Roots__P Parameter: Tissue Value: Roots vs. Whole Plant
  misc_feature: MA Experiment ID: 20000227 Result: Up-regulated in Transcription
  misc_feature: MA Experiment 20000227 PARAMETER Experiment Name: At_Root-Tips-vs-Tops_P Parameter: Tissue Value: Root Tips vs. Root Tops
  misc_feature: MA Experiment ID: 20000234 Result: Up-regulated in Transcription
  misc_feature: MA Experiment 20000234 PARAMETER Experiment Name: At_Siliques_P Parameter: Age (day) Value: 21
  misc_feature: MA Experiment 20000234 PARAMETER Experiment Name: At_Siliques_P Parameter: Organism Value: A. thaliana
  misc_feature: MA Experiment 20000234 PARAMETER Experiment Name: At_Siliques_P Parameter: Plant Line Value: WS
  misc_feature: MA Experiment 20000234 PARAMETER Experiment Name: At_Siliques_P Parameter: Tissue Value: Less Than 5mm Siliques vs. Whole Plant
  misc_feature: MA Experiment ID: 20000235 Result: Up-regulated in Transcription
  misc_feature: MA Experiment 20000235 PARAMETER Experiment Name: At_Siliques_P Parameter: Age (day) Value: 21
  misc_feature: MA Experiment 20000235 PARAMETER Experiment Name: At_Siliques_P Parameter: Organism Value: A. thaliana
  misc_feature: MA Experiment 20000235 PARAMETER Experiment Name: At_Siliques_P Parameter: Plant Line Value: WS
  misc_feature: MA Experiment 20000235 PARAMETER Experiment Name: At_Siliques_P Parameter: Tissue Value: 5-10mm Siliques vs. Whole Plant
  misc_feature: MA Experiment ID: 20000264 Result: Up-regulated in Transcription
  misc_feature: MA Experiment 20000264 PARAMETER Experiment Name: At_Open_Flower_P Parameter: Age (day) Value: 21
  misc_feature: MA Experiment 20000264 PARAMETER Experiment Name: At_Open_Flower_P Parameter: Plant Line Value: WS
  misc_feature: MA Experiment 20000264 PARAMETER Experiment Name: At_Open_Flower_P Parameter: Tissue Value: Open Flower vs. Whole Plant
  misc_feature: MA Experiment ID: 20000437 Result: Down-regulated in Transcription
  misc_feature: MA Experiment 20000437 PARAMETER Experiment Name: At_Drought_P Parameter: Age (day) Value: 8
  misc_feature: MA Experiment 20000437 PARAMETER Experiment Name: At_Drought_P Parameter: Organism Value: A. thaliana
  misc_feature: MA Experiment 20000437 PARAMETER Experiment Name: At_Drought_P Parameter: Plant Line Value: WS
  misc_feature: MA Experiment 20000437 PARAMETER Experiment Name: At_Drought_P Parameter: Timepoint (hr) Value: 24
  misc_feature: MA Experiment 20000437 PARAMETER Experiment Name: At_Drought_P Parameter: Tissue Value: Whole Plant
  misc_feature: MA Experiment 20000437 PARAMETER Experiment Name: At_Drought_P Parameter: Treatment Value: Drought vs. No Drought
  misc_feature: MA Experiment ID: 20001451 Result: Down-regulated in Transcription
  misc_feature: MA Experiment 20001451 PARAMETER Experiment Name: At_Far-red-induction_P Parameter: Age (day) Value: 7
  misc_feature: MA Experiment 20001451 PARAMETER Experiment Name: At_Far-red-induction_P Parameter: Light Value: Far-red vs. White
  misc_feature: MA Experiment 20001451 PARAMETER Experiment Name: At_Far-red-induction_P Parameter: Organism Value: A. thaliana
  misc_feature: MA Experiment 20001451 PARAMETER Experiment Name: At_Far-red-induction_P Parameter: Plant Line Value: Columbia
  misc_feature: MA Experiment 20001451 PARAMETER Experiment Name: At_Far-red-induction_P Parameter: Timepoint (hr) Value: 24
  misc_feature: MA Experiment 20001451 PARAMETER Experiment Name: At_Far-red-induction_P Parameter: Tissue Value: Whole Plant
  misc_feature: MA Experiment ID: 20001557 Result: Up-regulated in Transcription
  misc_feature: MA Experiment 20001557 PARAMETER Experiment Name: At_Drought_Soil_Dry_P Parameter: Age (day) Value: 27
  misc_feature: MA Experiment 20001557 PARAMETER Experiment Name: At_Drought_Soil_Dry_P Parameter: Organism Value: A. thaliana
  misc_feature: MA Experiment 20001557 PARAMETER Experiment Name: At_Drought_Soil_Dry_P Parameter: Plant Line Value: WS
  misc_feature: MA Experiment 20001557 PARAMETER Experiment Name: At_Drought_Soil_Dry_P Parameter: Post Timepoint (hr) Value: 3
  misc_feature: MA Experiment 20001557 PARAMETER Experiment Name: At_Drought_Soil_Dry_P Parameter: Post-Treatment Value: Re-Water vs. No Drought
  misc_feature: MA Experiment 20001557 PARAMETER Experiment Name: At_Drought_Soil_Dry_P Parameter: Timepoint (day) Value: 13
  misc_feature: MA Experiment 20001557 PARAMETER Experiment Name: At_Drought_Soil_Dry_P Parameter: Treatment Value: Drought vs. No Drought
  misc_feature: MA Experiment ID: 20001558 Result: Up-regulated in Transcription
  misc_feature: MA Experiment 20001558 PARAMETER Experiment Name: At_Drought_Soil_Dry_P Parameter: Age (day) Value: 27
  misc_feature: MA Experiment 20001558 PARAMETER Experiment Name: At_Drought_Soil_Dry_P Parameter: Organism Value: A. thaliana
  misc_feature: MA Experiment 20001558 PARAMETER Experiment Name: At_Drought_Soil_Dry_P Parameter: Plant Line Value: WS
  misc_feature: MA Experiment 20001558 PARAMETER Experiment Name: At_Drought_Soil_Dry_P Parameter: Post Timepoint (hr) Value: 6
  misc_feature: MA Experiment 20001558 PARAMETER Experiment Name: At_Drought_Soil_Dry_P Parameter: Post-Treatment Value: Re-Water vs. No Drought
  misc_feature: MA Experiment 20001558 PARAMETER Experiment Name: At_Drought_Soil_Dry_P Parameter: Timepoint (day) Value: 13
  misc_feature: MA Experiment 20001558 PARAMETER Experiment Name: At_Drought_Soil_Dry_P Parameter: Treatment Value: Drought vs. No Drought
  misc_feature: MA Experiment ID: 20001560 Result: Up-regulated in Transcription
  misc_feature: MA Experiment 20001560 PARAMETER Experiment Name: At_Drought_Soil_Dry_P Parameter: Age (day) Value: 28
  misc_feature: MA Experiment 20001560 PARAMETER Experiment Name: At_Drought_Soil_Dry_P Parameter: Organism Value: A. thaliana
  misc_feature: MA Experiment 20001560 PARAMETER Experiment Name: At_Drought_Soil_Dry_P Parameter: Plant Line Value: WS
  misc_feature: MA Experiment 20001560 PARAMETER Experiment Name: At_Drought_Soil_Dry_P Parameter: Post Timepoint (hr) Value: None
  misc_feature: MA Experiment 20001560 PARAMETER Experiment Name: At_Drought_Soil_Dry_P Parameter: Post-Treatment Value: None
  misc_feature: MA Experiment 20001560 PARAMETER Experiment Name: At_Drought_Soil_Dry_P Parameter: Timepoint (day) Value: 14
  misc_feature: MA Experiment 20001560 PARAMETER Experiment Name: At_Drought_Soil_Dry_P Parameter: Treatment Value: Drought vs. No Drought
  misc_feature: MA Experiment ID: 20001757 Result: Up-regulated in Transcription
  misc_feature: MA Experiment 20001757 PARAMETER Experiment Name: At_50mM_NH4NO3_L-to-H_P Parameter: Timepoint (hr) Value: 6
  misc_feature: MA Experiment 20001757 PARAMETER Experiment Name: At_50mM_NH4NO3_L-to-H_P Parameter: Tissue Value: Leaf
  misc_feature: MA Experiment 20001757 PARAMETER Experiment Name: At_50mM_NH4NO3_L-to-H_P Parameter: Treatment Value: 50mM NH4NO3 vs 100mM Mannitol
acagcaaaaaatcgaaaatggttgcctcagccgccgcacatgagcaccgatcaatccaccaccgtcactttaccagacgtcatgactgctccagttcgacctgacattgtcaacttcgtccacgcccaaatctccaacaacagccgtcagccttacgcagtctccaaaaaggccggtcaccaaacctccgccgagtcctggggaaccggaagagccgtgtcacgtatccctcgtgttcctggtggtggaactcaccgtgccggtcaagcagcgttcggaaacatgtgtcgtggtggtcgtatgtttgctccgactaagatctggagacgctggcaccgtcgtgtcaatgtcaacatgaagaggcacgcgattgtttctgcaatcgctgctactgctgttccagctcttgtgatggctcgtggtcacaagatcgagaatgttcctgagatgcctcttgttgttagcgactcagctgaagctggtggagaagacatcagctgcgatcaaggtattgaagcagatcggtgcttacgacgatgcggagaaagctaagaacagtattggaattcgtcctggtaaaggtaaaatgaggaatcgtcgttacatttctaggaaaggtcctcttgttgtgtttggaactgaaggagccaagattgtgaaagcttttaggaatcttcctggtgttgagctttgtcacgttgagaggcttaacttgttgaaattagcccctggtggtcaccttggtaggtttgtgatttggactaagtctgcttttgagaagcttggatctatctatggctcgtttgagaaaccatcagagaagaagaagggttacgtcttgcctcgtgcgaagatggtgaatgctgatcttgctaggattattaactccgatgaggtacagagtgtggtgaacccgattaaggatggttccaagagagcggttctgaagaagaatccattgaagaaccttaatgtgatgttcaagttgaatccttatgctaagaccgcaaagagaatgtctctgttggctgaagcttcaagggttaaggctaagaaggagaagctcgagaagaagaggaaagtcgtcactaaggaggaggcccaagcgatcaaagcagcaggcaaggcttggtatcagactatgatttcagacagtgactacaccgagttcgataacttcaccaagtggcttggcgctagtcagtaatgatgctctcgtcatcgcaaagtctcttatatctaggcaaagattttggttttctgatttatgttcttcgtttgtattggatttatctgggattttatgttgttgagttggtaagacgatttttaag

SEQ ID NO: 39255 - protein, 256 aa, Arabidopsis thaliana
  peptide (1)..(256): Ceres Seq. ID no. 13494123
  misc_feature (7)..(119): Pfam Name: Ribosomal protein L4/L1 family Pfam Description: Ribosomal protein L4/L1 family
  misc_feature (7)..(221): Homolog of NCBI NO: 1350686 NR Description: 60S RIBOSOMAL PROTEIN L4 (L1)
  misc_feature (7)..(256): Homolog of NCBI NO: 6441068 NR Description: 60S ribosomal protein L4 [Chlamydomonas sp. HS-5]
  misc_feature (7)..(256): Homolog of NCBI NO: 34897236 NR Description: putative 60S ribosomal protein L1
  misc_feature (7)..(256): Homolog of NCBI NO: 34393487 NR Description: putative 60S ribosomal protein L4/L1
  misc_feature (7)..(256): Homolog of NCBI NO: 13605831 NR Description: AT5g02870/F9G14_180 [Arabidopsis thaliana]
  misc_feature (7)..(256): Homolog of NCBI NO: 17367847 NR Description: 60S ribosomal protein L4 (L1)
  misc_feature (7)..(256): Homolog of NCBI NO: 21593543 NR Description: 60S ribosomal protein L4-B (L1) [Arabidopsis
  misc_feature (7)..(256): Homolog of NCBI NO: 15232723 NR Description: 60S ribosomal protein L4/L1 (RPL4A) [Arabidopsis
  misc_feature (7)..(256): Homolog of NCBI NO: 26450328 NR Description: putative 60S ribosomal protein [Arabidopsis
  misc_feature (7)..(256): Homolog of NCBI NO: 15242558 NR Description: 60S ribosomal protein L4/L1 (RPL4D) [Arabidopsis
MFLRCLLLLATQLKLVEKTSAAIKVLKQIGAYDDAEKAKNSIGIRPGKGKMRNRRYISRKGPLVVFGTEGAKIVKAFRNLPGVELCHVERLNLLKLAPGGHLGRFVIWTKSAFEKLGSIYGSFEKPSEKKKGYVLPRAKMVNADLARIINSDEVQSVVNPIKDGSKRAVLKKNPLKNLNVMFKLNPYAKTAKRMSLLAEASRVKAKKEKLEKKRKVVTKEEAQAIKAAGKAWYQTMISDSDYTEFDNFTKWLGASQ

SEQ ID NO: 39256 - protein, 206 aa, Arabidopsis thaliana
  peptide (1)..(206): Ceres Seq. ID no. 13494124
  misc_feature (1)..(69): Pfam Name: Ribosomal protein L4/L1 family Pfam Description: Ribosomal protein L4/L1 family
  misc_feature (1)..(171): Homolog of NCBI NO: 1350686 NR Description: 60S RIBOSOMAL PROTEIN L4 (L1)
  misc_feature (1)..(206): Homolog of NCBI NO: 6441068 NR Description: 60S ribosomal protein L4 [Chlamydomonas sp. HS-5]
  misc_feature (1)..(206): Homolog of NCBI NO: 34897236 NR Description: putative 60S ribosomal protein L1
  misc_feature (1)..(206): Homolog of NCBI NO: 34393487 NR Description: putative 60S ribosomal protein L4/L1
  misc_feature (1)..(206): Homolog of NCBI NO: 13605831 NR Description: AT5g02870/F9G14_180 [Arabidopsis thaliana]
  misc_feature (1)..(206): Homolog of NCBI NO: 17367847 NR Description: 60S ribosomal protein L4 (L1)
  misc_feature (1)..(206): Homolog of NCBI NO: 21593543 NR Description: 60S ribosomal protein L4-B (L1) [Arabidopsis
  misc_feature (1)..(206): Homolog of NCBI NO: 15232723 NR Description: 60S ribosomal protein L4/L1 (RPL4A) [Arabidopsis
  misc_feature (1)..(206): Homolog of NCBI NO: 26450328 NR Description: putative 60S ribosomal protein [Arabidopsis
  misc_feature (1)..(206): Homolog of NCBI NO: 15242558 NR Description: 60S ribosomal protein L4/L1 (RPL4D) [Arabidopsis
MRNRRYISRKGPLVVFGTEGAKIVKAFRNLPGVELCHVERLNLLKLAPGGHLGRFVIWTKSAFEKLGSIYGSFEKPSEKKKGYVLPRAKMVNADLARIINSDEVQSVVNPIKDGSKRAVLKKNPLKNLNVMFKLNPYAKTAKRMSLLAEASRVKAKKEKLEKKRKVVTKEEAQAIKAAGKAWYQTMISDSDYTEFDNFTKWLGASQ

SEQ ID NO: 39257 - protein, 183 aa, Arabidopsis thaliana
  peptide (1)..(183): Ceres Seq. ID no. 13494125
  misc_feature (20)..(160): Pfam Name: Ribosomal protein L4/L1 family Pfam Description: Ribosomal protein L4/L1 family
  misc_feature (20)..(160): Homolog of NCBI NO: 1350686 NR Description: 60S RIBOSOMAL PROTEIN L4 (L1)
  misc_feature (44)..(160): Homolog of NCBI NO: 6441068 NR Description: 60S ribosomal protein L4 [Chlamydomonas sp. HS-5]
  misc_feature (14)..(160): Homolog of NCBI NO: 34897236 NR Description: putative 60S ribosomal protein L1
  misc_feature (14)..(160): Homolog of NCBI NO: 34393487 NR Description: putative 60S ribosomal protein L4/L1
  misc_feature (95)..(160): Homolog of NCBI NO: 13605831 NR Description: AT5g02870/F9G14_180 [Arabidopsis thaliana]
  misc_feature (14)..(166): Homolog of NCBI NO: 17367847 NR Description: 60S ribosomal protein L4 (L1)
  misc_feature (14)..(160): Homolog of NCBI NO: 21593543 NR Description: 60S ribosomal protein L4-B (L1) [Arabidopsis
  misc_feature (14)..(160): Homolog of NCBI NO: 15232723 NR Description: 60S ribosomal protein L4/L1 (RPL4A) [Arabidopsis
  misc_feature (14)..(160): Homolog of NCBI NO: 26450328 NR Description: putative 60S ribosomal protein [Arabidopsis
  misc_feature (14)..(160): Homolog of NCBI NO: 15242558 NR Description: 60S ribosomal protein L4/L1 (RPL4D) [Arabidopsis
TAKNRKWLPQPPHMSTDQSTTVTLPDVMTAPVRPDIVNFVHAQISNNSRQPYAVSKKAGHQTSAESWGTGRAVSRIPRVPGGGTHRAGQAAFGNMCRGGRMFAPTKIWRRWHRRVNVNMKRHAIVSAIAATAVPALVMARGHKIENVPEMPLVVSDSAEAGGEDISCDQGIEADRCLRRCGES

SEQ ID NO: 39258 - DNA, 1771 bp, Arabidopsis thaliana
  misc_feature (1)..(1771): Ceres Seq. ID no. 13495902
  misc_feature: MA Experiment ID: 108474 Result: Down-regulated in Transcription
  misc_feature: MA Experiment 108474 PARAMETER Experiment Name: At_Drought_Flowers_cDNA_P Parameter: Timepoint (hr) Value: null
  misc_feature: MA Experiment 108474 PARAMETER Experiment Name: At_Drought_Flowers_cDNA_P Parameter: Treatment Value: Drought vs. No Drought
  misc_feature: MA Experiment ID: 108501 Result: Down-regulated in Transcription
  misc_feature: MA Experiment 108501 PARAMETER Experiment Name: At_ap2_floral_buds_cDNA_P Parameter: Plant Line Value: ap2 (Ler.)
  misc_feature: MA Experiment 108501 PARAMETER Experiment Name: At_ap2_floral_buds_cDNA_P Parameter: Tissue Value: Closed Flower
  misc_feature: MA Experiment ID: 108595 Result: Up-regulated in Transcription
  misc_feature: MA Experiment 108595 PARAMETER Experiment Name: At_Ler-pi_Ovule_cDNA_P Parameter: Plant Line Value: null
aaattcaattcgtttaaaaatggagagtcaaaagcaagaagataatgaatacattttccgcagtttgtatccatctgtgcccattcctgacaaacttacactgcctgaatttgtgctccaaggagttgaagaatacacagagaatgtagcgtttgtagaagcggtgaccggaaaagctgtgacgtacggtgatgtagtgagggacacaaagaggctagccaaagcgttgacatctctcggactaaggaaaggtcaagtgatggttgtggtcctaccaaacgtcgccgagtatgggattattgcccttggtattatgtctgccggtggagtcttctccggtgcaaatccgacggctcttgtttccgagatcaagaagcaagttgaagcttccggtgctagaggaatcatcactgatgctactaactatgaaaaggtgaaatcactaggtttaccggtgatagtgttaggtgaagagaagatagaaggagcagtaaactggaaagatcttctagaagcaggagacaaatgcggagataccgacaatgaagagattcttcagacagatctttgtgcacttcctttttcttcaggaacaacaggattacaaaaaggagtaatgctcacacatcgcaatctcatagccaatctttgctctactctcttcggtgtcaggtctgaaatgatcggtcagatcgtgacgcttggtttgatcccattctttcatatttacggtatcgttggcatatgttgtgctacaatgaagaataaaggcaaagttgttgctatgagtcggtacgatctaaggattttcttgaatgctttgattgctcatgaggtttcgtttgcgcctatagttccgccgattatattgaatcttgttaagaatccgatagttgatgagtttgatctttcgaagcttaaacttcagtctgtcatgactgctgctgctcctttagctcctgagcttcttactgccttcgaagccaagtttcctaatgtccaagtccaagaggcttatggattaacggagcatagttgcattacgttaactcacggagatccagagaaaggacaaggaatcgcgaaacgaaactcggttggtttcatacttccgaatctcgaggtaaagttcatagatcctgacaccggtagatcactcccgaagaacacttctggtgagctatgtgtgaggagccaatgtgtaatgcaaggttacttcatgaacaaggaagagactgacaagacaattgatgaacaaggttggcttcacacaggagacataggttacatcgatgatgatggagacatcttcatcgttgatcgtatcaaagaacttattaaatacaaaggttttcaggttgctccggccgagcttgaagctattctactcactcatccatccgttgaagacgttgccgtcgtgccgttaccggacgaggaagccggggagattccggcggcttgcgtggtgataaatccgaaagcgacagaaaaggaagaagacattctcaactttgttgcagcaaatgtggctcattacaagaaggttagagccgtccattttgtggattcaatccctaaatctctctctggtaaaatcatgaggaggcttcttagagacaagatcctcagcatcaacaagaagtagaagaaagaaaactcttacaagcttttaattaatctactttggttaaagaaattgtccttaaacaataaatactctttgtggtttcattattgctccttaattaggaaattctacagttcaatt

SEQ ID NO: 39259 - protein, 548 aa, Arabidopsis thaliana
  peptide (1)..(548): Ceres Seq. ID no. 13495903
  misc_feature (61)..(473): Pfam Name: AMP-binding enzyme Pfam Description: AMP-binding enzyme
  misc_feature (61)..(473): Pfam Name: AMP-binding enzyme Pfam Description: AMP-binding enzyme
  misc_feature (7)..(542): Homolog of NCBI NO: 12229632 NR Description: 4-coumarate--CoA ligase 2 (4CL 2)
  misc_feature (16)..(544): Homolog of NCBI NO: 112801 NR Description: 4-coumarate--CoA ligase 1 (4CL 1)
  misc_feature (16)..(544): Homolog of NCBI NO: 112800 NR Description: 4-coumarate--CoA ligase 1 (4CL 1)
  misc_feature (5)..(542): Homolog of NCBI NO: 398963 NR Description: 4-coumarate--CoA ligase 1 (4CL 1)
  misc_feature (7)..(542): Homolog of NCBI NO: 7428495 NR Description: 4-coumarate-CoA ligase (EC 6.2.1.12) - common
  misc_feature (7)..(542): Homolog of NCBI NO: 12229632 NR Description: 4-coumarate--CoA ligase 2 (4CL 2)
  misc_feature (16)..(544): Homolog of NCBI NO: 112800 NR Description: 4-coumarate--CoA ligase 1 (4CL 1)
  misc_feature (7)..(542): Homolog of NCBI NO: 7428495 NR Description: 4-coumarate-CoA ligase (EC 6.2.1.12) - common
  misc_feature (7)..(548): Homolog of NCBI NO: 15221636 NR Description: 4-coumarate:CoA ligase (4-coumaroyl-CoA synthase)
  misc_feature (7)..(543): Homolog of NCBI NO: 28628063 NR Description: 4-coumarate:CoA ligase-like [Nicotiana
  misc_feature (11)..(543): Homolog of NCBI NO: 38567930 NR Description: OSJNBa0033H08.6 [Oryza sativa (japonica
  misc_feature (7)..(542): Homolog of NCBI NO: 17063848 NR Description: 4-coumarate:CoA ligase [Amorpha fruticosa]
  misc_feature (5)..(542): Homolog of NCBI NO: 5163399 NR Description: 4-coumarate:coenzyme A ligase [Solanum tuberosum]
  misc_feature (5)..(542): Homolog of NCBI NO: 398963 NR Description: 4-coumarate--CoA ligase 1 (4CL 1)
  misc_feature (16)..(544): Homolog of NCBI NO: 112801 NR Description: 4-coumarate--CoA ligase 1 (4CL 1)
  misc_feature (5)..(542): Homolog of NCBI NO: 5163399 NR Description: 4-coumarate:coenzyme A ligase [Solanum tuberosum]
  misc_feature (7)..(542): Homolog of NCBI NO: 17063848 NR Description: 4-coumarate:CoA ligase [Amorpha fruticosa]
  misc_feature (11)..(543): Homolog of NCBI NO: 38567930 NR Description: OSJNBa0033H08.6 [Oryza sativa (japonica
  misc_feature (7)..(543): Homolog of NCBI NO: 28628063 NR Description: 4-coumarate:CoA ligase-like [Nicotiana
  misc_feature (7)..(548): Homolog of NCBI NO: 15221636 NR Description: 4-coumarate:CoA ligase (4-coumaroyl-CoA synthase)
NSIRLKMESQKQEDNEYIFRSLYPSVPIPDKLTLPEFVLQGVEEYTENVAFVEAVTGKAVTYGDVVRDTKRLAKALTSLGLRKGQVMVVVLPNVAEYGIIALGIMSAGGVFSGANPTALVSEIKKQVEASGARGIITDATNYEKVKSLGLPVIVLGEEKIEGAVNWKDLLEAGDKCGDTDNEEILQTDLCALPFSSGTTGLQKGVMLTHRNLIANLCSTLFGVRSEMIGQIVTLGLIPFFHIYGIVGICCATMKNKGKVVAMSRYDLRIFLNALIAHEVSFAPIVPPIILNLVKNPIVDEFDLSKLKLQSVMTAAAPLAPELLTAFEAKFPNVQVQEAYGLTEHSCITLTHGDPEKGQGIAKRNSVGFILPNLEVKFIDPDTGRSLPKNTSGELCVRSQCVMQGYFMNKEETDKTIDEQGWLHTGDIGYIDDDGDIFIVDRIKELIKYKGFQVAPAELEAILLTHPSVEDVAVVPLPDEEAGEIPAACVVINPKATEKEEDILNFVAANVAHYKKVRAVHFVDSIPKSLSGKIMRRLLRDKILSINKK

SEQ ID NO: 39260 - protein, 542 aa, Arabidopsis thaliana
  peptide (1)..(542): Ceres Seq. ID no. 13495904
  misc_feature (55)..(467): Pfam Name: AMP-binding enzyme Pfam Description: AMP-binding enzyme
  misc_feature (55)..(467): Pfam Name: AMP-binding enzyme Pfam Description: AMP-binding enzyme
  misc_feature (1)..(536): Homolog of NCBI NO: 12229632 NR Description: 4-coumarate--CoA ligase 2 (4CL 2)
  misc_feature (10)..(538): Homolog of NCBI NO: 112801 NR Description: 4-coumarate--CoA ligase 1 (4CL 1)
  misc_feature (10)..(538): Homolog of NCBI NO: 112800 NR Description: 4-coumarate--CoA ligase 1 (4CL 1)
  misc_feature (1)..(536): Homolog of NCBI NO: 398963 NR Description: 4-coumarate--CoA ligase 1 (4CL 1)
  misc_feature (1)..(536): Homolog of NCBI NO: 7428495 NR Description: 4-coumarate-CoA ligase (EC 6.2.1.12) - common
  misc_feature (1)..(536): Homolog of NCBI NO: 12229632 NR Description: 4-coumarate--CoA ligase 2 (4CL 2)
  misc_feature (10)..(538): Homolog of NCBI NO: 112800 NR Description: 4-coumarate--CoA ligase 1 (4CL 1)
  misc_feature (1)..(536): Homolog of NCBI NO: 7428495 NR Description: 4-coumarate-CoA ligase (EC 6.2.1.12) - common
  misc_feature (1)..(542): Homolog of NCBI NO: 15221636 NR Description: 4-coumarate:CoA ligase (4-coumaroyl-CoA synthase)
  misc_feature (1)..(537): Homolog of NCBI NO: 28628063 NR Description: 4-coumarate:CoA ligase-like [Nicotiana
  misc_feature (5)..(537): Homolog of NCBI NO: 38567930 NR Description: OSJNBa0033H08.6 [Oryza sativa (japonica
  misc_feature (1)..(536): Homolog of NCBI NO: 17063848 NR Description: 4-coumarate:CoA ligase [Amorpha fruticosa]
  misc_feature (1)..(536): Homolog of NCBI NO: 5163399 NR Description: 4-coumarate:coenzyme A ligase [Solanum tuberosum]
  misc_feature (1)..(536): Homolog of NCBI NO: 398963 NR Description: 4-coumarate--CoA ligase 1 (4CL 1)
  misc_feature (10)..(538): Homolog of NCBI NO: 112801 NR Description: 4-coumarate--CoA ligase 1 (4CL 1)
  misc_feature (1)..(536): Homolog of NCBI NO: 5163399 NR Description: 4-coumarate:coenzyme A ligase [Solanum tuberosum]
  misc_feature (1)..(536): Homolog of NCBI NO: 17063848 NR Description: 4-coumarate:CoA ligase [Amorpha fruticosa]
  misc_feature (5)..(537): Homolog of NCBI NO: 38567930 NR Description: OSJNBa0033H08.6 [Oryza sativa (japonica
  misc_feature (1)..(537): Homolog of NCBI NO: 28628063 NR Description: 4-coumarate:CoA ligase-like [Nicotiana
  misc_feature (1)..(542): Homolog of NCBI NO: 15221636 NR Description: 4-coumarate:CoA ligase (4-coumaroyl-CoA synthase)
MESQKQEDNEYIFRSLYPSVPIPDKLTLPEFVLQGVEEYTENVAFVEAVTGKAVTYGDVVRDTKRLAKALTSLGLRKGQVMVVVLPNVAEYGIIALGIMSAGGVFSGANPTALVSEIKKQVEASGARGIITDATNYEKVKSLGLPVIVLGEEKIEGAVNWKDLLEAGDKCGDTDNEEILQTDLCALPFSSGTTGLQKGVMLTHRNLIANLCSTLFGVRSEMIGQIVTLGLIPFFHIYGIVGICCATMKNKGKVVAMSRYDLRIFLNALIAHEVSFAPIVPPIILNLVKNPIVDEFDLSKLKLQSVMTAAAPLAPELLTAFEAKFPNVQVQEAYGLTEHSCITLTHGDPEKGQGIAKRNSVGFILPNLEVKFIDPDTGRSLPKNTSGELCVRSQCVMQGYFMNKEETDKTIDEQGWLHTGDIGYIDDDGDIFIVDRIKELIKYKGFQVAPAELEAILLTHPSVEDVAVVPLPDEEAGEIPAACVVINPKATEKEEDILNFVAANVAHYKKVRAVHFVDSIPKSLSGKIMRRLLRDKILSINKK

SEQ ID NO: 39261 - protein, 462 aa, Arabidopsis thaliana
  peptide (1)..(462): Ceres Seq. ID no. 13495905
  misc_feature (1)..(387): Pfam Name: AMP-binding enzyme Pfam Description: AMP-binding enzyme
  misc_feature (1)..(387): Pfam Name: AMP-binding enzyme Pfam Description: AMP-binding enzyme
  misc_feature (1)..(456): Homolog of NCBI NO: 12229632 NR Description: 4-coumarate--CoA ligase 2 (4CL 2)
  misc_feature (1)..(458): Homolog of NCBI NO: 112801 NR Description: 4-coumarate--CoA ligase 1 (4CL 1)
  misc_feature (1)..(458): Homolog of NCBI NO: 112800 NR Description: 4-coumarate--CoA ligase 1 (4CL 1)
  misc_feature (1)..(456): Homolog of NCBI NO: 398963 NR Description: 4-coumarate--CoA ligase 1 (4CL 1)
  misc_feature (1)..(456): Homolog of NCBI NO: 7428495 NR Description: 4-coumarate-CoA ligase (EC 6.2.1.12) - common
  misc_feature (1)..(456): Homolog of NCBI NO: 12229632 NR Description: 4-coumarate--CoA ligase 2 (4CL 2)
  misc_feature (1)..(458): Homolog of NCBI NO: 112800 NR Description: 4-coumarate--CoA ligase 1 (4CL 1)
  misc_feature (1)..(456): Homolog of NCBI NO: 7428495 NR Description: 4-coumarate-CoA ligase (EC 6.2.1.12) - common
  misc_feature (1)..(462): Homolog of NCBI NO: 15221636 NR Description: 4-coumarate:CoA ligase (4-coumaroyl-CoA synthase)
  misc_feature (1)..(457): Homolog of NCBI NO: 28628063 NR Description: 4-coumarate:CoA ligase-like [Nicotiana
  misc_feature (1)..(457): Homolog of NCBI NO: 38567930 NR Description: OSJNBa0033H08.6 [Oryza sativa (japonica
  misc_feature (1)..(456): Homolog of NCBI NO: 17063848 NR Description: 4-coumarate:CoA ligase [Amorpha fruticosa]
  misc_feature (1)..(456): Homolog of NCBI NO: 5163399 NR Description: 4-coumarate:coenzyme A ligase [Solanum tuberosum]
  misc_feature (1)..(456): Homolog of NCBI NO: 398963 NR Description: 4-coumarate--CoA ligase 1 (4CL 1)
  misc_feature (1)..(458): Homolog of NCBI NO: 112801 NR Description: 4-coumarate--CoA ligase 1 (4CL 1)
  misc_feature (1)..(456): Homolog of NCBI NO: 5163399 NR Description: 4-coumarate:coenzyme A ligase [Solanum tuberosum]
  misc_feature (1)..(456): Homolog of NCBI NO: 17063848 NR Description: 4-coumarate:CoA ligase [Amorpha fruticosa]
  misc_feature (1)..(457): Homolog of NCBI NO: 38567930 NR Description: OSJNBa0033H08.6 [Oryza sativa (japonica
  misc_feature (1)..(457): Homolog of NCBI NO: 28628063 NR Description: 4-coumarate:CoA ligase-like [Nicotiana
  misc_feature (1)..(462): Homolog of NCBI NO: 15221636 NR Description: 4-coumarate:CoA ligase (4-coumaroyl-CoA synthase)
MVVVLPNVAEYGIIALGIMSAGGVFSGANPTALVSEIKKQVEASGARGIITDATNYEKVKSLGLPVIVLGEEKIEGAVNWKDLLEAGDKCGDTDNEEILQTDLCALPFSSGTTGLQKGVMLTHRNLIANLCSTLFGVRSEMIGQIVTLGLIPFFHIYGIVGICCATMKNKGKVVAMSRYDLRIFLNALIAHEVSFAPIVPPIILNLVKNPIVDEFDLSKLKLQSVMTAAAPLAPELLTAFEAKFPNVQVQEAYGLTEHSCITLTHGDPEKGQGIAKRNSVGFILPNLEVKFIDPDTGRSLPKNTSGELCVRSQCVMQGYFMNKEETDKTIDEQGWLHTGDIGYIDDDGDIFIVDRIKELIKYKGFQVAPAELEAILLTHPSVEDVAVVPLPDEEAGEIPAACVVINPKATEKEEDILNFVAANVAHYKKVRAVHFVDSIPKSLSGKIMRRLLRDKILSINKK

SEQ ID NO: 39262 - DNA, 1109 bp, Arabidopsis thaliana
  misc_feature (1)..(1109): Ceres Seq. ID no. 13600811
  misc_feature: MA Experiment ID: 20000111 Result: Down-regulated in Transcription
  misc_feature: MA Experiment 20000111 PARAMETER Experiment Name: At_42deg_Heat_cDNA_P Parameter: Temperature (deg C) Value: 42 vs. 22
  misc_feature: MA Experiment 20000111 PARAMETER Experiment Name: At_42deg_Heat_cDNA_P Parameter: Timepoint (hr) Value: 6
  misc_feature: MA Experiment 20000111 PARAMETER Experiment Name: At_42deg_Heat_cDNA_P Parameter: Tissue Value: Aerial
  misc_feature: MA Experiment ID: 20000173 Result: Down-regulated in Transcription
  misc_feature: MA Experiment 20000173 PARAMETER Experiment Name: At_42deg_Heat_P Parameter: Age (day) Value: 14
  misc_feature: MA Experiment 20000173 PARAMETER Experiment Name: At_42deg_Heat_P Parameter: Organism Value: A. thaliana
  misc_feature: MA Experiment 20000173 PARAMETER Experiment Name: At_42deg_Heat_P Parameter: Plant Line Value: WS
  misc_feature: MA Experiment 20000173 PARAMETER Experiment Name: At_42deg_Heat_P Parameter: Temperature (deg C) Value: 42 vs. 22
  misc_feature: MA Experiment 20000173 PARAMETER Experiment Name: At_42deg_Heat_P Parameter: Timepoint (hr) Value: 6
  misc_feature: MA Experiment 20000173 PARAMETER Experiment Name: At_42deg_Heat_P Parameter: Tissue Value: Aerial
  misc_feature: MA Experiment ID: 20000179 Result: Up-regulated in Transcription
  misc_feature: MA Experiment 20000179 PARAMETER Experiment Name: At_Germinating_Seeds_P Parameter: Age (hr) Value: 6 vs. 0
  misc_feature: MA Experiment 20000179 PARAMETER Experiment Name: At_Germinating_Seeds_P Parameter: Tissue Value: Germinating Seeds
  misc_feature: MA Experiment ID: 20000184 Result: Down-regulated in Transcription
  misc_feature: MA Experiment 20000184 PARAMETER Experiment Name: At_Shoots__P Parameter: Age (day) Value: 7
  misc_feature: MA Experiment 20000184 PARAMETER Experiment Name: At_Shoots__P Parameter: Tissue Value: Shoots vs. Whole Plant
  misc_feature: MA Experiment ID: 20000185 Result: Up-regulated in Transcription
  misc_feature: MA Experiment 20000185 PARAMETER Experiment Name: At_Roots__P Parameter: Age (day) Value: 7 vs. 21
  misc_feature: MA Experiment 20000185 PARAMETER Experiment Name: At_Roots__P Parameter: Organism Value: A. thaliana
  misc_feature: MA Experiment 20000185 PARAMETER Experiment Name: At_Roots__P Parameter: Tissue Value: Roots vs. Whole Plant
  misc_feature: MA Experiment ID: 20000794 Result: Up-regulated in Transcription
  misc_feature: MA Experiment 20000794 PARAMETER Experiment Name: At_Petals_P Parameter: Age (day) Value: 23-25 days
  misc_feature: MA Experiment 20000794 PARAMETER Experiment Name: At_Petals_P Parameter: Plant Line Value: WS
  misc_feature: MA Experiment 20000794 PARAMETER Experiment Name: At_Petals_P Parameter: Tissue Value: Petals vs. Whole plant
aagttcgatttcctaattcctaatccgtttcctttttattccgatcaaagcagcgaaaaaagcatcggagatatgtcgtctaaggacaagaaactatcgaagccaacaagtggtcgtactggtggtatccgtacactttccgatctgaaccgaagatcagaacctgattccgatagtgactccgatggacctcaagaatacttcaccggtggcgaaaaaagtggtatgcttgttcaagatcctacaaaagaaccaaaacacgatgatgttgatgagatatttaatcaagcaagacagctaggagctgtggaaggacctcttgagcatccttcgagttctagaagctttacaggaacaggaagattgctttctggagaaagtgtgccaacggctcttcaacagcctgagcctgtgattcacaatattattttctggtctaatggattcactgtagatgatggacctttgaggaagttggatgatccagagaatgcttcttttcttgatagcattcgaaagtctgaatgtccgaaagagcttgagcctgttgataaaagagctcctgtacatgttaatcttatgagaagagatgagaagtgccctgagaaagaaaagcttaaggtttcatttcaaggagttggaaggactctaggtggtgcaagctcatcaacagcttcaagccaaagtaacctaactgatgtagcagcggttcaatcaccgttacagagccttgtagtagatgaaactcttccatccacatcgatccagcttagactcgcggatgggacacgcatggtagcaaagttcaacaaccatcacacggttaacgacattcgtggtttcattgagttttctcgaccagggaatccaaacaactatacccttcaggtcatggggttcccaccaaagccacttactgacccttctcagaccattgaacaagccggtctagcaagttctgtagtcattcagaaattctagaaaatttcgtttctctttttttgtactagagagagatttcaacaacttggaattgtactgaaaatattcaatcggcttattgttgtggcaagagaaataaaaacatcatatggtttctatgttgtttc

SEQ ID NO: 39263 - protein, 326 aa, Arabidopsis thaliana
  peptide (1)..(326): Ceres Seq. ID no. 13600812
  misc_feature (247)..(326): Pfam Name: UBX domain Pfam Description: UBX domain
  misc_feature (247)..(326): Pfam Name: UBX domain Pfam Description: UBX domain
  misc_feature (100)..(325): Homolog of NCBI NO: 32492162 NR Description: OSJNBb0048E02.1 [Oryza sativa (japonica
  misc_feature (34)..(325): Homolog of NCBI NO: 32489879 NR Description: OSJNBa0060P14.10 [Oryza sativa (japonica
  misc_feature (41)..(322): Homolog of NCBI NO: 7485149 NR Description: hypothetical protein - Arabidopsis thaliana
  misc_feature (41)..(326): Homolog of NCBI NO: 15292665 NR Description: putative phosphatase [Arabidopsis thaliana]
  misc_feature (41)..(326): Homolog of NCBI NO: 18414442 NR Description: phosphatase like protein [Arabidopsis thaliana]
  misc_feature (100)..(325): Homolog of NCBI NO: 32492162 NR Description: OSJNBb0048E02.1 [Oryza sativa (japonica
  misc_feature (41)..(322): Homolog of NCBI NO: 7485149 NR Description: hypothetical protein - Arabidopsis thaliana
  misc_feature (41)..(326): Homolog of NCBI NO: 18414442 NR Description: phosphatase like protein [Arabidopsis thaliana]
  misc_feature (25)..(326): Homolog of NCBI NO: 15234731 NR Description: expressed protein [Arabidopsis thaliana]
  misc_feature (25)..(326): Homolog of NCBI NO: 18412499 NR Description: membrane trafficking factor -related [Arabidopsis
  misc_feature (25)..(326): Homolog of NCBI NO: 7487458 NR Description: hypothetical protein T27D20.10 - Arabidopsis
  misc_feature (16)..(325): Homolog of NCBI NO: 13123657 NR Description: phosphatase-like protein Mtc923 [Medicago
  misc_feature (3)..(325): Homolog of NCBI NO: 13123659 NR Description: phosphatase-like protein Psc923 [Pisum sativum]
  misc_feature (41)..(326): Homolog of NCBI NO: 15292665 NR Description: putative phosphatase [Arabidopsis thaliana]
  misc_feature (34)..(325): Homolog of NCBI NO: 32489879 NR Description: OSJNBa0060P14.10 [Oryza sativa (japonica
  misc_feature (3)..(325): Homolog of NCBI NO: 13123659 NR Description: phosphatase-like protein Psc923 [Pisum sativum]
  misc_feature (16)..(325): Homolog of NCBI NO: 13123657 NR Description: phosphatase-like protein Mtc923 [Medicago
  misc_feature (25)..(326): Homolog of NCBI NO: 7487458 NR Description: hypothetical protein T27D20.10 - Arabidopsis
  misc_feature (25)..(326): Homolog of NCBI NO: 18412499 NR Description: membrane trafficking factor -related [Arabidopsis
  misc_feature (25)..(326): Homolog of NCBI NO: 15234731 NR Description: expressed protein [Arabidopsis thaliana]
KFDFLIPNPFPFYSDQSSEKSIGDMSSKDKKLSKPTSGRTGGIRTLSDLNRRSEPDSDSDSDGPQEYFTGGEKSGMLVQDPTKEPKHDDVDEIFNQARQLGAVEGPLEHPSSSRSFTGTGRLLSGESVPTALQQPEPVIHNIIFWSNGFTVDDGPLRKLDDPENASFLDSIRKSECPKELEPVDKRAPVHVNLMRRDEKCPEKEKLKVSFQGVGRTLGGASSSTASSQSNLTDVAAVQSPLQSLVVDETLPSTSIQLRLADGTRMVAKFNNHHTVNDIRGFIEFSRPGNPNNYTLQVMGFPPKPLTDPSQTIEQAGLASSVVIQKF

SEQ ID NO: 39264 - protein, 302 aa, Arabidopsis thaliana
  peptide (1)..(302): Ceres Seq. ID no. 13600813
  misc_feature (223)..(302): Pfam Name: UBX domain Pfam Description: UBX domain
  misc_feature (223)..(302): Pfam Name: UBX domain Pfam Description: UBX domain
  misc_feature (76)..(301): Homolog of NCBI NO: 32492162 NR Description: OSJNBb0048E02.1 [Oryza sativa (japonica
  misc_feature (10)..(301): Homolog of NCBI NO: 32489879 NR Description: OSJNBa0060P14.10 [Oryza sativa (japonica
  misc_feature (17)..(298): Homolog of NCBI NO: 7485149 NR Description: hypothetical protein - Arabidopsis thaliana
  misc_feature (17)..(302): Homolog of NCBI NO: 15292665 NR Description: putative phosphatase [Arabidopsis thaliana]
  misc_feature (17)..(302): Homolog of NCBI NO: 18414442 NR Description: phosphatase like protein [Arabidopsis thaliana]
  misc_feature (76)..(301): Homolog of NCBI NO: 32492162 NR Description: OSJNBb0048E02.1 [Oryza sativa (japonica
  misc_feature (17)..(298): Homolog of NCBI NO: 7485149 NR Description: hypothetical protein - Arabidopsis thaliana
  misc_feature (17)..(302): Homolog of NCBI NO: 18414442 NR Description: phosphatase like protein [Arabidopsis thaliana]
  misc_feature (1)..(302): Homolog of NCBI NO: 15234731 NR Description: expressed protein [Arabidopsis thaliana]
  misc_feature (1)..(302): Homolog of NCBI NO: 18412499 NR Description: membrane trafficking factor -related [Arabidopsis
  misc_feature (1)..(302): Homolog of NCBI NO: 7487458 NR Description: hypothetical protein T27D20.10 - Arabidopsis
  misc_feature (1)..(301): Homolog of NCBI NO: 13123657 NR Description: phosphatase-like protein Mtc923 [Medicago
  misc_feature (1)..(301): Homolog of NCBI NO: 13123659 NR Description: phosphatase-like protein Psc923 [Pisum sativum]
  misc_feature (17)..(302): Homolog of NCBI NO: 15292665 NR Description: putative phosphatase [Arabidopsis thaliana]
  misc_feature (10)..(301): Homolog of NCBI NO: 32489879 NR Description: OSJNBa0060P14.10 [Oryza sativa (japonica
  misc_feature (1)..(301): Homolog of NCBI NO: 13123659 NR Description: phosphatase-like protein Psc923 [Pisum sativum]
  misc_feature (1)..(301): Homolog of NCBI NO: 13123657 NR Description: phosphatase-like protein Mtc923 [Medicago
  misc_feature (1)..(302): Homolog of NCBI NO: 7487458 NR Description: hypothetical protein T27D20.10 - Arabidopsis
  misc_feature (1)..(302): Homolog of NCBI NO: 18412499 NR Description: membrane trafficking factor -related [Arabidopsis
  misc_feature (1)..(302): Homolog of NCBI NO: 15234731 NR Description: expressed protein [Arabidopsis thaliana]
MSSKDKKLSKPTSGRTGGIRTLSDLNRRSEPDSDSDSDGPQEYFTGGEKSGMLVQDPTKEPKHDDVDEIFNQARQLGAVEGPLEHPSSSRSFTGTGRLLSGESVPTALQQPEPVIHNIIFWSNGFTVDDGPLRKLDDPENASFLDSIRKSECPKELEPVDKRAPVHVNLMRRDEKCPEKEKLKVSFQGVGRTLGGASSSTASSQSNLTDVAAVQSPLQSLVVDETLPSTSIQLRLADGTRMVAKFNNHHTVNDIRGFIEFSRPGNPNNYTLQVMGFPPKPLTDPSQTIEQAGLASSVVIQKF

SEQ ID NO: 39265 - protein, 251 aa, Arabidopsis thaliana
  peptide (1)..(251): Ceres Seq. ID no. 13600814
  misc_feature (172)..(251): Pfam Name: UBX domain Pfam Description: UBX domain
  misc_feature (172)..(251): Pfam Name: UBX domain Pfam Description: UBX domain
  misc_feature (25)..(250): Homolog of NCBI NO: 32492162 NR Description: OSJNBb0048E02.1 [Oryza sativa (japonica
  misc_feature (1)..(250): Homolog of NCBI NO: 32489879 NR Description: OSJNBa0060P14.10 [Oryza sativa (japonica
  misc_feature (1)..(247): Homolog of NCBI NO: 7485149 NR Description: hypothetical protein - Arabidopsis thaliana
  misc_feature (1)..(251): Homolog of NCBI NO: 15292665 NR Description: putative phosphatase [Arabidopsis thaliana]
  misc_feature (1)..(251): Homolog of NCBI NO: 18414442 NR Description: phosphatase like protein [Arabidopsis thaliana]
  misc_feature (25)..(250): Homolog of NCBI NO: 32492162 NR Description: OSJNBb0048E02.1 [Oryza sativa (japonica
  misc_feature (1)..(247): Homolog of NCBI NO: 7485149 NR Description: hypothetical protein - Arabidopsis thaliana
  misc_feature (1)..(251): Homolog of NCBI NO: 18414442 NR Description: phosphatase like protein [Arabidopsis thaliana]
  misc_feature (1)..(251): Homolog of NCBI NO: 15234731 NR Description: expressed protein [Arabidopsis thaliana]
  misc_feature (1)..(251): Homolog of NCBI NO: 18412499 NR Description: membrane trafficking factor -related [Arabidopsis
  misc_feature (1)..(251): Homolog of NCBI NO: 7487458 NR Description: hypothetical protein T27D20.10 - Arabidopsis
  misc_feature (1)..(250): Homolog of NCBI NO: 13123657 NR Description: phosphatase-like protein Mtc923 [Medicago
  misc_feature (1)..(250): Homolog of NCBI NO: 13123659 NR Description: phosphatase-like protein Psc923 [Pisum sativum]
  misc_feature (1)..(251): Homolog of NCBI NO: 15292665 NR Description: putative phosphatase [Arabidopsis thaliana]
  misc_feature (1)..(250): Homolog of NCBI NO: 32489879 NR Description: OSJNBa0060P14.10 [Oryza sativa (japonica
  misc_feature (1)..(250): Homolog of NCBI NO: 13123659 NR Description: phosphatase-like protein Psc923 [Pisum sativum]
  misc_feature (1)..(250): Homolog of NCBI NO: 13123657 NR Description: phosphatase-like protein Mtc923 [Medicago
  misc_feature (1)..(251): Homolog of NCBI NO: 7487458 NR Description: hypothetical protein T27D20.10 - Arabidopsis
  misc_feature (1)..(251): Homolog of NCBI NO: 18412499 NR Description: membrane trafficking factor -related [Arabidopsis
  misc_feature (1)..(251): Homolog of NCBI NO: 15234731 NR Description: expressed protein [Arabidopsis thaliana]
MLVQDPTKEPKHDDVDEIFNQARQLGAVEGPLEHPSSSRSFTGTGRLLSGESVPTALQQPEPVIHNIIFWSNGFTVDDGPLRKLDDPENASFLDSIRKSECPKELEPVDKRAPVHVNLMRRDEKCPEKEKLKVSFQGVGRTLGGASSSTASSQSNLTDVAAVQSPLQSLVVDETLPSTSIQLRLADGTRMVAKFNNHHTVNDIRGFIEFSRPGNPNNYTLQVMGFPPKPLTDPSQTIEQAGLASSVVIQKF

SEQ ID NO: 39266 - DNA, 1429 bp, Arabidopsis thaliana
  misc_feature (1)..(1429): Ceres Seq. ID no. 13575008
  misc_feature: MA Experiment ID: 20000227 Result: Up-regulated in Transcription
  misc_feature: MA Experiment 20000227 PARAMETER Experiment Name: At_Root-Tips-vs-Tops_P Parameter: Tissue Value: Root Tips vs. Root Tops
  misc_feature: MA Experiment ID: 20000234 Result: Down-regulated in Transcription
  misc_feature: MA Experiment 20000234 PARAMETER Experiment Name: At_Siliques_P Parameter: Age (day) Value: 21
  misc_feature: MA Experiment 20000234 PARAMETER Experiment Name: At_Siliques_P Parameter: Organism Value: A. thaliana
  misc_feature: MA Experiment 20000234 PARAMETER Experiment Name: At_Siliques_P Parameter: Plant Line Value: WS
  misc_feature: MA Experiment 20000234 PARAMETER Experiment Name: At_Siliques_P Parameter: Tissue Value: Less Than 5mm Siliques vs. Whole Plant
  misc_feature: MA Experiment ID: 20000267 Result: Up-regulated in Transcription
  misc_feature: MA Experiment 20000267 PARAMETER Experiment Name: At_Drought_P Parameter: Age (day) Value: 7
  misc_feature: MA Experiment 20000267 PARAMETER Experiment Name: At_Drought_P Parameter: Organism Value: A. thaliana
  misc_feature: MA Experiment 20000267 PARAMETER Experiment Name: At_Drought_P Parameter: Plant Line Value: WS
  misc_feature: MA Experiment 20000267 PARAMETER Experiment Name: At_Drought_P Parameter: Timepoint (hr) Value: 6
  misc_feature: MA Experiment 20000267 PARAMETER Experiment Name: At_Drought_P Parameter: Tissue Value: Whole Plant
  misc_feature: MA Experiment 20000267 PARAMETER Experiment Name: At_Drought_P Parameter: Treatment Value: Drought vs. No Drought
  misc_feature: MA Experiment ID: 20000436 Result: Up-regulated in Transcription
  misc_feature: MA Experiment 20000436 PARAMETER Experiment Name: At_Drought_P Parameter: Age (day) Value: 7
  misc_feature: MA Experiment 20000436 PARAMETER Experiment Name: At_Drought_P Parameter: Organism Value: A. thaliana
  misc_feature: MA Experiment 20000436 PARAMETER Experiment Name: At_Drought_P Parameter: Plant Line Value: WS
  misc_feature: MA Experiment 20000436 PARAMETER Experiment Name: At_Drought_P Parameter: Timepoint (hr) Value: 12
  misc_feature: MA Experiment 20000436 PARAMETER Experiment Name: At_Drought_P Parameter: Tissue Value: Whole Plant
  misc_feature: MA Experiment 20000436 PARAMETER Experiment Name: At_Drought_P Parameter: Treatment Value: Drought vs. No Drought
  misc_feature: MA Experiment ID: 20000437 Result: Up-regulated in Transcription
  misc_feature: MA Experiment 20000437 PARAMETER Experiment Name: At_Drought_P Parameter: Age (day) Value: 8
  misc_feature: MA Experiment 20000437 PARAMETER Experiment Name: At_Drought_P Parameter: Organism Value: A. thaliana
  misc_feature: MA Experiment 20000437 PARAMETER Experiment Name: At_Drought_P Parameter: Plant Line Value: WS
  misc_feature: MA Experiment 20000437 PARAMETER Experiment Name: At_Drought_P Parameter: Timepoint (hr) Value: 24
  misc_feature: MA Experiment 20000437 PARAMETER Experiment Name: At_Drought_P Parameter: Tissue Value: Whole Plant
  misc_feature: MA Experiment 20000437 PARAMETER Experiment Name: At_Drought_P Parameter: Treatment Value: Drought vs. No Drought
  misc_feature: MA Experiment ID: 20001556 Result: Up-regulated in Transcription
  misc_feature: MA Experiment 20001556 PARAMETER Experiment Name: At_Drought_Soil_Dry_P Parameter: Age (day) Value: 26
  misc_feature: MA Experiment 20001556 PARAMETER Experiment Name: At_Drought_Soil_Dry_P Parameter: Organism Value: A. thaliana
  misc_feature: MA Experiment 20001556 PARAMETER Experiment Name: At_Drought_Soil_Dry_P Parameter: Plant Line Value: WS
  misc_feature: MA Experiment 20001556 PARAMETER Experiment Name: At_Drought_Soil_Dry_P Parameter: Post Timepoint (hr) Value: None
  misc_feature: MA Experiment 20001556 PARAMETER Experiment Name: At_Drought_Soil_Dry_P Parameter: Post-Treatment Value: None
  misc_feature: MA Experiment 20001556 PARAMETER Experiment Name: At_Drought_Soil_Dry_P Parameter: Timepoint (day) Value: 12
  misc_feature: MA Experiment 20001556 PARAMETER Experiment Name: At_Drought_Soil_Dry_P Parameter: Treatment Value: Drought vs. No Drought
  misc_feature: MA Experiment ID: 20001557 Result: Up-regulated in Transcription
  misc_feature: MA Experiment 20001557 PARAMETER Experiment Name: At_Drought_Soil_Dry_P Parameter: Age (day) Value: 27
  misc_feature: MA Experiment 20001557 PARAMETER Experiment Name: At_Drought_Soil_Dry_P Parameter: Organism Value: A. thaliana
  misc_feature: MA Experiment 20001557 PARAMETER Experiment Name: At_Drought_Soil_Dry_P Parameter: Plant Line Value: WS
  misc_feature: MA Experiment 20001557 PARAMETER Experiment Name: At_Drought_Soil_Dry_P Parameter: Post Timepoint (hr) Value: 3
  misc_feature: MA Experiment 20001557 PARAMETER Experiment Name: At_Drought_Soil_Dry_P Parameter: Post-Treatment Value: Re-Water vs. No Drought
  misc_feature: MA Experiment 20001557 PARAMETER Experiment Name: At_Drought_Soil_Dry_P Parameter: Timepoint (day) Value: 13
  misc_feature: MA Experiment 20001557 PARAMETER Experiment Name: At_Drought_Soil_Dry_P Parameter: Treatment Value: Drought vs. No Drought
  misc_feature: MA Experiment ID: 20001559 Result: Up-regulated in Transcription
  misc_feature: MA Experiment 20001559 PARAMETER Experiment Name: At_Drought_Soil_Dry_P Parameter: Age (day) Value: 28
  misc_feature: MA Experiment 20001559 PARAMETER Experiment Name: At_Drought_Soil_Dry_P Parameter: Organism Value: A. thaliana
  misc_feature: MA Experiment 20001559 PARAMETER Experiment Name: At_Drought_Soil_Dry_P Parameter: Plant Line Value: WS
  misc_feature: MA Experiment 20001559 PARAMETER Experiment Name: At_Drought_Soil_Dry_P Parameter: Post Timepoint (hr) Value: 29
  misc_feature: MA Experiment 20001559 PARAMETER Experiment Name: At_Drought_Soil_Dry_P Parameter: Post-Treatment Value: Re-Water vs. No Drought
  misc_feature: MA Experiment 20001559 PARAMETER Experiment Name: At_Drought_Soil_Dry_P Parameter: Timepoint (day) Value: 14
  misc_feature: MA Experiment 20001559 PARAMETER Experiment Name: At_Drought_Soil_Dry_P Parameter: Treatment Value: Drought vs. No Drought
  misc_feature: MA Experiment ID: 20001911 Result: Up-regulated in Transcription
  misc_feature: MA Experiment 20001911 PARAMETER Experiment Name: At_Drought_Reproduction_P Parameter: Age (day) Value: 40
  misc_feature: MA Experiment 20001911 PARAMETER Experiment Name: At_Drought_Reproduction_P Parameter: Organism Value: A. thaliana
  misc_feature: MA Experiment 20001911 PARAMETER Experiment Name: At_Drought_Reproduction_P Parameter: Plant Line Value: WS
  misc_feature: MA Experiment 20001911 PARAMETER Experiment Name: At_Drought_Reproduction_P Parameter: Timepoint (day) Value: 10
  misc_feature: MA Experiment 20001911 PARAMETER Experiment Name: At_Drought_Reproduction_P Parameter: Tissue Value: Flowers
  misc_feature: MA Experiment 20001911 PARAMETER Experiment Name: At_Drought_Reproduction_P Parameter: Treatment Value: Drought vs. No Drought
attcacatttggtgtctgctgctggctttggtctttctctttctctttctacttttttttggttctgcgatttccatcaaaacccttttcccaacaatcttggttttgtacagagaagaagaagaagaagaaaggcacacaaaataacccatgtctggtttatacaataactcatcttacttctctcctgctcgagctgcttctcctcagattagaagcactcctgagatcgacagctctcagtacttgacggagcttctcgctgaacatcaaaagcttactccttttatgcaggtcctacccatatgtagccgtctattgaatcaagagatgttcagggtctctggaatgatgtctaaccaaggatttggtgattttgatagacttcgacacagaagtcccagccctatggcttcttctaatcttatgtctaatgtctctaataccgggttaggaggctggaacggcctctctcaggagagacttagtggaacacctggaatgacaatggattggcaaggtgcacctggaagccccagttcatacaccgtcaaaaggatattgcgtctggagattcctgtagataactatcctaatttcaattttgttggacgacttctcggccctagaggcaactcgttaaaacgcgttgaagctaccaccggttgccgagtattcatcagagggaaagggtcaatcaaggatcccgaaaaggaagataaattaaggggaagacctggctatgaacacttgaatgagcagcttcacatcttaatagaggcagatcttccagctagtattgtggagatacgtctgcgacaagctcaagaaattatagaagagttactaaagcctgtggacgagtcgcaagatttcataaagagacagcagctgagggaactggcattgctaaactcgaacaacctgagggaagagagtccggggccaagcggaggtggaagcgtttcgcctttcaattcaagtggtaaacgcccgaaaacaggatgctaagtagcgttttgtacgtctcgcccaaaacgctccttcaagccttataatggttacttcaaccaaaagtacatgtctgcatgcattacacagacgcacatgtgtatatctggtttctccagtagtggctgcaatggtggtggtctggtcaaggcctgccctggtctctctcgggtgagcgaccctgtggctttcgtttttcttcttctttattttaaatttttgtttttctttttcctcatcaaaaattcattacagattatttaaaaaagattcatgcaaaaaaaaaaaaaaagagtatgagatatataatatatatagggagaaaaagatgtggtggcttgggagggcgtggactgaaaattcttattgtataaacataaacaaaaaacacatttattggattgattcttatcgtttg

SEQ ID NO: 39267 - protein, 286 aa, Arabidopsis thaliana
  peptide (1)..(286): Ceres Seq. ID no. 13575009
  misc_feature (139)..(194): Pfam Name: KH domain Pfam Description: KH domain
  misc_feature (139)..(194): Pfam Name: KH domain Pfam Description: KH domain
  misc_feature (27)..(284): Homolog of NCBI NO: 19424087 NR Description: putative RNA-binding protein [Arabidopsis
  misc_feature (5)..(284): Homolog of NCBI NO: 15241136 NR Description: KH domain protein [Arabidopsis thaliana]
  misc_feature (13)..(284): Homolog of NCBI NO: 20268733 NR Description: unknown protein [Arabidopsis thaliana]
  misc_feature (13)..(284): Homolog of NCBI NO: 15236738 NR Description: KH domain protein [Arabidopsis thaliana]
  misc_feature (1)..(283): Homolog of NCBI NO: 34909270 NR Description: P0454H12.18 [Oryza sativa (japonica
  misc_feature (27)..(284): Homolog of NCBI NO: 19424087 NR Description: putative RNA-binding protein [Arabidopsis
  misc_feature (13)..(284): Homolog of NCBI NO: 20268733 NR Description: unknown protein [Arabidopsis thaliana]
  misc_feature (1)..(283): Homolog of NCBI NO: 34909270 NR Description: P0454H12.18 [Oryza sativa (japonica
  misc_feature (1)..(286): Homolog of NCBI NO: 15224909 NR Description: KH domain protein [Arabidopsis thaliana]
  misc_feature (1)..(285): Homolog of NCBI NO: 12322716 NR Description: unknown protein; 28504-31237 [Arabidopsis
  misc_feature (1)..(285): Homolog of NCBI NO: 30680583 NR Description: KH domain protein [Arabidopsis thaliana]
  misc_feature (1)..(285): Homolog of NCBI NO: 40645104 NR Description: hypothetical protein [Nicotiana tabacum]
  misc_feature (3)..(283): Homolog of NCBI NO: 34900448 NR Description: contains EST C27129(C51039)~similar to
  misc_feature (13)..(284): Homolog of NCBI NO: 15236738 NR Description: KH domain protein [Arabidopsis thaliana]
  misc_feature (5)..(284): Homolog of NCBI NO: 15241136 NR Description: KH domain protein [Arabidopsis thaliana]
  misc_feature (3)..(283): Homolog of NCBI NO: 34900448 NR Description: contains EST C27129(C51039)~similar to
  misc_feature (1)..(285): Homolog of NCBI NO: 40645104 NR Description: hypothetical protein [Nicotiana tabacum]
  misc_feature (1)..(285): Homolog of NCBI NO: 30680583 NR Description: KH domain protein [Arabidopsis thaliana]
  misc_feature (1)..(285): Homolog of NCBI NO: 12322716 NR Description: unknown protein; 28504-31237 [Arabidopsis
  misc_feature (1)..(286): Homolog of NCBI NO: 15224909 NR Description: KH domain protein [Arabidopsis thaliana]
MSGLYNNSSYFSPARAASPQIRSTPEIDSSQYLTELLAEHQKLTPFMQVLPICSRLLNQEMFRVSGMMSNQGFGDFDRLRHRSPSPMASSNLMSNVSNTGLGGWNGLSQERLSGTPGMTMDWQGAPGSPSSYTVKRILRLEIPVDNYPNFNFVGRLLGPRGNSLKRVEATTGCRVFIRGKGSIKDPEKEDKLRGRPGYEHLNEQLHILIEADLPASIVEIRLRQAQEIIEELLKPVDESQDFIKRQQLRELALLNSNNLREESPGPSGGGSVSPFNSSGKRPKTGC

SEQ ID NO: 39268 - protein, 240 aa, Arabidopsis thaliana
  peptide (1)..(240): Ceres Seq. ID no. 13575010
  misc_feature (93)..(148): Pfam Name: KH domain Pfam Description: KH domain
  misc_feature (93)..(148): Pfam Name: KH domain Pfam Description: KH domain
  misc_feature (1)..(238): Homolog of NCBI NO: 19424087 NR Description: putative RNA-binding protein [Arabidopsis
  misc_feature (1)..(238): Homolog of NCBI NO: 15241136 NR Description: KH domain protein [Arabidopsis thaliana]
  misc_feature (1)..(238): Homolog of NCBI NO: 20268733 NR Description: unknown protein [Arabidopsis thaliana]
  misc_feature (1)..(238): Homolog of NCBI NO: 15236738 NR Description: KH domain protein [Arabidopsis thaliana]
  misc_feature (1)..(237): Homolog of NCBI NO: 34909270 NR Description: P0454H12.18 [Oryza sativa (japonica
  misc_feature (1)..(238): Homolog of NCBI NO: 19424087 NR Description: putative RNA-binding protein [Arabidopsis
  misc_feature (1)..(238): Homolog of NCBI NO: 20268733 NR Description: unknown protein [Arabidopsis thaliana]
  misc_feature (1)..(237): Homolog of NCBI NO: 34909270 NR Description: P0454H12.18 [Oryza sativa (japonica
  misc_feature (1)..(240): Homolog of NCBI NO: 15224909 NR Description: KH domain protein [Arabidopsis thaliana]
  misc_feature (1)..(239): Homolog of NCBI NO: 12322716 NR Description: unknown protein; 28504-31237 [Arabidopsis
  misc_feature (1)..(239): Homolog of NCBI NO: 30680583 NR Description: KH domain protein [Arabidopsis thaliana]
  misc_feature (1)..(239): Homolog of NCBI NO: 40645104 NR Description: hypothetical protein [Nicotiana tabacum]
  misc_feature (1)..(237): Homolog of NCBI NO: 34900448 NR Description: contains EST C27129(C51039)~similar to
  misc_feature (1)..(238): Homolog of NCBI NO: 15236738 NR Description: KH domain protein [Arabidopsis thaliana]
  misc_feature (1)..(238): Homolog of NCBI NO: 15241136 NR Description: KH domain protein [Arabidopsis thaliana]
  misc_feature (1)..(237): Homolog of NCBI NO: 34900448 NR Description: contains EST C27129(C51039)~similar to
  misc_feature (1)..(239): Homolog of NCBI NO: 40645104 NR Description: hypothetical protein [Nicotiana tabacum]
  misc_feature (1)..(239): Homolog of NCBI NO: 30680583 NR Description: KH domain protein [Arabidopsis thaliana]
  misc_feature (1)..(239): Homolog of NCBI NO: 12322716 NR Description: unknown protein; 28504-31237 [Arabidopsis
  misc_feature (1)..(240): Homolog of NCBI NO: 15224909 NR Description: KH domain protein [Arabidopsis thaliana]
MQVLPICSRLLNQEMFRVSGMMSNQGFGDFDRLRHRSPSPMASSNLMSNVSNTGLGGWNGLSQERLSGTPGMTMDWQGAPGSPSSYTVKRILRLEIPVDNYPNFNFVGRLLGPRGNSLKRVEATTGCRVFIRGKGSIKDPEKEDKLRGRPGYEHLNEQLHILIEADLPASIVEIRLRQAQEIIEELLKPVDESQDFIKRQQLRELALLNSNNLREESPGPSGGGSVSPFNSSGKRPKTGC

SEQ ID NO: 39269 - protein, 226 aa, Arabidopsis thaliana
  peptide (1)..(226): Ceres Seq. ID no. 13575011
  misc_feature (79)..(134): Pfam Name: KH domain Pfam Description: KH domain
  misc_feature (79)..(134): Pfam Name: KH domain Pfam Description: KH domain
  misc_feature (1)..(224): Homolog of NCBI NO: 19424087 NR Description: putative RNA-binding protein [Arabidopsis
  misc_feature (1)..(224): Homolog of NCBI NO: 15241136 NR Description: KH domain protein [Arabidopsis thaliana]
  misc_feature (1)..(224): Homolog of NCBI NO: 20268733 NR Description: unknown protein [Arabidopsis thaliana]
  misc_feature (1)..(224): Homolog of NCBI NO: 15236738 NR Description: KH domain protein [Arabidopsis thaliana]
  misc_feature (1)..(223): Homolog of NCBI NO: 34909270 NR Description: P0454H12.18 [Oryza sativa (japonica
  misc_feature (1)..(224): Homolog of NCBI NO: 19424087 NR Description: putative RNA-binding protein [Arabidopsis
  misc_feature (1)..(224): Homolog of NCBI NO: 20268733 NR Description: unknown protein [Arabidopsis thaliana]
  misc_feature (1)..(223): Homolog of NCBI NO: 34909270 NR Description: P0454H12.18 [Oryza sativa (japonica
  misc_feature (1)..(226): Homolog of NCBI NO: 15224909 NR Description: KH domain protein [Arabidopsis thaliana]
  misc_feature (1)..(225): Homolog of NCBI NO: 12322716 NR Description: unknown protein; 28504-31237 [Arabidopsis
  misc_feature (1)..(225): Homolog of NCBI NO: 30680583 NR Description: KH domain protein [Arabidopsis thaliana]
  misc_feature (1)..(225): Homolog of NCBI NO: 40645104 NR Description: hypothetical protein [Nicotiana tabacum]
  misc_feature (1)..(223): Homolog of NCBI NO: 34900448 NR Description: contains EST C27129(C51039)~similar to
  misc_feature (1)..(224): Homolog of NCBI NO: 15236738 NR Description: KH domain protein [Arabidopsis thaliana]
  misc_feature (1)..(224): Homolog of NCBI NO: 15241136 NR Description: KH domain protein [Arabidopsis thaliana]
  misc_feature (1)..(223): Homolog of NCBI NO: 34900448 NR Description: contains EST C27129(C51039)~similar to
  misc_feature (1)..(225): Homolog of NCBI NO: 40645104 NR Description: hypothetical protein [Nicotiana tabacum]
  misc_feature (1)..(225): Homolog of NCBI NO: 30680583 NR Description: KH domain protein [Arabidopsis thaliana]
  misc_feature (1)..(225): Homolog of NCBI NO: 12322716 NR Description: unknown protein; 28504-31237 [Arabidopsis
  misc_feature (1)..(226): Homolog of NCBI NO: 15224909 NR Description: KH domain protein [Arabidopsis thaliana]
MFRVSGMMSNQGFGDFDRLRHRSPSPMASSNLMSNVSNTGLGGWNGLSQERLSGTPGMTMDWQGAPGSPSSYTVKRILRLEIPVDNYPNFNFVGRLLGPRGNSLKRVEATTGCRVFIRGKGSIKDPEKEDKLRGRPGYEHLNEQLHILIEADLPASIVEIRLRQAQEIIEELLKPVDESQDFIKRQQLRELALLNSNNLREESPGPSGGGSVSPFNSSGKRPKTGC

SEQ ID NO: 39270 - DNA, 1657 bp, Arabidopsis thaliana
  misc_feature (1)..(1657): Ceres Seq. ID no. 12377488
  misc_feature: MA Experiment ID: 20000182 Result: Up-regulated in Transcription
  misc_feature: MA Experiment 20000182 PARAMETER Experiment Name: At_2mM_SA_P Parameter: Age (day) Value: 14
  misc_feature: MA Experiment 20000182 PARAMETER Experiment Name: At_2mM_SA_P Parameter: Organism Value: A. thaliana
  misc_feature: MA Experiment 20000182 PARAMETER Experiment Name: At_2mM_SA_P Parameter: Plant Line Value: WS
  misc_feature: MA Experiment 20000182 PARAMETER Experiment Name: At_2mM_SA_P Parameter: Timepoint (hr) Value: 6
  misc_feature: MA Experiment 20000182 PARAMETER Experiment Name: At_2mM_SA_P Parameter: Tissue Value: Aerial
  misc_feature: MA Experiment 20000182 PARAMETER Experiment Name: At_2mM_SA_P Parameter: Treatment Value: 2mM SA vs. No Treatment
  misc_feature: MA Experiment ID: 20000184 Result: Down-regulated in Transcription
  misc_feature: MA Experiment 20000184 PARAMETER Experiment Name: At_Shoots__P Parameter: Age (day) Value: 7
  misc_feature: MA Experiment 20000184 PARAMETER Experiment Name: At_Shoots__P Parameter: Tissue Value: Shoots vs. Whole Plant
  misc_feature: MA Experiment ID: 20000213 Result: Up-regulated in Transcription
  misc_feature: MA Experiment 20000213 PARAMETER Experiment Name: At_4deg_Cold_P Parameter: Timepoint (hr) Value: 2
  misc_feature: MA Experiment ID: 20000227 Result: Up-regulated in Transcription
  misc_feature: MA Experiment 20000227 PARAMETER Experiment Name: At_Root-Tips-vs-Tops_P Parameter: Tissue Value: Root Tips vs. Root Tops
atggagaaaccaaaccctagaagaccctcaaacagtgttcttccatacgaaacaccaagattaagagatcactatctcctcggcaaaaagctaggccaaggccaatttggaacaacctatctctgtacagagaaatcatcatcagctaattacgcttgcaaatcaatcccaaaacgtaagcttgtatgtcgtgaagactacgaagatgtatggcgtgagattcagatcatgcatcatctctctgagcatcctaatgttgttagaatcaagggtacttatgaagactctgtttttgttcacattgttatggaagtttgtgaaggtggtgagctttttgatcggattgtttctaaagggtgttttagtgaacgtgaagctgctaagttgattaagactattcttggtgttgttgaggcttgtcattctcttggtgttatgcatagagatcttaagcctgagaatttcttgtttgatagtcccagtgatgatgctaagcttaaagctacagactttggtttgtctgtcttctacaagccagggcagtatctgtatgatgtagttggaagtccgtattatgttgcacctgaggttctgaagaaatgttatggaccagagatagacgtgtggagcgccggtgttatcttgtacatcttactaagtggggttcctcctttttgggcagaaaccgagtcaggaatctttaggcagatattgcaagggaagatagattttaaatctgatccgtggcctactatctcagaaggtgctaaagatttgatttacaaaatgctcgataggagccccaagaaacgtatttctgcacatgaagcattgtgtcacccttggattgttgatgaacatgctgcaccagacaagcctctcgacccagcagtcttgtcgcgacttaagcagttctcgcaaatgaataaaatcaagaaaatggccttacgagtaatcgcggagagactctcggaggaagagattggtggtctgaaggaattgttcaaaatgatagatacagacaacagtggaacaatcacctttgaagagcttaaagcaggtctaaagagagttggatctgaattgatggaatcagaaatcaagtctcttatggatgcggcggatatagacaacagtgggacaatagactacggtgaattcctagcagcgacattacatataaacaagatggagagagaagagaacttggtggttgcgttttcatactttgataaagatggtagcggttatatcaccattgacgagcttcaacaagcctgcacagagtttggtctctgtgacactcctcttgatgacatgatcaaagagattgatcttgataatgacgggaagattgatttctcagagtttactgctatgatgaagaaaggagatggtgttgggaggagcagaactatgaggaacaacttgaacttcaatatagctgaagcttttggagttgaggacacaagcagcactgctaaatctgatgattcaccaaagtaattataatcatctatatacttggaattgagaaatgagaactcacaaaagaaaaactgaatctttcctttttgttttcgtttccacttttgtagatgagcaactttctcaattttgttataagcatggataattttgcttcatattttctgcg

SEQ ID NO: 39271 - protein, 501 aa, Arabidopsis thaliana
  peptide (1)..(501): Ceres Seq. ID no. 12377489
  misc_feature (25)..(283): Pfam Name: Protein kinase domain Pfam Description: Protein kinase domain
  misc_feature (1)..(498): Homolog of NCBI NO: 1084335 NR Description: calcium-dependent protein kinase (EC 2.7.1.-) 2 -
  misc_feature (1)..(189): Homolog of NCBI NO: 8778378 NR Description: F15O4.8 [Arabidopsis thaliana]
  misc_feature (180)..(498): Homolog of NCBI NO: 8778378 NR Description: F15O4.8 [Arabidopsis thaliana]
  misc_feature (1)..(498): Homolog of NCBI NO: 15219693 NR Description: calcium-dependent protein kinase
  misc_feature (1)..(501): Homolog of NCBI NO: 15233947 NR Description: calmodulin-domain protein kinase CDPK isoform 4
MEKPNPRRPSNSVLPYETPRLRDHYLLGKKLGQGQFGTTYLCTEKSSSANYACKSIPKRKLVCREDYEDVWREIQIMHHLSEHPNVVRIKGTYEDSVFVHIVMEVCEGGELFDRIVSKGCFSEREAAKLIKTILGVVEACHSLGVMHRDLKPENFLFDSPSDDAKLKATDFGLSVFYKPGQYLYDVVGSPYYVAPEVLKKCYGPEIDVWSAGVILYILLSGVPPFWAETESGIFRQILQGKIDFKSDPWPTISEGAKDLIYKMLDRSPKKRISAHEALCHPWIVDEHAAPDKPLDPAVLSRLKQFSQMNKIKKMALRVIAERLSEEEIGGLKELFKMIDTDNSGTITFEELKAGLKRVGSELMESEIKSLMDAADIDNSGTIDYGEFLAATLHINKMEREENLVVAFSYFDKDGSGYITIDELQQACTEFGLCDTPLDDMIKEIDLDNDGKIDFSEFTAMMKKGDGVGRSRTMRNNLNFNIAEAFGVEDTSSTAKSDDSPK

SEQ ID NO: 39272 - protein, 425 aa, Arabidopsis thaliana
  peptide (1)..(425): Ceres Seq. ID no. 12377490
  misc_feature (1)..(207): Pfam Name: Protein kinase domain Pfam Description: Protein kinase domain
  misc_feature (1)..(422): Homolog of NCBI NO: 1084335 NR Description: calcium-dependent protein kinase (EC 2.7.1.-) 2 -
  misc_feature (1)..(113): Homolog of NCBI NO: 8778378 NR Description: F15O4.8 [Arabidopsis thaliana]
  misc_feature (104)..(422): Homolog of NCBI NO: 8778378 NR Description: F15O4.8 [Arabidopsis thaliana]
  misc_feature (1)..(422): Homolog of NCBI NO: 15219693 NR Description: calcium-dependent protein kinase
  misc_feature (1)..(425): Homolog of NCBI NO: 15233947 NR Description: calmodulin-domain protein kinase CDPK isoform 4
MHHLSEHPNVVRIKGTYEDSVFVHIVMEVCEGGELFDRIVSKGCFSEREAAKLIKTILGVVEACHSLGVMHRDLKPENFLFDSPSDDAKLKATDFGLSVFYKPGQYLYDVVGSPYYVAPEVLKKCYGPEIDVWSAGVILYILLSGVPPFWAETESGIFRQILQGKIDFKSDPWPTISEGAKDLIYKMLDRSPKKRISAHEALCHPWIVDEHAAPDKPLDPAVLSRLKQFSQMNKIKKMALRVIAERLSEEEIGGLKELFKMIDTDNSGTITFEELKAGLKRVGSELMESEIKSLMDAADIDNSGTIDYGEFLAATLHINKMEREENLVVAFSYFDKDGSGYITIDELQQACTEFGLCDTPLDDMIKEIDLDNDGKIDFSEFTAMMKKGDGVGRSRTMRNNLNFNIAEAFGVEDTSSTAKSDDSPK

SEQ ID NO: 39273 - protein, 399 aa, Arabidopsis thaliana
  peptide (1)..(399): Ceres Seq. ID no. 12377491
  misc_feature (1)..(181): Pfam Name: Protein kinase domain Pfam Description: Protein kinase domain
  misc_feature (1)..(396): Homolog of NCBI NO: 1084335 NR Description: calcium-dependent protein kinase (EC 2.7.1.-) 2 -
  misc_feature (1)..(87): Homolog of NCBI NO: 8778378 NR Description: F15O4.8 [Arabidopsis thaliana]
  misc_feature (78)..(396): Homolog of NCBI NO: 8778378 NR Description: F15O4.8 [Arabidopsis thaliana]
  misc_feature (1)..(396): Homolog of NCBI NO: 15219693 NR Description: calcium-dependent protein kinase
  misc_feature (1)..(399): Homolog of NCBI NO: 15233947 NR Description: calmodulin-domain protein kinase CDPK isoform 4
MEVCEGGELFDRIVSKGCFSEREAAKLIKTILGVVEACHSLGVMHRDLKPENFLFDSPSDDAKLKATDFGLSVFYKPGQYLYDVVGSPYYVAPEVLKKCYGPEIDVWSAGVILYILLSGVPPFWAETESGIFRQILQGKIDFKSDPWPTISEGAKDLIYKMLDRSPKKRISAHEALCHPWIVDEHAAPDKPLDPAVLSRLKQFSQMNKIKKMALRVIAERLSEEEIGGLKELFKMIDTDNSGTITFEELKAGLKRVGSELMESEIKSLMDAADIDNSGTIDYGEFLAATLHINKMEREENLVVAFSYFDKDGSGYITIDELQQACTEFGLCDTPLDDMIKEIDLDNDGKIDFSEFTAMMKKGDGVGRSRTMRNNLNFNIAEAFGVEDTSSTAKSDDSPK

SEQ ID NO: 39274 - DNA, 990 bp, Arabidopsis thaliana
  misc_feature (1)..(990): Ceres Seq. ID no. 12325694
  misc_feature: MA Experiment ID: 108461 Result: Up-regulated in Transcription
  misc_feature: MA Experiment 108461 PARAMETER Experiment Name: At_Germinating_Seeds_cDNA_P Parameter: Age (day) Value: 1 vs. 0
  misc_feature: MA Experiment 108461 PARAMETER Experiment Name: At_Germinating_Seeds_cDNA_P Parameter: Tissue Value: Germinating Seeds
  misc_feature: MA Experiment ID: 108462 Result: Up-regulated in Transcription
  misc_feature: MA Experiment 108462 PARAMETER Experiment Name: At_Germinating_Seeds_cDNA_P Parameter: Age (day) Value: 2 vs. 0
  misc_feature: MA Experiment 108462 PARAMETER Experiment Name: At_Germinating_Seeds_cDNA_P Parameter: Tissue Value: Germinating Seeds
  misc_feature: MA Experiment ID: 108463 Result: Up-regulated in Transcription
  misc_feature: MA Experiment 108463 PARAMETER Experiment Name: At_Germinating_Seeds_cDNA_P Parameter: Age (day) Value: 3 vs. 0
  misc_feature: MA Experiment 108463 PARAMETER Experiment Name: At_Germinating_Seeds_cDNA_P Parameter: Tissue Value: Germinating Seeds
  misc_feature: MA Experiment ID: 108464 Result: Up-regulated in Transcription
  misc_feature: MA Experiment 108464 PARAMETER Experiment Name: At_Germinating_Seeds_cDNA_P Parameter: Age (day) Value: 4 vs. 0
  misc_feature: MA Experiment 108464 PARAMETER Experiment Name: At_Germinating_Seeds_cDNA_P Parameter: Tissue Value: Germinating Seeds
  misc_feature: MA Experiment ID: 108573 Result: Up-regulated in Transcription
  misc_feature: MA Experiment 108573 PARAMETER Experiment Name: At_Drought_cDNA_P Parameter: Timepoint (hr) Value: 6
  misc_feature: MA Experiment 108573 PARAMETER Experiment Name: At_Drought_cDNA_P Parameter: Tissue Value: Aerial
  misc_feature: MA Experiment 108573 PARAMETER Experiment Name: At_Drought_cDNA_P Parameter: Treatment Value: Drought vs. No Drought
  misc_feature: MA Experiment ID: 108579 Result: Down-regulated in Transcription
  misc_feature: MA Experiment 108579 PARAMETER Experiment Name: At_4deg_Cold_cDNA_P Parameter: Temperature (deg C) Value: 4 vs. 22
  misc_feature: MA Experiment 108579 PARAMETER Experiment Name: At_4deg_Cold_cDNA_P Parameter: Timepoint (hr) Value: 6
  misc_feature: MA Experiment 108579 PARAMETER Experiment Name: At_4deg_Cold_cDNA_P Parameter: Tissue Value: Aerial
  misc_feature: MA Experiment ID: 20000180 Result: Up-regulated in Transcription
  misc_feature: MA Experiment 20000180 PARAMETER Experiment Name: At_Germinating_Seeds_P Parameter: Age (hr) Value: 24 vs. 0
  misc_feature: MA Experiment 20000180 PARAMETER Experiment Name: At_Germinating_Seeds_P Parameter: Tissue Value: Germinating Seeds
  misc_feature: MA Experiment ID: 20000224 Result: Down-regulated in Transcription
  misc_feature: MA Experiment ID: 20000234 Result: Down-regulated in Transcription
  misc_feature: MA Experiment 20000234 PARAMETER Experiment Name: At_Siliques_P Parameter: Age (day) Value: 21
  misc_feature: MA Experiment 20000234 PARAMETER Experiment Name: At_Siliques_P Parameter: Organism Value: A. thaliana
  misc_feature: MA Experiment 20000234 PARAMETER Experiment Name: At_Siliques_P Parameter: Plant Line Value: WS
  misc_feature: MA Experiment 20000234 PARAMETER Experiment Name: At_Siliques_P Parameter: Tissue Value: Less Than 5mm Siliques vs. Whole Plant
  misc_feature: MA Experiment ID: 20001248 Result: Up-regulated in Transcription
  misc_feature: MA Experiment 20001248 PARAMETER Experiment Name: At_Far-red-induction_P Parameter: Age (day) Value: 7
  misc_feature: MA Experiment 20001248 PARAMETER Experiment Name: At_Far-red-induction_P Parameter: Light Value: Far-red vs. White
  misc_feature: MA Experiment 20001248 PARAMETER Experiment Name: At_Far-red-induction_P Parameter: Organism Value: A. thaliana
  misc_feature: MA Experiment 20001248 PARAMETER Experiment Name: At_Far-red-induction_P Parameter: Plant Line Value: Columbia
  misc_feature: MA Experiment 20001248 PARAMETER Experiment Name: At_Far-red-induction_P Parameter: Timepoint (hr) Value: 4
  misc_feature: MA Experiment 20001248 PARAMETER Experiment Name: At_Far-red-induction_P Parameter: Tissue Value: Whole Plant
  misc_feature: MA Experiment ID: 20001450 Result: Up-regulated in Transcription
  misc_feature: MA Experiment 20001450 PARAMETER Experiment Name: At_Far-red-induction_P Parameter: Age (day) Value: 7
  misc_feature: MA Experiment 20001450 PARAMETER Experiment Name: At_Far-red-induction_P Parameter: Light Value: Far-red vs. White
  misc_feature: MA Experiment 20001450 PARAMETER Experiment Name: At_Far-red-induction_P Parameter: Organism Value: A. thaliana
  misc_feature: MA Experiment 20001450 PARAMETER Experiment Name: At_Far-red-induction_P Parameter: Plant Line Value: Columbia
  misc_feature: MA Experiment 20001450 PARAMETER Experiment Name: At_Far-red-induction_P Parameter: Timepoint (hr) Value: 8
  misc_feature: MA Experiment 20001450 PARAMETER Experiment Name: At_Far-red-induction_P Parameter: Tissue Value: Whole Plant
  misc_feature: MA Experiment ID: 20001451 Result: Up-regulated in Transcription
  misc_feature: MA Experiment 20001451 PARAMETER Experiment Name: At_Far-red-induction_P Parameter: Age (day) Value: 7
  misc_feature: MA Experiment 20001451 PARAMETER Experiment Name: At_Far-red-induction_P Parameter: Light Value: Far-red vs. White
  misc_feature: MA Experiment 20001451 PARAMETER Experiment Name: At_Far-red-induction_P Parameter: Organism Value: A. thaliana
  misc_feature: MA Experiment 20001451 PARAMETER Experiment Name: At_Far-red-induction_P Parameter: Plant Line Value: Columbia
  misc_feature: MA Experiment 20001451 PARAMETER Experiment Name: At_Far-red-induction_P Parameter: Timepoint (hr) Value: 24
  misc_feature: MA Experiment 20001451 PARAMETER Experiment Name: At_Far-red-induction_P Parameter: Tissue Value: Whole Plant
acccaaaatctccgatattcttattcctttgctgtatcatcttcttcttctacttcgtcctcatcatcgtcacatagatcctcctttttcgttaattggggagagatatactttcttttgaggatcagatcgtgacagggtttagctcaaggagagggtgagaaaaagaagaagaaggtgagaaaagtgaaggcaaggctttgaggatgtcttttacaggaactcaacagaaatgcaaggcttgtgagaagactgtttatgctgttgagcttctctctgctgatggagttggatatcacaagtcttgcttcaaatgcactcactgcaaaagcaggcttcagctgagtagttactcatcaatggaaggtgttttgtactgtaagcctcattttgagcagctctttaaggagagtggtagtttcaacaagaactttcagtcacctgcaaaatcggctgacaaatcaactcctgagctgacaaggacgcctagccgagttgctggcaggttctctggtacacaagagaaatgcgccacttgtagtaaaactgtgtatcctattgaaaaggtaacagtcgagagccagacatatcacaagtcctgcttcaagtgctcacatggaggttgcccaatttcaccttccaactacgcagctcttgaaggaatcctgtactgcaagcaccatttcgctcagctcttcaaggagaagggaagttacaaccacttaatcaaatccgcttccatcaaacgctctgcagccgcagcagtcgccgccggtgtaccagcagcctccgttcctgaatcttaaaatccaataatttctcctctctagtctaaaatttgaagttaatgccaaactgattcagtttgatttctctttgtgagagcgtgtgtgtaatctatgctttgatgttcttatttccattgatgtctcctaaaattctatgtttgtgtggtgatttggttatctataaaaagtctgaaactttcct

SEQ ID NO: 39275 - protein, 199 aa, Arabidopsis thaliana
  peptide (1)..(199): Ceres Seq. ID no. 12325695
  misc_feature (108)..(165): Pfam Name: LIM domain Pfam Description: LIM domain
  misc_feature (1)..(196): Homolog of NCBI NO: 25354704 NR Description: T1N6.19 protein - Arabidopsis thaliana
  misc_feature (1)..(199): Homolog of NCBI NO: 15225897 NR Description: putative LIM-domain protein; protein id:
  misc_feature (1)..(199): Homolog of NCBI NO: 8515104 NR Description: LIM domain protein PLIM-2 [Nicotiana tabacum]
  misc_feature (52)..(199): Homolog of NCBI NO: 13926203 NR Description: transcription factor L2 [Arabidopsis thaliana]
  misc_feature (3)..(195): Homolog of NCBI NO: 34902012 NR Description: putative LIM-domain protein
  misc_feature (1)..(189): Homolog of NCBI NO: 17227092 NR Description: LIM domain protein [Gossypium hirsutum]
  misc_feature (1)..(184): Homolog of NCBI NO: 7489184 NR Description: probable transcription factor SF3 - common
  misc_feature (1)..(167): Homolog of NCBI NO: 11282608 NR Description: transcription factor L2 [imported] - Arabidopsis
  misc_feature (1)..(199): Homolog of NCBI NO: 15225592 NR Description: putative LIM-domain protein
  misc_feature (1)..(199): Homolog of NCBI NO: 15228188 NR Description: transcription factor L2
MSFTGTQQKCKACEKTVYAVELLSADGVGYHKSCFKCTHCKSRLQLSSYSSMEGVLYCKPHFEQLFKESGSFNKNFQSPAKSADKSTPELTRTPSRVAGRFSGTQEKCATCSKTVYPIEKVTVESQTYHKSCFKCSHGGCPISPSNYAALEGILYCKHHFAQLFKEKGSYNHLIKSASIKRSAAAAVAAGVPAASVPES

SEQ ID NO: 39276 - protein, 148 aa, Arabidopsis thaliana
  peptide (1)..(148): Ceres Seq. ID no. 12325696
  misc_feature (57)..(114): Pfam Name: LIM domain Pfam Description: LIM domain
  misc_feature (1)..(145): Homolog of NCBI NO: 25354704 NR Description: T1N6.19 protein - Arabidopsis thaliana
  misc_feature (1)..(148): Homolog of NCBI NO: 15225897 NR Description: putative LIM-domain protein; protein id:
  misc_feature (1)..(148): Homolog of NCBI NO: 8515104 NR Description: LIM domain protein PLIM-2 [Nicotiana tabacum]
  misc_feature (1)..(148): Homolog of NCBI NO: 13926203 NR Description: transcription factor L2 [Arabidopsis thaliana]
  misc_feature (1)..(144): Homolog of NCBI NO: 34902012 NR Description: putative LIM-domain protein
  misc_feature (1)..(138): Homolog of NCBI NO: 17227092 NR Description: LIM domain protein [Gossypium hirsutum]
  misc_feature (1)..(133): Homolog of NCBI NO: 7489184 NR Description: probable transcription factor SF3 - common
  misc_feature (1)..(116): Homolog of NCBI NO: 11282608 NR Description: transcription factor L2 [imported] - Arabidopsis
  misc_feature (1)..(148): Homolog of NCBI NO: 15225592 NR Description: putative LIM-domain protein
  misc_feature (1)..(148): Homolog of NCBI NO: 15228188 NR Description: transcription factor L2
MEGVLYCKPHFEQLFKESGSFNKNFQSPAKSADKSTPELTRTPSRVAGRFSGTQEKCATCSKTVYPIEKVTVESQTYHKSCFKCSHGGCPISPSNYAALEGILYCKHHFAQLFKEKGSYNHLIKSASIKRSAAAAVAAGVPAASVPES

SEQ ID NO: 39277 - DNA, 912 bp, Arabidopsis thaliana
  misc_feature (1)..(912): Ceres Seq. ID no. 12325697
  misc_feature: MA Experiment ID: 108434 Result: Up-regulated in Transcription
  misc_feature: MA Experiment 108434 PARAMETER Experiment Name: At_Root_Tips_cDNA_P Parameter: Tissue Value: Root Tips
  misc_feature: MA Experiment ID: 108462 Result: Down-regulated in Transcription
  misc_feature: MA Experiment 108462 PARAMETER Experiment Name: At_Germinating_Seeds_cDNA_P Parameter: Age (day) Value: 2 vs. 0
  misc_feature: MA Experiment 108462 PARAMETER Experiment Name: At_Germinating_Seeds_cDNA_P Parameter: Tissue Value: Germinating Seeds
  misc_feature: MA Experiment ID: 108463 Result: Down-regulated in Transcription
  misc_feature: MA Experiment 108463 PARAMETER Experiment Name: At_Germinating_Seeds_cDNA_P Parameter: Age (day) Value: 3 vs. 0
  misc_feature: MA Experiment 108463 PARAMETER Experiment Name: At_Germinating_Seeds_cDNA_P Parameter: Tissue Value: Germinating Seeds
  misc_feature: MA Experiment ID: 108464 Result: Down-regulated in Transcription
  misc_feature: MA Experiment 108464 PARAMETER Experiment Name: At_Germinating_Seeds_cDNA_P Parameter: Age (day) Value: 4 vs. 0
  misc_feature: MA Experiment 108464 PARAMETER Experiment Name: At_Germinating_Seeds_cDNA_P Parameter: Tissue Value: Germinating Seeds
  misc_feature: MA Experiment ID: 20000437 Result: Down-regulated in Transcription
  misc_feature: MA Experiment 20000437 PARAMETER Experiment Name: At_Drought_P Parameter: Age (day) Value: 8
  misc_feature: MA Experiment 20000437 PARAMETER Experiment Name: At_Drought_P Parameter: Organism Value: A. thaliana
  misc_feature: MA Experiment 20000437 PARAMETER Experiment Name: At_Drought_P Parameter: Plant Line Value: WS
  misc_feature: MA Experiment 20000437 PARAMETER Experiment Name: At_Drought_P Parameter: Timepoint (hr) Value: 24
  misc_feature: MA Experiment 20000437 PARAMETER Experiment Name: At_Drought_P Parameter: Tissue Value: Whole Plant
  misc_feature: MA Experiment 20000437 PARAMETER Experiment Name: At_Drought_P Parameter: Treatment Value: Drought vs. No Drought
  misc_feature: MA Experiment ID: 20000794 Result: Down-regulated in Transcription
  misc_feature: MA Experiment 20000794 PARAMETER Experiment Name: At_Petals_P Parameter: Age (day) Value: 23-25 days
  misc_feature: MA Experiment 20000794 PARAMETER Experiment Name: At_Petals_P Parameter: Plant Line Value: WS
  misc_feature: MA Experiment 20000794 PARAMETER Experiment Name: At_Petals_P Parameter: Tissue Value: Petals vs. Whole plant
  misc_feature: MA Experiment ID: 20001560 Result: Up-regulated in Transcription
  misc_feature: MA Experiment 20001560 PARAMETER Experiment Name: At_Drought_Soil_Dry_P Parameter: Age (day) Value: 28
  misc_feature: MA Experiment 20001560 PARAMETER Experiment Name: At_Drought_Soil_Dry_P Parameter: Organism Value: A. thaliana
  misc_feature: MA Experiment 20001560 PARAMETER Experiment Name: At_Drought_Soil_Dry_P Parameter: Plant Line Value: WS
  misc_feature: MA Experiment 20001560 PARAMETER Experiment Name: At_Drought_Soil_Dry_P Parameter: Post Timepoint (hr) Value: None
  misc_feature: MA Experiment 20001560 PARAMETER Experiment Name: At_Drought_Soil_Dry_P Parameter: Post-Treatment Value: None
  misc_feature: MA Experiment 20001560 PARAMETER Experiment Name: At_Drought_Soil_Dry_P Parameter: Timepoint (day) Value: 14
  misc_feature: MA Experiment 20001560 PARAMETER Experiment Name: At_Drought_Soil_Dry_P Parameter: Treatment Value: Drought vs. No Drought
tcaatctgcgaatttctcttaaaccctaaccctctcgctgccgtccggtggtttttccgacgacgaactatgacgattcacgctgcagtaatccagaagcttctgaacaccggagcacatctcggccgtcgtgccgccgagcaccatttcaagcaatacgcttacgggacgcgtaacggaatgacaattatcgactccgacaaaaccctaatttgcctccgtagcgccgctcatttcgtcgctaacctcgcccacatgagaggtaacatcttcttcgtcaacacgaatcctctcttcgacgaaatcattgagctcacttctcgtcggatccaaggagattcgtataatcacaaccgtgcgataaatctgtggaagatgggagggtttttgactaacagctacagtcctaagaagtttcgatctaggcataaaaagctttgctttggtccaactactatgcctgattgtgtcgttgtgtttgattctgagaggaagagctctgtgatacttgaggcatcgaagcttcagattccggttgttgcaattgtggacccgaatgtgccattggagttctttgagaagattacgtatcctgtgccagctcgtgattcggtcaagtttgtgtatttgttctgtaatgtgatcaccaagtgctttgtggcagaacagatgaagttggggatcaaagaagggagcaatgaagatttgatgaaggatttagctgcttgattttgatatttgcaacaaaagtatgaaactttacagttgtttttctgagtctggaataattgttcttcagaattgtggttacttcaactttgaaattctgggagttttttacacatggatgattttgtttctctgatggatatttctgtataagattgttgagttctagtgttctacatcttg

SEQ ID NO: 39278 - protein, 242 aa, Arabidopsis thaliana
  peptide (1)..(242): Ceres Seq. ID no. 12325698
  misc_feature (34)..(223): Pfam Name: Ribosomal protein S2 Pfam Description: Ribosomal protein S2
  misc_feature (24)..(217): Homolog of NCBI NO: 40795002 NR Description: ribosomal protein S2 [Zea mays]
  misc_feature (135)..(220): Homolog of NCBI NO: 11467163 NR Description: rps2 [Marchantia polymorpha]
  misc_feature (30)..(143): Homolog of NCBI NO: 11467163 NR Description: rps2 [Marchantia polymorpha]
  misc_feature (24)..(223): Homolog of NCBI NO: 7489611 NR Description: hypothetical protein 483 - rice mitochondrion
  misc_feature (23)..(229): Homolog of NCBI NO: 40795007 NR Description: ribosomal protein S2 [Zea mays]
  misc_feature (24)..(217): Homolog of NCBI NO: 9944889 NR Description: ribosomal protein S2 [Zea mays]
  misc_feature (23)..(229): Homolog of NCBI NO: 9944891 NR Description: ribosomal protein S2 [Zea mays]
  misc_feature (24)..(223): Homolog of NCBI NO: 7440113 NR Description: ribosomal protein S2 homolog - wheat
  misc_feature (24)..(242): Homolog of NCBI NO: 15228593 NR Description: putative ribosomal protein S2
  misc_feature (24)..(242): Homolog of NCBI NO: 21536611 NR Description: putative ribosomal protein S2 [Arabidopsis
SICEFLLNPNPLAAVRWFFRRRTMTIHAAVIQKLLNTGAHLGRRAAEHHFKQYAYGTRNGMTIIDSDKTLICLRSAAHFVANLAHMRGNIFFVNTNPLFDEIIELTSRRIQGDSYNHNRAINLWKMGGFLTNSYSPKKFRSRHKKLCFGPTTMPDCVVVFDSERKSSVILEASKLQIPVVAIVDPNVPLEFFEKITYPVPARDSVKFVYLFCNVITKCFVAEQMKLGIKEGSNEDLMKDLAA

SEQ ID NO: 39279 - protein, 219 aa, Arabidopsis thaliana
  peptide (1)..(219): Ceres Seq. ID no. 12325699
  misc_feature (11)..(200): Pfam Name: Ribosomal protein S2 Pfam Description: Ribosomal protein S2
  misc_feature (1)..(194): Homolog of NCBI NO: 40795002 NR Description: ribosomal protein S2 [Zea mays]
  misc_feature (112)..(197): Homolog of NCBI NO: 11467163 NR Description: rps2 [Marchantia polymorpha]
  misc_feature (7)..(120): Homolog of NCBI NO: 11467163 NR Description: rps2 [Marchantia polymorpha]
  misc_feature (1)..(200): Homolog of NCBI NO: 7489611 NR Description: hypothetical protein 483 - rice mitochondrion
  misc_feature (1)..(206): Homolog of NCBI NO: 40795007 NR Description: ribosomal protein S2 [Zea mays]
  misc_feature (1)..(194): Homolog of NCBI NO: 9944889 NR Description: ribosomal protein S2 [Zea mays]
  misc_feature (1)..(206): Homolog of NCBI NO: 9944891 NR Description: ribosomal protein S2 [Zea mays]
  misc_feature (1)..(200): Homolog of NCBI NO: 7440113 NR Description: ribosomal protein S2 homolog - wheat
  misc_feature (1)..(219): Homolog of NCBI NO: 15228593 NR Description: putative ribosomal protein S2
  misc_feature (1)..(219): Homolog of NCBI NO: 21536611 NR Description: putative ribosomal protein S2 [Arabidopsis
MTIHAAVIQKLLNTGAHLGRRAAEHHFKQYAYGTRNGMTIIDSDKTLICLRSAAHFVANLAHMRGNIFFVNTNPLFDEIIELTSRRIQGDSYNHNRAINLWKMGGFLTNSYSPKKFRSRHKKLCFGPTTMPDCVVVFDSERKSSVILEASKLQIPVVAIVDPNVPLEFFEKITYPVPARDSVKFVYLFCNVITKCFVAEQMKLGIKEGSNEDLMKDLAA

SEQ ID NO: 39280 - protein, 182 aa, Arabidopsis thaliana
  peptide (1)..(182): Ceres Seq. ID no. 12325700
  misc_feature (1)..(163): Pfam Name: Ribosomal protein S2 Pfam Description: Ribosomal protein S2
  misc_feature (1)..(157): Homolog of NCBI NO: 40795002 NR Description: ribosomal protein S2 [Zea mays]
  misc_feature (75)..(160): Homolog of NCBI NO: 11467163 NR Description: rps2 [Marchantia polymorpha]
  misc_feature (1)..(83): Homolog of NCBI NO: 11467163 NR Description: rps2 [Marchantia polymorpha]
  misc_feature (1)..(163): Homolog of NCBI NO: 7489611 NR Description: hypothetical protein 483 - rice mitochondrion
  misc_feature (1)..(169): Homolog of NCBI NO: 40795007 NR Description: ribosomal protein S2 [Zea mays]
  misc_feature (1)..(157): Homolog of NCBI NO: 9944889 NR Description: ribosomal protein S2 [Zea mays]
  misc_feature (1)..(169): Homolog of NCBI NO: 9944891 NR Description: ribosomal protein S2 [Zea mays]
  misc_feature (1)..(163): Homolog of NCBI NO: 7440113 NR Description: ribosomal protein S2 homolog - wheat
  misc_feature (1)..(182): Homolog of NCBI NO: 15228593 NR Description: putative ribosomal protein S2
  misc_feature (1)..(182): Homolog of NCBI NO: 21536611 NR Description: putative ribosomal protein S2 [Arabidopsis
MTIIDSDKTLICLRSAAHFVANLAHMRGNIFFVNTNPLFDEIIELTSRRIQGDSYNHNRAINLWKMGGFLTNSYSPKKFRSRHKKLCFGPTTMPDCVVVFDSERKSSVILEASKLQIPVVAIVDPNVPLEFFEKITYPVPARDSVKFVYLFCNVITKCFVAEQMKLGIKEGSNEDLMKDLAA

SEQ ID NO: 39281 - DNA, 1870 bp, Arabidopsis thaliana
  misc_feature (1)..(1870): Ceres Seq. ID no. 12328820
  misc_feature: MA Experiment ID: 108434 Result: Up-regulated in Transcription
  misc_feature: MA Experiment 108434 PARAMETER Experiment Name: At_Root_Tips_cDNA_P Parameter: Tissue Value: Root Tips
  misc_feature: MA Experiment ID: 108461 Result: Up-regulated in Transcription
  misc_feature: MA Experiment 108461 PARAMETER Experiment Name: At_Germinating_Seeds_cDNA_P Parameter: Age (day) Value: 1 vs. 0
  misc_feature: MA Experiment 108461 PARAMETER Experiment Name: At_Germinating_Seeds_cDNA_P Parameter: Tissue Value: Germinating Seeds
  misc_feature: MA Experiment ID: 108462 Result: Up-regulated in Transcription
  misc_feature: MA Experiment 108462 PARAMETER Experiment Name: At_Germinating_Seeds_cDNA_P Parameter: Age (day) Value: 2 vs. 0
  misc_feature: MA Experiment 108462 PARAMETER Experiment Name: At_Germinating_Seeds_cDNA_P Parameter: Tissue Value: Germinating Seeds
  misc_feature: MA Experiment ID: 108463 Result: Up-regulated in Transcription
  misc_feature: MA Experiment 108463 PARAMETER Experiment Name: At_Germinating_Seeds_cDNA_P Parameter: Age (day) Value: 3 vs. 0
  misc_feature: MA Experiment 108463 PARAMETER Experiment Name: At_Germinating_Seeds_cDNA_P Parameter: Tissue Value: Germinating Seeds
  misc_feature: MA Experiment ID: 108464 Result: Up-regulated in Transcription
  misc_feature: MA Experiment 108464 PARAMETER Experiment Name: At_Germinating_Seeds_cDNA_P Parameter: Age (day) Value: 4 vs. 0
  misc_feature: MA Experiment 108464 PARAMETER Experiment Name: At_Germinating_Seeds_cDNA_P Parameter: Tissue Value: Germinating Seeds
  misc_feature: MA Experiment ID: 108577 Result: Down-regulated in Transcription
  misc_feature: MA Experiment 108577 PARAMETER Experiment Name: At_42deg_Heat_cDNA_P Parameter: Temperature (deg C) Value: 42 vs. 22
  misc_feature: MA Experiment 108577 PARAMETER Experiment Name: At_42deg_Heat_cDNA_P Parameter: Timepoint (hr) Value: 6
  misc_feature: MA Experiment 108577 PARAMETER Experiment Name: At_42deg_Heat_cDNA_P Parameter: Tissue Value: Aerial
  misc_feature: MA Experiment ID: 20000069 Result: Down-regulated in Transcription
  misc_feature: MA Experiment 20000069 PARAMETER Experiment Name: At_100uM_ABA_Mutants_cDNA_P Parameter: Plant Line Value: CS23
  misc_feature: MA Experiment 20000069 PARAMETER Experiment Name: At_100uM_ABA_Mutants_cDNA_P Parameter: Timepoint (hr) Value: 6
  misc_feature: MA Experiment 20000069 PARAMETER Experiment Name: At_100uM_ABA_Mutants_cDNA_P Parameter: Tissue Value: Aerial
  misc_feature: MA Experiment 20000069 PARAMETER Experiment Name: At_100uM_ABA_Mutants_cDNA_P Parameter: Treatment Value: 100uM ABA vs. No Treatment
  misc_feature: MA Experiment ID: 20000087 Result: Down-regulated in Transcription
  misc_feature: MA Experiment 20000087 PARAMETER Experiment Name: At_100uM_ABA_Mutants_cDNA_P Parameter: Plant Line Value: WS
  misc_feature: MA Experiment 20000087 PARAMETER Experiment Name: At_100uM_ABA_Mutants_cDNA_P Parameter: Timepoint (hr) Value: 6
  misc_feature: MA Experiment 20000087 PARAMETER Experiment Name: At_100uM_ABA_Mutants_cDNA_P Parameter: Tissue Value: Aerial
  misc_feature: MA Experiment 20000087 PARAMETER Experiment Name: At_100uM_ABA_Mutants_cDNA_P Parameter: Treatment Value: 100uM ABA vs. No Treatment
  misc_feature: MA Experiment ID: 20000113 Result: Down-regulated in Transcription
  misc_feature: MA Experiment 20000113 PARAMETER Experiment Name: At_42deg_Heat_cDNA_P Parameter: Temperature (deg C) Value: 42 vs. 22
  misc_feature: MA Experiment 20000113 PARAMETER Experiment Name: At_42deg_Heat_cDNA_P Parameter: Timepoint (hr) Value: 8
  misc_feature: MA Experiment 20000113 PARAMETER Experiment Name: At_42deg_Heat_cDNA_P Parameter: Tissue Value: Aerial
  misc_feature: MA Experiment ID: 20000173 Result: Down-regulated in Transcription
  misc_feature: MA Experiment 20000173 PARAMETER Experiment Name: At_42deg_Heat_P Parameter: Age (day) Value: 14
  misc_feature: MA Experiment 20000173 PARAMETER Experiment Name: At_42deg_Heat_P Parameter: Organism Value: A. thaliana
  misc_feature: MA Experiment 20000173 PARAMETER Experiment Name: At_42deg_Heat_P Parameter: Plant Line Value: WS
  misc_feature: MA Experiment 20000173 PARAMETER Experiment Name: At_42deg_Heat_P Parameter: Temperature (deg C) Value: 42 vs. 22
  misc_feature: MA Experiment 20000173 PARAMETER Experiment Name: At_42deg_Heat_P Parameter: Timepoint (hr) Value: 6
  misc_feature: MA Experiment 20000173 PARAMETER Experiment Name: At_42deg_Heat_P Parameter: Tissue Value: Aerial
  misc_feature: MA Experiment ID: 20000179 Result: Up-regulated in Transcription
  misc_feature: MA Experiment 20000179 PARAMETER Experiment Name: At_Germinating_Seeds_P Parameter: Age (hr) Value: 6 vs. 0
  misc_feature: MA Experiment 20000179 PARAMETER Experiment Name: At_Germinating_Seeds_P Parameter: Tissue Value: Germinating Seeds
  misc_feature: MA Experiment ID: 20000185 Result: Up-regulated in Transcription
  misc_feature: MA Experiment 20000185 PARAMETER Experiment Name: At_Roots__P Parameter: Age (day) Value: 7 vs. 21
  misc_feature: MA Experiment 20000185 PARAMETER Experiment Name: At_Roots__P Parameter: Organism Value: A. thaliana
  misc_feature: MA Experiment 20000185 PARAMETER Experiment Name: At_Roots__P Parameter: Tissue Value: Roots vs. Whole Plant
  misc_feature: MA Experiment ID: 20000227 Result: Up-regulated in Transcription
  misc_feature: MA Experiment 20000227 PARAMETER Experiment Name: At_Root-Tips-vs-Tops_P Parameter: Tissue Value: Root Tips vs. Root Tops
  misc_feature: MA Experiment ID: 20000264 Result: Up-regulated in Transcription
  misc_feature: MA Experiment 20000264 PARAMETER Experiment Name: At_Open_Flower_P Parameter: Age (day) Value: 21
  misc_feature: MA Experiment 20000264 PARAMETER Experiment Name: At_Open_Flower_P Parameter: Plant Line Value: WS
  misc_feature: MA Experiment 20000264 PARAMETER Experiment Name: At_Open_Flower_P Parameter: Tissue Value: Open Flower vs. Whole Plant
  misc_feature: MA Experiment ID: 20000286 Result: Up-regulated in Transcription
  misc_feature: MA Experiment 20000286 PARAMETER Experiment Name: At_Open_Flower_P Parameter: Age (day) Value: 21
  misc_feature: MA Experiment 20000286 PARAMETER Experiment Name: At_Open_Flower_P Parameter: Plant Line Value: WS
  misc_feature: MA Experiment 20000286 PARAMETER Experiment Name: At_Open_Flower_P Parameter: Tissue Value: Half Open vs. Whole Plant
  misc_feature: MA Experiment ID: 20000438 Result: Up-regulated in Transcription
  misc_feature: MA Experiment 20000438 PARAMETER Experiment Name: At_Shoots__P Parameter: Age (day) Value: 14
  misc_feature: MA Experiment 20000438 PARAMETER Experiment Name: At_Shoots__P Parameter: Tissue Value: Shoots vs. Whole Plant
  misc_feature: MA Experiment ID: 20000439 Result: Up-regulated in Transcription
  misc_feature: MA Experiment 20000439 PARAMETER Experiment Name: At_Roots__P Parameter: Age (day) Value: 14 vs. 21
  misc_feature: MA Experiment 20000439 PARAMETER Experiment Name: At_Roots__P Parameter: Organism Value: A. thaliana
  misc_feature: MA Experiment 20000439 PARAMETER Experiment Name: At_Roots__P Parameter: Tissue Value: Roots vs. Whole Plant
  misc_feature: MA Experiment ID: 20000573 Result: Down-regulated in Transcription
  misc_feature: MA Experiment 20000573 PARAMETER Experiment Name: At_100uM_ABA_Mutants__P Parameter: Organism Value: A. thaliana
  misc_feature: MA Experiment 20000573 PARAMETER Experiment Name: At_100uM_ABA_Mutants__P Parameter: Plant Line Value: CS22 vs. Ler wt
  misc_feature: MA Experiment 20000573 PARAMETER Experiment Name: At_100uM_ABA_Mutants__P Parameter: Timepoint (hr) Value: N/A
  misc_feature: MA Experiment 20000573 PARAMETER Experiment Name: At_100uM_ABA_Mutants__P Parameter: Tissue Value: Whole Plant
  misc_feature: MA Experiment 20000573 PARAMETER Experiment Name: At_100uM_ABA_Mutants__P Parameter: Treatment Value: None
  misc_feature: MA Experiment ID: 20000574 Result: Down-regulated in Transcription
  misc_feature: MA Experiment 20000574 PARAMETER Experiment Name: At_100uM_ABA_Mutants__P Parameter: Organism Value: A. thaliana
  misc_feature: MA Experiment 20000574 PARAMETER Experiment Name: At_100uM_ABA_Mutants__P Parameter: Plant Line Value: CS23 vs. Ler wt
  misc_feature: MA Experiment 20000574 PARAMETER Experiment Name: At_100uM_ABA_Mutants__P Parameter: Timepoint (hr) Value: N/A
  misc_feature: MA Experiment 20000574 PARAMETER Experiment Name: At_100uM_ABA_Mutants__P Parameter: Tissue Value: Whole Plant
  misc_feature: MA Experiment 20000574 PARAMETER Experiment Name: At_100uM_ABA_Mutants__P Parameter: Treatment Value: None
  misc_feature: MA Experiment ID: 20000794 Result: Up-regulated in Transcription
  misc_feature: MA Experiment 20000794 PARAMETER Experiment Name: At_Petals_P Parameter: Age (day) Value: 23-25 days
  misc_feature: MA Experiment 20000794 PARAMETER Experiment Name: At_Petals_P Parameter: Plant Line Value: WS
  misc_feature: MA Experiment 20000794 PARAMETER Experiment Name: At_Petals_P Parameter: Tissue Value: Petals vs. Whole plant
  misc_feature: MA Experiment ID: 20001557 Result: Down-regulated in Transcription
  misc_feature: MA Experiment 20001557 PARAMETER Experiment Name: At_Drought_Soil_Dry_P Parameter: Age (day) Value: 27
  misc_feature: MA Experiment 20001557 PARAMETER Experiment Name: At_Drought_Soil_Dry_P Parameter: Organism Value: A. thaliana
  misc_feature: MA Experiment 20001557 PARAMETER Experiment Name: At_Drought_Soil_Dry_P Parameter: Plant Line Value: WS
  misc_feature: MA Experiment 20001557 PARAMETER Experiment Name: At_Drought_Soil_Dry_P Parameter: Post Timepoint (hr) Value: 3
  misc_feature: MA Experiment 20001557 PARAMETER Experiment Name: At_Drought_Soil_Dry_P Parameter: Post-Treatment Value: Re-Water vs. No Drought
  misc_feature: MA Experiment 20001557 PARAMETER Experiment Name: At_Drought_Soil_Dry_P Parameter: Timepoint (day) Value: 13
  misc_feature: MA Experiment 20001557 PARAMETER Experiment Name: At_Drought_Soil_Dry_P Parameter: Treatment Value: Drought vs. No Drought
  misc_feature: MA Experiment ID: 20001911 Result: Down-regulated in Transcription
  misc_feature: MA Experiment 20001911 PARAMETER Experiment Name: At_Drought_Reproduction_P Parameter: Age (day) Value: 40
  misc_feature: MA Experiment 20001911 PARAMETER Experiment Name: At_Drought_Reproduction_P Parameter: Organism Value: A. thaliana
  misc_feature: MA Experiment 20001911 PARAMETER Experiment Name: At_Drought_Reproduction_P Parameter: Plant Line Value: WS
  misc_feature: MA Experiment 20001911 PARAMETER Experiment Name: At_Drought_Reproduction_P Parameter: Timepoint (day) Value: 10
  misc_feature: MA Experiment 20001911 PARAMETER Experiment Name: At_Drought_Reproduction_P Parameter: Tissue Value: Flowers
  misc_feature: MA Experiment 20001911 PARAMETER Experiment Name: At_Drought_Reproduction_P Parameter: Treatment Value: Drought vs. No Drought
ataaactttataagaaaaataaatacatattctctttctcttccatcaagcaaagcttttcaaaaagaatcaaacttttcgaatctttttgcttctcgagatcttttcatagagagagagataaagaatgggtttttatgaaggagcctctgttcatccaagaactccagaaaacaaaaacacagtgaatattccgatactcacttcttcttcttcatcatcagatcttgacggagataacaatgacaacaacaacaatacaggaatcaaaacccttttgaaaagaatgatctttgatttgggtttcgcttgtttccttcctcctttaagctcaaccgaaaactccggcaacaacaatggaggaggaacaagcggcggcggaggaggaggaggaggaggaggagagaataacaaagcttggctattggcggaaacagcaccggagaatatgaatcctgatcctcattcagttcattcatcgtttagattcagtctttgttcacaaatcgagcttgagaaaatgaaaggtgaagaaccgtccttgtctgcttcgtcttcttgtcggaatttgtcggtttctggtggttccacgacggttttgatggttaatttggagaatggtgttaaggagactactgggaatgcgactgatgatttgcggtggactagagctaggtcgcttgagaagagtatttctccggtggctaatactttggttcgttttagctacggtgagattgtggcagctactcgtaatttctctaaagggagagtgttgggaagaggagcttgtagctatgtgtttagaggcaaaatcggaatgtggagaacggctttagcaatcaagagacttgataaggaagacaaagaatctcctaaatctttttgtagagagttgatgattgcaagctctcttcatagctccaacattgtacctcttcttggattctgtattgatcctgaagaagggttattcttggtttacaagtatgtctctggtggtagcctcgaacattatttacacgataagaagaagaagaaaggcgtaaaagccgcttttggtttgccttggtcagcaaggtacaaggtagcgttaggtatagcagatgccatagcttatttgcataatggaacagagcaatgtgttgttcacagagatatcaaaccttccaatattcttctttcatcaaagaaaataccaaagttgtgtgattttgggttagctacttggaccgctgcaccttcggttcctttcctctgcaagaccgtgaaaggcacattcggctatctggctcctgagtatttccagcatggtaagatatctgacaagaccgatgtttacgccttcggggttgtgttgcttgagctaataactggccggaaaccaatcgaagcaagaagagcatctggtcaagaaaatctggttgtttgggcgaaaccgttgttggatagagggatagaagctatagtggagctgcttgatccaaggctaaaatgcacaagaaaaaactcggttcaaatggagcggatgatccgtgctgcagcggcgtgtgtgatcaatgaggagtcccgaagacccggtatggaagagattgtctcaatcttgaaaggcgaagaaggtgtagagccagaaacacattcaagcaggaaaactacaaatatttcgggtatgattgactcttatacacaattgcaacaaaccaaatccgagatgaaatgtcatcttgatcttgcgatgctcggagtaaccgagtttgaagatgatgatcatgtgtacggccgataaaagattctaagaaatggatttataagtgtgtaaataggtatttatgaaaagtttgaaacagagttcttagtttctgaattagtg

SEQ ID NO: 39282 - protein, 552 aa, Arabidopsis thaliana
  peptide (1)..(552): Ceres Seq. ID no. 12328821
  misc_feature (176)..(546): Homolog of NCBI NO: 28376688 NR Description: putative serine/threonine kinase
  misc_feature (193)..(546): Homolog of NCBI NO: 15237563 NR Description: putative protein
  misc_feature (199)..(546): Homolog of NCBI NO: 22329713 NR Description: hypothetical protein
  misc_feature (434)..(546): Homolog of NCBI NO: 15223890 NR Description: hypothetical protein; protein id: At1g77280.1
  misc_feature (199)..(435): Homolog of NCBI NO: 15223890 NR Description: hypothetical protein; protein id: At1g77280.1
  misc_feature (1)..(217): Homolog of NCBI NO: 10177168 NR Description: gene_id:K22F20.5~unknown protein [Arabidopsis
  misc_feature (232)..(303): Homolog of NCBI NO: 10177167 NR Description: Ser/Thr protein kinase-like protein [Arabidopsis
  misc_feature (317)..(552): Homolog of NCBI NO: 10177167 NR Description: Ser/Thr protein kinase-like protein [Arabidopsis
  misc_feature (93)..(547): Homolog of NCBI NO: 15219657 NR Description: protein kinase, putative; protein id: At1g66460.1
  misc_feature (1)..(552): Homolog of NCBI NO: 15240345 NR Description: protein kinase - like protein
MGFYEGASVHPRTPENKNTVNIPILTSSSSSSDLDGDNNDNNNNTGIKTLLKRMIFDLGFACFLPPLSSTENSGNNNGGGTSGGGGGGGGGGENNKAWLLAETAPENMNPDPHSVHSSFRFSLCSQIELEKMKGEEPSLSASSSCRNLSVSGGSTTVLMVNLENGVKETTGNATDDLRWTRARSLEKSISPVANTLVRFSYGEIVAATRNFSKGRVLGRGACSYVFRGKIGMWRTALAIKRLDKEDKESPKSFCRELMIASSLHSSNIVPLLGFCIDPEEGLFLVYKYVSGGSLEHYLHDKKKKKGVKAAFGLPWSARYKVALGIADAIAYLHNGTEQCVVHRDIKPSNILLSSKKIPKLCDFGLATWTAAPSVPFLCKTVKGTFGYLAPEYFQHGKISDKTDVYAFGVVLLELITGRKPIEARRASGQENLVVWAKPLLDRGIEAIVELLDPRLKCTRKNSVQMERMIRAAAACVINEESRRPGMEEIVSILKGEEGVEPETHSSRKTTNISGMIDSYTQLQQTKSEMKCHLDLAMLGVTEFEDDDHVYGR

SEQ ID NO: 39283 - protein, 499 aa, Arabidopsis thaliana
  peptide (1)..(499): Ceres Seq. ID no. 12328822
  misc_feature (123)..(493): Homolog of NCBI NO: 28376688 NR Description: putative serine/threonine kinase
  misc_feature (140)..(493): Homolog of NCBI NO: 15237563 NR Description: putative protein
  misc_feature (146)..(493): Homolog of NCBI NO: 22329713 NR Description: hypothetical protein
  misc_feature (381)..(493): Homolog of NCBI NO: 15223890 NR Description: hypothetical protein; protein id: At1g77280.1
  misc_feature (146)..(382): Homolog of NCBI NO: 15223890 NR Description: hypothetical protein; protein id: At1g77280.1
  misc_feature (1)..(164): Homolog of NCBI NO: 10177168 NR Description: gene_id:K22F20.5~unknown protein [Arabidopsis
  misc_feature (179)..(250): Homolog of NCBI NO: 10177167 NR Description: Ser/Thr protein kinase-like protein [Arabidopsis
  misc_feature (264)..(499): Homolog of NCBI NO: 10177167 NR Description: Ser/Thr protein kinase-like protein [Arabidopsis
  misc_feature (40)..(494): Homolog of NCBI NO: 15219657 NR Description: protein kinase, putative; protein id: At1g66460.1
  misc_feature (1)..(499): Homolog of NCBI NO: 15240345 NR Description: protein kinase - like protein
MIFDLGFACFLPPLSSTENSGNNNGGGTSGGGGGGGGGGENNKAWLLAETAPENMNPDPHSVHSSFRFSLCSQIELEKMKGEEPSLSASSSCRNLSVSGGSTTVLMVNLENGVKETTGNATDDLRWTRARSLEKSISPVANTLVRFSYGEIVAATRNFSKGRVLGRGACSYVFRGKIGMWRTALAIKRLDKEDKESPKSFCRELMIASSLHSSNIVPLLGFCIDPEEGLFLVYKYVSGGSLEHYLHDKKKKKGVKAAFGLPWSARYKVALGIADAIAYLHNGTEQCVVHRDIKPSNILLSSKKIPKLCDFGLATWTAAPSVPFLCKTVKGTFGYLAPEYFQHGKISDKTDVYAFGVVLLELITGRKPIEARRASGQENLVVWAKPLLDRGIEAIVELLDPRLKCTRKNSVQMERMIRAAAACVINEESRRPGMEEIVSILKGEEGVEPETHSSRKTTNISGMIDSYTQLQQTKSEMKCHLDLAMLGVTEFEDDDHVYGR

SEQ ID NO: 39284 - protein, 445 aa, Arabidopsis thaliana
  peptide (1)..(445): Ceres Seq. ID no. 12328823
  misc_feature (69)..(439): Homolog of NCBI NO: 28376688 NR Description: putative serine/threonine kinase
  misc_feature (86)..(439): Homolog of NCBI NO: 15237563 NR Description: putative protein
  misc_feature (92)..(439): Homolog of NCBI NO: 22329713 NR Description: hypothetical protein
  misc_feature (327)..(439): Homolog of NCBI NO: 15223890 NR Description: hypothetical protein; protein id: At1g77280.1
  misc_feature (92)..(328): Homolog of NCBI NO: 15223890 NR Description: hypothetical protein; protein id: At1g77280.1
  misc_feature (1)..(110): Homolog of NCBI NO: 10177168 NR Description: gene_id:K22F20.5~unknown protein [Arabidopsis
  misc_feature (125)..(196): Homolog of NCBI NO: 10177167 NR Description: Ser/Thr protein kinase-like protein [Arabidopsis
  misc_feature (210)..(445): Homolog of NCBI NO: 10177167 NR Description: Ser/Thr protein kinase-like protein [Arabidopsis
  misc_feature (1)..(440): Homolog of NCBI NO: 15219657 NR Description: protein kinase, putative; protein id: At1g66460.1
  misc_feature (1)..(445): Homolog of NCBI NO: 15240345 NR Description: protein kinase - like protein
MNPDPHSVHSSFRFSLCSQIELEKMKGEEPSLSASSSCRNLSVSGGSTTVLMVNLENGVKETTGNATDDLRWTRARSLEKSISPVANTLVRFSYGEIVAATRNFSKGRVLGRGACSYVFRGKIGMWRTALAIKRLDKEDKESPKSFCRELMIASSLHSSNIVPLLGFCIDPEEGLFLVYKYVSGGSLEHYLHDKKKKKGVKAAFGLPWSARYKVALGIADAIAYLHNGTEQCVVHRDIKPSNILLSSKKIPKLCDFGLATWTAAPSVPFLCKTVKGTFGYLAPEYFQHGKISDKTDVYAFGVVLLELITGRKPIEARRASGQENLVVWAKPLLDRGIEAIVELLDPRLKCTRKNSVQMERMIRAAAACVINEESRRPGMEEIVSILKGEEGVEPETHSSRKTTNISGMIDSYTQLQQTKSEMKCHLDLAMLGVTEFEDDDHVYGR

SEQ ID NO: 39285 - DNA, 1724 bp, Arabidopsis thaliana
  misc_feature (1)..(1724): Ceres Seq. ID no. 13592997
  misc_feature: MA Experiment ID: 108576 Result: Down-regulated in Transcription
  misc_feature: MA Experiment 108576 PARAMETER Experiment Name: At_42deg_Heat_cDNA_P Parameter: Temperature (deg C) Value: 42 vs. 22
  misc_feature: MA Experiment 108576 PARAMETER Experiment Name: At_42deg_Heat_cDNA_P Parameter: Timepoint (hr) Value: 1
  misc_feature: MA Experiment 108576 PARAMETER Experiment Name: At_42deg_Heat_cDNA_P Parameter: Tissue Value: Aerial
  misc_feature: MA Experiment ID: 108577 Result: Down-regulated in Transcription
  misc_feature: MA Experiment 108577 PARAMETER Experiment Name: At_42deg_Heat_cDNA_P Parameter: Temperature (deg C) Value: 42 vs. 22
  misc_feature: MA Experiment 108577 PARAMETER Experiment Name: At_42deg_Heat_cDNA_P Parameter: Timepoint (hr) Value: 6
  misc_feature: MA Experiment 108577 PARAMETER Experiment Name: At_42deg_Heat_cDNA_P Parameter: Tissue Value: Aerial
  misc_feature: MA Experiment ID: 20000112 Result: Down-regulated in Transcription
  misc_feature: MA Experiment 20000112 PARAMETER Experiment Name: At_42deg_Heat_cDNA_P Parameter: Temperature (deg C) Value: 42 vs. 22
  misc_feature: MA Experiment 20000112 PARAMETER Experiment Name: At_42deg_Heat_cDNA_P Parameter: Timepoint (hr) Value: 2
  misc_feature: MA Experiment 20000112 PARAMETER Experiment Name: At_42deg_Heat_cDNA_P Parameter: Tissue Value: Aerial
  misc_feature: MA Experiment ID: 20000113 Result: Down-regulated in Transcription
  misc_feature: MA Experiment 20000113 PARAMETER Experiment Name: At_42deg_Heat_cDNA_P Parameter: Temperature (deg C) Value: 42 vs. 22
  misc_feature: MA Experiment 20000113 PARAMETER Experiment Name: At_42deg_Heat_cDNA_P Parameter: Timepoint (hr) Value: 8
  misc_feature: MA Experiment 20000113 PARAMETER Experiment Name: At_42deg_Heat_cDNA_P Parameter: Tissue Value: Aerial
  misc_feature: MA Experiment ID: 20001557 Result: Up-regulated in Transcription
  misc_feature: MA Experiment 20001557 PARAMETER Experiment Name: At_Drought_Soil_Dry_P Parameter: Age (day) Value: 27
  misc_feature: MA Experiment 20001557 PARAMETER Experiment Name: At_Drought_Soil_Dry_P Parameter: Organism Value: A. thaliana
  misc_feature: MA Experiment 20001557 PARAMETER Experiment Name: At_Drought_Soil_Dry_P Parameter: Plant Line Value: WS
  misc_feature: MA Experiment 20001557 PARAMETER Experiment Name: At_Drought_Soil_Dry_P Parameter: Post Timepoint (hr) Value: 3
  misc_feature: MA Experiment 20001557 PARAMETER Experiment Name: At_Drought_Soil_Dry_P Parameter: Post-Treatment Value: Re-Water vs. No Drought
  misc_feature: MA Experiment 20001557 PARAMETER Experiment Name: At_Drought_Soil_Dry_P Parameter: Timepoint (day) Value: 13
  misc_feature: MA Experiment 20001557 PARAMETER Experiment Name: At_Drought_Soil_Dry_P Parameter: Treatment Value: Drought vs. No Drought
agagttcacgagcttccgagtcaaaaacactctaaaacaaaaccatgactttgttccatagactcgatctcatcgatccgtacacgtgtacaccactcatcgtccgtgaaacctccattgttgaaccttcatcattgttcctagggtttccttccttcatcgacgaagacattgaagatctcttcgagttttcatcacctaatcctctcgatctattcgaaaccgtgacggatctggttaagattaagaaatctccgtcgtcttgcaagtacaaggtgattcgtcggagattagagccggagtatccattgaagtatctttgtgaccgtgtttctgatttggaatcaaagtttgatagattggttagtcctaagagtgataggaagtatacattgacgaaggagataaagggaagtggtgagaggaagtataaatgggaggcggagattcaaggaccgttggagaggaagtataagttggaagctgagattgaaggttcgggagagaggaagtatagatggacgacggagattaaaggagggaagaaggatgaggaagggttaaagttagctgctttgaagaaggagaaggcgaaagctaaagctattgctgctgctgaagcggagaagaagaagaataagaataagaagaagagttataattggacgacggaggtgaagagtgagagagagaatggtgaggtttcgcatacttatatcatcaaggctactactggaggagagaaaaagaagaaacatgaggagaaggagaagaaagagaagatagagactaagagcaagaagaaggagaaaactcgtgttgtggtgattgaggaggaggaagaagaagatgatgagtcgtcagaacatggtgctatcgttcttaggaaggcgttttccagaaggaatggagcagttaggaccaagaaggggaagaacaaggaaatgccacctgaatatgcggctgtgatgatccagagggccttcaaagcttatttgattcgtcgctcaaaatcattgcgtgctcttcgtgatcttgctattgcaaagactaaacttaaggagctaagagcttctttccacaacttcagctaccgtcgcctgattgctcgtgatggagaggagcgtcagaaattctcagagaagatcattgtactcctcctcactgttgacgccatagagggagttgatgtgatggttcgaggagcgaagagatcaatggtggatgagctggaagcaatgttagatgtggtagacccgcaaccgcaggggaaatcattgtcgatgagaagaagaacatttgatatgccagacagtttgatccgcaaagaaatcgcagagggagtgactcagattgtgcagatgcttgaaacggaagaagaatgatggaatggagcactgtgtgtttgtgactcaggggctgtttttgttgttgtttgtgactgggaagaactgatcagcctctttagtttgattagtgttctgaatgtttctaattatgcagacaaaattaataatgagagtggcttgaagaagagattggtgtctcgctcgcatcagtctcatctctcaaatcttgtctcttcttagtctgtttctgtttgtcaggttatgtaatccctttgtgttcccaaacttgtagactctgttttgtcaaattgcttatgtttttggttttgcttatttctactccatcatgaattagaaattgattataaagtttgc

SEQ ID NO: 39286 - protein, 446 aa, Arabidopsis thaliana
  peptide (1)..(446): Ceres Seq. ID no. 13592998
  misc_feature (83)..(340): Pfam Name: Caldesmon Pfam Description: Caldesmon
  misc_feature (83)..(340): Pfam Name: Caldesmon Pfam Description: Caldesmon
  misc_feature (83)..(446): Homolog of NCBI NO: 34897716 NR Description: ESTs AU082316(E3368),D41461(S3973) correspond to
  misc_feature (83)..(446): Homolog of NCBI NO: 34897716 NR Description: ESTs AU082316(E3368),D41461(S3973) correspond to
  misc_feature (1)..(446): Homolog of NCBI NO: 15241803 NR Description: calmodulin-binding protein family [Arabidopsis
  misc_feature (1)..(446): Homolog of NCBI NO: 15241803 NR Description: calmodulin-binding protein family [Arabidopsis
MTLFHRLDLIDPYTCTPLIVRETSIVEPSSLFLGFPSFIDEDIEDLFEFSSPNPLDLFETVTDLVKIKKSPSSCKYKVIRRRLEPEYPLKYLCDRVSDLESKFDRLVSPKSDRKYTLTKEIKGSGERKYKWEAEIQGPLERKYKLEAEIEGSGERKYRWTTEIKGGKKDEEGLKLAALKKEKAKAKAIAAAEAEKKKNKNKKKSYNWTTEVKSERENGEVSHTYIIKATTGGEKKKKHEEKEKKEKIETKSKKKEKTRVVVIEEEEEEDDESSEHGAIVLRKAFSRRNGAVRTKKGKNKEMPPEYAAVMIQRAFKAYLIRRSKSLRALRDLAIAKTKLKELRASFHNFSYRRLIARDGEERQKFSEKIIVLLLTVDAIEGVDVMVRGAKRSMVDELEAMLDVVDPQPQGKSLSMRRRTFDMPDSLIRKEIAEGVTQIVQMLETEEE

SEQ ID NO: 39287 - DNA, 1331 bp, Arabidopsis thaliana
  misc_feature (1)..(1331): Ceres Seq. ID no. 12579649
  misc_feature: MA Experiment ID: 108434 Result: Up-regulated in Transcription
  misc_feature: MA Experiment 108434 PARAMETER Experiment Name: At_Root_Tips_cDNA_P Parameter: Tissue Value: Root Tips
  misc_feature: MA Experiment ID: 108461 Result: Up-regulated in Transcription
  misc_feature: MA Experiment 108461 PARAMETER Experiment Name: At_Germinating_Seeds_cDNA_P Parameter: Age (day) Value: 1 vs. 0
  misc_feature: MA Experiment 108461 PARAMETER Experiment Name: At_Germinating_Seeds_cDNA_P Parameter: Tissue Value: Germinating Seeds
  misc_feature: MA Experiment ID: 20000171 Result: Up-regulated in Transcription
  misc_feature: MA Experiment 20000171 PARAMETER Experiment Name: At_42deg_Heat_P Parameter: Age (day) Value: 14
  misc_feature: MA Experiment 20000171 PARAMETER Experiment Name: At_42deg_Heat_P Parameter: Organism Value: A. thaliana
  misc_feature: MA Experiment 20000171 PARAMETER Experiment Name: At_42deg_Heat_P Parameter: Plant Line Value: WS
  misc_feature: MA Experiment 20000171 PARAMETER Experiment Name: At_42deg_Heat_P Parameter: Temperature (deg C) Value: 42 vs. 22
  misc_feature: MA Experiment 20000171 PARAMETER Experiment Name: At_42deg_Heat_P Parameter: Timepoint (hr) Value: 1
  misc_feature: MA Experiment 20000171 PARAMETER Experiment Name: At_42deg_Heat_P Parameter: Tissue Value: Aerial
  misc_feature: MA Experiment ID: 20000180 Result: Up-regulated in Transcription
  misc_feature: MA Experiment 20000180 PARAMETER Experiment Name: At_Germinating_Seeds_P Parameter: Age (hr) Value: 24 vs. 0
  misc_feature: MA Experiment 20000180 PARAMETER Experiment Name: At_Germinating_Seeds_P Parameter: Tissue Value: Germinating Seeds
  misc_feature: MA Experiment ID: 20000185 Result: Up-regulated in Transcription
  misc_feature: MA Experiment 20000185 PARAMETER Experiment Name: At_Roots__P Parameter: Age (day) Value: 7 vs. 21
  misc_feature: MA Experiment 20000185 PARAMETER Experiment Name: At_Roots__P Parameter: Organism Value: A. thaliana
  misc_feature: MA Experiment 20000185 PARAMETER Experiment Name: At_Roots__P Parameter: Tissue Value: Roots vs. Whole Plant
  misc_feature: MA Experiment ID: 20000227 Result: Up-regulated in Transcription
  misc_feature: MA Experiment 20000227 PARAMETER Experiment Name: At_Root-Tips-vs-Tops_P Parameter: Tissue Value: Root Tips vs. Root Tops
  misc_feature: MA Experiment ID: 20000234 Result: Up-regulated in Transcription
  misc_feature: MA Experiment 20000234 PARAMETER Experiment Name: At_Siliques_P Parameter: Age (day) Value: 21
  misc_feature: MA Experiment 20000234 PARAMETER Experiment Name: At_Siliques_P Parameter: Organism Value: A. thaliana
  misc_feature: MA Experiment 20000234 PARAMETER Experiment Name: At_Siliques_P Parameter: Plant Line Value: WS
  misc_feature: MA Experiment 20000234 PARAMETER Experiment Name: At_Siliques_P Parameter: Tissue Value: Less Than 5mm Siliques vs. Whole Plant
  misc_feature: MA Experiment ID: 20000286 Result: Up-regulated in Transcription
  misc_feature: MA Experiment 20000286 PARAMETER Experiment Name: At_Open_Flower_P Parameter: Age (day) Value: 21
  misc_feature: MA Experiment 20000286 PARAMETER Experiment Name: At_Open_Flower_P Parameter: Plant Line Value: WS
  misc_feature: MA Experiment 20000286 PARAMETER Experiment Name: At_Open_Flower_P Parameter: Tissue Value: Half Open vs. Whole Plant
  misc_feature: MA Experiment ID: 20000439 Result: Up-regulated in Transcription
  misc_feature: MA Experiment 20000439 PARAMETER Experiment Name: At_Roots__P Parameter: Age (day) Value: 14 vs. 21
  misc_feature: MA Experiment 20000439 PARAMETER Experiment Name: At_Roots__P Parameter: Organism Value: A. thaliana
  misc_feature: MA Experiment 20000439 PARAMETER Experiment Name: At_Roots__P Parameter: Tissue Value: Roots vs. Whole Plant
acagttctactatatggatgatggccctggcttcttcaaaccatctgtgtgtttagtcttctcatttgtgcacaactcaaagacaagtccactaagtttgaagcaaaatggcgatatggtttcagagaattttcctgttgcttctcgtttcctgttgcgcctcttcagattttttggaaaatccagacttcgaatctccaccgttaaacttacctacaaactcaaatgctagctctgtatcgctggatcagaacagtacactcccgggatggacattccaagggacagtgctttatgttgaactgcctgataccggacacgcggttcagctcggtgaagatggcaagatcaatcaaacattcattgccaaaggtgatgaattgaactacatcctcacattcgcactgatccacgcaggccagaactgtacaagctctgctggtctcagtgtctcggggccagacagcaatgcggtcttttcttacagacaaaactacagtaaggtttcatggcagagctacagtcataacttgggtagttgggggaatggtgagcctattaacttagttcttgaaagtcaggcaatagattctgattctgatacaaactccacatgttggcctatcattgacacattgcttatcaagactgttggtgtaacattggtccaagacagtggtaacctcttaatcaatggtggatttgagtctggacctggtttcttgcccaactcaaccgatggagttctgattgacgcggttccaagcctgattcaatcaccattaaggcagtggtctgtcataggaacagtcagatacatagactcggagcacttccatgtcccagaaggcaaagctgcaatagaaattctgtctaacacagctccatctggcatacacagcaacaaaaggcacaagtgaaggttcaagatacaacctcacatttaccttaggcgatgctaacgatgcgtgcagaggacatttcgtggtgggtgctcaagctggctccgtaactcaaaacttcacattggagagtaatgggactggctctggtgagaagtttgggttagtgtttgaagcagacaaagatgcagcacagataagtttcaccagctactcagttacaatgacaaaagagaatgttgtttgtggtcctgtgattgatgaagtgatggtacatcctcttggtggaacagcctcagtaaaacccacttggctgctacttattttcgctttgttgtatgttgcagttctctgattgaaactgtttgggagagaggtcataaagaagatatttttgcaaggagatgtgataatcattctagcttcatg

SEQ ID NO: 39288 - protein, 270 aa, Arabidopsis thaliana
  peptide (1)..(270): Ceres Seq. ID no. 12579650
  misc_feature (41)..(265): Pfam Name: Protein of unknown function, DUF642 Pfam Description: Protein of unknown function, DUF642
  misc_feature (10)..(255): Homolog of NCBI NO: 34912572 NR Description: P0410E03.24 [Oryza sativa (japonica
  misc_feature (10)..(256): Homolog of NCBI NO: 7488898 NR Description: hypothetical protein - castor bean
  misc_feature (52)..(256): Homolog of NCBI NO: 7486632 NR Description: hypothetical protein F8B4.160 - Arabidopsis
  misc_feature (15)..(256): Homolog of NCBI NO: 38345426 NR Description: OSJNBb0091E11.17 [Oryza sativa (japonica
  misc_feature (8)..(256): Homolog of NCBI NO: 18418018 NR Description: putative protein
  misc_feature (13)..(256): Homolog of NCBI NO: 34909656 NR Description: OJ1414_E05.5 [Oryza sativa (japonica
  misc_feature (8)..(256): Homolog of NCBI NO: 23397043 NR Description: unknown protein [Arabidopsis thaliana]
  misc_feature (8)..(256): Homolog of NCBI NO: 15239049 NR Description: putative protein
  misc_feature (8)..(256): Homolog of NCBI NO: 21554402 NR Description: unknown [Arabidopsis thaliana]
  misc_feature (1)..(265): Homolog of NCBI NO: 15241320 NR Description: putative protein
MAIWFQRIFLLLLVSCCASSDFLENPDFESPPLNLPTNSNASSVSLDQNSTLPGWTFQGTVLYVELPDTGHAVQLGEDGKINQTFIAKGDELNYILTFALIHAGQNCTSSAGLSVSGPDSNAVFSYRQNYSKVSWQSYSHNLGSWGNGEPINLVLESQAIDSDSDTNSTCWPIIDTLLIKTVGVTLVQDSGNLLINGGFESGPGFLPNSTDGVLIDAVPSLIQSPLRQWSVIGTVRYIDSEHFHVPEGKAAIEILSNTAPSGIHSNKRHK

SEQ ID NO: 39289 - DNA, 1397 bp, Arabidopsis thaliana
  misc_feature (1)..(1397): Ceres Seq. ID no. 13489548
  misc_feature: MA Experiment ID: 108462 Result: Up-regulated in Transcription
  misc_feature: MA Experiment 108462 PARAMETER Experiment Name: At_Germinating_Seeds_cDNA_P Parameter: Age (day) Value: 2 vs. 0
  misc_feature: MA Experiment 108462 PARAMETER Experiment Name: At_Germinating_Seeds_cDNA_P Parameter: Tissue Value: Germinating Seeds
  misc_feature: MA Experiment ID: 108464 Result: Up-regulated in Transcription
  misc_feature: MA Experiment 108464 PARAMETER Experiment Name: At_Germinating_Seeds_cDNA_P Parameter: Age (day) Value: 4 vs. 0
  misc_feature: MA Experiment 108464 PARAMETER Experiment Name: At_Germinating_Seeds_cDNA_P Parameter: Tissue Value: Germinating Seeds
  misc_feature: MA Experiment ID: 108573 Result: Up-regulated in Transcription
  misc_feature: MA Experiment 108573 PARAMETER Experiment Name: At_Drought_cDNA_P Parameter: Timepoint (hr) Value: 6
  misc_feature: MA Experiment 108573 PARAMETER Experiment Name: At_Drought_cDNA_P Parameter: Tissue Value: Aerial
  misc_feature: MA Experiment 108573 PARAMETER Experiment Name: At_Drought_cDNA_P Parameter: Treatment Value: Drought vs. No Drought
  misc_feature: MA Experiment ID: 108585 Result: Up-regulated in Transcription
  misc_feature: MA Experiment 108585 PARAMETER Experiment Name: At_5mM_NaNP_cDNA_P Parameter: Timepoint (hr) Value: 6
  misc_feature: MA Experiment 108585 PARAMETER Experiment Name: At_5mM_NaNP_cDNA_P Parameter: Tissue Value: Aerial
  misc_feature: MA Experiment 108585 PARAMETER Experiment Name: At_5mM_NaNP_cDNA_P Parameter: Treatment Value: null
  misc_feature: MA Experiment ID: 20000180 Result: Up-regulated in Transcription
  misc_feature: MA Experiment 20000180 PARAMETER Experiment Name: At_Germinating_Seeds_P Parameter: Age (hr) Value: 24 vs. 0
  misc_feature: MA Experiment 20000180 PARAMETER Experiment Name: At_Germinating_Seeds_P Parameter: Tissue Value: Germinating Seeds
  misc_feature: MA Experiment ID: 20000224 Result: Down-regulated in Transcription
aataaaaactttttcatggatctgagattttctccaaatctatatttgtgattgtttcgtgtagtttttctcttaaagttgtgttctttaagctctctcgtgctcaatcttacgtttccctttggtttgatttcgtgtttttgttattcgatttcacctttaacttttatctaatctcttgtttttgattttgtaaattgtaaaaagtttctggtgattctcttagcgaatttgggaaactttatctgtatttttctgtttcgccgtagatttaggatccttaattaatgaatttgtgggtttcaatattcctcgtctctgcaatagctggatcatgcttaccttctgggtttgcttacgttgacgtttgcaatcacgaattcgaggtgttccgatccgtgatcgagcaaaaatgtcctcgttctttgtatccaagccctcctatcgaggtagatggagacttgctagacaaactcatggatgcaaaccatggaaatgcctatatatccatactattttatacctcacggtgcccgttttcacgtgcagtacgcccaaagtttgatgttctgagttcaatgtttcctcacataacgcacctgattgttgagcaatctcaggctttaccatctgtgttttctaggtatggtatccatagcttgccttcaatcctgatggtgaatcaaacaatgaagatgcgataccatggtccaaaggatcttgcatccctgattcagttttacaaggaaacaacaggtcttaaacctgtccagtatatggatgaaggtgaaccaacaagcttggacactgatggaaacctgatcacatggctacacaacgggtcatctatcagagaaatagcagaaagagagccatatatggtacttgcactaatgtttctgtctttgaaactggcaattttgatcttccccatcatgggatcacggttgaaaacgttatgggcattgtatgttccgcatctgagcttgggaatacttggtgagactagccaactgtttggccgtgccctacacatgatcgatgtgaggagactatggataaaactgagactcaccaaaacaaggaacttccaagaaagagcaaagaacgcacttgcatcagtctcactaggaaaatcttcatcacaatcagcctaaaagggtgatttagaaatccttcactgtcaatgagcttagtttagattactttactttactgtctgtgagagatcctttgactgacatgtttctatacctttggagttccactgtctctgtatgtaaatcctgttttgcttcttttgtgaatattttttcttcttcttttgaatattcatgttcttggtccacttcgttgtgcttacgttttgtctatattgattatggatggtttggttt

SEQ ID NO: 39290 - protein, 289 aa, Arabidopsis thaliana
  peptide (1)..(289): Ceres Seq. ID no. 13489549
  misc_feature (53)..(158): Homolog of NCBI NO: 15236643 NR Description: protein disulfide isomerase -related [Arabidopsis
  misc_feature (54)..(288): Homolog of NCBI NO: 18399435 NR Description: expressed protein [Arabidopsis thaliana]
  misc_feature (49)..(286): Homolog of NCBI NO: 29367467 NR Description: disulfide isomerase-like protein
  misc_feature (6)..(286): Homolog of NCBI NO: 30103009 NR Description: unknown protein [Oryza sativa (japonica
  misc_feature (157)..(289): Homolog of NCBI NO: 6006856 NR Description: unknown protein [Arabidopsis thaliana]
  misc_feature (1)..(156): Homolog of NCBI NO: 6006856 NR Description: unknown protein [Arabidopsis thaliana]
  misc_feature (1)..(289): Homolog of NCBI NO: 18396691 NR Description: expressed protein [Arabidopsis thaliana]
  misc_feature (1)..(289): Homolog of NCBI NO: 9758894 NR Description: contains similarity to protein disulfide
  misc_feature (1)..(289): Homolog of NCBI NO: 21536613 NR Description: contains similarity to protein disulfide
  misc_feature (1)..(289): Homolog of NCBI NO: 18418521 NR Description: expressed protein [Arabidopsis thaliana]
  misc_feature (53)..(158): Homolog of NCBI NO: 15236643 NR Description: protein disulfide isomerase -related [Arabidopsis
  misc_feature (54)..(288): Homolog of NCBI NO: 18399435 NR Description: expressed protein [Arabidopsis thaliana]
  misc_feature (49)..(286): Homolog of NCBI NO: 29367467 NR Description: disulfide isomerase-like protein
  misc_feature (6)..(286): Homolog of NCBI NO: 30103009 NR Description: unknown protein [Oryza sativa (japonica
  misc_feature (157)..(289): Homolog of NCBI NO: 6006856 NR Description: unknown protein [Arabidopsis thaliana]
  misc_feature (1)..(156): Homolog of NCBI NO: 6006856 NR Description: unknown protein [Arabidopsis thaliana]
  misc_feature (1)..(289): Homolog of NCBI NO: 18396691 NR Description: expressed protein [Arabidopsis thaliana]
  misc_feature (1)..(289): Homolog of NCBI NO: 9758894 NR Description: contains similarity to protein disulfide
  misc_feature (1)..(289): Homolog of NCBI NO: 21536613 NR Description: contains similarity to protein disulfide
  misc_feature (1)..(289): Homolog of NCBI NO: 18418521 NR Description: expressed protein [Arabidopsis thaliana]
MNLWVSIFLVSAIAGSCLPSGFAYVDVCNHEFEVFRSVIEQKCPRSLYPSPPIEVDGDLLDKLMDANHGNAYISILFYTSRCPFSRAVRPKFDVLSSMFPHITHLIVEQSQALPSVFSRYGIHSLPSILMVNQTMKMRYHGPKDLASLIQFYKETTGLKPVQYMDEGEPTSLDTDGNLITWLHNGSSIREIAEREPYMVLALMFLSLKLAILIFPIMGSRLKTLWALYVPHLSLGILGETSQLFGRALHMIDVRRLWIKLRLTKTRNFQERAKNALASVSLGKSSSQSA

SEQ ID NO: 39291 - protein, 226 aa, Arabidopsis thaliana
  peptide (1)..(226): Ceres Seq. ID no. 13489550
  misc_feature (1)..(95): Homolog of NCBI NO: 15236643 NR Description: protein disulfide isomerase -related [Arabidopsis
  misc_feature (1)..(225): Homolog of NCBI NO: 18399435 NR Description: expressed protein [Arabidopsis thaliana]
  misc_feature (1)..(223): Homolog of NCBI NO: 29367467 NR Description: disulfide isomerase-like protein
  misc_feature (1)..(223): Homolog of NCBI NO: 30103009 NR Description: unknown protein [Oryza sativa (japonica
  misc_feature (94)..(226): Homolog of NCBI NO: 6006856 NR Description: unknown protein [Arabidopsis thaliana]
  misc_feature (1)..(93): Homolog of NCBI NO: 6006856 NR Description: unknown protein [Arabidopsis thaliana]
  misc_feature (1)..(226): Homolog of NCBI NO: 18396691 NR Description: expressed protein [Arabidopsis thaliana]
  misc_feature (1)..(226): Homolog of NCBI NO: 9758894 NR Description: contains similarity to protein disulfide
  misc_feature (1)..(226): Homolog of NCBI NO: 21536613 NR Description: contains similarity to protein disulfide
  misc_feature (1)..(226): Homolog of NCBI NO: 18418521 NR Description: expressed protein [Arabidopsis thaliana]
  misc_feature (1)..(95): Homolog of NCBI NO: 15236643 NR Description: protein disulfide isomerase -related [Arabidopsis
  misc_feature (1)..(225): Homolog of NCBI NO: 18399435 NR Description: expressed protein [Arabidopsis thaliana]
  misc_feature (1)..(223): Homolog of NCBI NO: 29367467 NR Description: disulfide isomerase-like protein
  misc_feature (1)..(223): Homolog of NCBI NO: 30103009 NR Description: unknown protein [Oryza sativa (japonica
  misc_feature (94)..(226): Homolog of NCBI NO: 6006856 NR Description: unknown protein [Arabidopsis thaliana]
  misc_feature (1)..(93): Homolog of NCBI NO: 6006856 NR Description: unknown protein [Arabidopsis thaliana]
  misc_feature (1)..(226): Homolog of NCBI NO: 18396691 NR Description: expressed protein [Arabidopsis thaliana]
  misc_feature (1)..(226): Homolog of NCBI NO: 9758894 NR Description: contains similarity to protein disulfide
  misc_feature (1)..(226): Homolog of NCBI NO: 21536613 NR Description: contains similarity to protein disulfide
  misc_feature (1)..(226): Homolog of NCBI NO: 18418521 NR Description: expressed protein [Arabidopsis thaliana]
MDANHGNAYISILFYTSRCPFSRAVRPKFDVLSSMFPHITHLIVEQSQALPSVFSRYGIHSLPSILMVNQTMKMRYHGPKDLASLIQFYKETTGLKPVQYMDEGEPTSLDTDGNLITWLHNGSSIREIAEREPYMVLALMFLSLKLAILIFPIMGSRLKTLWALYVPHLSLGILGETSQLFGRALHMIDVRRLWIKLRLTKTRNFQERAKNALASVSLGKSSSQSA

SEQ ID NO: 39292 - protein, 192 aa, Arabidopsis thaliana
  peptide (1)..(192): Ceres Seq. ID no. 13489551
  misc_feature (1)..(61): Homolog of NCBI NO: 15236643 NR Description: protein disulfide isomerase -related [Arabidopsis
  misc_feature (1)..(191): Homolog of NCBI NO: 18399435 NR Description: expressed protein [Arabidopsis thaliana]
  misc_feature (1)..(189): Homolog of NCBI NO: 29367467 NR Description: disulfide isomerase-like protein
  misc_feature (1)..(189): Homolog of NCBI NO: 30103009 NR Description: unknown protein [Oryza sativa (japonica
  misc_feature (60)..(192): Homolog of NCBI NO: 6006856 NR Description: unknown protein [Arabidopsis thaliana]
  misc_feature (1)..(59): Homolog of NCBI NO: 6006856 NR Description: unknown protein [Arabidopsis thaliana]
  misc_feature (1)..(192): Homolog of NCBI NO: 18396691 NR Description: expressed protein [Arabidopsis thaliana]
  misc_feature (1)..(192): Homolog of NCBI NO: 9758894 NR Description: contains similarity to protein disulfide
  misc_feature (1)..(192): Homolog of NCBI NO: 21536613 NR Description: contains similarity to protein disulfide
  misc_feature (1)..(192): Homolog of NCBI NO: 18418521 NR Description: expressed protein [Arabidopsis thaliana]
  misc_feature (1)..(61): Homolog of NCBI NO: 15236643 NR Description: protein disulfide isomerase -related [Arabidopsis
  misc_feature (1)..(191): Homolog of NCBI NO: 18399435 NR Description: expressed protein [Arabidopsis thaliana]
  misc_feature (1)..(189): Homolog of NCBI NO: 29367467 NR Description: disulfide isomerase-like protein
  misc_feature (1)..(189): Homolog of NCBI NO: 30103009 NR Description: unknown protein [Oryza sativa (japonica
  misc_feature (60)..(192): Homolog of NCBI NO: 6006856 NR Description: unknown protein [Arabidopsis thaliana]
  misc_feature (1)..(59): Homolog of NCBI NO: 6006856 NR Description: unknown protein [Arabidopsis thaliana]
  misc_feature (1)..(192): Homolog of NCBI NO: 18396691 NR Description: expressed protein [Arabidopsis thaliana]
  misc_feature (1)..(192): Homolog of NCBI NO: 9758894 NR Description: contains similarity to protein disulfide
  misc_feature (1)..(192): Homolog of NCBI NO: 21536613 NR Description: contains similarity to protein disulfide
  misc_feature (1)..(192): Homolog of NCBI NO: 18418521 NR Description: expressed protein [Arabidopsis thaliana]
MFPHITHLIVEQSQALPSVFSRYGIHSLPSILMVNQTMKMRYHGPKDLASLIQFYKETTGLKPVQYMDEGEPTSLDTDGNLITWLHNGSSIREIAEREPYMVLALMFLSLKLAILIFPIMGSRLKTLWALYVPHLSLGILGETSQLFGRALHMIDVRRLWIKLRLTKTRNFQERAKNALASVSLGKSSSQSA

SEQ ID NO: 39293 - DNA, 1208 bp, Arabidopsis thaliana
  misc_feature (1)..(1208): Ceres Seq. ID no. 13495834
  misc_feature: MA Experiment ID: 108462 Result: Down-regulated in Transcription
  misc_feature: MA Experiment 108462 PARAMETER Experiment Name: At_Germinating_Seeds_cDNA_P Parameter: Age (day) Value: 2 vs. 0
  misc_feature: MA Experiment 108462 PARAMETER Experiment Name: At_Germinating_Seeds_cDNA_P Parameter: Tissue Value: Germinating Seeds
  misc_feature: MA Experiment ID: 108463 Result: Down-regulated in Transcription
  misc_feature: MA Experiment 108463 PARAMETER Experiment Name: At_Germinating_Seeds_cDNA_P Parameter: Age (day) Value: 3 vs. 0
  misc_feature: MA Experiment 108463 PARAMETER Experiment Name: At_Germinating_Seeds_cDNA_P Parameter: Tissue Value: Germinating Seeds
  misc_feature: MA Experiment ID: 108464 Result: Down-regulated in Transcription
  misc_feature: MA Experiment 108464 PARAMETER Experiment Name: At_Germinating_Seeds_cDNA_P Parameter: Age (day) Value: 4 vs. 0
  misc_feature: MA Experiment 108464 PARAMETER Experiment Name: At_Germinating_Seeds_cDNA_P Parameter: Tissue Value: Germinating Seeds
  misc_feature: MA Experiment ID: 108488 Result: Down-regulated in Transcription
  misc_feature: MA Experiment ID: 20000071 Result: Up-regulated in Transcription
  misc_feature: MA Experiment 20000071 PARAMETER Experiment Name: At_100uM_ABA_Mutants_cDNA_P Parameter: Plant Line Value: CS8104
  misc_feature: MA Experiment 20000071 PARAMETER Experiment Name: At_100uM_ABA_Mutants_cDNA_P Parameter: Timepoint (hr) Value: 6
  misc_feature: MA Experiment 20000071 PARAMETER Experiment Name: At_100uM_ABA_Mutants_cDNA_P Parameter: Tissue Value: Aerial
  misc_feature: MA Experiment 20000071 PARAMETER Experiment Name: At_100uM_ABA_Mutants_cDNA_P Parameter: Treatment Value: 100uM ABA vs. No Treatment
  misc_feature: MA Experiment ID: 20000117 Result: Up-regulated in Transcription
  misc_feature: MA Experiment 20000117 PARAMETER Experiment Name: At_100uM_ABA_Mutants_cDNA_P Parameter: Plant Line Value: Columbia
  misc_feature: MA Experiment 20000117 PARAMETER Experiment Name: At_100uM_ABA_Mutants_cDNA_P Parameter: Timepoint (hr) Value: 6
  misc_feature: MA Experiment 20000117 PARAMETER Experiment Name: At_100uM_ABA_Mutants_cDNA_P Parameter: Tissue Value: Aerial
  misc_feature: MA Experiment 20000117 PARAMETER Experiment Name: At_100uM_ABA_Mutants_cDNA_P Parameter: Treatment Value: 100uM ABA vs. No Treatment
  misc_feature: MA Experiment ID: 20000224 Result: Down-regulated in Transcription
  misc_feature: MA Experiment ID: 20000794 Result: Up-regulated in Transcription
  misc_feature: MA Experiment 20000794 PARAMETER Experiment Name: At_Petals_P Parameter: Age (day) Value: 23-25 days
  misc_feature: MA Experiment 20000794 PARAMETER Experiment Name: At_Petals_P Parameter: Plant Line Value: WS
  misc_feature: MA Experiment 20000794 PARAMETER Experiment Name: At_Petals_P Parameter: Tissue Value: Petals vs. Whole plant
atcatagtttctatctccgatgacacaaaacgaggaagattatttgacattttaagtaagaacagctagctttgccatctccctaaaggcaataaatctcggatccactttcacgatattttgatattttttctatttataatctttctgggttttgagtcttttgaaggctgaattgctctgaaatctcaattgtataatcatctcctgggtcgtcgttatcgtgatcatctagaagaaagcatgactacactagatttgaccagagccgagcttgctcttattgttctctatttgaacaaagctgaggctagagataagatatgcagagctatccaatatggttccaaatttttgagcggtggccaacctggtactgctcaaactgtcgacaaaaacaccagcttggcgagaaaagttttccgtcttttcaagtttgtcaatgattttcacggtcttatcagccccgtgcctaaagggactccacttcctcttgtcttactcgggaagtcgaagaatgcgctcttgtctacctttttgtttcttgatcaaatcgtctggcttggtagatccggcatatacaagaacaaagaacgaactgaattgcttggacgtatatcacttttctgctggctgggatcatccgtttgtacaagtgcagtcgagattggtgagcttggaaggctctcttcatctatgaagaagatggaaaaggaactcaaagctgatgatgagctgtatcgtgctaagcttcagaaatcaaacgacagaactctagctttgattaaatcaagcatggacattattgtagccattggtctccttcagttagctccaaagacgattagtcctcgtgtcactggtgctttcgggtttaccacctcacttatctcttgttatcagttgcttccatcgcgccccaagttgaagacaccttgaagaaggaataagcttgttctctagactttcagaataattgtttcatattcatcagtaaacctattgtgttcaggtattctaaggagtctatgttcctcctttgaatgaatttgctgctcttataacgcgtttgcaagaataatgataagttttagaataagattattatgatacatcttcaagattttttgattagaaatttgtgtttgtttctcattttgaacaagactctgttcctacatagtagagaggaaatcatttgatgttcg

SEQ ID NO: 39294 - protein, 231 aa, Arabidopsis thaliana; identical to SEQ ID NO: 23905
  peptide (1)..(231): Ceres Seq. ID no. 13495835
  misc_feature (11)..(222): Pfam Name: Peroxisomal biogenesis factor 11 (PEX11) Pfam Description: Peroxisomal biogenesis factor 11 (PEX11)
  misc_feature (131)..(231): Homolog of NCBI NO: 14335058 NR Description: At2g45740/F4I18.28 [Arabidopsis thaliana]
  misc_feature (1)..(227): Homolog of NCBI NO: 34898026 NR Description: ESTs AU064537(E31904),AU082147(E31904) correspond a region of the predicted gene.~Similar to Arabidopsis thaliana
  misc_feature (1)..(229): Homolog of NCBI NO: 25553559 NR Description: OSJNBa0038F22.7 [Oryza sativa (japonica
  misc_feature (1)..(229): Homolog of NCBI NO: 8489788 NR Description: unknown [Lycopersicon esculentum]
  misc_feature (2)..(221): Homolog of NCBI NO: 7486466 NR Description: hypothetical protein At2g45740 [imported] -
  misc_feature (1)..(229): Homolog of NCBI NO: 18378887 NR Description: expressed protein [Arabidopsis thaliana]
  misc_feature (2)..(231): Homolog of NCBI NO: 18406877 NR Description: expressed protein [Arabidopsis thaliana]
  misc_feature (1)..(231): Homolog of NCBI NO: 11358250 NR Description: hypothetical protein T27I15_160 - Arabidopsis
  misc_feature (1)..(231): Homolog of NCBI NO: 30695340 NR Description: expressed protein [Arabidopsis thaliana]

SEQ ID NO: 39295 - DNA, 1270 bp, Arabidopsis thaliana
  misc_feature (1)..(1270): Ceres Seq. ID no. 12558327
  misc_feature: MA Experiment ID: 20000306 Result: Up-regulated in Transcription
  misc_feature: MA Experiment 20000306 PARAMETER Experiment Name: At_Germinating_Seeds_Sub_P Parameter: Age (hr) Value: 6 vs. 0
  misc_feature: MA Experiment 20000306 PARAMETER Experiment Name: At_Germinating_Seeds_Sub_P Parameter: Organism Value: A. thaliana
  misc_feature: MA Experiment 20000306 PARAMETER Experiment Name: At_Germinating_Seeds_Sub_P Parameter: Plant Line Value: WS
  misc_feature: MA Experiment 20000306 PARAMETER Experiment Name: At_Germinating_Seeds_Sub_P Parameter: Tissue Value: Germinating Seeds
  misc_feature: MA Experiment ID: 20000307 Result: Up-regulated in Transcription
  misc_feature: MA Experiment 20000307 PARAMETER Experiment Name: At_Germinating_Seeds_Sub_P Parameter: Age (hr) Value: 24 vs. 0
  misc_feature: MA Experiment 20000307 PARAMETER Experiment Name: At_Germinating_Seeds_Sub_P Parameter: Organism Value: A. thaliana
  misc_feature: MA Experiment 20000307 PARAMETER Experiment Name: At_Germinating_Seeds_Sub_P Parameter: Plant Line Value: WS
  misc_feature: MA Experiment 20000307 PARAMETER Experiment Name: At_Germinating_Seeds_Sub_P Parameter: Tissue Value: Germinating Seeds
  misc_feature: MA Experiment ID: 20000314 Result: Down-regulated in Transcription
  misc_feature: MA Experiment 20000314 PARAMETER Experiment Name: At_14day_Shoots-Roots_Sub_P Parameter: Age (day) Value: 14
  misc_feature: MA Experiment 20000314 PARAMETER Experiment Name: At_14day_Shoots-Roots_Sub_P Parameter: Organism Value: A. thaliana
  misc_feature: MA Experiment 20000314 PARAMETER Experiment Name: At_14day_Shoots-Roots_Sub_P Parameter: Plant Line Value: WS
  misc_feature: MA Experiment 20000314 PARAMETER Experiment Name: At_14day_Shoots-Roots_Sub_P Parameter: Tissue Value: Roots vs. Whole Plant
  misc_feature: MA Experiment ID: 20000315 Result: Down-regulated in Transcription
  misc_feature: MA Experiment 20000315 PARAMETER Experiment Name: At_14day_Shoots-Roots_Sub_P Parameter: Age (day) Value: 14
  misc_feature: MA Experiment 20000315 PARAMETER Experiment Name: At_14day_Shoots-Roots_Sub_P Parameter: Organism Value: A. thaliana
  misc_feature: MA Experiment 20000315 PARAMETER Experiment Name: At_14day_Shoots-Roots_Sub_P Parameter: Plant Line Value: WS
  misc_feature: MA Experiment 20000315 PARAMETER Experiment Name: At_14day_Shoots-Roots_Sub_P Parameter: Tissue Value: Shoots vs. Whole Plant
  misc_feature: MA Experiment ID: 20000355 Result: Down-regulated in Transcription
  misc_feature: MA Experiment 20000355 PARAMETER Experiment Name: At_Siliques_Sub_P Parameter: Age (day) Value: 21
  misc_feature: MA Experiment 20000355 PARAMETER Experiment Name: At_Siliques_Sub_P Parameter: Organism Value: A. thaliana
  misc_feature: MA Experiment 20000355 PARAMETER Experiment Name: At_Siliques_Sub_P Parameter: Plant Line Value: WS
  misc_feature: MA Experiment 20000355 PARAMETER Experiment Name: At_Siliques_Sub_P Parameter: Tissue Value: Less Than 5mm Siliques vs. Whole Plant
ctctcatttatcttcgtggagatctaaaagaaggaggaagacatttcttccctctggatctccaaaaaaacgagaggtttgggtggggaaggaaagaaggaggaagaggcaatgtcagctaggtattggtgtcacatgtgttcacaaatggtgaatccagttattggtgccgagatcaaatgccccttttgccaaagcgggtttgtcgaggaaatgagccgtgagattaatggcggcagcagtagcagtctaagggaggttcaagaccctgagattgattttggtacagaccgtgcattgtctctatggggtccaatcttgcttggaatgatgagtaatcctcgtagacgtagaaggtttaggaggacagagtttggtgtggataatgatgaggtcaatgtatctgatgatgttgatggaaatgacagcgtcgatattgatcgacatcatcatcgtcgtcatcgccacaggcaacaaggtagagagattgatttagacagagagtttgagtctatccttaggaggagacggagaagctcagctactatattgcagttgcttcagggtattcgtgcagggattgcttctgagtatgagagctcggatcgagacctgttaaatcaatcagctgttgttcagggttcaacgagtttgaatcaaaaccggaacaatacttctctttctgcaattggagattactttgttggatccagtttagaccatttgcttgaacatctagctgataatgattcaatcaggcacgggagtcttccagcacgtaaagaagttgtggataatctcccaacggttaagataagtgaatcattgcagtgctcgatttgtttggatgattttgacaaaggaagtgaagctaaagagatgccgtgtaagcacaagtttcacatccggtgtatagtaccgtggctcgagcttcacagttcatgtcccgtgtgccgatatgaactccctcctgatgatgagaccaaggttaatcctgtaagaccgagaacaagaactctagagatcaacgtaagtaatgagaatgtggaagatgatgcaaggaacagtaatgtgagcgagagaaggttctcttttccatggccgttcagcggattattctcttcatcctcttcgtcatccgcatcggcctcggggtcatctcatctcggtgagaactcgtaaactgctattcctcagcttatagtacataaaatcttgttcactcagattgttgaatactgcataacaaataaacactttcgaggaatgg

SEQ ID NO: 39296 - protein, 356 aa, Arabidopsis thaliana
  peptide (1)..(356): Ceres Seq. ID no. 12558328
  misc_feature (241)..(281): Pfam Name: Zinc finger, C3HC4 type (RING finger) Pfam Description: Zinc finger, C3HC4 type (RING finger)
  misc_feature (194)..(352): Homolog of NCBI NO: 11994207 NR Description: gene_id:MPN9.20~unknown protein [Arabidopsis
  misc_feature (97)..(290): Homolog of NCBI NO: 34903272 NR Description: unnamed protein product [Oryza sativa (japonica
  misc_feature (191)..(356): Homolog of NCBI NO: 37535546 NR Description: putative zinc finger protein
  misc_feature (24)..(327): Homolog of NCBI NO: 15231238 NR Description: unknown protein; protein id: At3g13430.1
  misc_feature (24)..(327): Homolog of NCBI NO: 38454178 NR Description: At3g13430 [Arabidopsis thaliana]
  misc_feature (310)..(349): Homolog of NCBI NO: 18405411 NR Description: expressed protein
  misc_feature (24)..(325): Homolog of NCBI NO: 18405411 NR Description: expressed protein
  misc_feature (1)..(356): Homolog of NCBI NO: 15241188 NR Description: putative protein
  misc_feature (13)..(356): Homolog of NCBI NO: 7486783 NR Description: hypothetical protein M3E9.170 - Arabidopsis
  misc_feature (1)..(356): Homolog of NCBI NO: 22328949 NR Description: putative protein
MSARYWCHMCSQMVNPVIGAEIKCPFCQSGFVEEMSREINGGSSSSLREVQDPEIDFGTDRALSLWGPILLGMMSNPRRRRRFRRTEFGVDNDEVNVSDDVDGNDSVDIDRHHHRRHRHRQQGREIDLDREFESILRRRRRSSATILQLLQGIRAGIASEYESSDRDLLNQSAVVQGSTSLNQNRNNTSLSAIGDYFVGSSLDHLLEHLADNDSIRHGSLPARKEVVDNLPTVKISESLQCSICLDDFDKGSEAKEMPCKHKFHIRCIVPWLELHSSCPVCRYELPPDDETKVNPVRPRTRTLEINVSNENVEDDARNSNVSERRFSFPWPFSGLFSSSSSSSASASGSSHLGENS

SEQ ID NO: 39297 - protein, 348 aa, Arabidopsis thaliana
  peptide (1)..(348): Ceres Seq. ID no. 12558329
  misc_feature (233)..(273): Pfam Name: Zinc finger, C3HC4 type (RING finger) Pfam Description: Zinc finger, C3HC4 type (RING finger)
  misc_feature (186)..(344): Homolog of NCBI NO: 11994207 NR Description: gene_id:MPN9.20~unknown protein [Arabidopsis
  misc_feature (89)..(282): Homolog of NCBI NO: 34903272 NR Description: unnamed protein product [Oryza sativa (japonica
  misc_feature (183)..(348): Homolog of NCBI NO: 37535546 NR Description: putative zinc finger protein
  misc_feature (16)..(319): Homolog of NCBI NO: 15231238 NR Description: unknown protein; protein id: At3g13430.1
  misc_feature (16)..(319): Homolog of NCBI NO: 38454178 NR Description: At3g13430 [Arabidopsis thaliana]
  misc_feature (302)..(341): Homolog of NCBI NO: 18405411 NR Description: expressed protein
  misc_feature (16)..(317): Homolog of NCBI NO: 18405411 NR Description: expressed protein
  misc_feature (1)..(348): Homolog of NCBI NO: 15241188 NR Description: putative protein
  misc_feature (5)..(348): Homolog of NCBI NO: 7486783 NR Description: hypothetical protein M3E9.170 - Arabidopsis
  misc_feature (1)..(348): Homolog of NCBI NO: 22328949 NR Description: putative protein
MCSQMVNPVIGAEIKCPFCQSGFVEEMSREINGGSSSSLREVQDPEIDFGTDRALSLWGPILLGMMSNPRRRRRFRRTEFGVDNDEVNVSDDVDGNDSVDIDRHHHRRHRHRQQGREIDLDREFESILRRRRRSSATILQLLQGIRAGIASEYESSDRDLLNQSAVVQGSTSLNQNRNNTSLSAIGDYFVGSSLDHLLEHLADNDSIRHGSLPARKEVVDNLPTVKISESLQCSICLDDFDKGSEAKEMPCKHKFHIRCIVPWLELHSSCPVCRYELPPDDETKVNPVRPRTRTLEINVSNENVEDDARNSNVSERRFSFPWPFSGLFSSSSSSSASASGSSHLGENS

SEQ ID NO: 39298 - protein, 344 aa, Arabidopsis thaliana
  peptide (1)..(344): Ceres Seq. ID no. 12558330
  misc_feature (229)..(269): Pfam Name: Zinc finger, C3HC4 type (RING finger) Pfam Description: Zinc finger, C3HC4 type (RING finger)
  misc_feature (182)..(340): Homolog of NCBI NO: 11994207 NR Description: gene_id:MPN9.20~unknown protein [Arabidopsis
  misc_feature (85)..(278): Homolog of NCBI NO: 34903272 NR Description: unnamed protein product [Oryza sativa (japonica
  misc_feature (179)..(344): Homolog of NCBI NO: 37535546 NR Description: putative zinc finger protein
  misc_feature (12)..(315): Homolog of NCBI NO: 15231238 NR Description: unknown protein; protein id: At3g13430.1
  misc_feature (12)..(315): Homolog of NCBI NO: 38454178 NR Description: At3g13430 [Arabidopsis thaliana]
  misc_feature (298)..(337): Homolog of NCBI NO: 18405411 NR Description: expressed protein
  misc_feature (12)..(313): Homolog of NCBI NO: 18405411 NR Description: expressed protein
  misc_feature (1)..(344): Homolog of NCBI NO: 15241188 NR Description: putative protein
  misc_feature (1)..(344): Homolog of NCBI NO: 7486783 NR Description: hypothetical protein M3E9.170 - Arabidopsis
  misc_feature (1)..(344): Homolog of NCBI NO: 22328949 NR Description: putative protein
MVNPVIGAEIKCPFCQSGFVEEMSREINGGSSSSLREVQDPEIDFGTDRALSLWGPILLGMMSNPRRRRRFRRTEFGVDNDEVNVSDDVDGNDSVDIDRHHHRRHRHRQQGREIDLDREFESILRRRRRSSATILQLLQGIRAGIASEYESSDRDLLNQSAVVQGSTSLNQNRNNTSLSAIGDYFVGSSLDHLLEHLADNDSIRHGSLPARKEVVDNLPTVKISESLQCSICLDDFDKGSEAKEMPCKHKFHIRCIVPWLELHSSCPVCRYELPPDDETKVNPVRPRTRTLEINVSNENVEDDARNSNVSERRFSFPWPFSGLFSSSSSSSASASGSSHLGENS

SEQ ID NO: 39299 - DNA, 1508 bp, Arabidopsis thaliana
  misc_feature (1)..(1508): Ceres Seq. ID no. 12328951
  misc_feature: MA Experiment ID: 20000171 Result: Down-regulated in Transcription
  misc_feature: MA Experiment 20000171 PARAMETER Experiment Name: At_42deg_Heat_P Parameter: Age (day) Value: 14
  misc_feature: MA Experiment 20000171 PARAMETER Experiment Name: At_42deg_Heat_P Parameter: Organism Value: A. thaliana
  misc_feature: MA Experiment 20000171 PARAMETER Experiment Name: At_42deg_Heat_P Parameter: Plant Line Value: WS
  misc_feature: MA Experiment 20000171 PARAMETER Experiment Name: At_42deg_Heat_P Parameter: Temperature (deg C) Value: 42 vs. 22
  misc_feature: MA Experiment 20000171 PARAMETER Experiment Name: At_42deg_Heat_P Parameter: Timepoint (hr) Value: 1
  misc_feature: MA Experiment 20000171 PARAMETER Experiment Name: At_42deg_Heat_P Parameter: Tissue Value: Aerial
  misc_feature: MA Experiment ID: 20000182 Result: Up-regulated in Transcription
  misc_feature: MA Experiment 20000182 PARAMETER Experiment Name: At_2mM_SA_P Parameter: Age (day) Value: 14
  misc_feature: MA Experiment 20000182 PARAMETER Experiment Name: At_2mM_SA_P Parameter: Organism Value: A. thaliana
  misc_feature: MA Experiment 20000182 PARAMETER Experiment Name: At_2mM_SA_P Parameter: Plant Line Value: WS
  misc_feature: MA Experiment 20000182 PARAMETER Experiment Name: At_2mM_SA_P Parameter: Timepoint (hr) Value: 6
  misc_feature: MA Experiment 20000182 PARAMETER Experiment Name: At_2mM_SA_P Parameter: Tissue Value: Aerial
  misc_feature: MA Experiment 20000182 PARAMETER Experiment Name: At_2mM_SA_P Parameter: Treatment Value: 2mM SA vs. No Treatment
  misc_feature: MA Experiment ID: 20000184 Result: Up-regulated in Transcription
  misc_feature: MA Experiment 20000184 PARAMETER Experiment Name: At_Shoots__P Parameter: Age (day) Value: 7
  misc_feature: MA Experiment 20000184 PARAMETER Experiment Name: At_Shoots__P Parameter: Tissue Value: Shoots vs. Whole Plant
  misc_feature: MA Experiment ID: 20000185 Result: Up-regulated in Transcription
  misc_feature: MA Experiment 20000185 PARAMETER Experiment Name: At_Roots__P Parameter: Age (day) Value: 7 vs. 21
  misc_feature: MA Experiment 20000185 PARAMETER Experiment Name: At_Roots__P Parameter: Organism Value: A. thaliana
  misc_feature: MA Experiment 20000185 PARAMETER Experiment Name: At_Roots__P Parameter: Tissue Value: Roots vs. Whole Plant
  misc_feature: MA Experiment ID: 20000224 Result: Down-regulated in Transcription
  misc_feature: MA Experiment ID: 20000227 Result: Down-regulated in Transcription
  misc_feature: MA Experiment 20000227 PARAMETER Experiment Name: At_Root-Tips-vs-Tops_P Parameter: Tissue Value: Root Tips vs. Root Tops
  misc_feature: MA Experiment ID: 20000437 Result: Down-regulated in Transcription
  misc_feature: MA Experiment 20000437 PARAMETER Experiment Name: At_Drought_P Parameter: Age (day) Value: 8
  misc_feature: MA Experiment 20000437 PARAMETER Experiment Name: At_Drought_P Parameter: Organism Value: A. thaliana
  misc_feature: MA Experiment 20000437 PARAMETER Experiment Name: At_Drought_P Parameter: Plant Line Value: WS
  misc_feature: MA Experiment 20000437 PARAMETER Experiment Name: At_Drought_P Parameter: Timepoint (hr) Value: 24
  misc_feature: MA Experiment 20000437 PARAMETER Experiment Name: At_Drought_P Parameter: Tissue Value: Whole Plant
  misc_feature: MA Experiment 20000437 PARAMETER Experiment Name: At_Drought_P Parameter: Treatment Value: Drought vs. No Drought
  misc_feature: MA Experiment ID: 20000439 Result: Up-regulated in Transcription
  misc_feature: MA Experiment 20000439 PARAMETER Experiment Name: At_Roots__P Parameter: Age (day) Value: 14 vs. 21
  misc_feature: MA Experiment 20000439 PARAMETER Experiment Name: At_Roots__P Parameter: Organism Value: A. thaliana
  misc_feature: MA Experiment 20000439 PARAMETER Experiment Name: At_Roots__P Parameter: Tissue Value: Roots vs. Whole Plant
  misc_feature: MA Experiment ID: 20000794 Result: Up-regulated in Transcription
  misc_feature: MA Experiment 20000794 PARAMETER Experiment Name: At_Petals_P Parameter: Age (day) Value: 23-25 days
  misc_feature: MA Experiment 20000794 PARAMETER Experiment Name: At_Petals_P Parameter: Plant Line Value: WS
  misc_feature: MA Experiment 20000794 PARAMETER Experiment Name: At_Petals_P Parameter: Tissue Value: Petals vs. Whole plant
  misc_feature: MA Experiment ID: 20001557 Result: Up-regulated in Transcription
  misc_feature: MA Experiment 20001557 PARAMETER Experiment Name: At_Drought_Soil_Dry_P Parameter: Age (day) Value: 27
  misc_feature: MA Experiment 20001557 PARAMETER Experiment Name: At_Drought_Soil_Dry_P Parameter: Organism Value: A. thaliana
  misc_feature: MA Experiment 20001557 PARAMETER Experiment Name: At_Drought_Soil_Dry_P Parameter: Plant Line Value: WS
  misc_feature: MA Experiment 20001557 PARAMETER Experiment Name: At_Drought_Soil_Dry_P Parameter: Post Timepoint (hr) Value: 3
  misc_feature: MA Experiment 20001557 PARAMETER Experiment Name: At_Drought_Soil_Dry_P Parameter: Post-Treatment Value: Re-Water vs. No Drought
  misc_feature: MA Experiment 20001557 PARAMETER Experiment Name: At_Drought_Soil_Dry_P Parameter: Timepoint (day) Value: 13
  misc_feature: MA Experiment 20001557 PARAMETER Experiment Name: At_Drought_Soil_Dry_P Parameter: Treatment Value: Drought vs. No Drought
gttgtttatttctgaagaagaagaaaaacagagcatcataagaagaaaaaaaaaaagcaatgggatccttagttcatgtgaaagaagccacagttattactccttccgaccaaacaccttcttctgttctgtctctctccgctttagattctcagcttttcctccgattcaccattgaatacctcctcgtttacccacccgtttccgacccggagtattctctctccggtcgtctcaaatccgctctctctcgcgctctcgttccttacttccctttctccggccgcgtccgagaaaaacccgacggcggcggaggtctcgaggtcaattgccgtggccaaggtgctctgtttcttgaagccgtctctgacatcctcacgtgccttgactttcagaaacctccccggcacgtgactagctggagaaagcttctttcgctccacgtcatcgatgtcctcgctggtgctccacctctcgtcgttcagctcacttggctccgtgacggtggtgctgctttagccgtcggtgttaaccactgcgtctccgatggaatcggtagcgccgagtttctcactttattcgccgagttatctaaagactcactgagtcaaaccgagttaaaacggaaacatctctgggatcgtcaattgcttatgccgtctccgattcgtgactcgttgagtcatcccgagttcaaccgtgttcccgatctatgcggattcgttaaccgattcaacgccgagcgactcgttcctacatcggttgtcttcgagagacagaaacttaacgagctaaagaaactcgcgagtcgactcggtgagttcaattctaaacacacatcgttcgaggtactctctgcacatgtatggcggagctgggcgagatcactgaacttgccatcgaatcaggtccttaagcttttgtttagcgtcaacattagagaccgagtcaaaccgagtctacccagtgggttctacgggaacgcattcgtcgtcggatgtgctcaaaccaccgtgaaagacttgacggagaaaggattaagctacgcgacgatgctcgtgaaacaagcgaaggagcgagtcggtgacgagtacgtcagatcggtggtggaagctgtgagcaaggagagagcgagtcctgactcggttggagtcttgatactgtcgcaatggtcacgtctcggtttagagaagcttgattttggtttgggtaaaccggttcatgttggatcggtctgttgcgaccgttactgtttgttgcttccgattcctgaacaaaatgacgccgttaaagtaatggtcgccgttccgtcaagctctgttgacacgtacgagaatcttgtgacgagtcctaacgcttagattagagaaaggataaattctaattttttactctttacgttttttacttttttacctttttctaaaataaattatgaactctcctccgttgacttgtaaaatatgagttttgacttattttattttaaatccatttttggttttctt

SEQ ID NO: 39300 - protein, 433 aa, Arabidopsis thaliana
  peptide (1)..(433): Ceres Seq. ID no. 12328952
  misc_feature (3)..(428): Pfam Name: Transferase family Pfam Description: Transferase family
  misc_feature (4)..(428): Homolog of NCBI NO: 34222064 NR Description: At3g48720 [Arabidopsis thaliana]
  misc_feature (4)..(428): Homolog of NCBI NO: 15229017 NR Description: putative protein; protein id: At3g48720.1
  misc_feature (4)..(428): Homolog of NCBI NO: 21553692 NR Description: acyltransferase-like protein [Arabidopsis
  misc_feature (5)..(425): Homolog of NCBI NO: 28380187 NR Description: Taxadien-5-alpha-ol O-acetyltransferase
  misc_feature (5)..(425): Homolog of NCBI NO: 30693725 NR Description: transferase family [Arabidopsis thaliana]
  misc_feature (5)..(425): Homolog of NCBI NO: 30693723 NR Description: transferase family [Arabidopsis thaliana]
  misc_feature (1)..(425): Homolog of NCBI NO: 34914932 NR Description: B1096D03.33 [Oryza sativa (japonica
  misc_feature (1)..(426): Homolog of NCBI NO: 34894074 NR Description: putative benzoyltransferase
  misc_feature (4)..(425): Homolog of NCBI NO: 15217644 NR Description: putative hypersensitivity-related protein
  misc_feature (1)..(433): Homolog of NCBI NO: 15225663 NR Description: putative anthranilate
MGSLVHVKEATVITPSDQTPSSVLSLSALDSQLFLRFTIEYLLVYPPVSDPEYSLSGRLKSALSRALVPYFPFSGRVREKPDGGGGLEVNCRGQGALFLEAVSDILTCLDFQKPPRHVTSWRKLLSLHVIDVLAGAPPLVVQLTWLRDGGAALAVGVNHCVSDGIGSAEFLTLFAELSKDSLSQTELKRKHLWDRQLLMPSPIRDSLSHPEFNRVPDLCGFVNRFNAERLVPTSVVFERQKLNELKKLASRLGEFNSKHTSFEVLSAHVWRSWARSLNLPSNQVLKLLFSVNIRDRVKPSLPSGFYGNAFVVGCAQTTVKDLTEKGLSYATMLVKQAKERVGDEYVRSVVEAVSKERASPDSVGVLILSQWSRLGLEKLDFGLGKPVHVGSVCCDRYCLLLPIPEQNDAVKVMVAVPSSSVDTYENLVTSPNA

SEQ ID NO: 39301 - protein, 235 aa, Arabidopsis thaliana
  peptide (1)..(235): Ceres Seq. ID no. 12328953
  misc_feature (1)..(230): Pfam Name: Transferase family Pfam Description: Transferase family
  misc_feature (1)..(230): Homolog of NCBI NO: 34222064 NR Description: At3g48720 [Arabidopsis thaliana]
  misc_feature (1)..(230): Homolog of NCBI NO: 15229017 NR Description: putative protein; protein id: At3g48720.1
  misc_feature (1)..(230): Homolog of NCBI NO: 21553692 NR Description: acyltransferase-like protein [Arabidopsis
  misc_feature (1)..(227): Homolog of NCBI NO: 28380187 NR Description: Taxadien-5-alpha-ol O-acetyltransferase
  misc_feature (1)..(227): Homolog of NCBI NO: 30693725 NR Description: transferase family [Arabidopsis thaliana]
  misc_feature (1)..(227): Homolog of NCBI NO: 30693723 NR Description: transferase family [Arabidopsis thaliana]
  misc_feature (1)..(227): Homolog of NCBI NO: 34914932 NR Description: B1096D03.33 [Oryza sativa (japonica
  misc_feature (1)..(228): Homolog of NCBI NO: 34894074 NR Description: putative benzoyltransferase
  misc_feature (1)..(227): Homolog of NCBI NO: 15217644 NR Description: putative hypersensitivity-related protein
  misc_feature (1)..(235): Homolog of NCBI NO: 15225663 NR Description: putative anthranilate
MPSPIRDSLSHPEFNRVPDLCGFVNRFNAERLVPTSVVFERQKLNELKKLASRLGEFNSKHTSFEVLSAHVWRSWARSLNLPSNQVLKLLFSVNIRDRVKPSLPSGFYGNAFVVGCAQTTVKDLTEKGLSYATMLVKQAKERVGDEYVRSVVEAVSKERASPDSVGVLILSQWSRLGLEKLDFGLGKPVHVGSVCCDRYCLLLPIPEQNDAVKVMVAVPSSSVDTYENLVTSPNA

SEQ ID NO: 39302 - DNA, 1330 bp, Arabidopsis thaliana
  misc_feature (1)..(1330): Ceres Seq. ID no. 13580365
  misc_feature: MA Experiment ID: 108434 Result: Up-regulated in Transcription
  misc_feature: MA Experiment 108434 PARAMETER Experiment Name: At_Root_Tips_cDNA_P Parameter: Tissue Value: Root Tips
  misc_feature: MA Experiment ID: 108462 Result: Down-regulated in Transcription
  misc_feature: MA Experiment 108462 PARAMETER Experiment Name: At_Germinating_Seeds_cDNA_P Parameter: Age (day) Value: 2 vs. 0
  misc_feature: MA Experiment 108462 PARAMETER Experiment Name: At_Germinating_Seeds_cDNA_P Parameter: Tissue Value: Germinating Seeds
  misc_feature: MA Experiment ID: 108463 Result: Down-regulated in Transcription
  misc_feature: MA Experiment 108463 PARAMETER Experiment Name: At_Germinating_Seeds_cDNA_P Parameter: Age (day) Value: 3 vs. 0
  misc_feature: MA Experiment 108463 PARAMETER Experiment Name: At_Germinating_Seeds_cDNA_P Parameter: Tissue Value: Germinating Seeds
  misc_feature: MA Experiment ID: 108464 Result: Down-regulated in Transcription
  misc_feature: MA Experiment 108464 PARAMETER Experiment Name: At_Germinating_Seeds_cDNA_P Parameter: Age (day) Value: 4 vs. 0
  misc_feature: MA Experiment 108464 PARAMETER Experiment Name: At_Germinating_Seeds_cDNA_P Parameter: Tissue Value: Germinating Seeds
  misc_feature: MA Experiment ID: 108561 Result: Down-regulated in Transcription
  misc_feature: MA Experiment 108561 PARAMETER Experiment Name: At_100uM_ABA_cDNA_P Parameter: Timepoint (hr) Value: 6
  misc_feature: MA Experiment 108561 PARAMETER Experiment Name: At_100uM_ABA_cDNA_P Parameter: Tissue Value: Aerial
  misc_feature: MA Experiment 108561 PARAMETER Experiment Name: At_100uM_ABA_cDNA_P Parameter: Treatment Value: 100uM ABA vs. No Treatment
  misc_feature: MA Experiment ID: 108577 Result: Down-regulated in Transcription
  misc_feature: MA Experiment 108577 PARAMETER Experiment Name: At_42deg_Heat_cDNA_P Parameter: Temperature (deg C) Value: 42 vs. 22
  misc_feature: MA Experiment 108577 PARAMETER Experiment Name: At_42deg_Heat_cDNA_P Parameter: Timepoint (hr) Value: 6
  misc_feature: MA Experiment 108577 PARAMETER Experiment Name: At_42deg_Heat_cDNA_P Parameter: Tissue Value: Aerial
  misc_feature: MA Experiment ID: 108585 Result: Down-regulated in Transcription
  misc_feature: MA Experiment 108585 PARAMETER Experiment Name: At_5mM_NaNP_cDNA_P Parameter: Timepoint (hr) Value: 6
  misc_feature: MA Experiment 108585 PARAMETER Experiment Name: At_5mM_NaNP_cDNA_P Parameter: Tissue Value: Aerial
  misc_feature: MA Experiment 108585 PARAMETER Experiment Name: At_5mM_NaNP_cDNA_P Parameter: Treatment Value: null
  misc_feature: MA Experiment ID: 108595 Result: Down-regulated in Transcription
  misc_feature: MA Experiment 108595 PARAMETER Experiment Name: At_Ler-pi_Ovule_cDNA_P Parameter: Plant Line Value: null
  misc_feature: MA Experiment ID: 108668 Result: Down-regulated in Transcription
  misc_feature: MA Experiment 108668 PARAMETER Experiment Name: At_2mM_SA_cDNA_P Parameter: Plant Line Value: WS
  misc_feature: MA Experiment 108668 PARAMETER Experiment Name: At_2mM_SA_cDNA_P Parameter: Timepoint (hr) Value: 6
  misc_feature: MA Experiment 108668 PARAMETER Experiment Name: At_2mM_SA_cDNA_P Parameter: Treatment Value: 2mM SA vs. No Treatment
  misc_feature: MA Experiment ID: 20000070 Result: Down-regulated in Transcription
  misc_feature: MA Experiment 20000070 PARAMETER Experiment Name: At_100uM_ABA_Mutants_cDNA_P Parameter: Plant Line Value: CS24
  misc_feature: MA Experiment 20000070 PARAMETER Experiment Name: At_100uM_ABA_Mutants_cDNA_P Parameter: Timepoint (hr) Value: 6
  misc_feature: MA Experiment 20000070 PARAMETER Experiment Name: At_100uM_ABA_Mutants_cDNA_P Parameter: Tissue Value: Aerial
  misc_feature: MA Experiment 20000070 PARAMETER Experiment Name: At_100uM_ABA_Mutants_cDNA_P Parameter: Treatment Value: 100uM ABA vs. No Treatment
  misc_feature: MA Experiment ID: 20000071 Result: Down-regulated in Transcription
  misc_feature: MA Experiment 20000071 PARAMETER Experiment Name: At_100uM_ABA_Mutants_cDNA_P Parameter: Plant Line Value: CS8104
  misc_feature: MA Experiment 20000071 PARAMETER Experiment Name: At_100uM_ABA_Mutants_cDNA_P Parameter: Timepoint (hr) Value: 6
  misc_feature: MA Experiment 20000071 PARAMETER Experiment Name: At_100uM_ABA_Mutants_cDNA_P Parameter: Tissue Value: Aerial
  misc_feature: MA Experiment 20000071 PARAMETER Experiment Name: At_100uM_ABA_Mutants_cDNA_P Parameter: Treatment Value: 100uM ABA vs. No Treatment
  misc_feature: MA Experiment ID: 20000072 Result: Down-regulated in Transcription
  misc_feature: MA Experiment 20000072 PARAMETER Experiment Name: At_100uM_ABA_Mutants_cDNA_P Parameter: Plant Line Value: CS8105
  misc_feature: MA Experiment 20000072 PARAMETER Experiment Name: At_100uM_ABA_Mutants_cDNA_P Parameter: Timepoint (hr) Value: 6
  misc_feature: MA Experiment 20000072 PARAMETER Experiment Name: At_100uM_ABA_Mutants_cDNA_P Parameter: Tissue Value: Aerial
  misc_feature: MA Experiment 20000072 PARAMETER Experiment Name: At_100uM_ABA_Mutants_cDNA_P Parameter: Treatment Value: 100uM ABA vs. No Treatment
  misc_feature: MA Experiment ID: 20000087 Result: Down-regulated in Transcription
  misc_feature: MA Experiment 20000087 PARAMETER Experiment Name: At_100uM_ABA_Mutants_cDNA_P Parameter: Plant Line Value: WS
  misc_feature: MA Experiment 20000087 PARAMETER Experiment Name: At_100uM_ABA_Mutants_cDNA_P Parameter: Timepoint (hr) Value: 6
  misc_feature: MA Experiment 20000087 PARAMETER Experiment Name: At_100uM_ABA_Mutants_cDNA_P Parameter: Tissue Value: Aerial
  misc_feature: MA Experiment 20000087 PARAMETER Experiment Name: At_100uM_ABA_Mutants_cDNA_P Parameter: Treatment Value: 100uM ABA vs. No Treatment
  misc_feature: MA Experiment ID: 20000314 Result: Down-regulated in Transcription
  misc_feature: MA Experiment 20000314 PARAMETER Experiment Name: At_14day_Shoots-Roots_Sub_P Parameter: Age (day) Value: 14
  misc_feature: MA Experiment 20000314 PARAMETER Experiment Name: At_14day_Shoots-Roots_Sub_P Parameter: Organism Value: A. thaliana
  misc_feature: MA Experiment 20000314 PARAMETER Experiment Name: At_14day_Shoots-Roots_Sub_P Parameter: Plant Line Value: WS
  misc_feature: MA Experiment 20000314 PARAMETER Experiment Name: At_14day_Shoots-Roots_Sub_P Parameter: Tissue Value: Roots vs. Whole Plant
  misc_feature: MA Experiment ID: 20001807 Result: Up-regulated in Transcription
  misc_feature: MA Experiment 20001807 PARAMETER Experiment Name: At_50mM_NH4NO3_L-to-H_Sub_P Parameter: Timepoint (hr) Value: 6
  misc_feature: MA Experiment 20001807 PARAMETER Experiment Name: At_50mM_NH4NO3_L-to-H_Sub_P Parameter: Tissue Value: Leaf
  misc_feature: MA Experiment 20001807 PARAMETER Experiment Name: At_50mM_NH4NO3_L-to-H_Sub_P Parameter: Treatment Value: 50mM NH4NO3 vs 100mM Mannitol
atccaaaactctctcagtcatggctcttcttcgtcttcctggcatttccctccaaattctaggtcacaaatcaaaccagaagaaccctaatcccaatgttgccttcaccaatcactctctctctttatctactccttcactatgtcgtctccatcgtcacgcgacgtttccagactcaattccagcaaaatccagaaacctcacttcgtacttctccaccacaacacaagagccagtcctcgaatcttcttcttcttcttcttcagctcctgaggtagtagaagaagagatttctaaaaccagattgattgctcagaatgttccatggacatctacacctgaagatattagatcgttgttcgagaagtacgggagtgttatcgacattgagatgtctatgcataagaaggaaagaaatagaggtttggtgttcattgaaatggcttctcctgaagaagctgcaacagctcttaaatctcttgaatcgtgtgaatatgagggtcgtcgtttgaaggtagactatgcaaagaccaaaaagaagaagacatatgcgccgcgtgagacgccttcaccagtgcctacattcaatttgtttgttgcaaacttggcatttgaagcaagggccaagcatcttaaggagttctttgatgcagacactggtaatgttgtctccactgaagttatattccatgaaaatccaaggaggtcgagtggttacgggtttgtctctttcaaaaccaagaaacaggccgaggcagcgcttattgagttccaaggaaaggattttttgggaaggccaatccattagctaaaagcaaacagtttgtgaagttgcaagcaaaagaagggttgcagccaccagaggaggaagcagaggaggaaccatctcagtctgagacaatgacccaagagcacgaaactccggctgcataaaacttagaagtcttcgttgcaggatcattgttggagatattggaattgacgaagaagcttcgagcttttaggtctttattcttcttagtttttgaccaacaagaggagtgggtacatacaagtagtacctaccttgagtaaatggtggagaggtaagaagtacaagaccgattttgttagaactgaaaactagtaagagacaggtattaccaaacgtcagtatcagaccagatcaaatctcaagaaacaaactcatgtggctcctacgaaacttgctttgttcagttaaacacaatgcttctttgtttgtcatctactttcgattacttgtttgcgtttgttatatgcttagtgtgtaacttcatatatgaacccgtactcttaagaaagttatgtt

SEQ ID NO: 39303 - protein, 268 aa, Arabidopsis thaliana
  peptide (1)..(268): Ceres Seq. ID no. 13580366
  misc_feature (197)..(267): Pfam Name: RNA recognition motif. (a.k.a. RRM, RBD, or RNP domain) Pfam Description: RNA recognition motif. (a.k.a. RRM, RBD, or RNP
  misc_feature (76)..(265): Homolog of NCBI NO: 1076509 NR Description: RNA-binding protein RNP1 precursor - kidney bean
  misc_feature (39)..(267): Homolog of NCBI NO: 133246 NR Description: 28 kDa ribonucleoprotein, chloroplast precursor
  misc_feature (81)..(267): Homolog of NCBI NO: 7446361 NR Description: RNA-binding protein - fava bean (fragment)
  misc_feature (96)..(267): Homolog of NCBI NO: 8163877 NR Description: enhancer binding protein-1; EBP1 [Entamoeba
  misc_feature (101)..(267): Homolog of NCBI NO: 34394882 NR Description: putative RNA-binding protein
  misc_feature (79)..(267): Homolog of NCBI NO: 38346724 NR Description: OSJNBa0086O06.22 [Oryza sativa (japonica
  misc_feature (16)..(267): Homolog of NCBI NO: 15226983 NR Description: 33 kDa ribonucleoprotein, chloroplast
  misc_feature (141)..(268): Homolog of NCBI NO: 25407472 NR Description: hypothetical protein AT4g09040 [imported] -
  misc_feature (7)..(163): Homolog of NCBI NO: 25407474 NR Description: hypothetical protein AT4g09050 [imported] -
  misc_feature (7)..(268): Homolog of NCBI NO: 22328520 NR Description: RNA recognition motif (RRM)-containing protein
SKTLSVMALLRLPGISLQILGHKSNQKNPNPNVAFTNHSLSLSTPSLCRLHRHATFPDSIPAKSRNLTSYFSTTTQEPVLESSSSSSSAPEVVEEEISKTRLIAQNVPWTSTPEDIRSLFEKYGSVIDIEMSMHKKERNRGLVFIEMASPEEAATALKSLESCEYEGRRLKVDYAKTKKKKTYAPRETPSPVPTFNLFVANLAFEARAKHLKEFFDADTGNVVSTEVIFHENPRRSSGYGFVSFKTKKQAEAALIEFQGKDFLGRPIH

SEQ ID NO: 39304 - protein, 262 aa, Arabidopsis thaliana
  peptide (1)..(262): Ceres Seq. ID no. 13580367
  misc_feature (191)..(261): Pfam Name: RNA recognition motif. (a.k.a. RRM, RBD, or RNP domain) Pfam Description: RNA recognition motif. (a.k.a. RRM, RBD, or RNP
  misc_feature (70)..(259): Homolog of NCBI NO: 1076509 NR Description: RNA-binding protein RNP1 precursor - kidney bean
  misc_feature (33)..(261): Homolog of NCBI NO: 133246 NR Description: 28 kDa ribonucleoprotein, chloroplast precursor
  misc_feature (75)..(261): Homolog of NCBI NO: 7446361 NR Description: RNA-binding protein - fava bean (fragment)
  misc_feature (90)..(261): Homolog of NCBI NO: 8163877 NR Description: enhancer binding protein-1; EBP1 [Entamoeba
  misc_feature (95)..(261): Homolog of NCBI NO: 34394882 NR Description: putative RNA-binding protein
  misc_feature (73)..(261): Homolog of NCBI NO: 38346724 NR Description: OSJNBa0086O06.22 [Oryza sativa (japonica
  misc_feature (10)..(261): Homolog of NCBI NO: 15226983 NR Description: 33 kDa ribonucleoprotein, chloroplast
  misc_feature (135)..(262): Homolog of NCBI NO: 25407472 NR Description: hypothetical protein AT4g09040 [imported] -
  misc_feature (1)..(157): Homolog of NCBI NO: 25407474 NR Description: hypothetical protein AT4g09050 [imported] -
  misc_feature (1)..(262): Homolog of NCBI NO: 22328520 NR Description: RNA recognition motif (RRM)-containing protein
MALLRLPGISLQILGHKSNQKNPNPNVAFTNHSLSLSTPSLCRLHRHATFPDSIPAKSRNLTSYFSTTTQEPVLESSSSSSSAPEVVEEEISKTRLIAQNVPWTSTPEDIRSLFEKYGSVIDIEMSMHKKERNRGLVFIEMASPEEAATALKSLESCEYEGRRLKVDYAKTKKKKTYAPRETPSPVPTFNLFVANLAFEARAKHLKEFFDADTGNVVSTEVIFHENPRRSSGYGFVSFKTKKQAEAALIEFQGKDFLGRPIH

SEQ ID NO: 39305 - protein, 138 aa, Arabidopsis thaliana
  peptide (1)..(138): Ceres Seq. ID no. 13580368
  misc_feature (67)..(137): Pfam Name: RNA recognition motif. (a.k.a. RRM, RBD, or RNP domain) Pfam Description: RNA recognition motif. (a.k.a. RRM, RBD, or RNP
  misc_feature (1)..(135): Homolog of NCBI NO: 1076509 NR Description: RNA-binding protein RNP1 precursor - kidney bean
  misc_feature (1)..(137): Homolog of NCBI NO: 133246 NR Description: 28 kDa ribonucleoprotein, chloroplast precursor
  misc_feature (1)..(137): Homolog of NCBI NO: 7446361 NR Description: RNA-binding protein - fava bean (fragment)
  misc_feature (1)..(137): Homolog of NCBI NO: 8163877 NR Description: enhancer binding protein-1; EBP1 [Entamoeba
  misc_feature (1)..(137): Homolog of NCBI NO: 34394882 NR Description: putative RNA-binding protein
  misc_feature (1)..(137): Homolog of NCBI NO: 38346724 NR Description: OSJNBa0086O06.22 [Oryza sativa (japonica
  misc_feature (1)..(137): Homolog of NCBI NO: 15226983 NR Description: 33 kDa ribonucleoprotein, chloroplast
  misc_feature (11)..(138): Homolog of NCBI NO: 25407472 NR Description: hypothetical protein AT4g09040 [imported] -
  misc_feature (1)..(33): Homolog of NCBI NO: 25407474 NR Description: hypothetical protein AT4g09050 [imported] -
  misc_feature (1)..(138): Homolog of NCBI NO: 22328520 NR Description: RNA recognition motif (RRM)-containing protein
MSMHKKERNRGLVFIEMASPEEAATALKSLESCEYEGRRLKVDYAKTKKKKTYAPRETPSPVPTFNLFVANLAFEARAKHLKEFFDADTGNVVSTEVIFHENPRRSSGYGFVSFKTKKQAEAALIEFQGKDFLGRPIH

SEQ ID NO: 39306 - DNA, 1278 bp, Arabidopsis thaliana
  misc_feature (1)..(1278): Ceres Seq. ID no. 12329059
  misc_feature: MA Experiment ID: 108434 Result: Up-regulated in Transcription
  misc_feature: MA Experiment 108434 PARAMETER Experiment Name: At_Root_Tips_cDNA_P Parameter: Tissue Value: Root Tips
  misc_feature: MA Experiment ID: 108462 Result: Down-regulated in Transcription
  misc_feature: MA Experiment 108462 PARAMETER Experiment Name: At_Germinating_Seeds_cDNA_P Parameter: Age (day) Value: 2 vs. 0
  misc_feature: MA Experiment 108462 PARAMETER Experiment Name: At_Germinating_Seeds_cDNA_P Parameter: Tissue Value: Germinating Seeds
  misc_feature: MA Experiment ID: 108573 Result: Up-regulated in Transcription
  misc_feature: MA Experiment 108573 PARAMETER Experiment Name: At_Drought_cDNA_P Parameter: Timepoint (hr) Value: 6
  misc_feature: MA Experiment 108573 PARAMETER Experiment Name: At_Drought_cDNA_P Parameter: Tissue Value: Aerial
  misc_feature: MA Experiment 108573 PARAMETER Experiment Name: At_Drought_cDNA_P Parameter: Treatment Value: Drought vs. No Drought
  misc_feature: MA Experiment ID: 20000214 Result: Down-regulated in Transcription
  misc_feature: MA Experiment 20000214 PARAMETER Experiment Name: At_4deg_Cold_P Parameter: Timepoint (hr) Value: 6
  misc_feature: MA Experiment ID: 20000495 Result: Up-regulated in Transcription
  misc_feature: MA Experiment 20000495 PARAMETER Experiment Name: At_Guard_Cells_P Parameter: Harvest Date Value: 8/2/2002
  misc_feature: MA Experiment 20000495 PARAMETER Experiment Name: At_Guard_Cells_P Parameter: Organism Value: A. thaliana
  misc_feature: MA Experiment 20000495 PARAMETER Experiment Name: At_Guard_Cells_P Parameter: Tissue Value: Guard Cells vs. Leaves
  misc_feature: MA Experiment ID: 20001248 Result: Up-regulated in Transcription
  misc_feature: MA Experiment 20001248 PARAMETER Experiment Name: At_Far-red-induction_P Parameter: Age (day) Value: 7
  misc_feature: MA Experiment 20001248 PARAMETER Experiment Name: At_Far-red-induction_P Parameter: Light Value: Far-red vs. White
  misc_feature: MA Experiment 20001248 PARAMETER Experiment Name: At_Far-red-induction_P Parameter: Organism Value: A. thaliana
  misc_feature: MA Experiment 20001248 PARAMETER Experiment Name: At_Far-red-induction_P Parameter: Plant Line Value: Columbia
  misc_feature: MA Experiment 20001248 PARAMETER Experiment Name: At_Far-red-induction_P Parameter: Timepoint (hr) Value: 4
  misc_feature: MA Experiment 20001248 PARAMETER Experiment Name: At_Far-red-induction_P Parameter: Tissue Value: Whole Plant
  misc_feature: MA Experiment ID: 20001450 Result: Up-regulated in Transcription
  misc_feature: MA Experiment 20001450 PARAMETER Experiment Name: At_Far-red-induction_P Parameter: Age (day) Value: 7
  misc_feature: MA Experiment 20001450 PARAMETER Experiment Name: At_Far-red-induction_P Parameter: Light Value: Far-red vs. White
  misc_feature: MA Experiment 20001450 PARAMETER Experiment Name: At_Far-red-induction_P Parameter: Organism Value: A. thaliana
  misc_feature: MA Experiment 20001450 PARAMETER Experiment Name: At_Far-red-induction_P Parameter: Plant Line Value: Columbia
  misc_feature: MA Experiment 20001450 PARAMETER Experiment Name: At_Far-red-induction_P Parameter: Timepoint (hr) Value: 8
  misc_feature: MA Experiment 20001450 PARAMETER Experiment Name: At_Far-red-induction_P Parameter: Tissue Value: Whole Plant
  misc_feature: MA Experiment ID: 20001451 Result: Up-regulated in Transcription
  misc_feature: MA Experiment 20001451 PARAMETER Experiment Name: At_Far-red-induction_P Parameter: Age (day) Value: 7
  misc_feature: MA Experiment 20001451 PARAMETER Experiment Name: At_Far-red-induction_P Parameter: Light Value: Far-red vs. White
  misc_feature: MA Experiment 20001451 PARAMETER Experiment Name: At_Far-red-induction_P Parameter: Organism Value: A. thaliana
  misc_feature: MA Experiment 20001451 PARAMETER Experiment Name: At_Far-red-induction_P Parameter: Plant Line Value: Columbia
  misc_feature: MA Experiment 20001451 PARAMETER Experiment Name: At_Far-red-induction_P Parameter: Timepoint (hr) Value: 24
  misc_feature: MA Experiment 20001451 PARAMETER Experiment Name: At_Far-red-induction_P Parameter: Tissue Value: Whole Plant
  misc_feature: MA Experiment ID: 20001911 Result: Up-regulated in Transcription
  misc_feature: MA Experiment 20001911 PARAMETER Experiment Name: At_Drought_Reproduction_P Parameter: Age (day) Value: 40
  misc_feature: MA Experiment 20001911 PARAMETER Experiment Name: At_Drought_Reproduction_P Parameter: Organism Value: A. thaliana
  misc_feature: MA Experiment 20001911 PARAMETER Experiment Name: At_Drought_Reproduction_P Parameter: Plant Line Value: WS
  misc_feature: MA Experiment 20001911 PARAMETER Experiment Name: At_Drought_Reproduction_P Parameter: Timepoint (day) Value: 10
  misc_feature: MA Experiment 20001911 PARAMETER Experiment Name: At_Drought_Reproduction_P Parameter: Tissue Value: Flowers
  misc_feature: MA Experiment 20001911 PARAMETER Experiment Name: At_Drought_Reproduction_P Parameter: Treatment Value: Drought vs. No Drought
tccggcgtgattcttgagaagaactgaagtgtagagagagatctgaaatctcaatctccgatttaacttgcgacaatgcttcaaattcgtcttcggagggattccccgacggaaactggaaatggtgcgaggccttctccgacggagacggttactgtagcctgtcccgaccatctcgtcctcgccgatcttcctgttgcgaaaggaatcggttccgtgactcccaccacagtaatcaagcccgtcggtcgtcgttctcgccgtcagctaggcgagagagttcacttctgcgttcgttgcgattttccgattgcaatctatggtcgtctgattccttgtgatcatgccttttgccttgaatgtgctcgcagtgattccatctgctatctatgtgatgagcggattcagaagattcaaacaatcaagatgatggaagggatcttcatctgtgcagctcctcattgtcttaggtctttcctgaagaaacttgactttgaagcccatgtccatgacctccatggaagcctattacaagccgatgcagagaaagaagatggtaaccagtcagatgttcagagcacaatgcagcagtcttcagcttcaaaatccaccttgcgagctcctttaagatcccagctgcaacaatcccgtgaactaaacaggtcggcgtcatttgcaaagtcacagtctggatttagtcaagtccagaattaccctccagatagcgataactctcgccctcctggattcgaaaccgctagtcctaaaccaggaatccggttcccagactacccccagcctatgaatcttatgcaaccgcccagcttgcccgttccaatgaatcaaaacccgggtttaccacagcagtttggttttccttcgtatccaacaacagagagtggatcatctcaacaattctttaacggtgctcagtacgagatgacaagaacagagagcggcggcggatcagaacaaagttcattgctcgggtatcccccgccttcaccaatgacgaatctgaatttccaaggatcgtatcctcctccatcatggaatcccggaatggcaccgcctcacacgacccagcaggttaaccggggtagagacggtcaaagttttgggtggccacaagagaaccgtgatggctttgggcaggagtaagagtagtctagtttgaatttgtgcaatgttaaacttgtcgtttgaaagtttcaagtgcttttgtttctaaaaactgtgtcgtttgttgttggtctaacatgtaattcgagtaaaccc

SEQ ID NO: 39307 - protein, 361 aa, Arabidopsis thaliana
  peptide (1)..(361): Ceres Seq. ID no. 12329060
  misc_feature (65)..(148): Homolog of NCBI NO: 34864203 NR Description: similar to Casitas B-lineage lymphoma-like 1
  misc_feature (20)..(148): Homolog of NCBI NO: 19921556 NR Description: CG10263-PA [Drosophila melanogaster]
  misc_feature (65)..(148): Homolog of NCBI NO: 19527264 NR Description: E-cadherin binding protein E7 [Mus musculus]
  misc_feature (65)..(148): Homolog of NCBI NO: 9622093 NR Description: E-cadherin binding protein E7 [Mus musculus]
  misc_feature (65)..(148): Homolog of NCBI NO: 34785057 NR Description: E-cadherin binding protein E7 [Homo sapiens]
  misc_feature (65)..(148): Homolog of NCBI NO: 13376204 NR Description: E-cadherin binding protein E7 [Homo sapiens]
  misc_feature (65)..(148): Homolog of NCBI NO: 26339810 NR Description: unnamed protein product [Mus musculus]
  misc_feature (11)..(256): Homolog of NCBI NO: 37535662 NR Description: hypothetical protein [Oryza sativa (japonica
  misc_feature (1)..(361): Homolog of NCBI NO: 15240902 NR Description: putative protein
  misc_feature (1)..(361): Homolog of NCBI NO: 21536615 NR Description: unknown [Arabidopsis thaliana]
MLQIRLRRDSPTETGNGARPSPTETVTVACPDHLVLADLPVAKGIGSVTPTTVIKPVGRRSRRQLGERVHFCVRCDFPIAIYGRLIPCDHAFCLECARSDSICYLCDERIQKIQTIKMMEGIFICAAPHCLRSFLKKLDFEAHVHDLHGSLLQADAEKEDGNQSDVQSTMQQSSASKSTLRAPLRSQLQQSRELNRSASFAKSQSGFSQVQNYPPDSDNSRPPGFETASPKPGIRFPDYPQPMNLMQPPSLPVPMNQNPGLPQQFGFPSYPTTESGSSQQFFNGAQYEMTRTESGGGSEQSSLLGYPPPSPMTNLNFQGSYPPPSWNPGMAPPHTTQQVNRGRDGQSFGWPQENRDGFGQE

SEQ ID NO: 39308 - protein, 244 aa, Arabidopsis thaliana
  peptide (1)..(244): Ceres Seq. ID no. 12329061
  misc_feature (1)..(31): Homolog of NCBI NO: 34864203 NR Description: similar to Casitas B-lineage lymphoma-like 1
  misc_feature (1)..(31): Homolog of NCBI NO: 19921556 NR Description: CG10263-PA [Drosophila melanogaster]
  misc_feature (1)..(31): Homolog of NCBI NO: 19527264 NR Description: E-cadherin binding protein E7 [Mus musculus]
  misc_feature (1)..(31): Homolog of NCBI NO: 9622093 NR Description: E-cadherin binding protein E7 [Mus musculus]
  misc_feature (1)..(31): Homolog of NCBI NO: 34785057 NR Description: E-cadherin binding protein E7 [Homo sapiens]
  misc_feature (1)..(31): Homolog of NCBI NO: 13376204 NR Description: E-cadherin binding protein E7 [Homo sapiens]
  misc_feature (1)..(31): Homolog of NCBI NO: 26339810 NR Description: unnamed protein product [Mus musculus]
  misc_feature (1)..(139): Homolog of NCBI NO: 37535662 NR Description: hypothetical protein [Oryza sativa (japonica
  misc_feature (1)..(244): Homolog of NCBI NO: 15240902 NR Description: putative protein
  misc_feature (1)..(244): Homolog of NCBI NO: 21536615 NR Description: unknown [Arabidopsis thaliana]
MMEGIFICAAPHCLRSFLKKLDFEAHVHDLHGSLLQADAEKEDGNQSDVQSTMQQSSASKSTLRAPLRSQLQQSRELNRSASFAKSQSGFSQVQNYPPDSDNSRPPGFETASPKPGIRFPDYPQPMNLMQPPSLPVPMNQNPGLPQQFGFPSYPTTESGSSQQFFNGAQYEMTRTESGGGSEQSSLLGYPPPSPMTNLNFQGSYPPPSWNPGMAPPHTTQQVNRGRDGQSFGWPQENRDGFGQE

SEQ ID NO: 39309 - protein, 243 aa, Arabidopsis thaliana
  peptide (1)..(243): Ceres Seq. ID no. 12329062
  misc_feature (1)..(30): Homolog of NCBI NO: 34864203 NR Description: similar to Casitas B-lineage lymphoma-like 1
  misc_feature (1)..(30): Homolog of NCBI NO: 19921556 NR Description: CG10263-PA [Drosophila melanogaster]
  misc_feature (1)..(30): Homolog of NCBI NO: 19527264 NR Description: E-cadherin binding protein E7 [Mus musculus]
  misc_feature (1)..(30): Homolog of NCBI NO: 9622093 NR Description: E-cadherin binding protein E7 [Mus musculus]
  misc_feature (1)..(30): Homolog of NCBI NO: 34785057 NR Description: E-cadherin binding protein E7 [Homo sapiens]
  misc_feature (1)..(30): Homolog of NCBI NO: 13376204 NR Description: E-cadherin binding protein E7 [Homo sapiens]
  misc_feature (1)..(30): Homolog of NCBI NO: 26339810 NR Description: unnamed protein product [Mus musculus]
  misc_feature (1)..(138): Homolog of NCBI NO: 37535662 NR Description: hypothetical protein [Oryza sativa (japonica
  misc_feature (1)..(243): Homolog of NCBI NO: 15240902 NR Description: putative protein
  misc_feature (1)..(243): Homolog of NCBI NO: 21536615 NR Description: unknown [Arabidopsis thaliana]
MEGIFICAAPHCLRSFLKKLDFEAHVHDLHGSLLQADAEKEDGNQSDVQSTMQQSSASKSTLRAPLRSQLQQSRELNRSASFAKSQSGFSQVQNYPPDSDNSRPPGFETASPKPGIRFPDYPQPMNLMQPPSLPVPMNQNPGLPQQFGFPSYPTTESGSSQQFFNGAQYEMTRTESGGGSEQSSLLGYPPPSPMTNLNFQGSYPPPSWNPGMAPPHTTQQVNRGRDGQSFGWPQENRDGFGQE

SEQ ID NO: 39310 - DNA, 1943 bp, Arabidopsis thaliana
  misc_feature (1)..(1943): Ceres Seq. ID no. 13495871
  misc_feature: MA Experiment ID: 108569 Result: Up-regulated in Transcription
  misc_feature: MA Experiment 108569 PARAMETER Experiment Name: At_0.001%_MeJA__cDNA_P Parameter: Timepoint (hr) Value: 6
  misc_feature: MA Experiment 108569 PARAMETER Experiment Name: At_0.001%_MeJA__cDNA_P Parameter: Tissue Value: Aerial
  misc_feature: MA Experiment 108569 PARAMETER Experiment Name: At_0.001%_MeJA__cDNA_P Parameter: Treatment Value: 0.001% MeJA vs. No Treatment
  misc_feature: MA Experiment ID: 108573 Result: Up-regulated in Transcription
  misc_feature: MA Experiment 108573 PARAMETER Experiment Name: At_Drought_cDNA_P Parameter: Timepoint (hr) Value: 6
  misc_feature: MA Experiment 108573 PARAMETER Experiment Name: At_Drought_cDNA_P Parameter: Tissue Value: Aerial
  misc_feature: MA Experiment 108573 PARAMETER Experiment Name: At_Drought_cDNA_P Parameter: Treatment Value: Drought vs. No Drought
  misc_feature: MA Experiment ID: 108576 Result: Down-regulated in Transcription
  misc_feature: MA Experiment 108576 PARAMETER Experiment Name: At_42deg_Heat_cDNA_P Parameter: Temperature (deg C) Value: 42 vs. 22
  misc_feature: MA Experiment 108576 PARAMETER Experiment Name: At_42deg_Heat_cDNA_P Parameter: Timepoint (hr) Value: 1
  misc_feature: MA Experiment 108576 PARAMETER Experiment Name: At_42deg_Heat_cDNA_P Parameter: Tissue Value: Aerial
  misc_feature: MA Experiment ID: 108577 Result: Down-regulated in Transcription
  misc_feature: MA Experiment 108577 PARAMETER Experiment Name: At_42deg_Heat_cDNA_P Parameter: Temperature (deg C) Value: 42 vs. 22
  misc_feature: MA Experiment 108577 PARAMETER Experiment Name: At_42deg_Heat_cDNA_P Parameter: Timepoint (hr) Value: 6
  misc_feature: MA Experiment 108577 PARAMETER Experiment Name: At_42deg_Heat_cDNA_P Parameter: Tissue Value: Aerial
  misc_feature: MA Experiment ID: 108585 Result: Up-regulated in Transcription
  misc_feature: MA Experiment 108585 PARAMETER Experiment Name: At_5mM_NaNP_cDNA_P Parameter: Timepoint (hr) Value: 6
  misc_feature: MA Experiment 108585 PARAMETER Experiment Name: At_5mM_NaNP_cDNA_P Parameter: Tissue Value: Aerial
  misc_feature: MA Experiment 108585 PARAMETER Experiment Name: At_5mM_NaNP_cDNA_P Parameter: Treatment Value: null
  misc_feature: MA Experiment ID: 20000113 Result: Down-regulated in Transcription
  misc_feature: MA Experiment 20000113 PARAMETER Experiment Name: At_42deg_Heat_cDNA_P Parameter: Temperature (deg C) Value: 42 vs. 22
  misc_feature: MA Experiment 20000113 PARAMETER Experiment Name: At_42deg_Heat_cDNA_P Parameter: Timepoint (hr) Value: 8
  misc_feature: MA Experiment 20000113 PARAMETER Experiment Name: At_42deg_Heat_cDNA_P Parameter: Tissue Value: Aerial
  misc_feature: MA Experiment ID: 20000171 Result: Down-regulated in Transcription
  misc_feature: MA Experiment 20000171 PARAMETER Experiment Name: At_42deg_Heat_P Parameter: Age (day) Value: 14
  misc_feature: MA Experiment 20000171 PARAMETER Experiment Name: At_42deg_Heat_P Parameter: Organism Value: A. thaliana
  misc_feature: MA Experiment 20000171 PARAMETER Experiment Name: At_42deg_Heat_P Parameter: Plant Line Value: WS
  misc_feature: MA Experiment 20000171 PARAMETER Experiment Name: At_42deg_Heat_P Parameter: Temperature (deg C) Value: 42 vs. 22
  misc_feature: MA Experiment 20000171 PARAMETER Experiment Name: At_42deg_Heat_P Parameter: Timepoint (hr) Value: 1
  misc_feature: MA Experiment 20000171 PARAMETER Experiment Name: At_42deg_Heat_P Parameter: Tissue Value: Aerial
  misc_feature: MA Experiment ID: 20000173 Result: Down-regulated in Transcription
  misc_feature: MA Experiment 20000173 PARAMETER Experiment Name: At_42deg_Heat_P Parameter: Age (day) Value: 14
  misc_feature: MA Experiment 20000173 PARAMETER Experiment Name: At_42deg_Heat_P Parameter: Organism Value: A. thaliana
  misc_feature: MA Experiment 20000173 PARAMETER Experiment Name: At_42deg_Heat_P Parameter: Plant Line Value: WS
  misc_feature: MA Experiment 20000173 PARAMETER Experiment Name: At_42deg_Heat_P Parameter: Temperature (deg C) Value: 42 vs. 22
  misc_feature: MA Experiment 20000173 PARAMETER Experiment Name: At_42deg_Heat_P Parameter: Timepoint (hr) Value: 6
  misc_feature: MA Experiment 20000173 PARAMETER Experiment Name: At_42deg_Heat_P Parameter: Tissue Value: Aerial
  misc_feature: MA Experiment ID: 20000185 Result: Up-regulated in Transcription
  misc_feature: MA Experiment 20000185 PARAMETER Experiment Name: At_Roots__P Parameter: Age (day) Value: 7 vs. 21
  misc_feature: MA Experiment 20000185 PARAMETER Experiment Name: At_Roots__P Parameter: Organism Value: A. thaliana
  misc_feature: MA Experiment 20000185 PARAMETER Experiment Name: At_Roots__P Parameter: Tissue Value: Roots vs. Whole Plant
  misc_feature: MA Experiment ID: 20001451 Result: Up-regulated in Transcription
  misc_feature: MA Experiment 20001451 PARAMETER Experiment Name: At_Far-red-induction_P Parameter: Age (day) Value: 7
  misc_feature: MA Experiment 20001451 PARAMETER Experiment Name: At_Far-red-induction_P Parameter: Light Value: Far-red vs. White
  misc_feature: MA Experiment 20001451 PARAMETER Experiment Name: At_Far-red-induction_P Parameter: Organism Value: A. thaliana
  misc_feature: MA Experiment 20001451 PARAMETER Experiment Name: At_Far-red-induction_P Parameter: Plant Line Value: Columbia
  misc_feature: MA Experiment 20001451 PARAMETER Experiment Name: At_Far-red-induction_P Parameter: Timepoint (hr) Value: 24
  misc_feature: MA Experiment 20001451 PARAMETER Experiment Name: At_Far-red-induction_P Parameter: Tissue Value: Whole Plant
gattgattccaatcttctttcattttcttcttcttcttcttcttcttcttctgctggggaaggggcaggttaaaattatgccatctattcaaatcgtgcctatcctcagatcttaactcttttctctacgagattcggcatctgggttttattcttcttgagcaaaatgcaatcggataatggaaagcttttcatcggtgggatatcttgggacaccaatgaggaacgtctcaaggagtatttcagcagttttggagaagtgatcgaagctgtcatcttgaaagatcgtaccactggtcgtgctcgtggtttcggttttgttgtntttgctgatcctgctgttgctgagattgttatcaccgaaaaacataatattgatggcagattggttgaagccaagaaagctgttcccagagatgaccaaaacatggtaaatagaagcaacagcagtagcatccaaggttctcccggtggtccaggtcgcacaaggaagatatttgttggaggattaccttcttcggttacagagagtgatttcaagacgtattttgagcagtttggtacaactacggatgtggttgtcatgtatgatcacaacacacaaaggcctagaggtttcgggtttataacctacgattccgaggaggcggttgaaaaggtattgctcaagacattccatgaactaaatggtaaaatggttgaggttaagcgagctgttccaaaggagttatctccaggtccaagtcgcagtcctyttggtgcaggttacakctatggagttaatagggtcaataacctccttaatgggtatgctcaagggtttaatcccgctgcagttggaggctacggacttakgattggatggtcggttcagtccggttggtgctggaagaagcgggtttgcaaattacagttctggatacgggatgaatgtgaactttgatcagggattgcccacagggttcacgggaggtacaaaattacaatggaaatgttgactatggccgatgaatgagcccgtactacattggtaacaacaaacaggtttggtcctgcggttggctatgaagggggcaacggaggaggaaactcatccttyttcagttcggttacacggaacttatggggaaacaatggtggtcttaactataacaacaataatacaaactcaaactccaatacatatatgggaggatcatcaagtgggaacaacacacttagtggtccatttggaaattcaggagtcaattggggtgctcctggaggaggaaacaatgctgtgagtaacgagaatgtgaagtttggttatggaggaaacggtgaatctggttttgggttgggaacaggtggttatgcagcaagaaacccaggggctaacaaggcagcaccatcctcttcattctcttctgcctcagcaaccaacaacacgggttatgatacagcaggacttgcagagttttacgggratggtscagtttatagtgaccctacatggagatcaaccaactcctgagacagaagggcctgctccttttagctatgggattggaggaggggttccttcttcagatgtttcagctagaagttcatctccaggttatgttggcagttacagtgtgaacaagagacaaccaaacagaggcgagccatcacggtgaacgatctgtgtcttttggcgaatcttttagattatcttcttttcccttcatacaaagccagtgaggacgaaacttgatcatatcatcacctagagctaaccagagaatcccgcagacttttctgtcatggtttggttttctaaattcattgttcctcctaggcttttttctgctttcttttttttctatttttgttttcttttcttctttcaatgagggacagaagaaactgtatcagtctccggcgaggcggtaatacataaggagagttcaaaacaaaaaccc

SEQ ID NO: 39311 - protein, 258 aa, Arabidopsis thaliana
  peptide (1)..(258): Ceres Seq. ID no. 15222963
  misc_feature (110)..(180): Pfam Name: RNA recognition motif. (a.k.a. RRM, RBD, or RNP domain) Pfam Description: RNA recognition motif. (a.k.a. RRM, RBD, or RNP
  misc_feature (1)..(218): Homolog of NCBI NO: 22531168 NR Description: RNA-binding protein-like [Arabidopsis thaliana]
  misc_feature (1)..(218): Homolog of NCBI NO: 9758187 NR Description: RNA-binding protein-like [Arabidopsis thaliana]
  misc_feature (1)..(229): Homolog of NCBI NO: 21553963 NR Description: RNA-binding protein-like [Arabidopsis thaliana]
  misc_feature (1)..(229): Homolog of NCBI NO: 18422817 NR Description: heterogeneous nuclear ribonucleoprotein (hnRNP),
  misc_feature (1)..(229): Homolog of NCBI NO: 9758790 NR Description: RNA-binding protein-like [Arabidopsis thaliana]
  misc_feature (1)..(231): Homolog of NCBI NO: 38175737 NR Description: putative heterogeneous nuclear ribonucleoprotein
  misc_feature (1)..(229): Homolog of NCBI NO: 15292697 NR Description: putative RNA-binding protein [Arabidopsis
  misc_feature (1)..(229): Homolog of NCBI NO: 18398061 NR Description: heterogeneous nuclear ribonucleoprotein (hnRNP),
  misc_feature (1)..(229): Homolog of NCBI NO: 6648193 NR Description: putative RNA-binding protein [Arabidopsis
  misc_feature (1)..(229): Homolog of NCBI NO: 30680456 NR Description: heterogeneous nuclear ribonucleoprotein (hnRNP),
  misc_feature (53)..(53): Xaa is any aa, unknown or other
  misc_feature (197)..(197): Xaa is any aa, unknown or other
  misc_feature (202)..(202): Xaa is any aa, unknown or other
  misc_feature (230)..(230): Xaa is any aa, unknown or other
MQSDNGKLFIGGISWDTNEERLKEYFSSFGEVIEAVILKDRTTGRARGFGFVXFADPAVAEIVITEKHNIDGRLVEAKKAVPRDDQNMVNRSNSSSIQGSPGGPGRTRKIFVGGLPSSVTESDFKTYFEQFGTTTDVVVMYDHNTQRPRGFGFITYDSEEAVEKVLLKTFHELNGKMVEVKRAVPKELSPGPSRSPXGAGYXYGVNRVNNLLNGYAQGFNPAAVGGYGLXIGWSVQSGWCWKKRVCKLQFWIRDECEL

SEQ ID NO: 39312 - protein, 171 aa, Arabidopsis thaliana
  peptide (1)..(171): Ceres Seq. ID no. 15222964
  misc_feature (23)..(93): Pfam Name: RNA recognition motif. (a.k.a. RRM, RBD, or RNP domain) Pfam Description: RNA recognition motif. (a.k.a. RRM, RBD, or RNP
  misc_feature (1)..(131): Homolog of NCBI NO: 18423760 NR Description: RNA recognition motif (RRM)-containing protein
  misc_feature (1)..(131): Homolog of NCBI NO: 9758187 NR Description: RNA-binding protein-like [Arabidopsis thaliana]
  misc_feature (1)..(142): Homolog of NCBI NO: 21553963 NR Description: RNA-binding protein-like [Arabidopsis thaliana]
  misc_feature (1)..(142): Homolog of NCBI NO: 18422817 NR Description: heterogeneous nuclear ribonucleoprotein (hnRNP),
  misc_feature (1)..(142): Homolog of NCBI NO: 9758790 NR Description: RNA-binding protein-like [Arabidopsis thaliana]
  misc_feature (1)..(144): Homolog of NCBI NO: 38175737 NR Description: putative heterogeneous nuclear ribonucleoprotein
  misc_feature (1)..(142): Homolog of NCBI NO: 15292697 NR Description: putative RNA-binding protein [Arabidopsis
  misc_feature (1)..(142): Homolog of NCBI NO: 18398061 NR Description: heterogeneous nuclear ribonucleoprotein (hnRNP),
  misc_feature (1)..(142): Homolog of NCBI NO: 6648193 NR Description: putative RNA-binding protein [Arabidopsis
  misc_feature (1)..(142): Homolog of NCBI NO: 30680456 NR Description: heterogeneous nuclear ribonucleoprotein (hnRNP),
  misc_feature (110)..(110): Xaa is any aa, unknown or other
  misc_feature (115)..(115): Xaa is any aa, unknown or other
  misc_feature (143)..(143): Xaa is any aa, unknown or other
MVNRSNSSSIQGSPGGPGRTRKIFVGGLPSSVTESDFKTYFEQFGTTTDVVVMYDHNTQRPRGFGFITYDSEEAVEKVLLKTFHELNGKMVEVKRAVPKELSPGPSRSPXGAGYXYGVNRVNNLLNGYAQGFNPAAVGGYGLXIGWSVQSGWCWKKRVCKLQFWIRDECEL

SEQ ID NO: 39313 - DNA, 1698 bp, Arabidopsis thaliana
  misc_feature (1)..(1698): Ceres Seq. ID no. 12370784
  misc_feature: MA Experiment ID: 108435 Result: Down-regulated in Transcription
  misc_feature: MA Experiment 108435 PARAMETER Experiment Name: At_stm_Mutants_cDNA_P Parameter: Plant Line Value: wt Landsburg vs stm
  misc_feature: MA Experiment 108435 PARAMETER Experiment Name: At_stm_Mutants_cDNA_P Parameter: Tissue Value: Shoot Apical Meristem Region
  misc_feature: MA Experiment ID: 108462 Result: Up-regulated in Transcription
  misc_feature: MA Experiment 108462 PARAMETER Experiment Name: At_Germinating_Seeds_cDNA_P Parameter: Age (day) Value: 2 vs. 0
  misc_feature: MA Experiment 108462 PARAMETER Experiment Name: At_Germinating_Seeds_cDNA_P Parameter: Tissue Value: Germinating Seeds
  misc_feature: MA Experiment ID: 108463 Result: Up-regulated in Transcription
  misc_feature: MA Experiment 108463 PARAMETER Experiment Name: At_Germinating_Seeds_cDNA_P Parameter: Age (day) Value: 3 vs. 0
  misc_feature: MA Experiment 108463 PARAMETER Experiment Name: At_Germinating_Seeds_cDNA_P Parameter: Tissue Value: Germinating Seeds
  misc_feature: MA Experiment ID: 108464 Result: Up-regulated in Transcription
  misc_feature: MA Experiment 108464 PARAMETER Experiment Name: At_Germinating_Seeds_cDNA_P Parameter: Age (day) Value: 4 vs. 0
  misc_feature: MA Experiment 108464 PARAMETER Experiment Name: At_Germinating_Seeds_cDNA_P Parameter: Tissue Value: Germinating Seeds
  misc_feature: MA Experiment ID: 108488 Result: Up-regulated in Transcription
  misc_feature: MA Experiment ID: 108569 Result: Up-regulated in Transcription
  misc_feature: MA Experiment 108569 PARAMETER Experiment Name: At_0.001%_MeJA__cDNA_P Parameter: Timepoint (hr) Value: 6
  misc_feature: MA Experiment 108569 PARAMETER Experiment Name: At_0.001%_MeJA__cDNA_P Parameter: Tissue Value: Aerial
  misc_feature: MA Experiment 108569 PARAMETER Experiment Name: At_0.001%_MeJA__cDNA_P Parameter: Treatment Value: 0.001% MeJA vs. No Treatment
  misc_feature: MA Experiment ID: 108573 Result: Up-regulated in Transcription
  misc_feature: MA Experiment 108573 PARAMETER Experiment Name: At_Drought_cDNA_P Parameter: Timepoint (hr) Value: 6
  misc_feature: MA Experiment 108573 PARAMETER Experiment Name: At_Drought_cDNA_P Parameter: Tissue Value: Aerial
  misc_feature: MA Experiment 108573 PARAMETER Experiment Name: At_Drought_cDNA_P Parameter: Treatment Value: Drought vs. No Drought
  misc_feature: MA Experiment ID: 108579 Result: Up-regulated in Transcription
  misc_feature: MA Experiment 108579 PARAMETER Experiment Name: At_4deg_Cold_cDNA_P Parameter: Temperature (deg C) Value: 4 vs. 22
  misc_feature: MA Experiment 108579 PARAMETER Experiment Name: At_4deg_Cold_cDNA_P Parameter: Timepoint (hr) Value: 6
  misc_feature: MA Experiment 108579 PARAMETER Experiment Name: At_4deg_Cold_cDNA_P Parameter: Tissue Value: Aerial
  misc_feature: MA Experiment ID: 108594 Result: Down-regulated in Transcription
  misc_feature: MA Experiment 108594 PARAMETER Experiment Name: At_Ler-rhl_Root_cDNA_P Parameter: Plant Line Value: null
  misc_feature: MA Experiment ID: 108595 Result: Down-regulated in Transcription
  misc_feature: MA Experiment 108595 PARAMETER Experiment Name: At_Ler-pi_Ovule_cDNA_P Parameter: Plant Line Value: null
  misc_feature: MA Experiment ID: 108668 Result: Down-regulated in Transcription
  misc_feature: MA Experiment 108668 PARAMETER Experiment Name: At_2mM_SA_cDNA_P Parameter: Plant Line Value: WS
  misc_feature: MA Experiment 108668 PARAMETER Experiment Name: At_2mM_SA_cDNA_P Parameter: Timepoint (hr) Value: 6
  misc_feature: MA Experiment 108668 PARAMETER Experiment Name: At_2mM_SA_cDNA_P Parameter: Treatment Value: 2mM SA vs. No Treatment
  misc_feature: MA Experiment ID: 20000087 Result: Down-regulated in Transcription
  misc_feature: MA Experiment 20000087 PARAMETER Experiment Name: At_100uM_ABA_Mutants_cDNA_P Parameter: Plant Line Value: WS
  misc_feature: MA Experiment 20000087 PARAMETER Experiment Name: At_100uM_ABA_Mutants_cDNA_P Parameter: Timepoint (hr) Value: 6
  misc_feature: MA Experiment 20000087 PARAMETER Experiment Name: At_100uM_ABA_Mutants_cDNA_P Parameter: Tissue Value: Aerial
  misc_feature: MA Experiment 20000087 PARAMETER Experiment Name: At_100uM_ABA_Mutants_cDNA_P Parameter: Treatment Value: 100uM ABA vs. No Treatment
  misc_feature: MA Experiment ID: 20000089 Result: Down-regulated in Transcription
  misc_feature: MA Experiment ID: 20000166 Result: Up-regulated in Transcription
  misc_feature: MA Experiment 20000166 PARAMETER Experiment Name: At_100uM_ABA_P Parameter: Age (day) Value: 14
  misc_feature: MA Experiment 20000166 PARAMETER Experiment Name: At_100uM_ABA_P Parameter: Organism Value: A. thaliana
  misc_feature: MA Experiment 20000166 PARAMETER Experiment Name: At_100uM_ABA_P Parameter: Plant Line Value: WS
  misc_feature: MA Experiment 20000166 PARAMETER Experiment Name: At_100uM_ABA_P Parameter: Timepoint (hr) Value: 1
  misc_feature: MA Experiment 20000166 PARAMETER Experiment Name: At_100uM_ABA_P Parameter: Tissue Value: Aerial
  misc_feature: MA Experiment 20000166 PARAMETER Experiment Name: At_100uM_ABA_P Parameter: Treatment Value: 100uM ABA vs. No Treatment
  misc_feature: MA Experiment ID: 20000182 Result: Down-regulated in Transcription
  misc_feature: MA Experiment 20000182 PARAMETER Experiment Name: At_2mM_SA_P Parameter: Age (day) Value: 14
  misc_feature: MA Experiment 20000182 PARAMETER Experiment Name: At_2mM_SA_P Parameter: Organism Value: A. thaliana
  misc_feature: MA Experiment 20000182 PARAMETER Experiment Name: At_2mM_SA_P Parameter: Plant Line Value: WS
  misc_feature: MA Experiment 20000182 PARAMETER Experiment Name: At_2mM_SA_P Parameter: Timepoint (hr) Value: 6
  misc_feature: MA Experiment 20000182 PARAMETER Experiment Name: At_2mM_SA_P Parameter: Tissue Value: Aerial
  misc_feature: MA Experiment 20000182 PARAMETER Experiment Name: At_2mM_SA_P Parameter: Treatment Value: 2mM SA vs. No Treatment
  misc_feature: MA Experiment ID: 20000184 Result: Up-regulated in Transcription
  misc_feature: MA Experiment 20000184 PARAMETER Experiment Name: At_Shoots__P Parameter: Age (day) Value: 7
  misc_feature: MA Experiment 20000184 PARAMETER Experiment Name: At_Shoots__P Parameter: Tissue Value: Shoots vs. Whole Plant
  misc_feature: MA Experiment ID: 20000185 Result: Down-regulated in Transcription
  misc_feature: MA Experiment 20000185 PARAMETER Experiment Name: At_Roots__P Parameter: Age (day) Value: 7 vs. 21
  misc_feature: MA Experiment 20000185 PARAMETER Experiment Name: At_Roots__P Parameter: Organism Value: A. thaliana
  misc_feature: MA Experiment 20000185 PARAMETER Experiment Name: At_Roots__P Parameter: Tissue Value: Roots vs. Whole Plant
  misc_feature: MA Experiment ID: 20000213 Result: Up-regulated in Transcription
  misc_feature: MA Experiment 20000213 PARAMETER Experiment Name: At_4deg_Cold_P Parameter: Timepoint (hr) Value: 2
  misc_feature: MA Experiment ID: 20000224 Result: Up-regulated in Transcription
  misc_feature: MA Experiment ID: 20000264 Result: Up-regulated in Transcription
  misc_feature: MA Experiment 20000264 PARAMETER Experiment Name: At_Open_Flower_P Parameter: Age (day) Value: 21
  misc_feature: MA Experiment 20000264 PARAMETER Experiment Name: At_Open_Flower_P Parameter: Plant Line Value: WS
  misc_feature: MA Experiment 20000264 PARAMETER Experiment Name: At_Open_Flower_P Parameter: Tissue Value: Open Flower vs. Whole Plant
  misc_feature: MA Experiment ID: 20000265 Result: Up-regulated in Transcription
  misc_feature: MA Experiment 20000265 PARAMETER Experiment Name: At_Open_Flower_P Parameter: Age (day) Value: 21
  misc_feature: MA Experiment 20000265 PARAMETER Experiment Name: At_Open_Flower_P Parameter: Plant Line Value: WS
  misc_feature: MA Experiment 20000265 PARAMETER Experiment Name: At_Open_Flower_P Parameter: Tissue Value: Closed Flower vs. Whole Plant
  misc_feature: MA Experiment ID: 20000438 Result: Up-regulated in Transcription
  misc_feature: MA Experiment 20000438 PARAMETER Experiment Name: At_Shoots__P Parameter: Age (day) Value: 14
  misc_feature: MA Experiment 20000438 PARAMETER Experiment Name: At_Shoots__P Parameter: Tissue Value: Shoots vs. Whole Plant
  misc_feature: MA Experiment ID: 20000452 Result: Down-regulated in Transcription
  misc_feature: MA Experiment 20000452 PARAMETER Experiment Name: At_CS6879_Shoots-Roots_P Parameter: Age (day) Value: 14
  misc_feature: MA Experiment 20000452 PARAMETER Experiment Name: At_CS6879_Shoots-Roots_P Parameter: Organism Value: A. thaliana
  misc_feature: MA Experiment 20000452 PARAMETER Experiment Name: At_CS6879_Shoots-Roots_P Parameter: Plant Line Value: CS6879 vs. WS
  misc_feature: MA Experiment 20000452 PARAMETER Experiment Name: At_CS6879_Shoots-Roots_P Parameter: Tissue Value: Shoots
  misc_feature: MA Experiment ID: 20000496 Result: Down-regulated in Transcription
  misc_feature: MA Experiment 20000496 PARAMETER Experiment Name: At_Guard_Cells_P Parameter: Harvest Date Value: 7/19/2002
  misc_feature: MA Experiment 20000496 PARAMETER Experiment Name: At_Guard_Cells_P Parameter: Organism Value: Canola
  misc_feature: MA Experiment 20000496 PARAMETER Experiment Name: At_Guard_Cells_P Parameter: Tissue Value: Guard Cells vs. Leaves
  misc_feature: MA Experiment ID: 20000527 Result: Up-regulated in Transcription
  misc_feature: MA Experiment 20000527 PARAMETER Experiment Name: At_10percent_PEG_P Parameter: Age (day) Value: 20
  misc_feature: MA Experiment 20000527 PARAMETER Experiment Name: At_10percent_PEG_P Parameter: Organism Value: A. thaliana
  misc_feature: MA Experiment 20000527 PARAMETER Experiment Name: At_10percent_PEG_P Parameter: Plant Line Value: WS
  misc_feature: MA Experiment 20000527 PARAMETER Experiment Name: At_10percent_PEG_P Parameter: Timepoint (day) Value: 20
  misc_feature: MA Experiment 20000527 PARAMETER Experiment Name: At_10percent_PEG_P Parameter: Tissue Value: Whole Plant
  misc_feature: MA Experiment 20000527 PARAMETER Experiment Name: At_10percent_PEG_P Parameter: Treatment Value: 10percent PEG vs. No Treatment
  misc_feature: MA Experiment ID: 20000573 Result: Up-regulated in Transcription
  misc_feature: MA Experiment 20000573 PARAMETER Experiment Name: At_100uM_ABA_Mutants__P Parameter: Organism Value: A. thaliana
  misc_feature: MA Experiment 20000573 PARAMETER Experiment Name: At_100uM_ABA_Mutants__P Parameter: Plant Line Value: CS22 vs. Ler wt
  misc_feature: MA Experiment 20000573 PARAMETER Experiment Name: At_100uM_ABA_Mutants__P Parameter: Timepoint (hr) Value: N/A
  misc_feature: MA Experiment 20000573 PARAMETER Experiment Name: At_100uM_ABA_Mutants__P Parameter: Tissue Value: Whole Plant
  misc_feature: MA Experiment 20000573 PARAMETER Experiment Name: At_100uM_ABA_Mutants__P Parameter: Treatment Value: None
  misc_feature: MA Experiment ID: 20000574 Result: Up-regulated in Transcription
  misc_feature: MA Experiment 20000574 PARAMETER Experiment Name: At_100uM_ABA_Mutants__P Parameter: Organism Value: A. thaliana
  misc_feature: MA Experiment 20000574 PARAMETER Experiment Name: At_100uM_ABA_Mutants__P Parameter: Plant Line Value: CS23 vs. Ler wt
  misc_feature: MA Experiment 20000574 PARAMETER Experiment Name: At_100uM_ABA_Mutants__P Parameter: Timepoint (hr) Value: N/A
  misc_feature: MA Experiment 20000574 PARAMETER Experiment Name: At_100uM_ABA_Mutants__P Parameter: Tissue Value: Whole Plant
  misc_feature: MA Experiment 20000574 PARAMETER Experiment Name: At_100uM_ABA_Mutants__P Parameter: Treatment Value: None
  misc_feature: MA Experiment ID: 20001247 Result: Down-regulated in Transcription
  misc_feature: MA Experiment 20001247 PARAMETER Experiment Name: At_Far-red-induction_P Parameter: Age (day) Value: 7
  misc_feature: MA Experiment 20001247 PARAMETER Experiment Name: At_Far-red-induction_P Parameter: Light Value: Far-red vs. White
  misc_feature: MA Experiment 20001247 PARAMETER Experiment Name: At_Far-red-induction_P Parameter: Organism Value: A. thaliana
  misc_feature: MA Experiment 20001247 PARAMETER Experiment Name: At_Far-red-induction_P Parameter: Plant Line Value: Columbia
  misc_feature: MA Experiment 20001247 PARAMETER Experiment Name: At_Far-red-induction_P Parameter: Timepoint (hr) Value: 1
  misc_feature: MA Experiment 20001247 PARAMETER Experiment Name: At_Far-red-induction_P Parameter: Tissue Value: Whole Plant
  misc_feature: MA Experiment ID: 20001248 Result: Down-regulated in Transcription
  misc_feature: MA Experiment 20001248 PARAMETER Experiment Name: At_Far-red-induction_P Parameter: Age (day) Value: 7
  misc_feature: MA Experiment 20001248 PARAMETER Experiment Name: At_Far-red-induction_P Parameter: Light Value: Far-red vs. White
  misc_feature: MA Experiment 20001248 PARAMETER Experiment Name: At_Far-red-induction_P Parameter: Organism Value: A. thaliana
  misc_feature: MA Experiment 20001248 PARAMETER Experiment Name: At_Far-red-induction_P Parameter: Plant Line Value: Columbia
  misc_feature: MA Experiment 20001248 PARAMETER Experiment Name: At_Far-red-induction_P Parameter: Timepoint (hr) Value: 4
  misc_feature: MA Experiment 20001248 PARAMETER Experiment Name: At_Far-red-induction_P Parameter: Tissue Value: Whole Plant
  misc_feature: MA Experiment ID: 20001450 Result: Down-regulated in Transcription
  misc_feature: MA Experiment 20001450 PARAMETER Experiment Name: At_Far-red-induction_P Parameter: Age (day) Value: 7
  misc_feature: MA Experiment 20001450 PARAMETER Experiment Name: At_Far-red-induction_P Parameter: Light Value: Far-red vs. White
  misc_feature: MA Experiment 20001450 PARAMETER Experiment Name: At_Far-red-induction_P Parameter: Organism Value: A. thaliana
  misc_feature: MA Experiment 20001450 PARAMETER Experiment Name: At_Far-red-induction_P Parameter: Plant Line Value: Columbia
  misc_feature: MA Experiment 20001450 PARAMETER Experiment Name: At_Far-red-induction_P Parameter: Timepoint (hr) Value: 8
  misc_feature: MA Experiment 20001450 PARAMETER Experiment Name: At_Far-red-induction_P Parameter: Tissue Value: Whole Plant
  misc_feature: MA Experiment ID: 20001560 Result: Down-regulated in Transcription
  misc_feature: MA Experiment 20001560 PARAMETER Experiment Name: At_Drought_Soil_Dry_P Parameter: Age (day) Value: 28
  misc_feature: MA Experiment 20001560 PARAMETER Experiment Name: At_Drought_Soil_Dry_P Parameter: Organism Value: A. thaliana
  misc_feature: MA Experiment 20001560 PARAMETER Experiment Name: At_Drought_Soil_Dry_P Parameter: Plant Line Value: WS
  misc_feature: MA Experiment 20001560 PARAMETER Experiment Name: At_Drought_Soil_Dry_P Parameter: Post Timepoint (hr) Value: None
  misc_feature: MA Experiment 20001560 PARAMETER Experiment Name: At_Drought_Soil_Dry_P Parameter: Post-Treatment Value: None
  misc_feature: MA Experiment 20001560 PARAMETER Experiment Name: At_Drought_Soil_Dry_P Parameter: Timepoint (day) Value: 14
  misc_feature: MA Experiment 20001560 PARAMETER Experiment Name: At_Drought_Soil_Dry_P Parameter: Treatment Value: Drought vs. No Drought
  misc_feature: MA Experiment ID: 20001768 Result: Up-regulated in Transcription
  misc_feature: MA Experiment 20001768 PARAMETER Experiment Name: At_Far-red-enriched-adult_P Parameter: Age (day) Value: 28
  misc_feature: MA Experiment 20001768 PARAMETER Experiment Name: At_Far-red-enriched-adult_P Parameter: Light Value: Far-red enriched vs. White
  misc_feature: MA Experiment 20001768 PARAMETER Experiment Name: At_Far-red-enriched-adult_P Parameter: Organism Value: A. thaliana
  misc_feature: MA Experiment 20001768 PARAMETER Experiment Name: At_Far-red-enriched-adult_P Parameter: Plant Line Value: Columbia
  misc_feature: MA Experiment 20001768 PARAMETER Experiment Name: At_Far-red-enriched-adult_P Parameter: Timepoint (hr) Value: 1
  misc_feature: MA Experiment 20001768 PARAMETER Experiment Name: At_Far-red-enriched-adult_P Parameter: Tissue Value: Aerial
cttttatagtaatctaaaccatattgagaactagctaatagatatggatatggcctttacgcacgtttgtctatggacgctactcgccttcgtgctgacctggacggtgttctgcgttaccaacaggaagaagaaggcgccggaattggcagatgcggcagcagaggagagaagagacagtgctgctgatgttatcatcgtcggggctggtgtgggtggctcggctctcgcatattctcttgctaaggacgggcgccgagtacttgtgatagagagggatatgagagaaccagagagaatgatgggtgagtttatgcagccaggaggacgactcatgctttctaagcttggccttgaagattgtctgaatgatatagatgcccaaaaagccacgggcatggcagtttataaggacggaaaagaagctgtcgcatcttttccggtggacgacaacaattttccatatgatccgtcggctcgaacttttcacaatggtcgattcgtccaacgtctgcgccaaaaggcttcttctcttcctagtgtgcggctcgaagaaggaacggtgaagtctttaatagaagaaaaaggagtgatcaaaggagtgacatacaaaaataaagcaggcgaagaaacaacagccttggcacctctcactgtagtatgcgacggttgctactcaaaccttcgtcggtctctaaacgataacaatgctgaggttctgtcttaccaagttgcttacatctcgaagaattgtcggcttgatgatcccaaaaaccttcatttgataatgtccaaaccctcctacatcatgttgtaccaattaagcagcactgatgttcgttgtggttttgaacttttctccgccaattttccttccattgcaaaaggtgaaatggctacttttgcgaagaacactctagctcctcaggtacctccaaaacttcgcaaaatattcttgaaaggtctagatgaaggagcacacataaaagcggtgccagcaaagcgcatgacagcttctttaaccaagaaaaatggattgattgtgttgggagatgcattcaacatgcgtcatccttcggtcgcggctggtatgatggttttattgtctgacattctcattctacgtcgtcttctccagccactaagcaaccttggtgatgcaaacaaagtctcagaagtcattaagtcctttaatattatccgcaagccaatgtcagcgacggtgaacacattaggaaatgcattttctcaagttctaattgcatcaactgacgaagcaaaagaggcaatgagacaaggttgctatgattacctctctagtggtggtttttgcacgtcggggatgatggctctactaggtggcatgaatcctcgtccgctctctctcatatatcatctatgtgctatcactttacattcaattggccatcttctatctccatttccttccccccttagcatttggcatagcctcaggctttttggtttggctttgaaaatgttggttccccatctcaaggctgagggagttagcgaaatgttttttccagcaaacgcagccgcatatcgcaaaagctatatggccgcatctggtctttaaacattgatgctctaaacagcaacatacgtaagcttgtaaactcgttgaaatgttattgtaatgcttagcttacataatattacttaatgagtttctcc

SEQ ID NO: 39314 - protein, 518 aa, Arabidopsis thaliana
  peptide (1)..(518): Ceres Seq. ID no. 12370785
  misc_feature (200)..(399): Pfam Name: Monooxygenase Pfam Description: Monooxygenase
  misc_feature (45)..(508): Homolog of NCBI NO: 18406296 NR Description: squalene monooxygenase, putative; protein id:
  misc_feature (49)..(511): Homolog of NCBI NO: 27475612 NR Description: squalene monooxygenase 1 [Medicago truncatula]
  misc_feature (49)..(511): Homolog of NCBI NO: 27311240 NR Description: Putative Squalene monooxygenase
  misc_feature (45)..(511): Homolog of NCBI NO: 27311241 NR Description: Putative Squalene monooxygenase
  misc_feature (6)..(516): Homolog of NCBI NO: 15237900 NR Description: squalene monooxygenase 2 (squalene epoxidase 2)
  misc_feature (1)..(516): Homolog of NCBI NO: 6685410 NR Description: Squalene monooxygenase 1,2 (Squalene epoxidase
  misc_feature (1)..(518): Homolog of NCBI NO: 6685411 NR Description: Squalene monooxygenase 1,1 (Squalene epoxidase
  misc_feature (3)..(518): Homolog of NCBI NO: 15237903 NR Description: squalene monooxygenase 1,2 (squalene epoxidase
  misc_feature (5)..(518): Homolog of NCBI NO: 11358675 NR Description: probable squalene monooxygenase (EC 1.14.99.7)
  misc_feature (3)..(518): Homolog of NCBI NO: 15237902 NR Description: squalene monooxygenase 1,1 (squalene epoxidase
MDMAFTHVCLWTLLAFVLTWTVFCVTNRKKKAPELADAAAEERRDSAADVIIVGAGVGGSALAYSLAKDGRRVLVIERDMREPERMMGEFMQPGGRLMLSKLGLEDCLNDIDAQKATGMAVYKDGKEAVASFPVDDNNFPYDPSARTFHNGRFVQRLRQKASSLPSVRLEEGTVKSLIEEKGVIKGVTYKNKAGEETTALAPLTVVCDGCYSNLRRSLNDNNAEVLSYQVAYISKNCRLDDPKNLHLIMSKPSYIMLYQLSSTDVRCGFELFSANFPSIAKGEMATFAKNTLAPQVPPKLRKIFLKGLDEGAHIKAVPAKRMTASLTKKNGLIVLGDAFNMRHPSVAAGMMVLLSDILILRRLLQPLSNLGDANKVSEVIKSFNIIRKPMSATVNTLGNAFSQVLIASTDEAKEAMRQGCYDYLSSGGFCTSGMMALLGGMNPRPLSLIYHLCAITLHSIGHLLSPFPSPLSIWHSLRLFGLALKMLVPHLKAEGVSEMFFPANAAAYRKSYMAASGL

SEQ ID NO: 39315 - protein, 516 aa, Arabidopsis thaliana
  peptide (1)..(516): Ceres Seq. ID no. 12370786
  misc_feature (198)..(397): Pfam Name: Monooxygenase Pfam Description: Monooxygenase
  misc_feature (43)..(506): Homolog of NCBI NO: 18406296 NR Description: squalene monooxygenase, putative; protein id:
  misc_feature (47)..(509): Homolog of NCBI NO: 27475612 NR Description: squalene monooxygenase 1 [Medicago truncatula]
  misc_feature (47)..(509): Homolog of NCBI NO: 27311240 NR Description: Putative Squalene monooxygenase
  misc_feature (43)..(509): Homolog of NCBI NO: 27311241 NR Description: Putative Squalene monooxygenase
  misc_feature (4)..(514): Homolog of NCBI NO: 15237900 NR Description: squalene monooxygenase 2 (squalene epoxidase 2)
  misc_feature (1)..(514): Homolog of NCBI NO: 6685410 NR Description: Squalene monooxygenase 1,2 (Squalene epoxidase
  misc_feature (1)..(516): Homolog of NCBI NO: 6685411 NR Description: Squalene monooxygenase 1,1 (Squalene epoxidase
  misc_feature (1)..(516): Homolog of NCBI NO: 15237903 NR Description: squalene monooxygenase 1,2 (squalene epoxidase
  misc_feature (3)..(516): Homolog of NCBI NO: 11358675 NR Description: probable squalene monooxygenase (EC 1.14.99.7)
  misc_feature (1)..(516): Homolog of NCBI NO: 15237902 NR Description: squalene monooxygenase 1,1 (squalene epoxidase
MAFTHVCLWTLLAFVLTWTVFCVTNRKKKAPELADAAAEERRDSAADVIIVGAGVGGSALAYSLAKDGRRVLVIERDMREPERMMGEFMQPGGRLMLSKLGLEDCLNDIDAQKATGMAVYKDGKEAVASFPVDDNNFPYDPSARTFHNGRFVQRLRQKASSLPSVRLEEGTVKSLIEEKGVIKGVTYKNKAGEETTALAPLTVVCDGCYSNLRRSLNDNNAEVLSYQVAYISKNCRLDDPKNLHLIMSKPSYIMLYQLSSTDVRCGFELFSANFPSIAKGEMATFAKNTLAPQVPPKLRKIFLKGLDEGAHIKAVPAKRMTASLTKKNGLIVLGDAFNMRHPSVAAGMMVLLSDILILRRLLQPLSNLGDANKVSEVIKSFNIIRKPMSATVNTLGNAFSQVLIASTDEAKEAMRQGCYDYLSSGGFCTSGMMALLGGMNPRPLSLIYHLCAITLHSIGHLLSPFPSPLSIWHSLRLFGLALKMLVPHLKAEGVSEMFFPANAAAYRKSYMAASGL

SEQ ID NO: 39316 - protein, 439 aa, Arabidopsis thaliana
  peptide (1)..(439): Ceres Seq. ID no. 12370787
  misc_feature (121)..(320): Pfam Name: Monooxygenase Pfam Description: Monooxygenase
  misc_feature (1)..(429): Homolog of NCBI NO: 18406296 NR Description: squalene monooxygenase, putative; protein id:
  misc_feature (1)..(432): Homolog of NCBI NO: 27475612 NR Description: squalene monooxygenase 1 [Medicago truncatula]
  misc_feature (1)..(432): Homolog of NCBI NO: 27311240 NR Description: Putative Squalene monooxygenase
  misc_feature (1)..(432): Homolog of NCBI NO: 27311241 NR Description: Putative Squalene monooxygenase
  misc_feature (1)..(437): Homolog of NCBI NO: 15237900 NR Description: squalene monooxygenase 2 (squalene epoxidase 2)
  misc_feature (1)..(437): Homolog of NCBI NO: 6685410 NR Description: Squalene monooxygenase 1,2 (Squalene epoxidase
  misc_feature (1)..(439): Homolog of NCBI NO: 6685411 NR Description: Squalene monooxygenase 1,1 (Squalene epoxidase
  misc_feature (1)..(439): Homolog of NCBI NO: 15237903 NR Description: squalene monooxygenase 1,2 (squalene epoxidase
  misc_feature (1)..(439): Homolog of NCBI NO: 11358675 NR Description: probable squalene monooxygenase (EC 1.14.99.7)
  misc_feature (1)..(439): Homolog of NCBI NO: 15237902 NR Description: squalene monooxygenase 1,1 (squalene epoxidase
MREPERMMGEFMQPGGRLMLSKLGLEDCLNDIDAQKATGMAVYKDGKEAVASFPVDDNNFPYDPSARTFHNGRFVQRLRQKASSLPSVRLEEGTVKSLIEEKGVIKGVTYKNKAGEETTALAPLTVVCDGCYSNLRRSLNDNNAEVLSYQVAYISKNCRLDDPKNLHLIMSKPSYIMLYQLSSTDVRCGFELFSANFPSIAKGEMATFAKNTLAPQVPPKLRKIFLKGLDEGAHIKAVPAKRMTASLTKKNGLIVLGDAFNMRHPSVAAGMMVLLSDILILRRLLQPLSNLGDANKVSEVIKSFNIIRKPMSATVNTLGNAFSQVLIASTDEAKEAMRQGCYDYLSSGGFCTSGMMALLGGMNPRPLSLIYHLCAITLHSIGHLLSPFPSPLSIWHSLRLFGLALKMLVPHLKAEGVSEMFFPANAAAYRKSYMAASGL

SEQ ID NO: 39317 - DNA, 1368 bp, Arabidopsis thaliana
  misc_feature (1)..(1368): Ceres Seq. ID no. 12558338
  misc_feature: MA Experiment ID: 108434 Result: Down-regulated in Transcription
  misc_feature: MA Experiment 108434 PARAMETER Experiment Name: At_Root_Tips_cDNA_P Parameter: Tissue Value: Root Tips
  misc_feature: MA Experiment ID: 108464 Result: Up-regulated in Transcription
  misc_feature: MA Experiment 108464 PARAMETER Experiment Name: At_Germinating_Seeds_cDNA_P Parameter: Age (day) Value: 4 vs. 0
  misc_feature: MA Experiment 108464 PARAMETER Experiment Name: At_Germinating_Seeds_cDNA_P Parameter: Tissue Value: Germinating Seeds
  misc_feature: MA Experiment ID: 108577 Result: Down-regulated in Transcription
  misc_feature: MA Experiment 108577 PARAMETER Experiment Name: At_42deg_Heat_cDNA_P Parameter: Temperature (deg C) Value: 42 vs. 22
  misc_feature: MA Experiment 108577 PARAMETER Experiment Name: At_42deg_Heat_cDNA_P Parameter: Timepoint (hr) Value: 6
  misc_feature: MA Experiment 108577 PARAMETER Experiment Name: At_42deg_Heat_cDNA_P Parameter: Tissue Value: Aerial
  misc_feature: MA Experiment ID: 108585 Result: Up-regulated in Transcription
  misc_feature: MA Experiment 108585 PARAMETER Experiment Name: At_5mM_NaNP_cDNA_P Parameter: Timepoint (hr) Value: 6
  misc_feature: MA Experiment 108585 PARAMETER Experiment Name: At_5mM_NaNP_cDNA_P Parameter: Tissue Value: Aerial
  misc_feature: MA Experiment 108585 PARAMETER Experiment Name: At_5mM_NaNP_cDNA_P Parameter: Treatment Value: null
  misc_feature: MA Experiment ID: 20000227 Result: Down-regulated in Transcription
  misc_feature: MA Experiment 20000227 PARAMETER Experiment Name: At_Root-Tips-vs-Tops_P Parameter: Tissue Value: Root Tips vs. Root Tops
  misc_feature: MA Experiment ID: 20000234 Result: Down-regulated in Transcription
  misc_feature: MA Experiment 20000234 PARAMETER Experiment Name: At_Siliques_P Parameter: Age (day) Value: 21
  misc_feature: MA Experiment 20000234 PARAMETER Experiment Name: At_Siliques_P Parameter: Organism Value: A. thaliana
  misc_feature: MA Experiment 20000234 PARAMETER Experiment Name: At_Siliques_P Parameter: Plant Line Value: WS
  misc_feature: MA Experiment 20000234 PARAMETER Experiment Name: At_Siliques_P Parameter: Tissue Value: Less Than 5mm Siliques vs. Whole Plant
  misc_feature: MA Experiment ID: 20000264 Result: Down-regulated in Transcription
  misc_feature: MA Experiment 20000264 PARAMETER Experiment Name: At_Open_Flower_P Parameter: Age (day) Value: 21
  misc_feature: MA Experiment 20000264 PARAMETER Experiment Name: At_Open_Flower_P Parameter: Plant Line Value: WS
  misc_feature: MA Experiment 20000264 PARAMETER Experiment Name: At_Open_Flower_P Parameter: Tissue Value: Open Flower vs. Whole Plant
  misc_feature: MA Experiment ID: 20000265 Result: Down-regulated in Transcription
  misc_feature: MA Experiment 20000265 PARAMETER Experiment Name: At_Open_Flower_P Parameter: Age (day) Value: 21
  misc_feature: MA Experiment 20000265 PARAMETER Experiment Name: At_Open_Flower_P Parameter: Plant Line Value: WS
  misc_feature: MA Experiment 20000265 PARAMETER Experiment Name: At_Open_Flower_P Parameter: Tissue Value: Closed Flower vs. Whole Plant
  misc_feature: MA Experiment ID: 20000286 Result: Down-regulated in Transcription
  misc_feature: MA Experiment 20000286 PARAMETER Experiment Name: At_Open_Flower_P Parameter: Age (day) Value: 21
  misc_feature: MA Experiment 20000286 PARAMETER Experiment Name: At_Open_Flower_P Parameter: Plant Line Value: WS
  misc_feature: MA Experiment 20000286 PARAMETER Experiment Name: At_Open_Flower_P Parameter: Tissue Value: Half Open vs. Whole Plant
  misc_feature: MA Experiment ID: 20000794 Result: Down-regulated in Transcription
  misc_feature: MA Experiment 20000794 PARAMETER Experiment Name: At_Petals_P Parameter: Age (day) Value: 23-25 days
  misc_feature: MA Experiment 20000794 PARAMETER Experiment Name: At_Petals_P Parameter: Plant Line Value: WS
  misc_feature: MA Experiment 20000794 PARAMETER Experiment Name: At_Petals_P Parameter: Tissue Value: Petals vs. Whole plant
  misc_feature: MA Experiment ID: 20001248 Result: Down-regulated in Transcription
  misc_feature: MA Experiment 20001248 PARAMETER Experiment Name: At_Far-red-induction_P Parameter: Age (day) Value: 7
  misc_feature: MA Experiment 20001248 PARAMETER Experiment Name: At_Far-red-induction_P Parameter: Light Value: Far-red vs. White
  misc_feature: MA Experiment 20001248 PARAMETER Experiment Name: At_Far-red-induction_P Parameter: Organism Value: A. thaliana
  misc_feature: MA Experiment 20001248 PARAMETER Experiment Name: At_Far-red-induction_P Parameter: Plant Line Value: Columbia
  misc_feature: MA Experiment 20001248 PARAMETER Experiment Name: At_Far-red-induction_P Parameter: Timepoint (hr) Value: 4
  misc_feature: MA Experiment 20001248 PARAMETER Experiment Name: At_Far-red-induction_P Parameter: Tissue Value: Whole Plant
  misc_feature: MA Experiment ID: 20001451 Result: Down-regulated in Transcription
  misc_feature: MA Experiment 20001451 PARAMETER Experiment Name: At_Far-red-induction_P Parameter: Age (day) Value: 7
  misc_feature: MA Experiment 20001451 PARAMETER Experiment Name: At_Far-red-induction_P Parameter: Light Value: Far-red vs. White
  misc_feature: MA Experiment 20001451 PARAMETER Experiment Name: At_Far-red-induction_P Parameter: Organism Value: A. thaliana
  misc_feature: MA Experiment 20001451 PARAMETER Experiment Name: At_Far-red-induction_P Parameter: Plant Line Value: Columbia
  misc_feature: MA Experiment 20001451 PARAMETER Experiment Name: At_Far-red-induction_P Parameter: Timepoint (hr) Value: 24
  misc_feature: MA Experiment 20001451 PARAMETER Experiment Name: At_Far-red-induction_P Parameter: Tissue Value: Whole Plant
ttccaaggaaaaaaaaagtctttacccgtaaacattttttctccatcttcttgatatcaacaaaacacacctcaacaaaaaaaaaaaaacttcatctctctcagatttcgaaattgacccgtcggtgattcttaatctctcctctctgttcttctccgatcaaacctcattccaaagaaacaaaccatggatctccaaccagaagagcttcaattcttgacaatacctcaactacttcaagaatcaatctcaatcaagaaacgatctccaagaaccttctacctcataaccctctccttcatcttccctctctccttcgctatcctcgctcactcactcttcactcaaccaatcttagccaaactcgacaaatccgacccaccaaactcagatcgttcacgtcatgattggactgttcttctaatcttccagttcagttacttgatcttcctctttgccttctctcttctctcaaccgctgctgttgtcttcaccgtcgcttctctttacaccggaaagcctgtttctttctcgtcaactctctctgcgattcccaaagtctttaaacgactctttataactttcctttgggttgctctgttgatgtttgcttataacgcagtcttctttgtcttcctcgtgatgcttctcgtagctcttgatttgaatagtttaggtttagctattgtagccggggttataatctctgttctatactttggtgttcatgtttatttcactgctttatggcatttaggtagtgtaatctctgttcttgaaccggtttacggaatcgccgctatgagaaaagcttatgagttgcttaaagggaagactaagatggctatggggttaatctttgtttatcttttcctctgtggattgattggagttgtttttggtgctgttgtggttcatggtggtgggaagtatggaacttttactaggactttggttggtggattgttagttggtgttcttgtgatggttaatcttgtgggtttgttggttcagagtgtgttttactatgtttgtaagagttatcatcatcagactattgataagaccgctttgtatgatcaacttggtgggtatcttggagattatgtgcctcttaagagcaacattcagttggaggatttagatatttgaagatttgtcaagatgatgattctcttgtactgtttttcttctcttattaccattctctctctctctttgtagtttgtaatattggagaagaagaagaaatttggaatctgaacaatagttttaatgtaatgtgtatgtattagactcaacactctttgttgttgttttcatttgattattattacatgatttgagtttactaatttattcttgttg

SEQ ID NO: 39318 - protein, 321 aa, Arabidopsis thaliana
  peptide (1)..(321): Ceres Seq. ID no. 12558339
  misc_feature (63)..(300): Homolog of NCBI NO: 18398816 NR Description: unknown protein; protein id: At2g18680.1
  misc_feature (32)..(292): Homolog of NCBI NO: 18398818 NR Description: expressed protein
  misc_feature (15)..(292): Homolog of NCBI NO: 27817928 NR Description: P0453E05.2 [Oryza sativa (japonica
  misc_feature (15)..(287): Homolog of NCBI NO: 9295718 NR Description: T24P13.3 [Arabidopsis thaliana]
  misc_feature (15)..(292): Homolog of NCBI NO: 15222319 NR Description: unknown protein; protein id: At1g69430.1
  misc_feature (1)..(320): Homolog of NCBI NO: 34908936 NR Description: P0691E06.20 [Oryza sativa (japonica
  misc_feature (1)..(321): Homolog of NCBI NO: 7485737 NR Description: hypothetical protein F18F4.50 - Arabidopsis
  misc_feature (1)..(321): Homolog of NCBI NO: 30684945 NR Description: expressed protein [Arabidopsis thaliana]
  misc_feature (1)..(321): Homolog of NCBI NO: 15241607 NR Description: putative protein
  misc_feature (1)..(321): Homolog of NCBI NO: 18397813 NR Description: expressed protein
  misc_feature (63)..(300): Homolog of NCBI NO: 18398816 NR Description: unknown protein; protein id: At2g18680.1
  misc_feature (32)..(292): Homolog of NCBI NO: 18398818 NR Description: expressed protein
  misc_feature (15)..(292): Homolog of NCBI NO: 27817928 NR Description: P0453E05.2 [Oryza sativa (japonica
  misc_feature (15)..(287): Homolog of NCBI NO: 9295718 NR Description: T24P13.3 [Arabidopsis thaliana]
  misc_feature (15)..(292): Homolog of NCBI NO: 15222319 NR Description: unknown protein; protein id: At1g69430.1
  misc_feature (1)..(320): Homolog of NCBI NO: 34908936 NR Description: P0691E06.20 [Oryza sativa (japonica
  misc_feature (1)..(321): Homolog of NCBI NO: 7485737 NR Description: hypothetical protein F18F4.50 - Arabidopsis
  misc_feature (1)..(321): Homolog of NCBI NO: 30684945 NR Description: expressed protein [Arabidopsis thaliana]
  misc_feature (1)..(321): Homolog of NCBI NO: 15241607 NR Description: putative protein
  misc_feature (1)..(321): Homolog of NCBI NO: 18397813 NR Description: expressed protein
MDLQPEELQFLTIPQLLQESISIKKRSPRTFYLITLSFIFPLSFAILAHSLFTQPILAKLDKSDPPNSDRSRHDWTVLLIFQFSYLIFLFAFSLLSTAAVVFTVASLYTGKPVSFSSTLSAIPKVFKRLFITFLWVALLMFAYNAVFFVFLVMLLVALDLNSLGLAIVAGVIISVLYFGVHVYFTALWHLGSVISVLEPVYGIAAMRKAYELLKGKTKMAMGLIFVYLFLCGLIGVVFGAVVVHGGGKYGTFTRTLVGGLLVGVLVMVNLVGLLVQSVFYYVCKSYHHQTIDKTALYDQLGGYLGDYVPLKSNIQLEDLDI

SEQ ID NO: 39319 - protein, 182 aa, Arabidopsis thaliana
  peptide (1)..(182): Ceres Seq. ID no. 12558340
  misc_feature (1)..(161): Homolog of NCBI NO: 18398816 NR Description: unknown protein; protein id: At2g18680.1
  misc_feature (1)..(153): Homolog of NCBI NO: 18398818 NR Description: expressed protein
  misc_feature (1)..(153): Homolog of NCBI NO: 27817928 NR Description: P0453E05.2 [Oryza sativa (japonica
  misc_feature (1)..(148): Homolog of NCBI NO: 9295718 NR Description: T24P13.3 [Arabidopsis thaliana]
  misc_feature (1)..(153): Homolog of NCBI NO: 15222319 NR Description: unknown protein; protein id: At1g69430.1
  misc_feature (1)..(181): Homolog of NCBI NO: 34908936 NR Description: P0691E06.20 [Oryza sativa (japonica
  misc_feature (1)..(182): Homolog of NCBI NO: 7485737 NR Description: hypothetical protein F18F4.50 - Arabidopsis
  misc_feature (1)..(182): Homolog of NCBI NO: 30684945 NR Description: expressed protein [Arabidopsis thaliana]
  misc_feature (1)..(182): Homolog of NCBI NO: 15241607 NR Description: putative protein
  misc_feature (1)..(182): Homolog of NCBI NO: 18397813 NR Description: expressed protein
  misc_feature (1)..(161): Homolog of NCBI NO: 18398816 NR Description: unknown protein; protein id: At2g18680.1
  misc_feature (1)..(153): Homolog of NCBI NO: 18398818 NR Description: expressed protein
  misc_feature (1)..(153): Homolog of NCBI NO: 27817928 NR Description: P0453E05.2 [Oryza sativa (japonica
  misc_feature (1)..(148): Homolog of NCBI NO: 9295718 NR Description: T24P13.3 [Arabidopsis thaliana]
  misc_feature (1)..(153): Homolog of NCBI NO: 15222319 NR Description: unknown protein; protein id: At1g69430.1
  misc_feature (1)..(181): Homolog of NCBI NO: 34908936 NR Description: P0691E06.20 [Oryza sativa (japonica
  misc_feature (1)..(182): Homolog of NCBI NO: 7485737 NR Description: hypothetical protein F18F4.50 - Arabidopsis
  misc_feature (1)..(182): Homolog of NCBI NO: 30684945 NR Description: expressed protein [Arabidopsis thaliana]
  misc_feature (1)..(182): Homolog of NCBI NO: 15241607 NR Description: putative protein
  misc_feature (1)..(182): Homolog of NCBI NO: 18397813 NR Description: expressed protein
MFAYNAVFFVFLVMLLVALDLNSLGLAIVAGVIISVLYFGVHVYFTALWHLGSVISVLEPVYGIAAMRKAYELLKGKTKMAMGLIFVYLFLCGLIGVVFGAVVVHGGGKYGTFTRTLVGGLLVGVLVMVNLVGLLVQSVFYYVCKSYHHQTIDKTALYDQLGGYLGDYVPLKSNIQLEDLDI

SEQ ID NO: 39320 - protein, 169 aa, Arabidopsis thaliana
  peptide (1)..(169): Ceres Seq. ID no. 12558341
  misc_feature (1)..(148): Homolog of NCBI NO: 18398816 NR Description: unknown protein; protein id: At2g18680.1
  misc_feature (1)..(140): Homolog of NCBI NO: 18398818 NR Description: expressed protein
  misc_feature (1)..(140): Homolog of NCBI NO: 27817928 NR Description: P0453E05.2 [Oryza sativa (japonica
  misc_feature (1)..(135): Homolog of NCBI NO: 9295718 NR Description: T24P13.3 [Arabidopsis thaliana]
  misc_feature (1)..(140): Homolog of NCBI NO: 15222319 NR Description: unknown protein; protein id: At1g69430.1
  misc_feature (1)..(168): Homolog of NCBI NO: 34908936 NR Description: P0691E06.20 [Oryza sativa (japonica
  misc_feature (1)..(169): Homolog of NCBI NO: 7485737 NR Description: hypothetical protein F18F4.50 - Arabidopsis
  misc_feature (1)..(169): Homolog of NCBI NO: 30684945 NR Description: expressed protein [Arabidopsis thaliana]
  misc_feature (1)..(169): Homolog of NCBI NO: 15241607 NR Description: putative protein
  misc_feature (1)..(169): Homolog of NCBI NO: 18397813 NR Description: expressed protein
  misc_feature (1)..(148): Homolog of NCBI NO: 18398816 NR Description: unknown protein; protein id: At2g18680.1
  misc_feature (1)..(140): Homolog of NCBI NO: 18398818 NR Description: expressed protein
  misc_feature (1)..(140): Homolog of NCBI NO: 27817928 NR Description: P0453E05.2 [Oryza sativa (japonica
  misc_feature (1)..(135): Homolog of NCBI NO: 9295718 NR Description: T24P13.3 [Arabidopsis thaliana]
  misc_feature (1)..(140): Homolog of NCBI NO: 15222319 NR Description: unknown protein; protein id: At1g69430.1
  misc_feature (1)..(168): Homolog of NCBI NO: 34908936 NR Description: P0691E06.20 [Oryza sativa (japonica
  misc_feature (1)..(169): Homolog of NCBI NO: 7485737 NR Description: hypothetical protein F18F4.50 - Arabidopsis
  misc_feature (1)..(169): Homolog of NCBI NO: 30684945 NR Description: expressed protein [Arabidopsis thaliana]
  misc_feature (1)..(169): Homolog of NCBI NO: 15241607 NR Description: putative protein
  misc_feature (1)..(169): Homolog of NCBI NO: 18397813 NR Description: expressed protein
MLLVALDLNSLGLAIVAGVIISVLYFGVHVYFTALWHLGSVISVLEPVYGIAAMRKAYELLKGKTKMAMGLIFVYLFLCGLIGVVFGAVVVHGGGKYGTFTRTLVGGLLVGVLVMVNLVGLLVQSVFYYVCKSYHHQTIDKTALYDQLGGYLGDYVPLKSNIQLEDLDI

SEQ ID NO: 39321 - DNA, 2811 bp, Arabidopsis thaliana
  misc_feature (1)..(2811): Ceres Seq. ID no. 13491848
  misc_feature: MA Experiment ID: 108433 Result: Down-regulated in Transcription
  misc_feature: MA Experiment 108433 PARAMETER Experiment Name: At_rhl_Mutant2_cDNA_P Parameter: Age (day) Value: 7
  misc_feature: MA Experiment 108433 PARAMETER Experiment Name: At_rhl_Mutant2_cDNA_P Parameter: Organism Value: A. thaliana
  misc_feature: MA Experiment 108433 PARAMETER Experiment Name: At_rhl_Mutant2_cDNA_P Parameter: Plant Line Value: rhl Mutant vs. wt landsburg
  misc_feature: MA Experiment 108433 PARAMETER Experiment Name: At_rhl_Mutant2_cDNA_P Parameter: Tissue Value: Roots
  misc_feature: MA Experiment ID: 108462 Result: Down-regulated in Transcription
  misc_feature: MA Experiment 108462 PARAMETER Experiment Name: At_Germinating_Seeds_cDNA_P Parameter: Age (day) Value: 2 vs. 0
  misc_feature: MA Experiment 108462 PARAMETER Experiment Name: At_Germinating_Seeds_cDNA_P Parameter: Tissue Value: Germinating Seeds
ctgcaggcttcgatagagatagagctaagcacgaaaatcccgagtaattgaccttctcttcttcccagtgttgtcttctcttctccacgaacttaattttttcaaaaccctagcaactttgattcattcaaaatccgatccaacgatgactattgaagaagtttccggtgagactcctccgtctacgcctccttcttcttctacgccttctccgtcttcctccaccaccaacgccgcgccgttgggatcctctgtgattccgattgtaaacaagctacaagacatattcgctcagctcggaagccagtctacgatcgcgcttcctcaggttgttgttgttggaagccaaagcagtggcaagtctagcgtccttgaagcactcgtcggccgtgactttctccctcgtggtaatgatatctgcacgcgtcgtcctcttgttctccagctcctccagactaaaagccgcgctaatggcggatccgatgatgagtggggggagtttcgtcaccttcctgaaactcgtttctatgatttctctgagattcgtcgagaaattgaggctgagacgaatagattagttggagagaacaaaggtgtagcagatacacagattcgtcttaaaatttcttcacctaatgtattgaacatcacgcttgtggatctgcctggtattaccaaggtgccagttggtgaccagccatccgacattgaagcacgtataagaacgatgatcttgtcttacatcaagcaagatacttgcttgatattggctgttacccctgctaataccgatctagcaaactctgatgcccttcaaattgctagcattgtagatcctgatggtcacagaacgataggtgtaatcacaaagttggatattatggacaaaggtactgatgctcgaaaactccttcttggaaatgttgttcctcttcgacttggatacgtgggagttgtaaatcgttgccaggaggatattttgctaaaccgcacagtcaaggaagcacttctcgcagaggagaagttcttccggagtcacccggtttaccatggtcttgccgatcgtttgggtgttcctcagctagcaaagaagttaaatcagatccttgttcaacatatcaaggtcttgcttccggatttgaagtcgcggataagtaatgctttggttgctacagcaaaagagcatcagagctatggtgaattaacagaatcaagggctgggcaaggagctcttctcctcaactttctctccaaatactgtgaagcatactcttcattgctggaagggaaaagtgaagaaatgtctacgtcagagctctctggaggagcaagaattcactatattttccagtcaatctttgttaagagtttggaggaggttgatccatgcgaggacttgacagatgatgatattcggactgcaattcagaatgcaactggtccaagatctgcattatttgttccagatgttccatttgaagttcttgttaggaggcagatatctcgtttgttagatcctagccttcagtgtgcccggttcatttttgaagagctaataaagattagccatagatgtatgatgaatgagttacaacgatttccagtcctacgaaagcgcatggatgaggttatcggggatttcctgcgagaaggtcttgaaccctcagaagcaatgatcggggatatcattgatatggagatggattacataaacacttcacatccaaattttattggtggaaccaaggccgtggaagctgcaatgcatcaagtgaagtcttcgaggattccccatcctgtggcacgaccaaaggacactgtggagcctgatagaacatcttcttccacgagtcaagtgaaatctagatcgtttctcggcaggcaagctaatggaattgttactgatcagggagttgtatctgcagatgctgaaaaagctcaacctgctgcaaatgcgagtgatacaaggtggggtatcccttcaattttccgagggggtgatactagagcagttactaaagatagcttattaaacaaaccattcagtgaagctgttgaggatatgtctcacaacttatccatgatctatctaaaggagcccccagctgtcttgaggccaaccgaaacccattcagaacaggaagcagttgagattcagataacaaagctgttactaagatcatactatgacattgtaaggaagaatattgaggactcggtaccaaaagcaatcatgcatttcctggtaaaccacacaaaacgtgagctgcataacgtcttcatcaagaagctttacagggagaacttgtttgaagaaatgttgcaagagccagatgagatagcagttaagaggaaacgcacacaagagactctccacgttcttcagcaagcttacaggacactagatgagttgccactggaagcagattcggtgtcagcaggaatgtcaaaacatcaggagttactgacatcttcaaagtattcgacaagcagctcatactcggcatctccaagtacgacaagaagatcgagaagagcaggagatcaacaccaaaatggatacggattctaacatgatccaaatatctcgaatatctctcgactgtgataacgcatttcattcatttaatggctctttcaggttttggtattaaattatgtgttggtcatatgaagaatttatataggaaaccagtacacagtgtgggttttggtccttttggactctgcattggttgacttgataagggagtgaaaggtgatatagtttttttttccaaaaaaaaaaaaaaaaaactcgagggggggccc

SEQ ID NO: 39322 - protein, 808 aa, Arabidopsis thaliana
  peptide (1)..(808): Ceres Seq. ID no. 13491849
  misc_feature (252)..(545): Pfam Name: Dynamin central region Pfam Description: Dynamin central region
  misc_feature (252)..(545): Pfam Name: Dynamin central region Pfam Description: Dynamin central region
  misc_feature (12)..(546): Homolog of NCBI NO: 30048092 NR Description: DNM1 protein [Homo sapiens]
  misc_feature (663)..(756): Homolog of NCBI NO: 33416854 NR Description: Unknown (protein for MGC:66163) [Danio rerio]
  misc_feature (36)..(557): Homolog of NCBI NO: 33416854 NR Description: Unknown (protein for MGC:66163) [Danio rerio]
  misc_feature (649)..(756): Homolog of NCBI NO: 2689219 NR Description: dynamin like protein [Dictyostelium discoideum]
  misc_feature (37)..(538): Homolog of NCBI NO: 2689219 NR Description: dynamin like protein [Dictyostelium discoideum]
  misc_feature (12)..(546): Homolog of NCBI NO: 30048092 NR Description: DNM1 protein [Homo sapiens]
  misc_feature (36)..(557): Homolog of NCBI NO: 33416854 NR Description: Unknown (protein for MGC:66163) [Danio rerio]
  misc_feature (37)..(538): Homolog of NCBI NO: 2689219 NR Description: dynamin like protein [Dictyostelium discoideum]
  misc_feature (1)..(474): Homolog of NCBI NO: 14334428 NR Description: putative dynamin protein ADL2 [Arabidopsis
  misc_feature (17)..(373): Homolog of NCBI NO: 19386736 NR Description: putative dynamin-like protein ADL2
  misc_feature (570)..(808): Homolog of NCBI NO: 19386736 NR Description: putative dynamin-like protein ADL2
  misc_feature (410)..(575): Homolog of NCBI NO: 19386736 NR Description: putative dynamin-like protein ADL2
  misc_feature (21)..(802): Homolog of NCBI NO: 38346632 NR Description: OSJNBa0072D21.2 [Oryza sativa (japonica
  misc_feature (649)..(756): Homolog of NCBI NO: 2689219 NR Description: dynamin like protein [Dictyostelium discoideum]
  misc_feature (663)..(756): Homolog of NCBI NO: 33416854 NR Description: Unknown (protein for MGC:66163) [Danio rerio]
  misc_feature (21)..(802): Homolog of NCBI NO: 38346632 NR Description: OSJNBa0072D21.2 [Oryza sativa (japonica
  misc_feature (410)..(575): Homolog of NCBI NO: 19386736 NR Description: putative dynamin-like protein ADL2
  misc_feature (570)..(808): Homolog of NCBI NO: 19386736 NR Description: putative dynamin-like protein ADL2
  misc_feature (17)..(373): Homolog of NCBI NO: 19386736 NR Description: putative dynamin-like protein ADL2
  misc_feature (1)..(474): Homolog of NCBI NO: 14334428 NR Description: putative dynamin protein ADL2 [Arabidopsis
MTIEEVSGETPPSTPPSSSTPSPSSSTTNAAPLGSSVIPIVNKLQDIFAQLGSQSTIALPQVVVVGSQSSGKSSVLEALVGRDFLPRGNDICTRRPLVLQLLQTKSRANGGSDDEWGEFRHLPETRFYDFSEIRREIEAETNRLVGENKGVADTQIRLKISSPNVLNITLVDLPGITKVPVGDQPSDIEARIRTMILSYIKQDTCLILAVTPANTDLANSDALQIASIVDPDGHRTIGVITKLDIMDKGTDARKLLLGNVVPLRLGYVGVVNRCQEDILLNRTVKEALLAEEKFFRSHPVYHGLADRLGVPQLAKKLNQILVQHIKVLLPDLKSRISNALVATAKEHQSYGELTESRAGQGALLLNFLSKYCEAYSSLLEGKSEEMSTSELSGGARIHYIFQSIFVKSLEEVDPCEDLTDDDIRTAIQNATGPRSALFVPDVPFEVLVRRQISRLLDPSLQCARFIFEELIKISHRCMMNELQRFPVLRKRMDEVIGDFLREGLEPSEAMIGDIIDMEMDYINTSHPNFIGGTKAVEAAMHQVKSSRIPHPVARPKDTVEPDRTSSSTSQVKSRSFLGRQANGIVTDQGVVSADAEKAQPAANASDTRWGIPSIFRGGDTRAVTKDSLLNKPFSEAVEDMSHNLSMIYLKEPPAVLRPTETHSEQEAVEIQITKLLLRSYYDIVRKNIEDSVPKAIMHFLVNHTKRELHNVFIKKLYRENLFEEMLQEPDEIAVKRKRTQETLHVLQQAYRTLDELPLEADSVSAGMSKHQELLTSSKYSTSSSYSASPSTTRRSRRAGDQHQNGYGF

SEQ ID NO: 39323 - protein, 614 aa, Arabidopsis thaliana
  peptide (1)..(614): Ceres Seq. ID no. 13491850
  misc_feature (58)..(351): Pfam Name: Dynamin central region Pfam Description: Dynamin central region
  misc_feature (58)..(351): Pfam Name: Dynamin central region Pfam Description: Dynamin central region
  misc_feature (1)..(352): Homolog of NCBI NO: 30048092 NR Description: DNM1 protein [Homo sapiens]
  misc_feature (469)..(562): Homolog of NCBI NO: 33416854 NR Description: Unknown (protein for MGC:66163) [Danio rerio]
  misc_feature (1)..(363): Homolog of NCBI NO: 33416854 NR Description: Unknown (protein for MGC:66163) [Danio rerio]
  misc_feature (455)..(562): Homolog of NCBI NO: 2689219 NR Description: dynamin like protein [Dictyostelium discoideum]
  misc_feature (1)..(344): Homolog of NCBI NO: 2689219 NR Description: dynamin like protein [Dictyostelium discoideum]
  misc_feature (1)..(352): Homolog of NCBI NO: 30048092 NR Description: DNM1 protein [Homo sapiens]
  misc_feature (1)..(363): Homolog of NCBI NO: 33416854 NR Description: Unknown (protein for MGC:66163) [Danio rerio]
  misc_feature (1)..(344): Homolog of NCBI NO: 2689219 NR Description: dynamin like protein [Dictyostelium discoideum]
  misc_feature (1)..(280): Homolog of NCBI NO: 14334428 NR Description: putative dynamin protein ADL2 [Arabidopsis
  misc_feature (1)..(179): Homolog of NCBI NO: 19386736 NR Description: putative dynamin-like protein ADL2
  misc_feature (376)..(614): Homolog of NCBI NO: 19386736 NR Description: putative dynamin-like protein ADL2
  misc_feature (216)..(381): Homolog of NCBI NO: 19386736 NR Description: putative dynamin-like protein ADL2
  misc_feature (1)..(608): Homolog of NCBI NO: 38346632 NR Description: OSJNBa0072D21.2 [Oryza sativa (japonica
  misc_feature (455)..(562): Homolog of NCBI NO: 2689219 NR Description: dynamin like protein [Dictyostelium discoideum]
  misc_feature (469)..(562): Homolog of NCBI NO: 33416854 NR Description: Unknown (protein for MGC:66163) [Danio rerio]
  misc_feature (1)..(608): Homolog of NCBI NO: 38346632 NR Description: OSJNBa0072D21.2 [Oryza sativa (japonica
  misc_feature (216)..(381): Homolog of NCBI NO: 19386736 NR Description: putative dynamin-like protein ADL2
  misc_feature (376)..(614): Homolog of NCBI NO: 19386736 NR Description: putative dynamin-like protein ADL2
  misc_feature (1)..(179): Homolog of NCBI NO: 19386736 NR Description: putative dynamin-like protein ADL2
  misc_feature (1)..(280): Homolog of NCBI NO: 14334428 NR Description: putative dynamin protein ADL2 [Arabidopsis
MILSYIKQDTCLILAVTPANTDLANSDALQIASIVDPDGHRTIGVITKLDIMDKGTDARKLLLGNVVPLRLGYVGVVNRCQEDILLNRTVKEALLAEEKFFRSHPVYHGLADRLGVPQLAKKLNQILVQHIKVLLPDLKSRISNALVATAKEHQSYGELTESRAGQGALLLNFLSKYCEAYSSLLEGKSEEMSTSELSGGARIHYIFQSIFVKSLEEVDPCEDLTDDDIRTAIQNATGPRSALFVPDVPFEVLVRRQISRLLDPSLQCARFIFEELIKISHRCMMNELQRFPVLRKRMDEVIGDFLREGLEPSEAMIGDIIDMEMDYINTSHPNFIGGTKAVEAAMHQVKSSRIPHPVARPKDTVEPDRTSSSTSQVKSRSFLGRQANGIVTDQGVVSADAEKAQPAANASDTRWGIPSIFRGGDTRAVTKDSLLNKPFSEAVEDMSHNLSMIYLKEPPAVLRPTETHSEQEAVEIQITKLLLRSYYDIVRKNIEDSVPKAIMHFLVNHTKRELHNVFIKKLYRENLFEEMLQEPDEIAVKRKRTQETLHVLQQAYRTLDELPLEADSVSAGMSKHQELLTSSKYSTSSSYSASPSTTRRSRRAGDQHQNGYGF

SEQ ID NO: 39324 - protein, 563 aa, Arabidopsis thaliana
  peptide (1)..(563): Ceres Seq. ID no. 13491851
  misc_feature (7)..(300): Pfam Name: Dynamin central region Pfam Description: Dynamin central region
  misc_feature (7)..(300): Pfam Name: Dynamin central region Pfam Description: Dynamin central region
  misc_feature (1)..(301): Homolog of NCBI NO: 30048092 NR Description: DNM1 protein [Homo sapiens]
  misc_feature (418)..(511): Homolog of NCBI NO: 33416854 NR Description: Unknown (protein for MGC:66163) [Danio rerio]
  misc_feature (1)..(312): Homolog of NCBI NO: 33416854 NR Description: Unknown (protein for MGC:66163) [Danio rerio]
  misc_feature (404)..(511): Homolog of NCBI NO: 2689219 NR Description: dynamin like protein [Dictyostelium discoideum]
  misc_feature (1)..(293): Homolog of NCBI NO: 2689219 NR Description: dynamin like protein [Dictyostelium discoideum]
  misc_feature (1)..(301): Homolog of NCBI NO: 30048092 NR Description: DNM1 protein [Homo sapiens]
  misc_feature (1)..(312): Homolog of NCBI NO: 33416854 NR Description: Unknown (protein for MGC:66163) [Danio rerio]
  misc_feature (1)..(293): Homolog of NCBI NO: 2689219 NR Description: dynamin like protein [Dictyostelium discoideum]
  misc_feature (1)..(229): Homolog of NCBI NO: 14334428 NR Description: putative dynamin protein ADL2 [Arabidopsis
  misc_feature (1)..(128): Homolog of NCBI NO: 19386736 NR Description: putative dynamin-like protein ADL2
  misc_feature (325)..(563): Homolog of NCBI NO: 19386736 NR Description: putative dynamin-like protein ADL2
  misc_feature (165)..(330): Homolog of NCBI NO: 19386736 NR Description: putative dynamin-like protein ADL2
  misc_feature (1)..(557): Homolog of NCBI NO: 38346632 NR Description: OSJNBa0072D21.2 [Oryza sativa (japonica
  misc_feature (404)..(511): Homolog of NCBI NO: 2689219 NR Description: dynamin like protein [Dictyostelium discoideum]
  misc_feature (418)..(511): Homolog of NCBI NO: 33416854 NR Description: Unknown (protein for MGC:66163) [Danio rerio]
  misc_feature (1)..(557): Homolog of NCBI NO: 38346632 NR Description: OSJNBa0072D21.2 [Oryza sativa (japonica
  misc_feature (165)..(330): Homolog of NCBI NO: 19386736 NR Description: putative dynamin-like protein ADL2
  misc_feature (325)..(563): Homolog of NCBI NO: 19386736 NR Description: putative dynamin-like protein ADL2
  misc_feature (1)..(128): Homolog of NCBI NO: 19386736 NR Description: putative dynamin-like protein ADL2
  misc_feature (1)..(229): Homolog of NCBI NO: 14334428 NR Description: putative dynamin protein ADL2 [Arabidopsis
MDKGTDARKLLLGNVVPLRLGYVGVVNRCQEDILLNRTVKEALLAEEKFFRSHPVYHGLADRLGVPQLAKKLNQILVQHIKVLLPDLKSRISNALVATAKEHQSYGELTESRAGQGALLLNFLSKYCEAYSSLLEGKSEEMSTSELSGGARIHYIFQSIFVKSLEEVDPCEDLTDDDIRTAIQNATGPRSALFVPDVPFEVLVRRQISRLLDPSLQCARFIFEELIKISHRCMMNELQRFPVLRKRMDEVIGDFLREGLEPSEAMIGDIIDMEMDYINTSHPNFIGGTKAVEAAMHQVKSSRIPHPVARPKDTVEPDRTSSSTSQVKSRSFLGRQANGIVTDQGVVSADAEKAQPAANASDTRWGIPSIFRGGDTRAVTKDSLLNKPFSEAVEDMSHNLSMIYLKEPPAVLRPTETHSEQEAVEIQITKLLLRSYYDIVRKNIEDSVPKAIMHFLVNHTKRELHNVFIKKLYRENLFEEMLQEPDEIAVKRKRTQETLHVLQQAYRTLDELPLEADSVSAGMSKHQELLTSSKYSTSSSYSASPSTTRRSRRAGDQHQNGYGF

SEQ ID NO: 39325 - DNA, 1850 bp, Arabidopsis thaliana
  misc_feature (1)..(1850): Ceres Seq. ID no. 13575016
  misc_feature: MA Experiment ID: 20000315 Result: Down-regulated in Transcription
  misc_feature: MA Experiment 20000315 PARAMETER Experiment Name: At_14day_Shoots-Roots_Sub_P Parameter: Age (day) Value: 14
  misc_feature: MA Experiment 20000315 PARAMETER Experiment Name: At_14day_Shoots-Roots_Sub_P Parameter: Organism Value: A. thaliana
  misc_feature: MA Experiment 20000315 PARAMETER Experiment Name: At_14day_Shoots-Roots_Sub_P Parameter: Plant Line Value: WS
  misc_feature: MA Experiment 20000315 PARAMETER Experiment Name: At_14day_Shoots-Roots_Sub_P Parameter: Tissue Value: Shoots vs. Whole Plant
  misc_feature: MA Experiment ID: 20000328 Result: Down-regulated in Transcription
  misc_feature: MA Experiment 20000328 PARAMETER Experiment Name: At_42deg_Heat_Sub_P Parameter: Age (day) Value: 14
  misc_feature: MA Experiment 20000328 PARAMETER Experiment Name: At_42deg_Heat_Sub_P Parameter: Organism Value: A. thaliana
  misc_feature: MA Experiment 20000328 PARAMETER Experiment Name: At_42deg_Heat_Sub_P Parameter: Plant Line Value: WS
  misc_feature: MA Experiment 20000328 PARAMETER Experiment Name: At_42deg_Heat_Sub_P Parameter: Temperature (deg C) Value: 42 vs. 22
  misc_feature: MA Experiment 20000328 PARAMETER Experiment Name: At_42deg_Heat_Sub_P Parameter: Timepoint (hr) Value: 6
  misc_feature: MA Experiment 20000328 PARAMETER Experiment Name: At_42deg_Heat_Sub_P Parameter: Tissue Value: Aerial
  misc_feature: MA Experiment ID: 20000355 Result: Down-regulated in Transcription
  misc_feature: MA Experiment 20000355 PARAMETER Experiment Name: At_Siliques_Sub_P Parameter: Age (day) Value: 21
  misc_feature: MA Experiment 20000355 PARAMETER Experiment Name: At_Siliques_Sub_P Parameter: Organism Value: A. thaliana
  misc_feature: MA Experiment 20000355 PARAMETER Experiment Name: At_Siliques_Sub_P Parameter: Plant Line Value: WS
  misc_feature: MA Experiment 20000355 PARAMETER Experiment Name: At_Siliques_Sub_P Parameter: Tissue Value: Less Than 5mm Siliques vs. Whole Plant
gtcgtctcatattctcgtttgattcaaaacgatagaaatcgacaaagaaggtgtgaagaagttgggaaaacaaaattaacgcttgaagaatctaaaggtttagcttttttctcaatccgatcattcaccgagaaatattctattttatatatttatgtgaagctcttcaattgaagaaagaagaagaaaagacaatcgtcaaatgcttgactttggtttcagttcttcttcacgacagctcaaggaagatcggctctttgatgggatgggacaccaagaaatcaccatgggtttatgatgctatcaattactagtagtacgtgttatcttctgaatatatatcatggcatcctctggactgggaaatggagtaggcacttcgagatctgccaaaggtttaaagagctcttctagttctgtcgattggttgaccagagatttggctgagacgaggataagggacaaagtagagaccgatgatgagagagatagtgaaccagatattattgatggggctggtgctgagcctggtcatgtgattagaaccacactccgtggtcgaaatggtcaatcaagacagacagtcagttacatatcagaacatgttgttggtactggttcctttggcatggttttccaagctaaatgtagggaaactggggaggttgttgccatcaagaaggttctacaagacaaacgctacaagaacagggagctacaaataatgcagatgctagaccatcccaatgccgttgctttaaagcatagctttttctcaagaacagacaacgaagaggtttatttgaatcttgtccttgaatttgtgcctgagaccgtcaatcgtgttgcaagaagttatagtaggacaaaccagctgatgccattgatatatgttaaactctacacctatcagatttgcagggcgcttgcttacatccataattcctttggtctttgtcaccgtgatatcaagcctcaaaacctgctggtgaacccacacacgcatcagctaaaaatatgtgatttcgggagtgcaaaagtgttggtaaaaggagaacccaatgtttcttacatctgttctagatactatcgtgctccagaactcatttttggtgccagtgaatacacaactgcaattgatatatggtccactggttgtgtgatggccgaactgcttcttggacagcctctgtttcctggtgagagcggagttgatcagcttgttgaaatcattaaggttttaggtacaccaacaagggaagaaatcaagtgcatgaatccaaactatacagaatttaagtttccgcagataaaacctcatccatggcacaaggtgttccaaaaacgtttgccaccagaagcagttgatcttctttgtaggttcttccaatattcccccaatttgagatgtacagctttggaagcttgtatccatccgttatttgatgagctaagggacccaaacactcgtcttcccaatggccgaccacttcctccacttttcaactttaaaccgcaagagctatctggcatacctcctgaaatcgtgaacaggcttgtcccagagcatgcccgtaagcagaacctcttcatggctttgcattcgtaagacgcttatcggtttttgcatctgtataagcaagctctcttgatatcaatatttggagcagccagttttcagccatttggcttttgtttttggtgagttctttttctttattttttttctgtttggttggttatatgtcgatgaggatgcatgaatacaaacagtacttgaggtttgctggttacagaccacttgtttgtttcacggccaccatataaccttatctatcgcaaactgtttt

SEQ ID NO: 39326 - protein, 421 aa, Arabidopsis thaliana
  peptide (1)..(421): Ceres Seq. ID no. 13575017
  misc_feature (83)..(367): Pfam Name: Protein kinase domain Pfam Description: Protein kinase domain
  misc_feature (1)..(419): Homolog of NCBI NO: 33591206 NR Description: shaggy-related protein kinase 2 [Physcomitrella
  misc_feature (1)..(419): Homolog of NCBI NO: 33591210 NR Description: shaggy-related protein kinase 4 [Physcomitrella
  misc_feature (1)..(419): Homolog of NCBI NO: 33591208 NR Description: shaggy-related protein kinase 3 [Physcomitrella
  misc_feature (1)..(419): Homolog of NCBI NO: 33591204 NR Description: shaggy-related protein kinase 1 [Physcomitrella
  misc_feature (1)..(421): Homolog of NCBI NO: 24637171 NR Description: GSK-3-like protein MsK4 [Medicago sativa]
  misc_feature (47)..(421): Homolog of NCBI NO: 1504063 NR Description: shaggy-like kinase kappa [Arabidopsis thaliana]
  misc_feature (4)..(421): Homolog of NCBI NO: 15217795 NR Description: shaggy-related protein kinase kappa, putative
  misc_feature (1)..(48): Homolog of NCBI NO: 25287630 NR Description: hypothetical protein [imported] - Arabidopsis
  misc_feature (48)..(421): Homolog of NCBI NO: 25287630 NR Description: hypothetical protein [imported] - Arabidopsis
  misc_feature (1)..(421): Homolog of NCBI NO: 15218288 NR Description: shaggy-related protien kinase kappa [Arabidopsis
MASSGLGNGVGTSRSAKGLKSSSSSVDWLTRDLAETRIRDKVETDDERDSEPDIIDGAGAEPGHVIRTTLRGRNGQSRQTVSYISEHVVGTGSFGMVFQAKCRETGEVVAIKKVLQDKRYKNRELQIMQMLDHPNAVALKHSFFSRTDNEEVYLNLVLEFVPETVNRVARSYSRTNQLMPLIYVKLYTYQICRALAYIHNSFGLCHRDIKPQNLLVNPHTHQLKICDFGSAKVLVKGEPNVSYICSRYYRAPELIFGASEYTTAIDIWSTGCVMAELLLGQPLFPGESGVDQLVEIIKVLGTPTREEIKCMNPNYTEFKFPQIKPHPWHKVFQKRLPPEAVDLLCRFFQYSPNLRCTALEACIHPLFDELRDPNTRLPNGRPLPPLFNFKPQELSGIPPEIVNRLVPEHARKQNLFMALHS

SEQ ID NO: 39327 - protein, 326 aa, Arabidopsis thaliana
  peptide (1)..(326): Ceres Seq. ID no. 13575018
  misc_feature (1)..(272): Pfam Name: Protein kinase domain Pfam Description: Protein kinase domain
  misc_feature (1)..(324): Homolog of NCBI NO: 22326813 NR Description: serine/threonine protein kinase, Msk family
  misc_feature (1)..(324): Homolog of NCBI NO: 33591206 NR Description: shaggy-related protein kinase 2 [Physcomitrella
  misc_feature (1)..(324): Homolog of NCBI NO: 33591210 NR Description: shaggy-related protein kinase 4 [Physcomitrella
  misc_feature (1)..(324): Homolog of NCBI NO: 33591208 NR Description: shaggy-related protein kinase 3 [Physcomitrella
  misc_feature (1)..(324): Homolog of NCBI NO: 33591204 NR Description: shaggy-related protein kinase 1 [Physcomitrella
  misc_feature (1)..(326): Homolog of NCBI NO: 24637171 NR Description: GSK-3-like protein MsK4 [Medicago sativa]
  misc_feature (1)..(326): Homolog of NCBI NO: 1504063 NR Description: shaggy-like kinase kappa [Arabidopsis thaliana]
  misc_feature (1)..(326): Homolog of NCBI NO: 15217795 NR Description: shaggy-related protein kinase kappa, putative
  misc_feature (1)..(326): Homolog of NCBI NO: 25287630 NR Description: hypothetical protein [imported] - Arabidopsis
  misc_feature (1)..(326): Homolog of NCBI NO: 15218288 NR Description: shaggy-related protien kinase kappa [Arabidopsis
MVFQAKCRETGEVVAIKKVLQDKRYKNRELQIMQMLDHPNAVALKHSFFSRTDNEEVYLNLVLEFVPETVNRVARSYSRTNQLMPLIYVKLYTYQICRALAYIHNSFGLCHRDIKPQNLLVNPHTHQLKICDFGSAKVLVKGEPNVSYICSRYYRAPELIFGASEYTTAIDIWSTGCVMAELLLGQPLFPGESGVDQLVEIIKVLGTPTREEIKCMNPNYTEFKFPQIKPHPWHKVFQKRLPPEAVDLLCRFFQYSPNLRCTALEACIHPLFDELRDPNTRLPNGRPLPPLFNFKPQELSGIPPEIVNRLVPEHARKQNLFMALHS

SEQ ID NO: 39328 - protein, 294 aa, Arabidopsis thaliana
  peptide (1)..(294): Ceres Seq. ID no. 13575019
  misc_feature (1)..(240): Pfam Name: Protein kinase domain Pfam Description: Protein kinase domain
  misc_feature (1)..(292): Homolog of NCBI NO: 22326813 NR Description: serine/threonine protein kinase, Msk family
  misc_feature (1)..(292): Homolog of NCBI NO: 33591206 NR Description: shaggy-related protein kinase 2 [Physcomitrella
  misc_feature (1)..(292): Homolog of NCBI NO: 33591210 NR Description: shaggy-related protein kinase 4 [Physcomitrella
  misc_feature (1)..(292): Homolog of NCBI NO: 33591208 NR Description: shaggy-related protein kinase 3 [Physcomitrella
  misc_feature (1)..(292): Homolog of NCBI NO: 33591204 NR Description: shaggy-related protein kinase 1 [Physcomitrella
  misc_feature (1)..(294): Homolog of NCBI NO: 24637171 NR Description: GSK-3-like protein MsK4 [Medicago sativa]
  misc_feature (1)..(294): Homolog of NCBI NO: 1504063 NR Description: shaggy-like kinase kappa [Arabidopsis thaliana]
  misc_feature (1)..(294): Homolog of NCBI NO: 15217795 NR Description: shaggy-related protein kinase kappa, putative
  misc_feature (1)..(294): Homolog of NCBI NO: 25287630 NR Description: hypothetical protein [imported] - Arabidopsis
  misc_feature (1)..(294): Homolog of NCBI NO: 15218288 NR Description: shaggy-related protien kinase kappa [Arabidopsis
MQMLDHPNAVALKHSFFSRTDNEEVYLNLVLEFVPETVNRVARSYSRTNQLMPLIYVKLYTYQICRALAYIHNSFGLCHRDIKPQNLLVNPHTHQLKICDFGSAKVLVKGEPNVSYICSRYYRAPELIFGASEYTTAIDIWSTGCVMAELLLGQPLFPGESGVDQLVEIIKVLGTPTREEIKCMNPNYTEFKFPQIKPHPWHKVFQKRLPPEAVDLLCRFFQYSPNLRCTALEACIHPLFDELRDPNTRLPNGRPLPPLFNFKPQELSGIPPEIVNRLVPEHARKQNLFMALHS

SEQ ID NO: 39329 - DNA, 1174 bp, Arabidopsis thaliana
  misc_feature (1)..(1174): Ceres Seq. ID no. 13488707
  misc_feature: MA Experiment ID: 20000111 Result: Down-regulated in Transcription
  misc_feature: MA Experiment 20000111 PARAMETER Experiment Name: At_42deg_Heat_cDNA_P Parameter: Temperature (deg C) Value: 42 vs. 22
  misc_feature: MA Experiment 20000111 PARAMETER Experiment Name: At_42deg_Heat_cDNA_P Parameter: Timepoint (hr) Value: 6
  misc_feature: MA Experiment 20000111 PARAMETER Experiment Name: At_42deg_Heat_cDNA_P Parameter: Tissue Value: Aerial
  misc_feature: MA Experiment ID: 20000439 Result: Up-regulated in Transcription
  misc_feature: MA Experiment 20000439 PARAMETER Experiment Name: At_Roots__P Parameter: Age (day) Value: 14 vs. 21
  misc_feature: MA Experiment 20000439 PARAMETER Experiment Name: At_Roots__P Parameter: Organism Value: A. thaliana
  misc_feature: MA Experiment 20000439 PARAMETER Experiment Name: At_Roots__P Parameter: Tissue Value: Roots vs. Whole Plant
  misc_feature: MA Experiment ID: 20001248 Result: Down-regulated in Transcription
  misc_feature: MA Experiment 20001248 PARAMETER Experiment Name: At_Far-red-induction_P Parameter: Age (day) Value: 7
  misc_feature: MA Experiment 20001248 PARAMETER Experiment Name: At_Far-red-induction_P Parameter: Light Value: Far-red vs. White
  misc_feature: MA Experiment 20001248 PARAMETER Experiment Name: At_Far-red-induction_P Parameter: Organism Value: A. thaliana
  misc_feature: MA Experiment 20001248 PARAMETER Experiment Name: At_Far-red-induction_P Parameter: Plant Line Value: Columbia
  misc_feature: MA Experiment 20001248 PARAMETER Experiment Name: At_Far-red-induction_P Parameter: Timepoint (hr) Value: 4
  misc_feature: MA Experiment 20001248 PARAMETER Experiment Name: At_Far-red-induction_P Parameter: Tissue Value: Whole Plant
  misc_feature: MA Experiment ID: 20001451 Result: Down-regulated in Transcription
  misc_feature: MA Experiment 20001451 PARAMETER Experiment Name: At_Far-red-induction_P Parameter: Age (day) Value: 7
  misc_feature: MA Experiment 20001451 PARAMETER Experiment Name: At_Far-red-induction_P Parameter: Light Value: Far-red vs. White
  misc_feature: MA Experiment 20001451 PARAMETER Experiment Name: At_Far-red-induction_P Parameter: Organism Value: A. thaliana
  misc_feature: MA Experiment 20001451 PARAMETER Experiment Name: At_Far-red-induction_P Parameter: Plant Line Value: Columbia
  misc_feature: MA Experiment 20001451 PARAMETER Experiment Name: At_Far-red-induction_P Parameter: Timepoint (hr) Value: 24
  misc_feature: MA Experiment 20001451 PARAMETER Experiment Name: At_Far-red-induction_P Parameter: Tissue Value: Whole Plant
agaagaagaagaaccctttcgtcgtcaaggtctagctttctcaaatcctctctctctcgtttctccgattccgatatcaccgtctcctccaccggaaaatccataacgcgattaggtttttagcctagttccttaatctctggttattgattctttcaatttctgatcgatgacattgtccaagcgattggctctattgggagctcaatctgcgattactctcgctaaacctcgaggtctcggttcctctctcgggttacttgatcgtcgtccatttccgtatcgtcaattttctgagctcacgaaagctaatgggagacgtgcttttctcgttgatacattggctctggtgaggagtcttgaagctcaaggagttccatcgaaacaagctgaggcaataacttctgctattactgaggttttgaatgatagcttggaaaatgtctctgagtcttttgtgtcgaaagcggaaatgcagaagattgaaatgattcaagattcaaatttatcgaaatttaaatctgaagtcaaaagttctcaggagcatcattttactgtattgcaacgtgagactgaaaaattgagaggcgatatagagaagatgcgaagtgagctaaggtacgaaattgataaggtcacagcgggacaacgcttggatttgaatcttgaaagaggccgaatacgtgatgagctagctaatcagaataccgaaacaacaaacctcacaaacaagcttgacagggaaattcatgcgttgagagctcaattagaagcttcaaaatacgaagtcatcaaatattgcataggtacacttgtgtcgatttcagcagtgggactcgccgtccttcgtatcatgatttaaagtacgatcccaacactcaacactgctctctgcttacaggcttaaaagccaaattgataacttgtcatttttatttgaatcccatcaatatgccatattatttttttctggcgatcagagaatattattgtttctgtgatctattttgccatcatcctttctaggtgtcagggtttgaaaatttgcaccgagaattatgttaatccaaggattattggtttcttccatttgcattattagttttctagctccttatatgatatgtcaatgactcaatgttacaaattgtcccaactgattttgtttctaagc

SEQ ID NO: 39330 - protein, 230 aa, Arabidopsis thaliana
  peptide (1)..(230): Ceres Seq. ID no. 13488708
  misc_feature (32)..(230): Homolog of NCBI NO: 20149663 NR Description: hypothetical protein MDS025 [Homo sapiens]
  misc_feature (32)..(230): Homolog of NCBI NO: 10197624 NR Description: MDS025 [Homo sapiens]
  misc_feature (97)..(230): Homolog of NCBI NO: 32422519 NR Description: predicted protein [Neurospora crassa]
  misc_feature (56)..(230): Homolog of NCBI NO: 19115424 NR Description: hypothetical conserved protein
  misc_feature (56)..(230): Homolog of NCBI NO: 40743676 NR Description: hypothetical protein AN5773.2 [Aspergillus
  misc_feature (73)..(229): Homolog of NCBI NO: 14318473 NR Description: Hypothetical ORF; Yfl046wp [Saccharomyces
  misc_feature (1)..(124): Homolog of NCBI NO: 25411710 NR Description: hypothetical protein At2g16460 [imported] -
  misc_feature (34)..(230): Homolog of NCBI NO: 11357624 NR Description: hypothetical protein F24M12.130 - Arabidopsis
  misc_feature (34)..(230): Homolog of NCBI NO: 18409266 NR Description: expressed protein [Arabidopsis thaliana]
  misc_feature (1)..(230): Homolog of NCBI NO: 18398123 NR Description: expressed protein [Arabidopsis thaliana]
MTLSKRLALLGAQSAITLAKPRGLGSSLGLLDRRPFPYRQFSELTKANGRRAFLVDTLALVRSLEAQGVPSKQAEAITSAITEVLNDSLENVSESFVSKAEMQKIEMIQDSNLSKFKSEVKSSQEHHFTVLQRETEKLRGDIEKMRSELRYEIDKVTAGQRLDLNLERGRIRDELANQNTETTNLTNKLDREIHALRAQLEASKYEVIKYCIGTLVSISAVGLAVLRIMI

SEQ ID NO: 39331 - protein, 129 aa, Arabidopsis thaliana
  peptide (1)..(129): Ceres Seq. ID no. 13488709
  misc_feature (1)..(129): Homolog of NCBI NO: 20149663 NR Description: hypothetical protein MDS025 [Homo sapiens]
  misc_feature (1)..(129): Homolog of NCBI NO: 10197624 NR Description: MDS025 [Homo sapiens]
  misc_feature (1)..(129): Homolog of NCBI NO: 32422519 NR Description: predicted protein [Neurospora crassa]
  misc_feature (1)..(129): Homolog of NCBI NO: 19115424 NR Description: hypothetical conserved protein
  misc_feature (1)..(129): Homolog of NCBI NO: 40743676 NR Description: hypothetical protein AN5773.2 [Aspergillus
  misc_feature (1)..(128): Homolog of NCBI NO: 14318473 NR Description: Hypothetical ORF; Yfl046wp [Saccharomyces
  misc_feature (1)..(23): Homolog of NCBI NO: 25411710 NR Description: hypothetical protein At2g16460 [imported] -
  misc_feature (1)..(129): Homolog of NCBI NO: 11357624 NR Description: hypothetical protein F24M12.130 - Arabidopsis
  misc_feature (1)..(129): Homolog of NCBI NO: 18409266 NR Description: expressed protein [Arabidopsis thaliana]
  misc_feature (1)..(129): Homolog of NCBI NO: 18398123 NR Description: expressed protein [Arabidopsis thaliana]
MQKIEMIQDSNLSKFKSEVKSSQEHHFTVLQRETEKLRGDIEKMRSELRYEIDKVTAGQRLDLNLERGRIRDELANQNTETTNLTNKLDREIHALRAQLEASKYEVIKYCIGTLVSISAVGLAVLRIMI

SEQ ID NO: 39332 - protein, 124 aa, Arabidopsis thaliana
  peptide (1)..(124): Ceres Seq. ID no. 13488710
  misc_feature (1)..(124): Homolog of NCBI NO: 20149663 NR Description: hypothetical protein MDS025 [Homo sapiens]
  misc_feature (1)..(124): Homolog of NCBI NO: 10197624 NR Description: MDS025 [Homo sapiens]
  misc_feature (1)..(124): Homolog of NCBI NO: 32422519 NR Description: predicted protein [Neurospora crassa]
  misc_feature (1)..(124): Homolog of NCBI NO: 19115424 NR Description: hypothetical conserved protein
  misc_feature (1)..(124): Homolog of NCBI NO: 40743676 NR Description: hypothetical protein AN5773.2 [Aspergillus
  misc_feature (1)..(123): Homolog of NCBI NO: 14318473 NR Description: Hypothetical ORF; Yfl046wp [Saccharomyces
  misc_feature (1)..(18): Homolog of NCBI NO: 25411710 NR Description: hypothetical protein At2g16460 [imported] -
  misc_feature (1)..(124): Homolog of NCBI NO: 11357624 NR Description: hypothetical protein F24M12.130 - Arabidopsis
  misc_feature (1)..(124): Homolog of NCBI NO: 18409266 NR Description: expressed protein [Arabidopsis thaliana]
  misc_feature (1)..(124): Homolog of NCBI NO: 18398123 NR Description: expressed protein [Arabidopsis thaliana]
MIQDSNLSKFKSEVKSSQEHHFTVLQRETEKLRGDIEKMRSELRYEIDKVTAGQRLDLNLERGRIRDELANQNTETTNLTNKLDREIHALRAQLEASKYEVIKYCIGTLVSISAVGLAVLRIMI

SEQ ID NO: 39333 - DNA, 831 bp, Arabidopsis thaliana
  misc_feature (1)..(831): Ceres Seq. ID no. 12385287
  misc_feature: MA Experiment ID: 108461 Result: Up-regulated in Transcription
  misc_feature: MA Experiment 108461 PARAMETER Experiment Name: At_Germinating_Seeds_cDNA_P Parameter: Age (day) Value: 1 vs. 0
  misc_feature: MA Experiment 108461 PARAMETER Experiment Name: At_Germinating_Seeds_cDNA_P Parameter: Tissue Value: Germinating Seeds
  misc_feature: MA Experiment ID: 108573 Result: Down-regulated in Transcription
  misc_feature: MA Experiment 108573 PARAMETER Experiment Name: At_Drought_cDNA_P Parameter: Timepoint (hr) Value: 6
  misc_feature: MA Experiment 108573 PARAMETER Experiment Name: At_Drought_cDNA_P Parameter: Tissue Value: Aerial
  misc_feature: MA Experiment 108573 PARAMETER Experiment Name: At_Drought_cDNA_P Parameter: Treatment Value: Drought vs. No Drought
  misc_feature: MA Experiment ID: 108595 Result: Down-regulated in Transcription
  misc_feature: MA Experiment 108595 PARAMETER Experiment Name: At_Ler-pi_Ovule_cDNA_P Parameter: Plant Line Value: null
  misc_feature: MA Experiment ID: 20000087 Result: Down-regulated in Transcription
  misc_feature: MA Experiment 20000087 PARAMETER Experiment Name: At_100uM_ABA_Mutants_cDNA_P Parameter: Plant Line Value: WS
  misc_feature: MA Experiment 20000087 PARAMETER Experiment Name: At_100uM_ABA_Mutants_cDNA_P Parameter: Timepoint (hr) Value: 6
  misc_feature: MA Experiment 20000087 PARAMETER Experiment Name: At_100uM_ABA_Mutants_cDNA_P Parameter: Tissue Value: Aerial
  misc_feature: MA Experiment 20000087 PARAMETER Experiment Name: At_100uM_ABA_Mutants_cDNA_P Parameter: Treatment Value: 100uM ABA vs. No Treatment
  misc_feature: MA Experiment ID: 20000113 Result: Up-regulated in Transcription
  misc_feature: MA Experiment 20000113 PARAMETER Experiment Name: At_42deg_Heat_cDNA_P Parameter: Temperature (deg C) Value: 42 vs. 22
  misc_feature: MA Experiment 20000113 PARAMETER Experiment Name: At_42deg_Heat_cDNA_P Parameter: Timepoint (hr) Value: 8
  misc_feature: MA Experiment 20000113 PARAMETER Experiment Name: At_42deg_Heat_cDNA_P Parameter: Tissue Value: Aerial
  misc_feature: MA Experiment ID: 20000185 Result: Down-regulated in Transcription
  misc_feature: MA Experiment 20000185 PARAMETER Experiment Name: At_Roots__P Parameter: Age (day) Value: 7 vs. 21
  misc_feature: MA Experiment 20000185 PARAMETER Experiment Name: At_Roots__P Parameter: Organism Value: A. thaliana
  misc_feature: MA Experiment 20000185 PARAMETER Experiment Name: At_Roots__P Parameter: Tissue Value: Roots vs. Whole Plant
  misc_feature: MA Experiment ID: 20000227 Result: Down-regulated in Transcription
  misc_feature: MA Experiment 20000227 PARAMETER Experiment Name: At_Root-Tips-vs-Tops_P Parameter: Tissue Value: Root Tips vs. Root Tops
  misc_feature: MA Experiment ID: 20000437 Result: Down-regulated in Transcription
  misc_feature: MA Experiment 20000437 PARAMETER Experiment Name: At_Drought_P Parameter: Age (day) Value: 8
  misc_feature: MA Experiment 20000437 PARAMETER Experiment Name: At_Drought_P Parameter: Organism Value: A. thaliana
  misc_feature: MA Experiment 20000437 PARAMETER Experiment Name: At_Drought_P Parameter: Plant Line Value: WS
  misc_feature: MA Experiment 20000437 PARAMETER Experiment Name: At_Drought_P Parameter: Timepoint (hr) Value: 24
  misc_feature: MA Experiment 20000437 PARAMETER Experiment Name: At_Drought_P Parameter: Tissue Value: Whole Plant
  misc_feature: MA Experiment 20000437 PARAMETER Experiment Name: At_Drought_P Parameter: Treatment Value: Drought vs. No Drought
  misc_feature: MA Experiment ID: 20000439 Result: Down-regulated in Transcription
  misc_feature: MA Experiment 20000439 PARAMETER Experiment Name: At_Roots__P Parameter: Age (day) Value: 14 vs. 21
  misc_feature: MA Experiment 20000439 PARAMETER Experiment Name: At_Roots__P Parameter: Organism Value: A. thaliana
  misc_feature: MA Experiment 20000439 PARAMETER Experiment Name: At_Roots__P Parameter: Tissue Value: Roots vs. Whole Plant
  misc_feature: MA Experiment ID: 20000495 Result: Down-regulated in Transcription
  misc_feature: MA Experiment 20000495 PARAMETER Experiment Name: At_Guard_Cells_P Parameter: Harvest Date Value: 8/2/2002
  misc_feature: MA Experiment 20000495 PARAMETER Experiment Name: At_Guard_Cells_P Parameter: Organism Value: A. thaliana
  misc_feature: MA Experiment 20000495 PARAMETER Experiment Name: At_Guard_Cells_P Parameter: Tissue Value: Guard Cells vs. Leaves
  misc_feature: MA Experiment ID: 20001906 Result: Down-regulated in Transcription
  misc_feature: MA Experiment 20001906 PARAMETER Experiment Name: At_Drought_Reproduction_P Parameter: Age (day) Value: 35
  misc_feature: MA Experiment 20001906 PARAMETER Experiment Name: At_Drought_Reproduction_P Parameter: Organism Value: A. thaliana
  misc_feature: MA Experiment 20001906 PARAMETER Experiment Name: At_Drought_Reproduction_P Parameter: Plant Line Value: WS
  misc_feature: MA Experiment 20001906 PARAMETER Experiment Name: At_Drought_Reproduction_P Parameter: Timepoint (day) Value: 5
  misc_feature: MA Experiment 20001906 PARAMETER Experiment Name: At_Drought_Reproduction_P Parameter: Tissue Value: Siliques
  misc_feature: MA Experiment 20001906 PARAMETER Experiment Name: At_Drought_Reproduction_P Parameter: Treatment Value: Drought vs. No Drought
aatcaccgattgttctgagccggacgaaggagaggcagccgcctaagaagttgccgtcgtgcgccatggccgtgaaggcttctggattcattgggaaatcagcaatctctgttcatctagatttctcttcgtttcctgtgaaattttcatgcttgaaacagttttctgtatcttcaccaaagccactggtcgttttatccgttgccttatcgtcgccggcaagaacagttgagtctccgcctgttggttaccggaagaatgttgggatttgtctcgttagcccatgtagaaagatttttacggcgtcaaagattcacattccggatacatggcagatgcctcagggtggtgctgatgagggagaagatttgaggaacgctgcctttagagaactgagagaagaaacaggggttacttcggcagaattcattgcggagataccaaactggctgacctatgattttccccgagaagtaaaggacaaactaaaccggaaatggcgaacaagttacaaaggccaagctcagaagtggtttctctttaagttcacgggcaaggaagaagagataaatctccttggagacggtactgcaaaaccagagtttaaggtgtggtcgtggatgctaccggaacaagttattgaacatgctgtatatttcaagagacctgtttatgagcatgtcataaagcaattcaacccttattttgtggatgaagaaaaggattccatgaactcgtctaaggattgaatgtgcacaaagattcaccaagtgaatactgattagaagcaaatcaatcaattcattatactggtttctcttgaatctcatc

SEQ ID NO: 39334 - protein, 248 aa, Arabidopsis thaliana
  peptide (1)..(248): Ceres Seq. ID no. 12385288
  misc_feature (83)..(230): Pfam Name: NUDIX domain Pfam Description: NUDIX domain
  misc_feature (83)..(232): Homolog of NCBI NO: 22962168 NR Description: hypothetical protein [Rhodopseudomonas palustris]
  misc_feature (71)..(238): Homolog of NCBI NO: 22967686 NR Description: hypothetical protein [Rhodospirillum rubrum]
  misc_feature (74)..(234): Homolog of NCBI NO: 22959957 NR Description: hypothetical protein [Rhodobacter sphaeroides]
  misc_feature (76)..(237): Homolog of NCBI NO: 15220667 NR Description: diadenosine 5,5-P1,P4-tetraphosphate hydrolase,
  misc_feature (40)..(231): Homolog of NCBI NO: 8567796 NR Description: diadenosine 5',5'''-P1,P4-tetraphosphate
  misc_feature (40)..(231): Homolog of NCBI NO: 15228345 NR Description: putative diadenosine 5',5'''-P1,P4-tetraphosphate
  misc_feature (42)..(234): Homolog of NCBI NO: 7489414 NR Description: probable bis(5'-nucleosyl)-tetraphosphatase
  misc_feature (72)..(234): Homolog of NCBI NO: 14488439 NR Description: Chain A, Solution Structure Of The Nudix Enzyme
  misc_feature (65)..(234): Homolog of NCBI NO: 1888557 NR Description: diadenosine 5',5'''-P1,P4-tetraphosphate
  misc_feature (22)..(248): Homolog of NCBI NO: 15240003 NR Description: diadenosine 5,5-P1,P4-tetraphosphate
SPIVLSRTKERQPPKKLPSCAMAVKASGFIGKSAISVHLDFSSFPVKFSCLKQFSVSSPKPLVVLSVALSSPARTVESPPVGYRKNVGICLVSPCRKIFTASKIHIPDTWQMPQGGADEGEDLRNAAFRELREETGVTSAEFIAEIPNWLTYDFPREVKDKLNRKWRTSYKGQAQKWFLFKFTGKEEEINLLGDGTAKPEFKVWSWMLPEQVIEHAVYFKRPVYEHVIKQFNPYFVDEEKDSMNSSKD

SEQ ID NO: 39335 - protein, 227 aa, Arabidopsis thaliana
  peptide (1)..(227): Ceres Seq. ID no. 12385289
  misc_feature (62)..(209): Pfam Name: NUDIX domain Pfam Description: NUDIX domain
  misc_feature (62)..(211): Homolog of NCBI NO: 22962168 NR Description: hypothetical protein [Rhodopseudomonas palustris]
  misc_feature (50)..(217): Homolog of NCBI NO: 22967686 NR Description: hypothetical protein [Rhodospirillum rubrum]
  misc_feature (53)..(213): Homolog of NCBI NO: 22959957 NR Description: hypothetical protein [Rhodobacter sphaeroides]
  misc_feature (55)..(216): Homolog of NCBI NO: 15220667 NR Description: diadenosine 5,5-P1,P4-tetraphosphate hydrolase,
  misc_feature (19)..(210): Homolog of NCBI NO: 8567796 NR Description: diadenosine 5',5'''-P1,P4-tetraphosphate
  misc_feature (19)..(210): Homolog of NCBI NO: 15228345 NR Description: putative diadenosine 5',5'''-P1,P4-tetraphosphate
  misc_feature (21)..(213): Homolog of NCBI NO: 7489414 NR Description: probable bis(5'-nucleosyl)-tetraphosphatase
  misc_feature (51)..(213): Homolog of NCBI NO: 14488439 NR Description: Chain A, Solution Structure Of The Nudix Enzyme
  misc_feature (44)..(213): Homolog of NCBI NO: 1888557 NR Description: diadenosine 5',5'''-P1,P4-tetraphosphate
  misc_feature (1)..(227): Homolog of NCBI NO: 15240003 NR Description: diadenosine 5,5-P1,P4-tetraphosphate
MAVKASGFIGKSAISVHLDFSSFPVKFSCLKQFSVSSPKPLVVLSVALSSPARTVESPPVGYRKNVGICLVSPCRKIFTASKIHIPDTWQMPQGGADEGEDLRNAAFRELREETGVTSAEFIAEIPNWLTYDFPREVKDKLNRKWRTSYKGQAQKWFLFKFTGKEEEINLLGDGTAKPEFKVWSWMLPEQVIEHAVYFKRPVYEHVIKQFNPYFVDEEKDSMNSSKD

SEQ ID NO: 39336 - protein, 137 aa, Arabidopsis thaliana
  peptide (1)..(137): Ceres Seq. ID no. 12385290
  misc_feature (1)..(119): Pfam Name: NUDIX domain Pfam Description: NUDIX domain
  misc_feature (1)..(121): Homolog of NCBI NO: 22962168 NR Description: hypothetical protein [Rhodopseudomonas palustris]
  misc_feature (1)..(127): Homolog of NCBI NO: 22967686 NR Description: hypothetical protein [Rhodospirillum rubrum]
  misc_feature (1)..(123): Homolog of NCBI NO: 22959957 NR Description: hypothetical protein [Rhodobacter sphaeroides]
  misc_feature (1)..(126): Homolog of NCBI NO: 15220667 NR Description: diadenosine 5,5-P1,P4-tetraphosphate hydrolase,
  misc_feature (1)..(120): Homolog of NCBI NO: 8567796 NR Description: diadenosine 5',5'''-P1,P4-tetraphosphate
  misc_feature (1)..(120): Homolog of NCBI NO: 15228345 NR Description: putative diadenosine 5',5'''-P1,P4-tetraphosphate
  misc_feature (1)..(123): Homolog of NCBI NO: 7489414 NR Description: probable bis(5'-nucleosyl)-tetraphosphatase
  misc_feature (1)..(123): Homolog of NCBI NO: 14488439 NR Description: Chain A, Solution Structure Of The Nudix Enzyme
  misc_feature (1)..(123): Homolog of NCBI NO: 1888557 NR Description: diadenosine 5',5'''-P1,P4-tetraphosphate
  misc_feature (1)..(137): Homolog of NCBI NO: 15240003 NR Description: diadenosine 5,5-P1,P4-tetraphosphate
MPQGGADEGEDLRNAAFRELREETGVTSAEFIAEIPNWLTYDFPREVKDKLNRKWRTSYKGQAQKWFLFKFTGKEEEINLLGDGTAKPEFKVWSWMLPEQVIEHAVYFKRPVYEHVIKQFNPYFVDEEKDSMNSSKD

SEQ ID NO: 39337 - DNA, 1180 bp, Arabidopsis thaliana; identical to SEQ ID NO: 23631
  misc_feature (1)..(1180): Ceres Seq. ID no. 12330478
  misc_feature: MA Experiment ID: 20000495 Result: Down-regulated in Transcription
  misc_feature: MA Experiment 20000495 PARAMETER Experiment Name: At_Guard_Cells_P Parameter: Harvest Date Value: 8/2/2002
  misc_feature: MA Experiment 20000495 PARAMETER Experiment Name: At_Guard_Cells_P Parameter: Organism Value: A. thaliana
  misc_feature: MA Experiment 20000495 PARAMETER Experiment Name: At_Guard_Cells_P Parameter: Tissue Value: Guard Cells vs. Leaves

SEQ ID NO: 39338 - protein, 254 aa, Arabidopsis thaliana; identical to SEQ ID NO: 23632
  peptide (1)..(254): Ceres Seq. ID no. 12330479
  misc_feature (5)..(240): Pfam Name: 14-3-3 protein Pfam Description: 14-3-3 protein
  misc_feature (5)..(240): Pfam Name: 14-3-3 protein Pfam Description: 14-3-3 protein
  misc_feature (5)..(240): Pfam Name: 14-3-3 protein Pfam Description: 14-3-3 protein
  misc_feature (1)..(240): Homolog of NCBI NO: 18399427 NR Description: 14-3-3 protein GF14 omicron (grf11)
  misc_feature (1)..(254): Homolog of NCBI NO: 2492490 NR Description: 14-3-3-LIKE PROTEIN
  misc_feature (1)..(254): Homolog of NCBI NO: 3925703 NR Description: 14-3-3 protein [Lycopersicon esculentum]
  misc_feature (1)..(240): Homolog of NCBI NO: 18399427 NR Description: 14-3-3 protein GF14 omicron (grf11)
  misc_feature (1)..(254): Homolog of NCBI NO: 3925703 NR Description: 14-3-3 protein [Lycopersicon esculentum]
  misc_feature (1)..(253): Homolog of NCBI NO: 30687814 NR Description: 14-3-3 protein GF14 epsilon (grf10) [Arabidopsis
  misc_feature (1)..(254): Homolog of NCBI NO: 2492490 NR Description: 14-3-3-LIKE PROTEIN
  misc_feature (1)..(254): Homolog of NCBI NO: 18395103 NR Description: 14-3-3 protein GF14 epsilon (grf10)
  misc_feature (1)..(253): Homolog of NCBI NO: 30687814 NR Description: 14-3-3 protein GF14 epsilon (grf10) [Arabidopsis
  misc_feature (1)..(254): Homolog of NCBI NO: 26454609 NR Description: 14-3-3 protein 7
  misc_feature (1)..(254): Homolog of NCBI NO: 3925703 NR Description: 14-3-3 protein [Lycopersicon esculentum]
  misc_feature (1)..(240): Homolog of NCBI NO: 18399427 NR Description: 14-3-3 protein GF14 omicron (grf11)
  misc_feature (1)..(254): Homolog of NCBI NO: 18395103 NR Description: 14-3-3 protein GF14 epsilon (grf10)
  misc_feature (1)..(254): Homolog of NCBI NO: 26454609 NR Description: 14-3-3 protein 7
  misc_feature (1)..(254): Homolog of NCBI NO: 2492490 NR Description: 14-3-3-LIKE PROTEIN
  misc_feature (1)..(254): Homolog of NCBI NO: 26454609 NR Description: 14-3-3 protein 7
  misc_feature (1)..(253): Homolog of NCBI NO: 30687814 NR Description: 14-3-3 protein GF14 epsilon (grf10) [Arabidopsis
  misc_feature (1)..(254): Homolog of NCBI NO: 18395103 NR Description: 14-3-3 protein GF14 epsilon (grf10)

SEQ ID NO: 39339 - protein, 231 aa, Arabidopsis thaliana; identical to SEQ ID NO: 23633
  peptide (1)..(231): Ceres Seq. ID no. 12330480
  misc_feature (1)..(217): Pfam Name: 14-3-3 protein Pfam Description: 14-3-3 protein
  misc_feature (1)..(217): Pfam Name: 14-3-3 protein Pfam Description: 14-3-3 protein
  misc_feature (1)..(217): Pfam Name: 14-3-3 protein Pfam Description: 14-3-3 protein
  misc_feature (1)..(217): Homolog of NCBI NO: 18399427 NR Description: 14-3-3 protein GF14 omicron (grf11)
  misc_feature (1)..(231): Homolog of NCBI NO: 2492490 NR Description: 14-3-3-LIKE PROTEIN
  misc_feature (1)..(231): Homolog of NCBI NO: 3925703 NR Description: 14-3-3 protein [Lycopersicon esculentum]
  misc_feature (1)..(217): Homolog of NCBI NO: 18399427 NR Description: 14-3-3 protein GF14 omicron (grf11)
  misc_feature (1)..(231): Homolog of NCBI NO: 3925703 NR Description: 14-3-3 protein [Lycopersicon esculentum]
  misc_feature (1)..(230): Homolog of NCBI NO: 30687814 NR Description: 14-3-3 protein GF14 epsilon (grf10) [Arabidopsis
  misc_feature (1)..(231): Homolog of NCBI NO: 2492490 NR Description: 14-3-3-LIKE PROTEIN
  misc_feature (1)..(231): Homolog of NCBI NO: 18395103 NR Description: 14-3-3 protein GF14 epsilon (grf10)
  misc_feature (1)..(230): Homolog of NCBI NO: 30687814 NR Description: 14-3-3 protein GF14 epsilon (grf10) [Arabidopsis
  misc_feature (1)..(231): Homolog of NCBI NO: 26454609 NR Description: 14-3-3 protein 7
  misc_feature (1)..(231): Homolog of NCBI NO: 3925703 NR Description: 14-3-3 protein [Lycopersicon esculentum]
  misc_feature (1)..(217): Homolog of NCBI NO: 18399427 NR Description: 14-3-3 protein GF14 omicron (grf11)
  misc_feature (1)..(231): Homolog of NCBI NO: 18395103 NR Description: 14-3-3 protein GF14 epsilon (grf10)
  misc_feature (1)..(231): Homolog of NCBI NO: 26454609 NR Description: 14-3-3 protein 7
  misc_feature (1)..(231): Homolog of NCBI NO: 2492490 NR Description: 14-3-3-LIKE PROTEIN
  misc_feature (1)..(231): Homolog of NCBI NO: 26454609 NR Description: 14-3-3 protein 7
  misc_feature (1)..(230): Homolog of NCBI NO: 30687814 NR Description: 14-3-3 protein GF14 epsilon (grf10) [Arabidopsis
  misc_feature (1)..(231): Homolog of NCBI NO: 18395103 NR Description: 14-3-3 protein GF14 epsilon (grf10)

SEQ ID NO: 39340 - protein, 227 aa, Arabidopsis thaliana; identical to SEQ ID NO: 23634
  peptide (1)..(227): Ceres Seq. ID no. 12330481
  misc_feature (1)..(213): Pfam Name: 14-3-3 protein Pfam Description: 14-3-3 protein
  misc_feature (1)..(213): Pfam Name: 14-3-3 protein Pfam Description: 14-3-3 protein
  misc_feature (1)..(213): Pfam Name: 14-3-3 protein Pfam Description: 14-3-3 protein
  misc_feature (1)..(213): Homolog of NCBI NO: 18399427 NR Description: 14-3-3 protein GF14 omicron (grf11)
  misc_feature (1)..(227): Homolog of NCBI NO: 2492490 NR Description: 14-3-3-LIKE PROTEIN
  misc_feature (1)..(227): Homolog of NCBI NO: 3925703 NR Description: 14-3-3 protein [Lycopersicon esculentum]
  misc_feature (1)..(213): Homolog of NCBI NO: 18399427 NR Description: 14-3-3 protein GF14 omicron (grf11)
  misc_feature (1)..(227): Homolog of NCBI NO: 3925703 NR Description: 14-3-3 protein [Lycopersicon esculentum]
  misc_feature (1)..(226): Homolog of NCBI NO: 30687814 NR Description: 14-3-3 protein GF14 epsilon (grf10) [Arabidopsis
  misc_feature (1)..(227): Homolog of NCBI NO: 2492490 NR Description: 14-3-3-LIKE PROTEIN
  misc_feature (1)..(227): Homolog of NCBI NO: 18395103 NR Description: 14-3-3 protein GF14 epsilon (grf10)
  misc_feature (1)..(226): Homolog of NCBI NO: 30687814 NR Description: 14-3-3 protein GF14 epsilon (grf10) [Arabidopsis
  misc_feature (1)..(227): Homolog of NCBI NO: 26454609 NR Description: 14-3-3 protein 7
  misc_feature (1)..(227): Homolog of NCBI NO: 3925703 NR Description: 14-3-3 protein [Lycopersicon esculentum]
  misc_feature (1)..(213): Homolog of NCBI NO: 18399427 NR Description: 14-3-3 protein GF14 omicron (grf11)
  misc_feature (1)..(227): Homolog of NCBI NO: 18395103 NR Description: 14-3-3 protein GF14 epsilon (grf10)
  misc_feature (1)..(227): Homolog of NCBI NO: 26454609 NR Description: 14-3-3 protein 7
  misc_feature (1)..(227): Homolog of NCBI NO: 2492490 NR Description: 14-3-3-LIKE PROTEIN
  misc_feature (1)..(227): Homolog of NCBI NO: 26454609 NR Description: 14-3-3 protein 7
  misc_feature (1)..(226): Homolog of NCBI NO: 30687814 NR Description: 14-3-3 protein GF14 epsilon (grf10) [Arabidopsis
  misc_feature (1)..(227): Homolog of NCBI NO: 18395103 NR Description: 14-3-3 protein GF14 epsilon (grf10)

SEQ ID NO: 39341 - DNA, 929 bp, Arabidopsis thaliana
  misc_feature (1)..(929): Ceres Seq. ID no. 12325534
attcccaccattagggctctctctaaattcctcagtctcgtgagaatcgtcatcgtcttcacggagctcactcgaagatgttaacggcagatataccaccgaatcattcaatctacatccaaaacctcaatgaaaggatcaagaaagaggaattgaagagatctctttactgtttgttctctcagtttgggagaatacttgatgtggttgctttgaagactccgaagctccgaggacaagcttgggttacttttagtgaagtcactgctgctggtcatgctgttcgtcagatgcaaaattttcccttctatgataaaccaatgcgcttacaatatgcaaaagcaaagtcagattgtctagctaaagctgagggaactttcgttccaaaagataagaagaggaagcaagaagaaaaagttgaaagaaagcgtgaagaatcccaacgaccaaacacagctaatggtccaagtgctaatggtccaagtgccaataacggagtccctgcgccttcgttccagccgagcgggcaagaaacaatgccaccaaacaacatactcttcattcagaatctcccacacgagacaacaagcatgatgctccagcttctcttcgaacagtaccctggattcaaagagataagaatgatcgacgcaaaaccaggaatcgcgtttgtagagtacgaagacgatgttcaagcttccatagctatgcaacctcttcaaggtttcaaaatcactccccagaatccaatggtcatctctttcgccaagaaatgataagagtcttgtttttgtttgtttgttgtcctttaagacgatagtactggaccaaccaaacctggtgtgtataaccaaccaacggttctattggttaacggattaatccggttttggtttaatcattgaaagagacccttgaaacgcggtttc

SEQ ID NO: 39342 - protein, 232 aa, Arabidopsis thaliana; identical to SEQ ID NO: 22953
  peptide (1)..(232): Ceres Seq. ID no. 12325535
  misc_feature (12)..(84): Pfam Name: RNA recognition motif. (a.k.a. RRM, RBD, or RNP domain) Pfam Description: RNA recognition motif. (a.k.a. RRM, RBD, or RNP
  misc_feature (4)..(232): Homolog of NCBI NO: 15226631 NR Description: small nuclear ribonucleoprotein U1A
  misc_feature (7)..(232): Homolog of NCBI NO: 34897622 NR Description: putative small nuclear ribonucleoprotein U1A
  misc_feature (5)..(232): Homolog of NCBI NO: 2119045 NR Description: small nuclear ribonucleoprotein U1A - potato
  misc_feature (1)..(232): Homolog of NCBI NO: 421960 NR Description: small nuclear ribonucleoprotein U2B'' - potato
  misc_feature (1)..(232): Homolog of NCBI NO: 25294325 NR Description: hypothetical protein [imported] - Arabidopsis
  misc_feature (1)..(232): Homolog of NCBI NO: 19347861 NR Description: putative spliceosomal protein (U2B) [Arabidopsis
  misc_feature (1)..(232): Homolog of NCBI NO: 30679897 NR Description: small nuclear ribonucleoprotein U2B (spliceosomal
  misc_feature (1)..(232): Homolog of NCBI NO: 30679892 NR Description: small nuclear ribonucleoprotein U2B (spliceosomal
  misc_feature (1)..(232): Homolog of NCBI NO: 15227729 NR Description: small nuclear ribonucleoprotein U2B, putative
  misc_feature (1)..(232): Homolog of NCBI NO: 21593001 NR Description: putative small nuclear ribonucleoprotein U2B

SEQ ID NO: 39343 - protein, 161 aa, Arabidopsis thaliana; identical to SEQ ID NO: 22954
  peptide (1)..(161): Ceres Seq. ID no. 12325536
  misc_feature (1)..(161): Homolog of NCBI NO: 15226631 NR Description: small nuclear ribonucleoprotein U1A
  misc_feature (1)..(161): Homolog of NCBI NO: 34897622 NR Description: putative small nuclear ribonucleoprotein U1A
  misc_feature (1)..(161): Homolog of NCBI NO: 2119045 NR Description: small nuclear ribonucleoprotein U1A - potato
  misc_feature (1)..(161): Homolog of NCBI NO: 421960 NR Description: small nuclear ribonucleoprotein U2B'' - potato
  misc_feature (1)..(161): Homolog of NCBI NO: 25294325 NR Description: hypothetical protein [imported] - Arabidopsis
  misc_feature (1)..(161): Homolog of NCBI NO: 19347861 NR Description: putative spliceosomal protein (U2B) [Arabidopsis
  misc_feature (1)..(161): Homolog of NCBI NO: 30679897 NR Description: small nuclear ribonucleoprotein U2B (spliceosomal
  misc_feature (1)..(161): Homolog of NCBI NO: 30679892 NR Description: small nuclear ribonucleoprotein U2B (spliceosomal
  misc_feature (1)..(161): Homolog of NCBI NO: 15227729 NR Description: small nuclear ribonucleoprotein U2B, putative
  misc_feature (1)..(161): Homolog of NCBI NO: 21593001 NR Description: putative small nuclear ribonucleoprotein U2B

SEQ ID NO: 39344 - protein, 151 aa, Arabidopsis thaliana; identical to SEQ ID NO: 22955
  peptide (1)..(151): Ceres Seq. ID no. 12325537
  misc_feature (1)..(151): Homolog of NCBI NO: 15226631 NR Description: small nuclear ribonucleoprotein U1A
  misc_feature (1)..(151): Homolog of NCBI NO: 34897622 NR Description: putative small nuclear ribonucleoprotein U1A
  misc_feature (1)..(151): Homolog of NCBI NO: 2119045 NR Description: small nuclear ribonucleoprotein U1A - potato
  misc_feature (1)..(151): Homolog of NCBI NO: 421960 NR Description: small nuclear ribonucleoprotein U2B'' - potato
  misc_feature (1)..(151): Homolog of NCBI NO: 25294325 NR Description: hypothetical protein [imported] - Arabidopsis
  misc_feature (1)..(151): Homolog of NCBI NO: 19347861 NR Description: putative spliceosomal protein (U2B) [Arabidopsis
  misc_feature (1)..(151): Homolog of NCBI NO: 30679897 NR Description: small nuclear ribonucleoprotein U2B (spliceosomal
  misc_feature (1)..(151): Homolog of NCBI NO: 30679892 NR Description: small nuclear ribonucleoprotein U2B (spliceosomal
  misc_feature (1)..(151): Homolog of NCBI NO: 15227729 NR Description: small nuclear ribonucleoprotein U2B, putative
  misc_feature (1)..(151): Homolog of NCBI NO: 21593001 NR Description: putative small nuclear ribonucleoprotein U2B

SEQ ID NO: 39345 - DNA, 1431 bp, Arabidopsis thaliana
  misc_feature (1)..(1431): Ceres Seq. ID no. 12328852
  misc_feature: MA Experiment ID: 108462 Result: Down-regulated in Transcription
  misc_feature: MA Experiment 108462 PARAMETER Experiment Name: At_Germinating_Seeds_cDNA_P Parameter: Age (day) Value: 2 vs. 0
  misc_feature: MA Experiment 108462 PARAMETER Experiment Name: At_Germinating_Seeds_cDNA_P Parameter: Tissue Value: Germinating Seeds
  misc_feature: MA Experiment ID: 108463 Result: Down-regulated in Transcription
  misc_feature: MA Experiment 108463 PARAMETER Experiment Name: At_Germinating_Seeds_cDNA_P Parameter: Age (day) Value: 3 vs. 0
  misc_feature: MA Experiment 108463 PARAMETER Experiment Name: At_Germinating_Seeds_cDNA_P Parameter: Tissue Value: Germinating Seeds
  misc_feature: MA Experiment ID: 108464 Result: Down-regulated in Transcription
  misc_feature: MA Experiment 108464 PARAMETER Experiment Name: At_Germinating_Seeds_cDNA_P Parameter: Age (day) Value: 4 vs. 0
  misc_feature: MA Experiment 108464 PARAMETER Experiment Name: At_Germinating_Seeds_cDNA_P Parameter: Tissue Value: Germinating Seeds
  misc_feature: MA Experiment ID: 108595 Result: Down-regulated in Transcription
  misc_feature: MA Experiment 108595 PARAMETER Experiment Name: At_Ler-pi_Ovule_cDNA_P Parameter: Plant Line Value: null
  misc_feature: MA Experiment ID: 20000111 Result: Down-regulated in Transcription
  misc_feature: MA Experiment 20000111 PARAMETER Experiment Name: At_42deg_Heat_cDNA_P Parameter: Temperature (deg C) Value: 42 vs. 22
  misc_feature: MA Experiment 20000111 PARAMETER Experiment Name: At_42deg_Heat_cDNA_P Parameter: Timepoint (hr) Value: 6
  misc_feature: MA Experiment 20000111 PARAMETER Experiment Name: At_42deg_Heat_cDNA_P Parameter: Tissue Value: Aerial
aaattgggttaagtcaattgttgtcactatagatgtttagttctacaactctgcatcatcttcctcgtccgaatcttcttcttcccagctctcgtgtctgcaggaaagttatttcgagaagaatgagtacgaatcctgcaattgaaccaaaagttcgcaaatttgaatctgttgaaggagttgatattggttcaagaaataaatccgatggtatcagattccgtcttgtttcatataacatattagctcaggtttatgtgaagagtgcacttctcccacactctccacctgcctgtctcaaatggaaagctcgttcacatgcaattctcagcgttctcaaaaatctccaggctgatttcttttgtctgcaggaagtagatgagtacgatagcttttacagaaataacatggactctctgggatattctgggatttatattcagagaaccggccagaggaagcgtgatggttgtgcaatcttctacaagccaagctgtgcagagttagtcacaaaggaacggatcgaatataatgatcttgtggactcaataaaagcagatagtgtttcctgcagcgaacagaagattgagacatccaacgaaggaaaaggtgatgagaaagcgaaagattctcgaaaagacagtcgtgaccttaatgatccactagtgagactaaaacgtgattgcgttggaataatggctgcttttaggatcaacaagccgtttcagcatatcgttatcgtggcaaacacacatctttactgggaccctgaattggctgatgtcaagcttgctcaagccaagtatctactgtcacgactagctcagttcaaaacactaatatcagatgaatttgagtgcacaccttcattgctactagctggcgacttcaattcaattcctggggatatggtttatagttacctagtatcgggtaatgctaaacccacagagaccatagaagaagaagaagctccagttcctctgtctagtgtctatgaagtcacaagaggagagcctaagttcacaaattgcactcctggcttcacaaacacacttgactacatcttcatctctccttcagacttcatcaaacctgtgagtatccttcaactacctgagccggattctccagatgttgtcggtttcttaccgaatcatcatcacccgagtgatcatttacctataggagctgagtttgagattcgtcgggaataggaagtttcgttctttagaaagttttgtcgcataactccattgtttcagcatttgaatatggttcttgtagaaatcatgaagcagtgaatcatacacacacaacacaaagtattaaaggacttggatcatttttgtctcgataaactcgaaatcgttgtgtgcattgaattactgagaatatttgaattttcttgagaagaaattgtttaatgtc

SEQ ID NO: 39346 - protein, 394 aa, Arabidopsis thaliana
  peptide (1)..(394): Ceres Seq. ID no. 12328853
  misc_feature (98)..(389): Pfam Name: Endonuclease/Exonuclease/phosphatase family Pfam Description: Endonuclease/Exonuclease/phosphatase family
  misc_feature (35)..(389): Homolog of NCBI NO: 11282423 NR Description: hypothetical protein F14P22.150 - Arabidopsis
  misc_feature (18)..(394): Homolog of NCBI NO: 19075401 NR Description: putative global transcriptional regulator
  misc_feature (45)..(169): Homolog of NCBI NO: 7493814 NR Description: transcription effector - yeast (Candida albicans)
  misc_feature (199)..(393): Homolog of NCBI NO: 7493814 NR Description: transcription effector - yeast (Candida albicans)
  misc_feature (89)..(190): Homolog of NCBI NO: 12322536 NR Description: hypothetical protein [Arabidopsis thaliana]
  misc_feature (221)..(393): Homolog of NCBI NO: 12322536 NR Description: hypothetical protein [Arabidopsis thaliana]
  misc_feature (78)..(190): Homolog of NCBI NO: 15222370 NR Description: hypothetical protein; protein id: At1g31530.1
  misc_feature (221)..(393): Homolog of NCBI NO: 15222370 NR Description: hypothetical protein; protein id: At1g31530.1
  misc_feature (88)..(394): Homolog of NCBI NO: 28973671 NR Description: unknown protein [Arabidopsis thaliana]
  misc_feature (88)..(394): Homolog of NCBI NO: 15222367 NR Description: hypothetical protein; protein id: At1g31500.1
MFSSTTLHHLPRPNLLLPSSRVCRKVISRRMSTNPAIEPKVRKFESVEGVDIGSRNKSDGIRFRLVSYNILAQVYVKSALLPHSPPACLKWKARSHAILSVLKNLQADFFCLQEVDEYDSFYRNNMDSLGYSGIYIQRTGQRKRDGCAIFYKPSCAELVTKERIEYNDLVDSIKADSVSCSEQKIETSNEGKGDEKAKDSRKDSRDLNDPLVRLKRDCVGIMAAFRINKPFQHIVIVANTHLYWDPELADVKLAQAKYLLSRLAQFKTLISDEFECTPSLLLAGDFNSIPGDMVYSYLVSGNAKPTETIEEEEAPVPLSSVYEVTRGEPKFTNCTPGFTNTLDYIFISPSDFIKPVSILQLPEPDSPDVVGFLPNHHHPSDHLPIGAEFEIRRE

SEQ ID NO: 39347 - protein, 364 aa, Arabidopsis thaliana
  peptide (1)..(364): Ceres Seq. ID no. 12328854
  misc_feature (68)..(359): Pfam Name: Endonuclease/Exonuclease/phosphatase family Pfam Description: Endonuclease/Exonuclease/phosphatase family
  misc_feature (5)..(359): Homolog of NCBI NO: 11282423 NR Description: hypothetical protein F14P22.150 - Arabidopsis
  misc_feature (1)..(364): Homolog of NCBI NO: 19075401 NR Description: putative global transcriptional regulator
  misc_feature (15)..(139): Homolog of NCBI NO: 7493814 NR Description: transcription effector - yeast (Candida albicans)
  misc_feature (169)..(363): Homolog of NCBI NO: 7493814 NR Description: transcription effector - yeast (Candida albicans)
  misc_feature (59)..(160): Homolog of NCBI NO: 12322536 NR Description: hypothetical protein [Arabidopsis thaliana]
  misc_feature (191)..(363): Homolog of NCBI NO: 12322536 NR Description: hypothetical protein [Arabidopsis thaliana]
  misc_feature (48)..(160): Homolog of NCBI NO: 15222370 NR Description: hypothetical protein; protein id: At1g31530.1
  misc_feature (191)..(363): Homolog of NCBI NO: 15222370 NR Description: hypothetical protein; protein id: At1g31530.1
  misc_feature (58)..(364): Homolog of NCBI NO: 28973671 NR Description: unknown protein [Arabidopsis thaliana]
  misc_feature (58)..(364): Homolog of NCBI NO: 15222367 NR Description: hypothetical protein; protein id: At1g31500.1
MSTNPAIEPKVRKFESVEGVDIGSRNKSDGIRFRLVSYNILAQVYVKSALLPHSPPACLKWKARSHAILSVLKNLQADFFCLQEVDEYDSFYRNNMDSLGYSGIYIQRTGQRKRDGCAIFYKPSCAELVTKERIEYNDLVDSIKADSVSCSEQKIETSNEGKGDEKAKDSRKDSRDLNDPLVRLKRDCVGIMAAFRINKPFQHIVIVANTHLYWDPELADVKLAQAKYLLSRLAQFKTLISDEFECTPSLLLAGDFNSIPGDMVYSYLVSGNAKPTETIEEEEAPVPLSSVYEVTRGEPKFTNCTPGFTNTLDYIFISPSDFIKPVSILQLPEPDSPDVVGFLPNHHHPSDHLPIGAEFEIRRE

SEQ ID NO: 39348 - protein, 269 aa, Arabidopsis thaliana
  peptide (1)..(269): Ceres Seq. ID no. 12328855
  misc_feature (1)..(264): Pfam Name: Endonuclease/Exonuclease/phosphatase family Pfam Description: Endonuclease/Exonuclease/phosphatase family
  misc_feature (1)..(264): Homolog of NCBI NO: 11282423 NR Description: hypothetical protein F14P22.150 - Arabidopsis
  misc_feature (1)..(269): Homolog of NCBI NO: 19075401 NR Description: putative global transcriptional regulator
  misc_feature (1)..(44): Homolog of NCBI NO: 7493814 NR Description: transcription effector - yeast (Candida albicans)
  misc_feature (74)..(268): Homolog of NCBI NO: 7493814 NR Description: transcription effector - yeast (Candida albicans)
  misc_feature (1)..(65): Homolog of NCBI NO: 12322536 NR Description: hypothetical protein [Arabidopsis thaliana]
  misc_feature (96)..(268): Homolog of NCBI NO: 12322536 NR Description: hypothetical protein [Arabidopsis thaliana]
  misc_feature (1)..(65): Homolog of NCBI NO: 15222370 NR Description: hypothetical protein; protein id: At1g31530.1
  misc_feature (96)..(268): Homolog of NCBI NO: 15222370 NR Description: hypothetical protein; protein id: At1g31530.1
  misc_feature (1)..(269): Homolog of NCBI NO: 28973671 NR Description: unknown protein [Arabidopsis thaliana]
  misc_feature (1)..(269): Homolog of NCBI NO: 15222367 NR Description: hypothetical protein; protein id: At1g31500.1
MDSLGYSGIYIQRTGQRKRDGCAIFYKPSCAELVTKERIEYNDLVDSIKADSVSCSEQKIETSNEGKGDEKAKDSRKDSRDLNDPLVRLKRDCVGIMAAFRINKPFQHIVIVANTHLYWDPELADVKLAQAKYLLSRLAQFKTLISDEFECTPSLLLAGDFNSIPGDMVYSYLVSGNAKPTETIEEEEAPVPLSSVYEVTRGEPKFTNCTPGFTNTLDYIFISPSDFIKPVSILQLPEPDSPDVVGFLPNHHHPSDHLPIGAEFEIRRE

SEQ ID NO: 39349 - DNA, 1279 bp, Arabidopsis thaliana
  misc_feature (1)..(1279): Ceres Seq. ID no. 13491536
  misc_feature: MA Experiment ID: 108595 Result: Up-regulated in Transcription
  misc_feature: MA Experiment 108595 PARAMETER Experiment Name: At_Ler-pi_Ovule_cDNA_P Parameter: Plant Line Value: null
  misc_feature: MA Experiment ID: 20000234 Result: Up-regulated in Transcription
  misc_feature: MA Experiment 20000234 PARAMETER Experiment Name: At_Siliques_P Parameter: Age (day) Value: 21
  misc_feature: MA Experiment 20000234 PARAMETER Experiment Name: At_Siliques_P Parameter: Organism Value: A. thaliana
  misc_feature: MA Experiment 20000234 PARAMETER Experiment Name: At_Siliques_P Parameter: Plant Line Value: WS
  misc_feature: MA Experiment 20000234 PARAMETER Experiment Name: At_Siliques_P Parameter: Tissue Value: Less Than 5mm Siliques vs. Whole Plant
  misc_feature: MA Experiment ID: 20000264 Result: Up-regulated in Transcription
  misc_feature: MA Experiment 20000264 PARAMETER Experiment Name: At_Open_Flower_P Parameter: Age (day) Value: 21
  misc_feature: MA Experiment 20000264 PARAMETER Experiment Name: At_Open_Flower_P Parameter: Plant Line Value: WS
  misc_feature: MA Experiment 20000264 PARAMETER Experiment Name: At_Open_Flower_P Parameter: Tissue Value: Open Flower vs. Whole Plant
  misc_feature: MA Experiment ID: 20000437 Result: Down-regulated in Transcription
  misc_feature: MA Experiment 20000437 PARAMETER Experiment Name: At_Drought_P Parameter: Age (day) Value: 8
  misc_feature: MA Experiment 20000437 PARAMETER Experiment Name: At_Drought_P Parameter: Organism Value: A. thaliana
  misc_feature: MA Experiment 20000437 PARAMETER Experiment Name: At_Drought_P Parameter: Plant Line Value: WS
  misc_feature: MA Experiment 20000437 PARAMETER Experiment Name: At_Drought_P Parameter: Timepoint (hr) Value: 24
  misc_feature: MA Experiment 20000437 PARAMETER Experiment Name: At_Drought_P Parameter: Tissue Value: Whole Plant
  misc_feature: MA Experiment 20000437 PARAMETER Experiment Name: At_Drought_P Parameter: Treatment Value: Drought vs. No Drought
  misc_feature: MA Experiment ID: 20000495 Result: Up-regulated in Transcription
  misc_feature: MA Experiment 20000495 PARAMETER Experiment Name: At_Guard_Cells_P Parameter: Harvest Date Value: 8/2/2002
  misc_feature: MA Experiment 20000495 PARAMETER Experiment Name: At_Guard_Cells_P Parameter: Organism Value: A. thaliana
  misc_feature: MA Experiment 20000495 PARAMETER Experiment Name: At_Guard_Cells_P Parameter: Tissue Value: Guard Cells vs. Leaves
  misc_feature: MA Experiment ID: 20001450 Result: Down-regulated in Transcription
  misc_feature: MA Experiment 20001450 PARAMETER Experiment Name: At_Far-red-induction_P Parameter: Age (day) Value: 7
  misc_feature: MA Experiment 20001450 PARAMETER Experiment Name: At_Far-red-induction_P Parameter: Light Value: Far-red vs. White
  misc_feature: MA Experiment 20001450 PARAMETER Experiment Name: At_Far-red-induction_P Parameter: Organism Value: A. thaliana
  misc_feature: MA Experiment 20001450 PARAMETER Experiment Name: At_Far-red-induction_P Parameter: Plant Line Value: Columbia
  misc_feature: MA Experiment 20001450 PARAMETER Experiment Name: At_Far-red-induction_P Parameter: Timepoint (hr) Value: 8
  misc_feature: MA Experiment 20001450 PARAMETER Experiment Name: At_Far-red-induction_P Parameter: Tissue Value: Whole Plant
  misc_feature: MA Experiment ID: 20001560 Result: Up-regulated in Transcription
  misc_feature: MA Experiment 20001560 PARAMETER Experiment Name: At_Drought_Soil_Dry_P Parameter: Age (day) Value: 28
  misc_feature: MA Experiment 20001560 PARAMETER Experiment Name: At_Drought_Soil_Dry_P Parameter: Organism Value: A. thaliana
  misc_feature: MA Experiment 20001560 PARAMETER Experiment Name: At_Drought_Soil_Dry_P Parameter: Plant Line Value: WS
  misc_feature: MA Experiment 20001560 PARAMETER Experiment Name: At_Drought_Soil_Dry_P Parameter: Post Timepoint (hr) Value: None
  misc_feature: MA Experiment 20001560 PARAMETER Experiment Name: At_Drought_Soil_Dry_P Parameter: Post-Treatment Value: None
  misc_feature: MA Experiment 20001560 PARAMETER Experiment Name: At_Drought_Soil_Dry_P Parameter: Timepoint (day) Value: 14
  misc_feature: MA Experiment 20001560 PARAMETER Experiment Name: At_Drought_Soil_Dry_P Parameter: Treatment Value: Drought vs. No Drought
  misc_feature: MA Experiment ID: 20001911 Result: Down-regulated in Transcription
  misc_feature: MA Experiment 20001911 PARAMETER Experiment Name: At_Drought_Reproduction_P Parameter: Age (day) Value: 40
  misc_feature: MA Experiment 20001911 PARAMETER Experiment Name: At_Drought_Reproduction_P Parameter: Organism Value: A. thaliana
  misc_feature: MA Experiment 20001911 PARAMETER Experiment Name: At_Drought_Reproduction_P Parameter: Plant Line Value: WS
  misc_feature: MA Experiment 20001911 PARAMETER Experiment Name: At_Drought_Reproduction_P Parameter: Timepoint (day) Value: 10
  misc_feature: MA Experiment 20001911 PARAMETER Experiment Name: At_Drought_Reproduction_P Parameter: Tissue Value: Flowers
  misc_feature: MA Experiment 20001911 PARAMETER Experiment Name: At_Drought_Reproduction_P Parameter: Treatment Value: Drought vs. No Drought
acaatcacttgtctgattctctcatataatagagttttctttctattctcctctgcttaatttcccagaaattactctttctgtgcttatcggattcaatagattcttagtaaatcgtaatggagacaccatcatcgacaagaagagtcacgagatctcagacccgctgtgctatcaataatctcttatcctcaaagaaagcggatgattggtcagataaatgtcaatcgaagtcggtacaaagaaacggtgcaaaagacaggtctgcgttgtttgacataaccaacgactcaccgatcgtaggtctggcgatgcagacaccgtcctcaggagttgttgggaagaggaacatgagcagaatcaataacactcctggatctggtgaggctctcttgagaggccaagtcaagactctcttgcagaaggttgaggaagaagcagatctcaccaagatttcgttggaatctcgtcctttcatccatctcgttacttctcccatgggtcttctcgccccaactccggccaacaccccccaagttcttggtttctcagacgaagtgcaggttgtgatcacttctccggtagttgcaggacaattcagagcaccgtctcaggtggtggaaagcaacatgtttgatgagaaagaagaaagcttggagttagagaagagcccgagcattactcggtcattgcttctggactttagtgataaatcagaattatgggagagctcagactgctcatctgtggtgactcaaaacccagaggatgataactcgtcggtgtggtcgatgcaggccaatgcaagtgccaaagacgaagagtatgatgatgaagaggaagaagcctattcttacggtgaggaatatgatgaggaatactacgacgaggaagaggaggaagaagagggagggattgtggatgggttgtgtgagggaattaggaagatgagcgtagagactgactttgcagggaaacacactagatttgtgtatgacagtgaagatgaagagattgtggaggccaaagatcaatctccaggagtgttgcgtttgaaaggctttcctacaccgacaggaaaacatgtcagatttgccggtgatgaatgagttcagtttgaatctttcttcttggagttgtgacaaaaagcctcatatgtctcgactttttttttttttttcttgttgttgcttgaagattcacaaatctgattcttgttattaccttgttgttatttttcaataactaaaagtgtaatcggaatatgactcttttcatt

SEQ ID NO: 39350 - protein, 329 aa, Arabidopsis thaliana
  peptide (1)..(329): Ceres Seq. ID no. 13491537
  misc_feature (1)..(328): Homolog of NCBI NO: 37537140 NR Description: putative proline and glutamic acid rich nuclear
  misc_feature (274)..(329): Homolog of NCBI NO: 15230432 NR Description: hypothetical protein [Arabidopsis thaliana]
  misc_feature (1)..(182): Homolog of NCBI NO: 15230432 NR Description: hypothetical protein [Arabidopsis thaliana]
  misc_feature (1)..(329): Homolog of NCBI NO: 15239303 NR Description: expressed protein [Arabidopsis thaliana]
METPSSTRRVTRSQTRCAINNLLSSKKADDWSDKCQSKSVQRNGAKDRSALFDITNDSPIVGLAMQTPSSGVVGKRNMSRINNTPGSGEALLRGQVKTLLQKVEEEADLTKISLESRPFIHLVTSPMGLLAPTPANTPQVLGFSDEVQVVITSPVVAGQFRAPSQVVESNMFDEKEESLELEKSPSITRSLLLDFSDKSELWESSDCSSVVTQNPEDDNSSVWSMQANASAKDEEYDDEEEEAYSYGEEYDEEYYDEEEEEEEGGIVDGLCEGIRKMSVETDFAGKHTRFVYDSEDEEIVEAKDQSPGVLRLKGFPTPTGKHVRFAGDE

SEQ ID NO: 39351 - protein, 265 aa, Arabidopsis thaliana
  peptide (1)..(265): Ceres Seq. ID no. 13491538
  misc_feature (1)..(264): Homolog of NCBI NO: 37537140 NR Description: putative proline and glutamic acid rich nuclear
  misc_feature (210)..(265): Homolog of NCBI NO: 15230432 NR Description: hypothetical protein [Arabidopsis thaliana]
  misc_feature (1)..(118): Homolog of NCBI NO: 15230432 NR Description: hypothetical protein [Arabidopsis thaliana]
  misc_feature (1)..(265): Homolog of NCBI NO: 15239303 NR Description: expressed protein [Arabidopsis thaliana]
MQTPSSGVVGKRNMSRINNTPGSGEALLRGQVKTLLQKVEEEADLTKISLESRPFIHLVTSPMGLLAPTPANTPQVLGFSDEVQVVITSPVVAGQFRAPSQVVESNMFDEKEESLELEKSPSITRSLLLDFSDKSELWESSDCSSVVTQNPEDDNSSVWSMQANASAKDEEYDDEEEEAYSYGEEYDEEYYDEEEEEEEGGIVDGLCEGIRKMSVETDFAGKHTRFVYDSEDEEIVEAKDQSPGVLRLKGFPTPTGKHVRFAGDE

SEQ ID NO: 39352 - protein, 252 aa, Arabidopsis thaliana
  peptide (1)..(252): Ceres Seq. ID no. 13491539
  misc_feature (1)..(251): Homolog of NCBI NO: 37537140 NR Description: putative proline and glutamic acid rich nuclear
  misc_feature (197)..(252): Homolog of NCBI NO: 15230432 NR Description: hypothetical protein [Arabidopsis thaliana]
  misc_feature (1)..(105): Homolog of NCBI NO: 15230432 NR Description: hypothetical protein [Arabidopsis thaliana]
  misc_feature (1)..(252): Homolog of NCBI NO: 15239303 NR Description: expressed protein [Arabidopsis thaliana]
MSRINNTPGSGEALLRGQVKTLLQKVEEEADLTKISLESRPFIHLVTSPMGLLAPTPANTPQVLGFSDEVQVVITSPVVAGQFRAPSQVVESNMFDEKEESLELEKSPSITRSLLLDFSDKSELWESSDCSSVVTQNPEDDNSSVWSMQANASAKDEEYDDEEEEAYSYGEEYDEEYYDEEEEEEEGGIVDGLCEGIRKMSVETDFAGKHTRFVYDSEDEEIVEAKDQSPGVLRLKGFPTPTGKHVRFAGDE

SEQ ID NO: 39353 - DNA, 1335 bp, Arabidopsis thaliana
  misc_feature (1)..(1335): Ceres Seq. ID no. 12330247
  misc_feature: MA Experiment ID: 108501 Result: Up-regulated in Transcription
  misc_feature: MA Experiment 108501 PARAMETER Experiment Name: At_ap2_floral_buds_cDNA_P Parameter: Plant Line Value: ap2 (Ler.)
  misc_feature: MA Experiment 108501 PARAMETER Experiment Name: At_ap2_floral_buds_cDNA_P Parameter: Tissue Value: Closed Flower
  misc_feature: MA Experiment ID: 108595 Result: Up-regulated in Transcription
  misc_feature: MA Experiment 108595 PARAMETER Experiment Name: At_Ler-pi_Ovule_cDNA_P Parameter: Plant Line Value: null
  misc_feature: MA Experiment ID: 20000184 Result: Up-regulated in Transcription
  misc_feature: MA Experiment 20000184 PARAMETER Experiment Name: At_Shoots__P Parameter: Age (day) Value: 7
  misc_feature: MA Experiment 20000184 PARAMETER Experiment Name: At_Shoots__P Parameter: Tissue Value: Shoots vs. Whole Plant
  misc_feature: MA Experiment ID: 20000185 Result: Up-regulated in Transcription
  misc_feature: MA Experiment 20000185 PARAMETER Experiment Name: At_Roots__P Parameter: Age (day) Value: 7 vs. 21
  misc_feature: MA Experiment 20000185 PARAMETER Experiment Name: At_Roots__P Parameter: Organism Value: A. thaliana
  misc_feature: MA Experiment 20000185 PARAMETER Experiment Name: At_Roots__P Parameter: Tissue Value: Roots vs. Whole Plant
  misc_feature: MA Experiment ID: 20000439 Result: Up-regulated in Transcription
  misc_feature: MA Experiment 20000439 PARAMETER Experiment Name: At_Roots__P Parameter: Age (day) Value: 14 vs. 21
  misc_feature: MA Experiment 20000439 PARAMETER Experiment Name: At_Roots__P Parameter: Organism Value: A. thaliana
  misc_feature: MA Experiment 20000439 PARAMETER Experiment Name: At_Roots__P Parameter: Tissue Value: Roots vs. Whole Plant
  misc_feature: MA Experiment ID: 20000495 Result: Up-regulated in Transcription
  misc_feature: MA Experiment 20000495 PARAMETER Experiment Name: At_Guard_Cells_P Parameter: Harvest Date Value: 8/2/2002
  misc_feature: MA Experiment 20000495 PARAMETER Experiment Name: At_Guard_Cells_P Parameter: Organism Value: A. thaliana
  misc_feature: MA Experiment 20000495 PARAMETER Experiment Name: At_Guard_Cells_P Parameter: Tissue Value: Guard Cells vs. Leaves
  misc_feature: MA Experiment ID: 20001451 Result: Up-regulated in Transcription
  misc_feature: MA Experiment 20001451 PARAMETER Experiment Name: At_Far-red-induction_P Parameter: Age (day) Value: 7
  misc_feature: MA Experiment 20001451 PARAMETER Experiment Name: At_Far-red-induction_P Parameter: Light Value: Far-red vs. White
  misc_feature: MA Experiment 20001451 PARAMETER Experiment Name: At_Far-red-induction_P Parameter: Organism Value: A. thaliana
  misc_feature: MA Experiment 20001451 PARAMETER Experiment Name: At_Far-red-induction_P Parameter: Plant Line Value: Columbia
  misc_feature: MA Experiment 20001451 PARAMETER Experiment Name: At_Far-red-induction_P Parameter: Timepoint (hr) Value: 24
  misc_feature: MA Experiment 20001451 PARAMETER Experiment Name: At_Far-red-induction_P Parameter: Tissue Value: Whole Plant
  misc_feature: MA Experiment ID: 20001556 Result: Down-regulated in Transcription
  misc_feature: MA Experiment 20001556 PARAMETER Experiment Name: At_Drought_Soil_Dry_P Parameter: Age (day) Value: 26
  misc_feature: MA Experiment 20001556 PARAMETER Experiment Name: At_Drought_Soil_Dry_P Parameter: Organism Value: A. thaliana
  misc_feature: MA Experiment 20001556 PARAMETER Experiment Name: At_Drought_Soil_Dry_P Parameter: Plant Line Value: WS
  misc_feature: MA Experiment 20001556 PARAMETER Experiment Name: At_Drought_Soil_Dry_P Parameter: Post Timepoint (hr) Value: None
  misc_feature: MA Experiment 20001556 PARAMETER Experiment Name: At_Drought_Soil_Dry_P Parameter: Post-Treatment Value: None
  misc_feature: MA Experiment 20001556 PARAMETER Experiment Name: At_Drought_Soil_Dry_P Parameter: Timepoint (day) Value: 12
  misc_feature: MA Experiment 20001556 PARAMETER Experiment Name: At_Drought_Soil_Dry_P Parameter: Treatment Value: Drought vs. No Drought
  misc_feature: MA Experiment ID: 20001557 Result: Down-regulated in Transcription
  misc_feature: MA Experiment 20001557 PARAMETER Experiment Name: At_Drought_Soil_Dry_P Parameter: Age (day) Value: 27
  misc_feature: MA Experiment 20001557 PARAMETER Experiment Name: At_Drought_Soil_Dry_P Parameter: Organism Value: A. thaliana
  misc_feature: MA Experiment 20001557 PARAMETER Experiment Name: At_Drought_Soil_Dry_P Parameter: Plant Line Value: WS
  misc_feature: MA Experiment 20001557 PARAMETER Experiment Name: At_Drought_Soil_Dry_P Parameter: Post Timepoint (hr) Value: 3
  misc_feature: MA Experiment 20001557 PARAMETER Experiment Name: At_Drought_Soil_Dry_P Parameter: Post-Treatment Value: Re-Water vs. No Drought
  misc_feature: MA Experiment 20001557 PARAMETER Experiment Name: At_Drought_Soil_Dry_P Parameter: Timepoint (day) Value: 13
  misc_feature: MA Experiment 20001557 PARAMETER Experiment Name: At_Drought_Soil_Dry_P Parameter: Treatment Value: Drought vs. No Drought
  misc_feature: MA Experiment ID: 20001558 Result: Down-regulated in Transcription
  misc_feature: MA Experiment 20001558 PARAMETER Experiment Name: At_Drought_Soil_Dry_P Parameter: Age (day) Value: 27
  misc_feature: MA Experiment 20001558 PARAMETER Experiment Name: At_Drought_Soil_Dry_P Parameter: Organism Value: A. thaliana
  misc_feature: MA Experiment 20001558 PARAMETER Experiment Name: At_Drought_Soil_Dry_P Parameter: Plant Line Value: WS
  misc_feature: MA Experiment 20001558 PARAMETER Experiment Name: At_Drought_Soil_Dry_P Parameter: Post Timepoint (hr) Value: 6
  misc_feature: MA Experiment 20001558 PARAMETER Experiment Name: At_Drought_Soil_Dry_P Parameter: Post-Treatment Value: Re-Water vs. No Drought
  misc_feature: MA Experiment 20001558 PARAMETER Experiment Name: At_Drought_Soil_Dry_P Parameter: Timepoint (day) Value: 13
  misc_feature: MA Experiment 20001558 PARAMETER Experiment Name: At_Drought_Soil_Dry_P Parameter: Treatment Value: Drought vs. No Drought
  misc_feature: MA Experiment ID: 20001905 Result: Down-regulated in Transcription
  misc_feature: MA Experiment 20001905 PARAMETER Experiment Name: At_Drought_Reproduction_P Parameter: Age (day) Value: 40
  misc_feature: MA Experiment 20001905 PARAMETER Experiment Name: At_Drought_Reproduction_P Parameter: Organism Value: A. thaliana
  misc_feature: MA Experiment 20001905 PARAMETER Experiment Name: At_Drought_Reproduction_P Parameter: Plant Line Value: WS
  misc_feature: MA Experiment 20001905 PARAMETER Experiment Name: At_Drought_Reproduction_P Parameter: Timepoint (day) Value: 10
  misc_feature: MA Experiment 20001905 PARAMETER Experiment Name: At_Drought_Reproduction_P Parameter: Tissue Value: Rosettes
  misc_feature: MA Experiment 20001905 PARAMETER Experiment Name: At_Drought_Reproduction_P Parameter: Treatment Value: Drought vs. No Drought
acactcctctccttcttctttacacctctccaatggtaaaatctctcattcactaactttctctgcttctctctatctttctctgtgcataccaactctaaagtctctcatcaatggcggctcgaaaactagggtcgttgttacgtcaatactttttctctctatgcttcctcttcctcggttgcttcttcttccctaaagacgcagactataaacaaaagagaagaaagaagaagcttagaagagtttcttcttcttctggttcatctctatcctcttcttggacgtatttaaaacgagttttcttatccacgacaaggatatccaaatcccgtaaccaaacacatcctaacgttactttaacatccgcaagatcatctcaaaactccctcgtcactctcgtccaacccgataccacaaaccaacccgacccggaaacacgtattcatcagcaaaccgaattcgagatctcctcttccgacgagattttcccttgtaactcgtgtggcgagattttcccaaaaatcaatctcctcgagaatcacatcgcgatcaaacacgccgtgtcggagctaatcgccggagaatcaagcacgaacatcgtcaagatcatattcaaatctggttggccggagcaaggtaattacaaatctccggtgatcaatcgaatcttaaaaatccacaacagttcaaagattctcaccagattcgaagagtatcgtgagttcgtgaaagctaaagccgctcgtagcaacggcggtggaagacggtgggacgatgaacgttgcgtcgccgacggaaacgaacttttacgattttactgctcgacgtttatgtgtgatttagggcaaaacggtaaatcaaatctctgtggtcatcagtattgtagtatctgtggtatcatcggatctggattctcgccgaagctcgacgggatcgcgacgttggcgacggggtggagaggacacgtggcggttccggaggaggttgaagaagagtttgggtttatgaatgtgaaacgggccatgttggtttgtcgggttgtagcgggtcgggtcgggtgtgatttgattgatgatgatgacgtggataagagtgatggtggagggtatgattctctggttgggcagagtgggaacaagagtggggctctgttgaggatcgacgatgatgagcttttggtttttaatccaagggctgtgcttccttgttttgttattgtgtatactgtgtaaccggatttgtgatcctgtgtgtttttgtttatattttgttacaattgtgaagtgtgaaacgctttaggtttgtttggaaaatggtaaaatctttgtggtg

SEQ ID NO: 39354 - protein, 373 aa, Arabidopsis thaliana
  peptide (1)..(373): Ceres Seq. ID no. 12330248
  misc_feature (126)..(149): Pfam Name: Zinc finger, C2H2 type Pfam Description: Zinc finger, C2H2 type
  misc_feature (81)..(370): Homolog of NCBI NO: 18416951 NR Description: expressed protein
  misc_feature (46)..(151): Homolog of NCBI NO: 38346001 NR Description: OSJNBa0073L13.11 [Oryza sativa (japonica
  misc_feature (151)..(373): Homolog of NCBI NO: 38346001 NR Description: OSJNBa0073L13.11 [Oryza sativa (japonica
  misc_feature (128)..(370): Homolog of NCBI NO: 15239695 NR Description: putative protein
  misc_feature (125)..(373): Homolog of NCBI NO: 9802582 NR Description: T2E6.3 [Arabidopsis thaliana]
  misc_feature (122)..(373): Homolog of NCBI NO: 15222333 NR Description: unknown protein; protein id: At1g75710.1
  misc_feature (125)..(371): Homolog of NCBI NO: 5777616 NR Description: CAA30374.1 protein [Oryza sativa]
  misc_feature (117)..(371): Homolog of NCBI NO: 38345520 NR Description: OSJNBa0039K24.23 [Oryza sativa (japonica
  misc_feature (45)..(372): Homolog of NCBI NO: 34901982 NR Description: hypothetical protein [Oryza sativa (japonica
  misc_feature (1)..(373): Homolog of NCBI NO: 18402112 NR Description: expressed protein
MAARKLGSLLRQYFFSLCFLFLGCFFFPKDADYKQKRRKKKLRRVSSSSGSSLSSSWTYLKRVFLSTTRISKSRNQTHPNVTLTSARSSQNSLVTLVQPDTTNQPDPETRIHQQTEFEISSSDEIFPCNSCGEIFPKINLLENHIAIKHAVSELIAGESSTNIVKIIFKSGWPEQGNYKSPVINRILKIHNSSKILTRFEEYREFVKAKAARSNGGGRRWDDERCVADGNELLRFYCSTFMCDLGQNGKSNLCGHQYCSICGIIGSGFSPKLDGIATLATGWRGHVAVPEEVEEEFGFMNVKRAMLVCRVVAGRVGCDLIDDDDVDKSDGGGYDSLVGQSGNKSGALLRIDDDELLVFNPRAVLPCFVIVYTV

SEQ ID NO: 39355 - DNA, 1854 bp, Arabidopsis thaliana
  misc_feature (1)..(1854): Ceres Seq. ID no. 12330847
  misc_feature: MA Experiment ID: 108489 Result: Down-regulated in Transcription
  misc_feature: MA Experiment ID: 108576 Result: Up-regulated in Transcription
  misc_feature: MA Experiment 108576 PARAMETER Experiment Name: At_42deg_Heat_cDNA_P Parameter: Temperature (deg C) Value: 42 vs. 22
  misc_feature: MA Experiment 108576 PARAMETER Experiment Name: At_42deg_Heat_cDNA_P Parameter: Timepoint (hr) Value: 1
  misc_feature: MA Experiment 108576 PARAMETER Experiment Name: At_42deg_Heat_cDNA_P Parameter: Tissue Value: Aerial
  misc_feature: MA Experiment ID: 108577 Result: Up-regulated in Transcription
  misc_feature: MA Experiment 108577 PARAMETER Experiment Name: At_42deg_Heat_cDNA_P Parameter: Temperature (deg C) Value: 42 vs. 22
  misc_feature: MA Experiment 108577 PARAMETER Experiment Name: At_42deg_Heat_cDNA_P Parameter: Timepoint (hr) Value: 6
  misc_feature: MA Experiment 108577 PARAMETER Experiment Name: At_42deg_Heat_cDNA_P Parameter: Tissue Value: Aerial
  misc_feature: MA Experiment ID: 108579 Result: Up-regulated in Transcription
  misc_feature: MA Experiment 108579 PARAMETER Experiment Name: At_4deg_Cold_cDNA_P Parameter: Temperature (deg C) Value: 4 vs. 22
  misc_feature: MA Experiment 108579 PARAMETER Experiment Name: At_4deg_Cold_cDNA_P Parameter: Timepoint (hr) Value: 6
  misc_feature: MA Experiment 108579 PARAMETER Experiment Name: At_4deg_Cold_cDNA_P Parameter: Tissue Value: Aerial
  misc_feature: MA Experiment ID: 20000069 Result: Down-regulated in Transcription
  misc_feature: MA Experiment 20000069 PARAMETER Experiment Name: At_100uM_ABA_Mutants_cDNA_P Parameter: Plant Line Value: CS23
  misc_feature: MA Experiment 20000069 PARAMETER Experiment Name: At_100uM_ABA_Mutants_cDNA_P Parameter: Timepoint (hr) Value: 6
  misc_feature: MA Experiment 20000069 PARAMETER Experiment Name: At_100uM_ABA_Mutants_cDNA_P Parameter: Tissue Value: Aerial
  misc_feature: MA Experiment 20000069 PARAMETER Experiment Name: At_100uM_ABA_Mutants_cDNA_P Parameter: Treatment Value: 100uM ABA vs. No Treatment
  misc_feature: MA Experiment ID: 20000070 Result: Down-regulated in Transcription
  misc_feature: MA Experiment 20000070 PARAMETER Experiment Name: At_100uM_ABA_Mutants_cDNA_P Parameter: Plant Line Value: CS24
  misc_feature: MA Experiment 20000070 PARAMETER Experiment Name: At_100uM_ABA_Mutants_cDNA_P Parameter: Timepoint (hr) Value: 6
  misc_feature: MA Experiment 20000070 PARAMETER Experiment Name: At_100uM_ABA_Mutants_cDNA_P Parameter: Tissue Value: Aerial
  misc_feature: MA Experiment 20000070 PARAMETER Experiment Name: At_100uM_ABA_Mutants_cDNA_P Parameter: Treatment Value: 100uM ABA vs. No Treatment
  misc_feature: MA Experiment ID: 20000071 Result: Down-regulated in Transcription
  misc_feature: MA Experiment 20000071 PARAMETER Experiment Name: At_100uM_ABA_Mutants_cDNA_P Parameter: Plant Line Value: CS8104
  misc_feature: MA Experiment 20000071 PARAMETER Experiment Name: At_100uM_ABA_Mutants_cDNA_P Parameter: Timepoint (hr) Value: 6
  misc_feature: MA Experiment 20000071 PARAMETER Experiment Name: At_100uM_ABA_Mutants_cDNA_P Parameter: Tissue Value: Aerial
  misc_feature: MA Experiment 20000071 PARAMETER Experiment Name: At_100uM_ABA_Mutants_cDNA_P Parameter: Treatment Value: 100uM ABA vs. No Treatment
  misc_feature: MA Experiment ID: 20000072 Result: Down-regulated in Transcription
  misc_feature: MA Experiment 20000072 PARAMETER Experiment Name: At_100uM_ABA_Mutants_cDNA_P Parameter: Plant Line Value: CS8105
  misc_feature: MA Experiment 20000072 PARAMETER Experiment Name: At_100uM_ABA_Mutants_cDNA_P Parameter: Timepoint (hr) Value: 6
  misc_feature: MA Experiment 20000072 PARAMETER Experiment Name: At_100uM_ABA_Mutants_cDNA_P Parameter: Tissue Value: Aerial
  misc_feature: MA Experiment 20000072 PARAMETER Experiment Name: At_100uM_ABA_Mutants_cDNA_P Parameter: Treatment Value: 100uM ABA vs. No Treatment
  misc_feature: MA Experiment ID: 20000087 Result: Down-regulated in Transcription
  misc_feature: MA Experiment 20000087 PARAMETER Experiment Name: At_100uM_ABA_Mutants_cDNA_P Parameter: Plant Line Value: WS
  misc_feature: MA Experiment 20000087 PARAMETER Experiment Name: At_100uM_ABA_Mutants_cDNA_P Parameter: Timepoint (hr) Value: 6
  misc_feature: MA Experiment 20000087 PARAMETER Experiment Name: At_100uM_ABA_Mutants_cDNA_P Parameter: Tissue Value: Aerial
  misc_feature: MA Experiment 20000087 PARAMETER Experiment Name: At_100uM_ABA_Mutants_cDNA_P Parameter: Treatment Value: 100uM ABA vs. No Treatment
  misc_feature: MA Experiment ID: 20000088 Result: Down-regulated in Transcription
  misc_feature: MA Experiment 20000088 PARAMETER Experiment Name: At_100uM_ABA_Mutants_cDNA_P Parameter: Plant Line Value: Landsberg
  misc_feature: MA Experiment 20000088 PARAMETER Experiment Name: At_100uM_ABA_Mutants_cDNA_P Parameter: Timepoint (hr) Value: 6
  misc_feature: MA Experiment 20000088 PARAMETER Experiment Name: At_100uM_ABA_Mutants_cDNA_P Parameter: Tissue Value: Aerial
  misc_feature: MA Experiment 20000088 PARAMETER Experiment Name: At_100uM_ABA_Mutants_cDNA_P Parameter: Treatment Value: 100uM ABA vs. No Treatment
  misc_feature: MA Experiment ID: 20000089 Result: Down-regulated in Transcription
  misc_feature: MA Experiment ID: 20000090 Result: Down-regulated in Transcription
  misc_feature: MA Experiment ID: 20000093 Result: Up-regulated in Transcription
  misc_feature: MA Experiment 20000093 PARAMETER Experiment Name: At_42deg_Heat_cDNA_P Parameter: Temperature (deg C) Value: 42 vs. 22
  misc_feature: MA Experiment 20000093 PARAMETER Experiment Name: At_42deg_Heat_cDNA_P Parameter: Timepoint (hr) Value: 0.5
  misc_feature: MA Experiment 20000093 PARAMETER Experiment Name: At_42deg_Heat_cDNA_P Parameter: Tissue Value: Aerial
  misc_feature: MA Experiment ID: 20000111 Result: Up-regulated in Transcription
  misc_feature: MA Experiment 20000111 PARAMETER Experiment Name: At_42deg_Heat_cDNA_P Parameter: Temperature (deg C) Value: 42 vs. 22
  misc_feature: MA Experiment 20000111 PARAMETER Experiment Name: At_42deg_Heat_cDNA_P Parameter: Timepoint (hr) Value: 6
  misc_feature: MA Experiment 20000111 PARAMETER Experiment Name: At_42deg_Heat_cDNA_P Parameter: Tissue Value: Aerial
  misc_feature: MA Experiment ID: 20000117 Result: Down-regulated in Transcription
  misc_feature: MA Experiment 20000117 PARAMETER Experiment Name: At_100uM_ABA_Mutants_cDNA_P Parameter: Plant Line Value: Columbia
  misc_feature: MA Experiment 20000117 PARAMETER Experiment Name: At_100uM_ABA_Mutants_cDNA_P Parameter: Timepoint (hr) Value: 6
  misc_feature: MA Experiment 20000117 PARAMETER Experiment Name: At_100uM_ABA_Mutants_cDNA_P Parameter: Tissue Value: Aerial
  misc_feature: MA Experiment 20000117 PARAMETER Experiment Name: At_100uM_ABA_Mutants_cDNA_P Parameter: Treatment Value: 100uM ABA vs. No Treatment
  misc_feature: MA Experiment ID: 20000144 Result: Up-regulated in Transcription
  misc_feature: MA Experiment 20000144 PARAMETER Experiment Name: At_42deg_Heat_cDNA_P Parameter: Temperature (deg C) Value: 42 vs. 22
  misc_feature: MA Experiment 20000144 PARAMETER Experiment Name: At_42deg_Heat_cDNA_P Parameter: Timepoint (hr) Value: 1
  misc_feature: MA Experiment 20000144 PARAMETER Experiment Name: At_42deg_Heat_cDNA_P Parameter: Tissue Value: Aerial
  misc_feature: MA Experiment ID: 20000173 Result: Up-regulated in Transcription
  misc_feature: MA Experiment 20000173 PARAMETER Experiment Name: At_42deg_Heat_P Parameter: Age (day) Value: 14
  misc_feature: MA Experiment 20000173 PARAMETER Experiment Name: At_42deg_Heat_P Parameter: Organism Value: A. thaliana
  misc_feature: MA Experiment 20000173 PARAMETER Experiment Name: At_42deg_Heat_P Parameter: Plant Line Value: WS
  misc_feature: MA Experiment 20000173 PARAMETER Experiment Name: At_42deg_Heat_P Parameter: Temperature (deg C) Value: 42 vs. 22
  misc_feature: MA Experiment 20000173 PARAMETER Experiment Name: At_42deg_Heat_P Parameter: Timepoint (hr) Value: 6
  misc_feature: MA Experiment 20000173 PARAMETER Experiment Name: At_42deg_Heat_P Parameter: Tissue Value: Aerial
  misc_feature: MA Experiment ID: 20000224 Result: Up-regulated in Transcription
  misc_feature: MA Experiment ID: 20000286 Result: Up-regulated in Transcription
  misc_feature: MA Experiment 20000286 PARAMETER Experiment Name: At_Open_Flower_P Parameter: Age (day) Value: 21
  misc_feature: MA Experiment 20000286 PARAMETER Experiment Name: At_Open_Flower_P Parameter: Plant Line Value: WS
  misc_feature: MA Experiment 20000286 PARAMETER Experiment Name: At_Open_Flower_P Parameter: Tissue Value: Half Open vs. Whole Plant
  misc_feature: MA Experiment ID: 20000438 Result: Up-regulated in Transcription
  misc_feature: MA Experiment 20000438 PARAMETER Experiment Name: At_Shoots__P Parameter: Age (day) Value: 14
  misc_feature: MA Experiment 20000438 PARAMETER Experiment Name: At_Shoots__P Parameter: Tissue Value: Shoots vs. Whole Plant
  misc_feature: MA Experiment ID: 20001248 Result: Down-regulated in Transcription
  misc_feature: MA Experiment 20001248 PARAMETER Experiment Name: At_Far-red-induction_P Parameter: Age (day) Value: 7
  misc_feature: MA Experiment 20001248 PARAMETER Experiment Name: At_Far-red-induction_P Parameter: Light Value: Far-red vs. White
  misc_feature: MA Experiment 20001248 PARAMETER Experiment Name: At_Far-red-induction_P Parameter: Organism Value: A. thaliana
  misc_feature: MA Experiment 20001248 PARAMETER Experiment Name: At_Far-red-induction_P Parameter: Plant Line Value: Columbia
  misc_feature: MA Experiment 20001248 PARAMETER Experiment Name: At_Far-red-induction_P Parameter: Timepoint (hr) Value: 4
  misc_feature: MA Experiment 20001248 PARAMETER Experiment Name: At_Far-red-induction_P Parameter: Tissue Value: Whole Plant
caataggcgttgattcttcttttgttggattccaacaatattactcagaccctccgtatgaaagtgctgcatcttcgcctacttatgttccatatgttattcagcctgatatggtctcgaatagttcaacagactctttggtagcgaatggtggtcaatctgatggaagaggatccatgcagagaaatggttcagcaattgccggactcccaaaagatgctccaaagtctaccactactggccagtataaacagccaggaatccccaagaatgtttccacaacagcttctgcacattctctccagggaaaaactgcttacgcgaacacactcttgccttatgggaaatcagacattgctaatggggtctcatcaattgcttcatatagttataaaccttgttccaagatttatgataccagaggtgataacaacacaactggaagtacatatacgagtgaacaaaatcgaggatcgagaacgagaagatcaagaaatcaactaattgtcaaagcatatacaaccaaagctggaaatgctgatgcggaaggaaatattgtgataaatcctgatcgatataataaagaagatttcagtattgaatacagcgatgccaggttttttgtgattaagtcgtatagtgaagatgatgttcacaagagcatcaaatatggtgtctggtcatctacattgaatgggaacaagaaattgcagagtgtatatgaagatgctcagagaatagccactgagaagtctcgtgaatgtcctattttcttattcttttctgtcaattccagtggtctgttctgtggcgtggctgagatgaccggtccagtttccttcgaccgagacatggatttttggcagcaagacaaatggagtggaagctttcctgtcaagtggcacattattaaagatgttcctaatagctatttcaggcacattattttacataataacgagaataagccagtgaccaacagccgagacacacaagagataatactgaaacaaggactcgaggtgctaaaactattcaaacatcatgcggaaaagacttcactattagatgattttatgtactacgaagaccgccagagactcatgcaggaagagagagctagacttccatttaggacctttcgcaggccatttcccgtgctcaatctagatttttctgacagaagcaagaaaagctccaaggatgtcggtaagaagccttcagtgacctctgcagaaacaaaggttgtgcaattaaaaaactcagatggggatgaaaagagcaatacacaggaagcaacagacgaaactactccttccactctgaagtttggctctctcgccattaaaccaactgctggtaccacctttaacccaacccaagccaagcctaaaccgaccccatctctcggctctgaccacaagtcagactcttctgaagaggttactgggtctctggctgatgacattgtcagtgtaggatcgttgcccataaaagtaaagggatctaaagaattatcctccaagatcgcagcggtgggtacaagtcctctctcaactcaagatcagttcagaagtaaaccagggttttgacattgtctttgtctaacttgtttatgcataatagaaagcatggtcgatatggttcgagaaagagaaagagattgagtatgtatagattggttggttttaccttttaaatggtctgattggtcgtttgagaatccttgtttatcgtctcagtttggacaaatgattgttgccagtggttgcgttttggtttgttgggtttgattaaacagttggttccgtcttttgatcgaaatttatgtgtttgtcatgctatattaatgtt

SEQ ID NO: 39356 - protein, 529 aa, Arabidopsis thaliana
  peptide (1)..(529): Ceres Seq. ID no. 12330848
  misc_feature (258)..(348): Pfam Name: YT521-B-like family Pfam Description: YT521-B-like family
  misc_feature (113)..(376): Homolog of NCBI NO: 18412316 NR Description: expressed protein
  misc_feature (113)..(376): Homolog of NCBI NO: 7487895 NR Description: hypothetical protein YUP8H12R.13 - Arabidopsis
  misc_feature (31)..(416): Homolog of NCBI NO: 34911170 NR Description: B1144G04.32 [Oryza sativa (japonica
  misc_feature (41)..(374): Homolog of NCBI NO: 18087662 NR Description: putative RNA-binding protein [Oryza sativa]
  misc_feature (34)..(374): Homolog of NCBI NO: 22773231 NR Description: Putative RNA-binding protein
  misc_feature (332)..(517): Homolog of NCBI NO: 8778514 NR Description: F21D18.17 [Arabidopsis thaliana]
  misc_feature (10)..(333): Homolog of NCBI NO: 8778514 NR Description: F21D18.17 [Arabidopsis thaliana]
  misc_feature (10)..(517): Homolog of NCBI NO: 15221079 NR Description: unknown protein; protein id: At1g48110.1
  misc_feature (1)..(524): Homolog of NCBI NO: 11994550 NR Description: gene_id:MGD8.17~unknown protein [Arabidopsis
  misc_feature (1)..(529): Homolog of NCBI NO: 30684473 NR Description: expressed protein [Arabidopsis thaliana]
IGVDSSFVGFQQYYSDPPYESAASSPTYVPYVIQPDMVSNSSTDSLVANGGQSDGRGSMQRNGSAIAGLPKDAPKSTTTGQYKQPGIPKNVSTTASAHSLQGKTAYANTLLPYGKSDIANGVSSIASYSYKPCSKIYDTRGDNNTTGSTYTSEQNRGSRTRRSRNQLIVKAYTTKAGNADAEGNIVINPDRYNKEDFSIEYSDARFFVIKSYSEDDVHKSIKYGVWSSTLNGNKKLQSVYEDAQRIATEKSRECPIFLFFSVNSSGLFCGVAEMTGPVSFDRDMDFWQQDKWSGSFPVKWHIIKDVPNSYFRHIILHNNENKPVTNSRDTQEIILKQGLEVLKLFKHHAEKTSLLDDFMYYEDRQRLMQEERARLPFRTFRRPFPVLNLDFSDRSKKSSKDVGKKPSVTSAETKVVQLKNSDGDEKSNTQEATDETTPSTLKFGSLAIKPTAGTTFNPTQAKPKPTPSLGSDHKSDSSEEVTGSLADDIVSVGSLPIKVKGSKELSSKIAAVGTSPLSTQDQFRSKPGF

SEQ ID NO: 39357 - protein, 493 aa, Arabidopsis thaliana
  peptide (1)..(493): Ceres Seq. ID no. 12330849
  misc_feature (222)..(312): Pfam Name: YT521-B-like family Pfam Description: YT521-B-like family
  misc_feature (77)..(340): Homolog of NCBI NO: 18412316 NR Description: expressed protein
  misc_feature (77)..(340): Homolog of NCBI NO: 7487895 NR Description: hypothetical protein YUP8H12R.13 - Arabidopsis
  misc_feature (1)..(380): Homolog of NCBI NO: 34911170 NR Description: B1144G04.32 [Oryza sativa (japonica
  misc_feature (5)..(338): Homolog of NCBI NO: 18087662 NR Description: putative RNA-binding protein [Oryza sativa]
  misc_feature (1)..(338): Homolog of NCBI NO: 22773231 NR Description: Putative RNA-binding protein
  misc_feature (296)..(481): Homolog of NCBI NO: 8778514 NR Description: F21D18.17 [Arabidopsis thaliana]
  misc_feature (1)..(297): Homolog of NCBI NO: 8778514 NR Description: F21D18.17 [Arabidopsis thaliana]
  misc_feature (1)..(481): Homolog of NCBI NO: 15221079 NR Description: unknown protein; protein id: At1g48110.1
  misc_feature (1)..(488): Homolog of NCBI NO: 11994550 NR Description: gene_id:MGD8.17~unknown protein [Arabidopsis
  misc_feature (1)..(493): Homolog of NCBI NO: 30684473 NR Description: expressed protein [Arabidopsis thaliana]
MVSNSSTDSLVANGGQSDGRGSMQRNGSAIAGLPKDAPKSTTTGQYKQPGIPKNVSTTASAHSLQGKTAYANTLLPYGKSDIANGVSSIASYSYKPCSKIYDTRGDNNTTGSTYTSEQNRGSRTRRSRNQLIVKAYTTKAGNADAEGNIVINPDRYNKEDFSIEYSDARFFVIKSYSEDDVHKSIKYGVWSSTLNGNKKLQSVYEDAQRIATEKSRECPIFLFFSVNSSGLFCGVAEMTGPVSFDRDMDFWQQDKWSGSFPVKWHIIKDVPNSYFRHIILHNNENKPVTNSRDTQEIILKQGLEVLKLFKHHAEKTSLLDDFMYYEDRQRLMQEERARLPFRTFRRPFPVLNLDFSDRSKKSSKDVGKKPSVTSAETKVVQLKNSDGDEKSNTQEATDETTPSTLKFGSLAIKPTAGTTFNPTQAKPKPTPSLGSDHKSDSSEEVTGSLADDIVSVGSLPIKVKGSKELSSKIAAVGTSPLSTQDQFRSKPGF

SEQ ID NO: 39358 - protein, 471 aa, Arabidopsis thaliana
  peptide (1)..(471): Ceres Seq. ID no. 12330850
  misc_feature (200)..(290): Pfam Name: YT521-B-like family Pfam Description: YT521-B-like family
  misc_feature (55)..(318): Homolog of NCBI NO: 18412316 NR Description: expressed protein
  misc_feature (55)..(318): Homolog of NCBI NO: 7487895 NR Description: hypothetical protein YUP8H12R.13 - Arabidopsis
  misc_feature (1)..(358): Homolog of NCBI NO: 34911170 NR Description: B1144G04.32 [Oryza sativa (japonica
  misc_feature (1)..(316): Homolog of NCBI NO: 18087662 NR Description: putative RNA-binding protein [Oryza sativa]
  misc_feature (1)..(316): Homolog of NCBI NO: 22773231 NR Description: Putative RNA-binding protein
  misc_feature (274)..(459): Homolog of NCBI NO: 8778514 NR Description: F21D18.17 [Arabidopsis thaliana]
  misc_feature (1)..(275): Homolog of NCBI NO: 8778514 NR Description: F21D18.17 [Arabidopsis thaliana]
  misc_feature (1)..(459): Homolog of NCBI NO: 15221079 NR Description: unknown protein; protein id: At1g48110.1
  misc_feature (1)..(466): Homolog of NCBI NO: 11994550 NR Description: gene_id:MGD8.17~unknown protein [Arabidopsis
  misc_feature (1)..(471): Homolog of NCBI NO: 30684473 NR Description: expressed protein [Arabidopsis thaliana]
MQRNGSAIAGLPKDAPKSTTTGQYKQPGIPKNVSTTASAHSLQGKTAYANTLLPYGKSDIANGVSSIASYSYKPCSKIYDTRGDNNTTGSTYTSEQNRGSRTRRSRNQLIVKAYTTKAGNADAEGNIVINPDRYNKEDFSIEYSDARFFVIKSYSEDDVHKSIKYGVWSSTLNGNKKLQSVYEDAQRIATEKSRECPIFLFFSVNSSGLFCGVAEMTGPVSFDRDMDFWQQDKWSGSFPVKWHIIKDVPNSYFRHIILHNNENKPVTNSRDTQEIILKQGLEVLKLFKHHAEKTSLLDDFMYYEDRQRLMQEERARLPFRTFRRPFPVLNLDFSDRSKKSSKDVGKKPSVTSAETKVVQLKNSDGDEKSNTQEATDETTPSTLKFGSLAIKPTAGTTFNPTQAKPKPTPSLGSDHKSDSSEEVTGSLADDIVSVGSLPIKVKGSKELSSKIAAVGTSPLSTQDQFRSKPGF

SEQ ID NO: 39359 - DNA, 1562 bp, Arabidopsis thaliana
  misc_feature (1)..(1562): Ceres Seq. ID no. 12395256
  misc_feature: MA Experiment ID: 108462 Result: Down-regulated in Transcription
  misc_feature: MA Experiment 108462 PARAMETER Experiment Name: At_Germinating_Seeds_cDNA_P Parameter: Age (day) Value: 2 vs. 0
  misc_feature: MA Experiment 108462 PARAMETER Experiment Name: At_Germinating_Seeds_cDNA_P Parameter: Tissue Value: Germinating Seeds
  misc_feature: MA Experiment ID: 108463 Result: Down-regulated in Transcription
  misc_feature: MA Experiment 108463 PARAMETER Experiment Name: At_Germinating_Seeds_cDNA_P Parameter: Age (day) Value: 3 vs. 0
  misc_feature: MA Experiment 108463 PARAMETER Experiment Name: At_Germinating_Seeds_cDNA_P Parameter: Tissue Value: Germinating Seeds
  misc_feature: MA Experiment ID: 108464 Result: Down-regulated in Transcription
  misc_feature: MA Experiment 108464 PARAMETER Experiment Name: At_Germinating_Seeds_cDNA_P Parameter: Age (day) Value: 4 vs. 0
  misc_feature: MA Experiment 108464 PARAMETER Experiment Name: At_Germinating_Seeds_cDNA_P Parameter: Tissue Value: Germinating Seeds
  misc_feature: MA Experiment ID: 108577 Result: Down-regulated in Transcription
  misc_feature: MA Experiment 108577 PARAMETER Experiment Name: At_42deg_Heat_cDNA_P Parameter: Temperature (deg C) Value: 42 vs. 22
  misc_feature: MA Experiment 108577 PARAMETER Experiment Name: At_42deg_Heat_cDNA_P Parameter: Timepoint (hr) Value: 6
  misc_feature: MA Experiment 108577 PARAMETER Experiment Name: At_42deg_Heat_cDNA_P Parameter: Tissue Value: Aerial
  misc_feature: MA Experiment ID: 108579 Result: Down-regulated in Transcription
  misc_feature: MA Experiment 108579 PARAMETER Experiment Name: At_4deg_Cold_cDNA_P Parameter: Temperature (deg C) Value: 4 vs. 22
  misc_feature: MA Experiment 108579 PARAMETER Experiment Name: At_4deg_Cold_cDNA_P Parameter: Timepoint (hr) Value: 6
  misc_feature: MA Experiment 108579 PARAMETER Experiment Name: At_4deg_Cold_cDNA_P Parameter: Tissue Value: Aerial
  misc_feature: MA Experiment ID: 20000070 Result: Up-regulated in Transcription
  misc_feature: MA Experiment 20000070 PARAMETER Experiment Name: At_100uM_ABA_Mutants_cDNA_P Parameter: Plant Line Value: CS24
  misc_feature: MA Experiment 20000070 PARAMETER Experiment Name: At_100uM_ABA_Mutants_cDNA_P Parameter: Timepoint (hr) Value: 6
  misc_feature: MA Experiment 20000070 PARAMETER Experiment Name: At_100uM_ABA_Mutants_cDNA_P Parameter: Tissue Value: Aerial
  misc_feature: MA Experiment 20000070 PARAMETER Experiment Name: At_100uM_ABA_Mutants_cDNA_P Parameter: Treatment Value: 100uM ABA vs. No Treatment
  misc_feature: MA Experiment ID: 20000071 Result: Up-regulated in Transcription
  misc_feature: MA Experiment 20000071 PARAMETER Experiment Name: At_100uM_ABA_Mutants_cDNA_P Parameter: Plant Line Value: CS8104
  misc_feature: MA Experiment 20000071 PARAMETER Experiment Name: At_100uM_ABA_Mutants_cDNA_P Parameter: Timepoint (hr) Value: 6
  misc_feature: MA Experiment 20000071 PARAMETER Experiment Name: At_100uM_ABA_Mutants_cDNA_P Parameter: Tissue Value: Aerial
  misc_feature: MA Experiment 20000071 PARAMETER Experiment Name: At_100uM_ABA_Mutants_cDNA_P Parameter: Treatment Value: 100uM ABA vs. No Treatment
  misc_feature: MA Experiment ID: 20000072 Result: Up-regulated in Transcription
  misc_feature: MA Experiment 20000072 PARAMETER Experiment Name: At_100uM_ABA_Mutants_cDNA_P Parameter: Plant Line Value: CS8105
  misc_feature: MA Experiment 20000072 PARAMETER Experiment Name: At_100uM_ABA_Mutants_cDNA_P Parameter: Timepoint (hr) Value: 6
  misc_feature: MA Experiment 20000072 PARAMETER Experiment Name: At_100uM_ABA_Mutants_cDNA_P Parameter: Tissue Value: Aerial
  misc_feature: MA Experiment 20000072 PARAMETER Experiment Name: At_100uM_ABA_Mutants_cDNA_P Parameter: Treatment Value: 100uM ABA vs. No Treatment
  misc_feature: MA Experiment ID: 20000086 Result: Up-regulated in Transcription
  misc_feature: MA Experiment 20000086 PARAMETER Experiment Name: At_100uM_ABA_Mutants_cDNA_P Parameter: Plant Line Value: CS22
  misc_feature: MA Experiment 20000086 PARAMETER Experiment Name: At_100uM_ABA_Mutants_cDNA_P Parameter: Timepoint (hr) Value: 6
  misc_feature: MA Experiment 20000086 PARAMETER Experiment Name: At_100uM_ABA_Mutants_cDNA_P Parameter: Tissue Value: Aerial
  misc_feature: MA Experiment 20000086 PARAMETER Experiment Name: At_100uM_ABA_Mutants_cDNA_P Parameter: Treatment Value: 100uM ABA vs. No Treatment
  misc_feature: MA Experiment ID: 20000087 Result: Up-regulated in Transcription
  misc_feature: MA Experiment 20000087 PARAMETER Experiment Name: At_100uM_ABA_Mutants_cDNA_P Parameter: Plant Line Value: WS
  misc_feature: MA Experiment 20000087 PARAMETER Experiment Name: At_100uM_ABA_Mutants_cDNA_P Parameter: Timepoint (hr) Value: 6
  misc_feature: MA Experiment 20000087 PARAMETER Experiment Name: At_100uM_ABA_Mutants_cDNA_P Parameter: Tissue Value: Aerial
  misc_feature: MA Experiment 20000087 PARAMETER Experiment Name: At_100uM_ABA_Mutants_cDNA_P Parameter: Treatment Value: 100uM ABA vs. No Treatment
  misc_feature: MA Experiment ID: 20000113 Result: Down-regulated in Transcription
  misc_feature: MA Experiment 20000113 PARAMETER Experiment Name: At_42deg_Heat_cDNA_P Parameter: Temperature (deg C) Value: 42 vs. 22
  misc_feature: MA Experiment 20000113 PARAMETER Experiment Name: At_42deg_Heat_cDNA_P Parameter: Timepoint (hr) Value: 8
  misc_feature: MA Experiment 20000113 PARAMETER Experiment Name: At_42deg_Heat_cDNA_P Parameter: Tissue Value: Aerial
  misc_feature: MA Experiment ID: 20000184 Result: Down-regulated in Transcription
  misc_feature: MA Experiment 20000184 PARAMETER Experiment Name: At_Shoots__P Parameter: Age (day) Value: 7
  misc_feature: MA Experiment 20000184 PARAMETER Experiment Name: At_Shoots__P Parameter: Tissue Value: Shoots vs. Whole Plant
  misc_feature: MA Experiment ID: 20000438 Result: Down-regulated in Transcription
  misc_feature: MA Experiment 20000438 PARAMETER Experiment Name: At_Shoots__P Parameter: Age (day) Value: 14
  misc_feature: MA Experiment 20000438 PARAMETER Experiment Name: At_Shoots__P Parameter: Tissue Value: Shoots vs. Whole Plant
  misc_feature: MA Experiment ID: 20000794 Result: Up-regulated in Transcription
  misc_feature: MA Experiment 20000794 PARAMETER Experiment Name: At_Petals_P Parameter: Age (day) Value: 23-25 days
  misc_feature: MA Experiment 20000794 PARAMETER Experiment Name: At_Petals_P Parameter: Plant Line Value: WS
  misc_feature: MA Experiment 20000794 PARAMETER Experiment Name: At_Petals_P Parameter: Tissue Value: Petals vs. Whole plant
attcgcttttctgaatcctttagagtattgttttctccgtcgaattcgcatgaacacttgagctcaacaagacggcgtggaagtggacggtgaggtagttttttttagtttttgaaagacatggcgcaaaacgggtacttggttccagcggatccttcggcggttgtgacggtgaagaagaaaacgccacaagcgtcgtgggctcttattgacgcgacgggacagagtgagccactcgatgttgataagtatgagatcatgcaccgtgtccagatccacgctcgcgatctccggattctagaccccaatttatcttacccttccactattcttggccgagagagagccattgttctcaatttggagcatatcaaggctattatcacttccgaagaggttttgcttcgggatccgtctgatgaaaatgttattccagttgtggaggagcttcgaagacgcttacctgttggaaatgcatcacacaatggtggtcaaggagacgggaaagagatcgcaggtgctcaaaacgacggtgatactggtgacgaagatgaatccccatttgaatttcgggcgctggaagtagctttggaagcaatctgtagcttcttagctgcaaggacagcagaattagaaacagctgcttatcctgctttggatgagcttacctcaaagatcagtagccgtaatttggatagagttcggaaattgaagagtgccatgactcggttgacagctcgggttcaaaaggtaagagatgaactcgaacagttgctggatgatgacgatgatatggcagatctttacctttcaaggaaactttcaagtgcttcctcaccgattagtagtattggtgaaccaaattggtatactacttccccaacaataggctctaagatttcaagagcaagtagagcgagtttagccacagttcatggggatgagaatgatgttgaagaacttgaaatgttactcgaggcatacttcatgcagatcgacagcactttgaacagattaacaacactacgtgagtatattgatgacacagaggactacattaacatccagcttgacaatcatcggaatcagcttattcagttggagctagtgttaagttctggaacagtttgcttatcgatgtactctcttgtcgctggaattttcgggatgaacattccatacacatggaacgacggtcatggatacatgttcaaatacgtggtgggcttgacggggacactttgtgtagtcgtgtttgtgatcataatgtcgtacgctaggtacaaaggacttgtgggatcttgatggctgaatttgggttagatggagagattgtgaaggggcattgggcagatcttgttttcgattattatacttgtggtcgttctgagttttgaacgagcttcacaattattttagttgtcgcatcataaaatttaatcaaacatattgaaaaaagcagaagcattgtgacttgtaattgcaaagataagctctaccatcgattccttacaattagagcatagaaatcaaatttaggatccttgattccttattagctc

SEQ ID NO: 39360 - protein, 394 aa, Arabidopsis thaliana
  peptide (1)..(394): Ceres Seq. ID no. 12395257
  misc_feature (15)..(292): Homolog of NCBI NO: 9759003 NR Description: contains similarity to unknown
  misc_feature (85)..(394): Homolog of NCBI NO: 40539050 NR Description: putative  CorA-like Mg2+ transporter protein
  misc_feature (1)..(326): Homolog of NCBI NO: 30682814 NR Description: expressed protein [Arabidopsis thaliana]
  misc_feature (15)..(393): Homolog of NCBI NO: 25360964 NR Description: MRS2-8 [Arabidopsis thaliana]
  misc_feature (1)..(332): Homolog of NCBI NO: 9758997 NR Description: gene_id:MTH16.11~unknown protein [Arabidopsis
  misc_feature (1)..(394): Homolog of NCBI NO: 11282359 NR Description: hypothetical protein F17I14.120 - Arabidopsis
  misc_feature (1)..(394): Homolog of NCBI NO: 30682808 NR Description: expressed protein [Arabidopsis thaliana]
  misc_feature (1)..(394): Homolog of NCBI NO: 25360941 NR Description: MRS2-7 [Arabidopsis thaliana]
  misc_feature (1)..(367): Homolog of NCBI NO: 30698047 NR Description: expressed protein [Arabidopsis thaliana]
  misc_feature (1)..(394): Homolog of NCBI NO: 30698045 NR Description: expressed protein [Arabidopsis thaliana]
MAQNGYLVPADPSAVVTVKKKTPQASWALIDATGQSEPLDVDKYEIMHRVQIHARDLRILDPNLSYPSTILGRERAIVLNLEHIKAIITSEEVLLRDPSDENVIPVVEELRRRLPVGNASHNGGQGDGKEIAGAQNDGDTGDEDESPFEFRALEVALEAICSFLAARTAELETAAYPALDELTSKISSRNLDRVRKLKSAMTRLTARVQKVRDELEQLLDDDDDMADLYLSRKLSSASSPISSIGEPNWYTTSPTIGSKISRASRASLATVHGDENDVEELEMLLEAYFMQIDSTLNRLTTLREYIDDTEDYINIQLDNHRNQLIQLELVLSSGTVCLSMYSLVAGIFGMNIPYTWNDGHGYMFKYVVGLTGTLCVVVFVIIMSYARYKGLVGS

SEQ ID NO: 39361 - protein, 348 aa, Arabidopsis thaliana
  peptide (1)..(348): Ceres Seq. ID no. 12395258
  misc_feature (1)..(246): Homolog of NCBI NO: 9759003 NR Description: contains similarity to unknown
  misc_feature (39)..(348): Homolog of NCBI NO: 40539050 NR Description: putative  CorA-like Mg2+ transporter protein
  misc_feature (1)..(280): Homolog of NCBI NO: 30682814 NR Description: expressed protein [Arabidopsis thaliana]
  misc_feature (1)..(347): Homolog of NCBI NO: 25360964 NR Description: MRS2-8 [Arabidopsis thaliana]
  misc_feature (1)..(286): Homolog of NCBI NO: 9758997 NR Description: gene_id:MTH16.11~unknown protein [Arabidopsis
  misc_feature (1)..(348): Homolog of NCBI NO: 11282359 NR Description: hypothetical protein F17I14.120 - Arabidopsis
  misc_feature (1)..(348): Homolog of NCBI NO: 30682808 NR Description: expressed protein [Arabidopsis thaliana]
  misc_feature (1)..(348): Homolog of NCBI NO: 25360941 NR Description: MRS2-7 [Arabidopsis thaliana]
  misc_feature (1)..(321): Homolog of NCBI NO: 30698047 NR Description: expressed protein [Arabidopsis thaliana]
  misc_feature (1)..(348): Homolog of NCBI NO: 30698045 NR Description: expressed protein [Arabidopsis thaliana]
MHRVQIHARDLRILDPNLSYPSTILGRERAIVLNLEHIKAIITSEEVLLRDPSDENVIPVVEELRRRLPVGNASHNGGQGDGKEIAGAQNDGDTGDEDESPFEFRALEVALEAICSFLAARTAELETAAYPALDELTSKISSRNLDRVRKLKSAMTRLTARVQKVRDELEQLLDDDDDMADLYLSRKLSSASSPISSIGEPNWYTTSPTIGSKISRASRASLATVHGDENDVEELEMLLEAYFMQIDSTLNRLTTLREYIDDTEDYINIQLDNHRNQLIQLELVLSSGTVCLSMYSLVAGIFGMNIPYTWNDGHGYMFKYVVGLTGTLCVVVFVIIMSYARYKGLVGS

SEQ ID NO: 39362 - DNA, 1376 bp, Arabidopsis thaliana; identical to SEQ ID NO: 27480
  misc_feature (1)..(1376): Ceres Seq. ID no. 13575406
  misc_feature: MA Experiment ID: 20000180 Result: Up-regulated in Transcription
  misc_feature: MA Experiment 20000180 PARAMETER Experiment Name: At_Germinating_Seeds_P Parameter: Age (hr) Value: 24 vs. 0
  misc_feature: MA Experiment 20000180 PARAMETER Experiment Name: At_Germinating_Seeds_P Parameter: Tissue Value: Germinating Seeds
  misc_feature: MA Experiment ID: 20000224 Result: Up-regulated in Transcription

SEQ ID NO: 39363 - protein, 326 aa, Arabidopsis thaliana; identical to SEQ ID NO: 27481
  peptide (1)..(326): Ceres Seq. ID no. 13575407
  misc_feature (1)..(318): Pfam Name: Myosin tail Pfam Description: Myosin tail
  misc_feature (1)..(318): Pfam Name: Myosin tail Pfam Description: Myosin tail
  misc_feature (9)..(322): Homolog of NCBI NO: 19716176 NR Description: TMV-MP30 binding protein 2C [Nicotiana tabacum]
  misc_feature (118)..(326): Homolog of NCBI NO: 1732515 NR Description: myosin heavy chain-like protein [Arabidopsis
  misc_feature (118)..(326): Homolog of NCBI NO: 1732515 NR Description: myosin heavy chain-like protein [Arabidopsis
  misc_feature (1)..(326): Homolog of NCBI NO: 15241531 NR Description: myosin heavy chain-related protein [Arabidopsis
  misc_feature (9)..(322): Homolog of NCBI NO: 19716176 NR Description: TMV-MP30 binding protein 2C [Nicotiana tabacum]
  misc_feature (1)..(326): Homolog of NCBI NO: 15241531 NR Description: myosin heavy chain-related protein [Arabidopsis

SEQ ID NO: 39364 - protein, 318 aa, Arabidopsis thaliana; identical to SEQ ID NO: 27482
  peptide (1)..(318): Ceres Seq. ID no. 13575408
  misc_feature (1)..(310): Pfam Name: Myosin tail Pfam Description: Myosin tail
  misc_feature (1)..(310): Pfam Name: Myosin tail Pfam Description: Myosin tail
  misc_feature (1)..(314): Homolog of NCBI NO: 19716176 NR Description: TMV-MP30 binding protein 2C [Nicotiana tabacum]
  misc_feature (110)..(318): Homolog of NCBI NO: 1732515 NR Description: myosin heavy chain-like protein [Arabidopsis
  misc_feature (110)..(318): Homolog of NCBI NO: 1732515 NR Description: myosin heavy chain-like protein [Arabidopsis
  misc_feature (1)..(318): Homolog of NCBI NO: 15241531 NR Description: myosin heavy chain-related protein [Arabidopsis
  misc_feature (1)..(314): Homolog of NCBI NO: 19716176 NR Description: TMV-MP30 binding protein 2C [Nicotiana tabacum]
  misc_feature (1)..(318): Homolog of NCBI NO: 15241531 NR Description: myosin heavy chain-related protein [Arabidopsis

SEQ ID NO: 39365 - protein, 268 aa, Arabidopsis thaliana; identical to SEQ ID NO: 27483
  peptide (1)..(268): Ceres Seq. ID no. 13575409
  misc_feature (1)..(260): Pfam Name: Myosin tail Pfam Description: Myosin tail
  misc_feature (1)..(260): Pfam Name: Myosin tail Pfam Description: Myosin tail
  misc_feature (1)..(264): Homolog of NCBI NO: 19716176 NR Description: TMV-MP30 binding protein 2C [Nicotiana tabacum]
  misc_feature (60)..(268): Homolog of NCBI NO: 1732515 NR Description: myosin heavy chain-like protein [Arabidopsis
  misc_feature (60)..(268): Homolog of NCBI NO: 1732515 NR Description: myosin heavy chain-like protein [Arabidopsis
  misc_feature (1)..(268): Homolog of NCBI NO: 15241531 NR Description: myosin heavy chain-related protein [Arabidopsis
  misc_feature (1)..(264): Homolog of NCBI NO: 19716176 NR Description: TMV-MP30 binding protein 2C [Nicotiana tabacum]
  misc_feature (1)..(268): Homolog of NCBI NO: 15241531 NR Description: myosin heavy chain-related protein [Arabidopsis

SEQ ID NO: 39366 - DNA, 1191 bp, Arabidopsis thaliana
  misc_feature (1)..(1191): Ceres Seq. ID no. 13489080
  misc_feature: MA Experiment ID: 108433 Result: Down-regulated in Transcription
  misc_feature: MA Experiment 108433 PARAMETER Experiment Name: At_rhl_Mutant2_cDNA_P Parameter: Age (day) Value: 7
  misc_feature: MA Experiment 108433 PARAMETER Experiment Name: At_rhl_Mutant2_cDNA_P Parameter: Organism Value: A. thaliana
  misc_feature: MA Experiment 108433 PARAMETER Experiment Name: At_rhl_Mutant2_cDNA_P Parameter: Plant Line Value: rhl Mutant vs. wt landsburg
  misc_feature: MA Experiment 108433 PARAMETER Experiment Name: At_rhl_Mutant2_cDNA_P Parameter: Tissue Value: Roots
  misc_feature: MA Experiment ID: 108434 Result: Up-regulated in Transcription
  misc_feature: MA Experiment 108434 PARAMETER Experiment Name: At_Root_Tips_cDNA_P Parameter: Tissue Value: Root Tips
  misc_feature: MA Experiment ID: 108435 Result: Up-regulated in Transcription
  misc_feature: MA Experiment 108435 PARAMETER Experiment Name: At_stm_Mutants_cDNA_P Parameter: Plant Line Value: wt Landsburg vs stm
  misc_feature: MA Experiment 108435 PARAMETER Experiment Name: At_stm_Mutants_cDNA_P Parameter: Tissue Value: Shoot Apical Meristem Region
  misc_feature: MA Experiment ID: 108462 Result: Down-regulated in Transcription
  misc_feature: MA Experiment 108462 PARAMETER Experiment Name: At_Germinating_Seeds_cDNA_P Parameter: Age (day) Value: 2 vs. 0
  misc_feature: MA Experiment 108462 PARAMETER Experiment Name: At_Germinating_Seeds_cDNA_P Parameter: Tissue Value: Germinating Seeds
  misc_feature: MA Experiment ID: 108463 Result: Down-regulated in Transcription
  misc_feature: MA Experiment 108463 PARAMETER Experiment Name: At_Germinating_Seeds_cDNA_P Parameter: Age (day) Value: 3 vs. 0
  misc_feature: MA Experiment 108463 PARAMETER Experiment Name: At_Germinating_Seeds_cDNA_P Parameter: Tissue Value: Germinating Seeds
  misc_feature: MA Experiment ID: 108489 Result: Up-regulated in Transcription
  misc_feature: MA Experiment ID: 108576 Result: Down-regulated in Transcription
  misc_feature: MA Experiment 108576 PARAMETER Experiment Name: At_42deg_Heat_cDNA_P Parameter: Temperature (deg C) Value: 42 vs. 22
  misc_feature: MA Experiment 108576 PARAMETER Experiment Name: At_42deg_Heat_cDNA_P Parameter: Timepoint (hr) Value: 1
  misc_feature: MA Experiment 108576 PARAMETER Experiment Name: At_42deg_Heat_cDNA_P Parameter: Tissue Value: Aerial
  misc_feature: MA Experiment ID: 108595 Result: Down-regulated in Transcription
  misc_feature: MA Experiment 108595 PARAMETER Experiment Name: At_Ler-pi_Ovule_cDNA_P Parameter: Plant Line Value: null
  misc_feature: MA Experiment ID: 108607 Result: Down-regulated in Transcription
  misc_feature: MA Experiment 108607 PARAMETER Experiment Name: At_100uM_ABA_cDNA_P Parameter: Timepoint (hr) Value: 4
  misc_feature: MA Experiment 108607 PARAMETER Experiment Name: At_100uM_ABA_cDNA_P Parameter: Tissue Value: Aerial
  misc_feature: MA Experiment 108607 PARAMETER Experiment Name: At_100uM_ABA_cDNA_P Parameter: Treatment Value: 100uM ABA vs. No Treatment
  misc_feature: MA Experiment ID: 108609 Result: Down-regulated in Transcription
  misc_feature: MA Experiment 108609 PARAMETER Experiment Name: At_100uM_ABA_cDNA_P Parameter: Timepoint (hr) Value: 24
  misc_feature: MA Experiment 108609 PARAMETER Experiment Name: At_100uM_ABA_cDNA_P Parameter: Tissue Value: Aerial
  misc_feature: MA Experiment 108609 PARAMETER Experiment Name: At_100uM_ABA_cDNA_P Parameter: Treatment Value: 100uM ABA vs. No Treatment
  misc_feature: MA Experiment ID: 20000069 Result: Down-regulated in Transcription
  misc_feature: MA Experiment 20000069 PARAMETER Experiment Name: At_100uM_ABA_Mutants_cDNA_P Parameter: Plant Line Value: CS23
  misc_feature: MA Experiment 20000069 PARAMETER Experiment Name: At_100uM_ABA_Mutants_cDNA_P Parameter: Timepoint (hr) Value: 6
  misc_feature: MA Experiment 20000069 PARAMETER Experiment Name: At_100uM_ABA_Mutants_cDNA_P Parameter: Tissue Value: Aerial
  misc_feature: MA Experiment 20000069 PARAMETER Experiment Name: At_100uM_ABA_Mutants_cDNA_P Parameter: Treatment Value: 100uM ABA vs. No Treatment
  misc_feature: MA Experiment ID: 20000112 Result: Down-regulated in Transcription
  misc_feature: MA Experiment 20000112 PARAMETER Experiment Name: At_42deg_Heat_cDNA_P Parameter: Temperature (deg C) Value: 42 vs. 22
  misc_feature: MA Experiment 20000112 PARAMETER Experiment Name: At_42deg_Heat_cDNA_P Parameter: Timepoint (hr) Value: 2
  misc_feature: MA Experiment 20000112 PARAMETER Experiment Name: At_42deg_Heat_cDNA_P Parameter: Tissue Value: Aerial
  misc_feature: MA Experiment ID: 20000117 Result: Down-regulated in Transcription
  misc_feature: MA Experiment 20000117 PARAMETER Experiment Name: At_100uM_ABA_Mutants_cDNA_P Parameter: Plant Line Value: Columbia
  misc_feature: MA Experiment 20000117 PARAMETER Experiment Name: At_100uM_ABA_Mutants_cDNA_P Parameter: Timepoint (hr) Value: 6
  misc_feature: MA Experiment 20000117 PARAMETER Experiment Name: At_100uM_ABA_Mutants_cDNA_P Parameter: Tissue Value: Aerial
  misc_feature: MA Experiment 20000117 PARAMETER Experiment Name: At_100uM_ABA_Mutants_cDNA_P Parameter: Treatment Value: 100uM ABA vs. No Treatment
  misc_feature: MA Experiment ID: 20000184 Result: Up-regulated in Transcription
  misc_feature: MA Experiment 20000184 PARAMETER Experiment Name: At_Shoots__P Parameter: Age (day) Value: 7
  misc_feature: MA Experiment 20000184 PARAMETER Experiment Name: At_Shoots__P Parameter: Tissue Value: Shoots vs. Whole Plant
  misc_feature: MA Experiment ID: 20000185 Result: Up-regulated in Transcription
  misc_feature: MA Experiment 20000185 PARAMETER Experiment Name: At_Roots__P Parameter: Age (day) Value: 7 vs. 21
  misc_feature: MA Experiment 20000185 PARAMETER Experiment Name: At_Roots__P Parameter: Organism Value: A. thaliana
  misc_feature: MA Experiment 20000185 PARAMETER Experiment Name: At_Roots__P Parameter: Tissue Value: Roots vs. Whole Plant
  misc_feature: MA Experiment ID: 20000227 Result: Up-regulated in Transcription
  misc_feature: MA Experiment 20000227 PARAMETER Experiment Name: At_Root-Tips-vs-Tops_P Parameter: Tissue Value: Root Tips vs. Root Tops
  misc_feature: MA Experiment ID: 20000234 Result: Up-regulated in Transcription
  misc_feature: MA Experiment 20000234 PARAMETER Experiment Name: At_Siliques_P Parameter: Age (day) Value: 21
  misc_feature: MA Experiment 20000234 PARAMETER Experiment Name: At_Siliques_P Parameter: Organism Value: A. thaliana
  misc_feature: MA Experiment 20000234 PARAMETER Experiment Name: At_Siliques_P Parameter: Plant Line Value: WS
  misc_feature: MA Experiment 20000234 PARAMETER Experiment Name: At_Siliques_P Parameter: Tissue Value: Less Than 5mm Siliques vs. Whole Plant
  misc_feature: MA Experiment ID: 20000235 Result: Up-regulated in Transcription
  misc_feature: MA Experiment 20000235 PARAMETER Experiment Name: At_Siliques_P Parameter: Age (day) Value: 21
  misc_feature: MA Experiment 20000235 PARAMETER Experiment Name: At_Siliques_P Parameter: Organism Value: A. thaliana
  misc_feature: MA Experiment 20000235 PARAMETER Experiment Name: At_Siliques_P Parameter: Plant Line Value: WS
  misc_feature: MA Experiment 20000235 PARAMETER Experiment Name: At_Siliques_P Parameter: Tissue Value: 5-10mm Siliques vs. Whole Plant
  misc_feature: MA Experiment ID: 20000264 Result: Up-regulated in Transcription
  misc_feature: MA Experiment 20000264 PARAMETER Experiment Name: At_Open_Flower_P Parameter: Age (day) Value: 21
  misc_feature: MA Experiment 20000264 PARAMETER Experiment Name: At_Open_Flower_P Parameter: Plant Line Value: WS
  misc_feature: MA Experiment 20000264 PARAMETER Experiment Name: At_Open_Flower_P Parameter: Tissue Value: Open Flower vs. Whole Plant
  misc_feature: MA Experiment ID: 20000265 Result: Up-regulated in Transcription
  misc_feature: MA Experiment 20000265 PARAMETER Experiment Name: At_Open_Flower_P Parameter: Age (day) Value: 21
  misc_feature: MA Experiment 20000265 PARAMETER Experiment Name: At_Open_Flower_P Parameter: Plant Line Value: WS
  misc_feature: MA Experiment 20000265 PARAMETER Experiment Name: At_Open_Flower_P Parameter: Tissue Value: Closed Flower vs. Whole Plant
  misc_feature: MA Experiment ID: 20000286 Result: Up-regulated in Transcription
  misc_feature: MA Experiment 20000286 PARAMETER Experiment Name: At_Open_Flower_P Parameter: Age (day) Value: 21
  misc_feature: MA Experiment 20000286 PARAMETER Experiment Name: At_Open_Flower_P Parameter: Plant Line Value: WS
  misc_feature: MA Experiment 20000286 PARAMETER Experiment Name: At_Open_Flower_P Parameter: Tissue Value: Half Open vs. Whole Plant
  misc_feature: MA Experiment ID: 20000437 Result: Down-regulated in Transcription
  misc_feature: MA Experiment 20000437 PARAMETER Experiment Name: At_Drought_P Parameter: Age (day) Value: 8
  misc_feature: MA Experiment 20000437 PARAMETER Experiment Name: At_Drought_P Parameter: Organism Value: A. thaliana
  misc_feature: MA Experiment 20000437 PARAMETER Experiment Name: At_Drought_P Parameter: Plant Line Value: WS
  misc_feature: MA Experiment 20000437 PARAMETER Experiment Name: At_Drought_P Parameter: Timepoint (hr) Value: 24
  misc_feature: MA Experiment 20000437 PARAMETER Experiment Name: At_Drought_P Parameter: Tissue Value: Whole Plant
  misc_feature: MA Experiment 20000437 PARAMETER Experiment Name: At_Drought_P Parameter: Treatment Value: Drought vs. No Drought
  misc_feature: MA Experiment ID: 20001451 Result: Down-regulated in Transcription
  misc_feature: MA Experiment 20001451 PARAMETER Experiment Name: At_Far-red-induction_P Parameter: Age (day) Value: 7
  misc_feature: MA Experiment 20001451 PARAMETER Experiment Name: At_Far-red-induction_P Parameter: Light Value: Far-red vs. White
  misc_feature: MA Experiment 20001451 PARAMETER Experiment Name: At_Far-red-induction_P Parameter: Organism Value: A. thaliana
  misc_feature: MA Experiment 20001451 PARAMETER Experiment Name: At_Far-red-induction_P Parameter: Plant Line Value: Columbia
  misc_feature: MA Experiment 20001451 PARAMETER Experiment Name: At_Far-red-induction_P Parameter: Timepoint (hr) Value: 24
  misc_feature: MA Experiment 20001451 PARAMETER Experiment Name: At_Far-red-induction_P Parameter: Tissue Value: Whole Plant
  misc_feature: MA Experiment ID: 20001458 Result: Up-regulated in Transcription
  misc_feature: MA Experiment 20001458 PARAMETER Experiment Name: At_50mM_NH4NO3_L-to-H_P Parameter: Age (day) Value: Undefined
  misc_feature: MA Experiment 20001458 PARAMETER Experiment Name: At_50mM_NH4NO3_L-to-H_P Parameter: Organism Value: Undefined
  misc_feature: MA Experiment 20001458 PARAMETER Experiment Name: At_50mM_NH4NO3_L-to-H_P Parameter: Plant Line Value: Undefined
  misc_feature: MA Experiment 20001458 PARAMETER Experiment Name: At_50mM_NH4NO3_L-to-H_P Parameter: Timepoint (hr) Value: 2
  misc_feature: MA Experiment 20001458 PARAMETER Experiment Name: At_50mM_NH4NO3_L-to-H_P Parameter: Tissue Value: Siliques
  misc_feature: MA Experiment 20001458 PARAMETER Experiment Name: At_50mM_NH4NO3_L-to-H_P Parameter: Treatment Value: 50mM NH4NO3 vs. 100mM Manitol
  misc_feature: MA Experiment ID: 20001557 Result: Up-regulated in Transcription
  misc_feature: MA Experiment 20001557 PARAMETER Experiment Name: At_Drought_Soil_Dry_P Parameter: Age (day) Value: 27
  misc_feature: MA Experiment 20001557 PARAMETER Experiment Name: At_Drought_Soil_Dry_P Parameter: Organism Value: A. thaliana
  misc_feature: MA Experiment 20001557 PARAMETER Experiment Name: At_Drought_Soil_Dry_P Parameter: Plant Line Value: WS
  misc_feature: MA Experiment 20001557 PARAMETER Experiment Name: At_Drought_Soil_Dry_P Parameter: Post Timepoint (hr) Value: 3
  misc_feature: MA Experiment 20001557 PARAMETER Experiment Name: At_Drought_Soil_Dry_P Parameter: Post-Treatment Value: Re-Water vs. No Drought
  misc_feature: MA Experiment 20001557 PARAMETER Experiment Name: At_Drought_Soil_Dry_P Parameter: Timepoint (day) Value: 13
  misc_feature: MA Experiment 20001557 PARAMETER Experiment Name: At_Drought_Soil_Dry_P Parameter: Treatment Value: Drought vs. No Drought
  misc_feature: MA Experiment ID: 20001558 Result: Up-regulated in Transcription
  misc_feature: MA Experiment 20001558 PARAMETER Experiment Name: At_Drought_Soil_Dry_P Parameter: Age (day) Value: 27
  misc_feature: MA Experiment 20001558 PARAMETER Experiment Name: At_Drought_Soil_Dry_P Parameter: Organism Value: A. thaliana
  misc_feature: MA Experiment 20001558 PARAMETER Experiment Name: At_Drought_Soil_Dry_P Parameter: Plant Line Value: WS
  misc_feature: MA Experiment 20001558 PARAMETER Experiment Name: At_Drought_Soil_Dry_P Parameter: Post Timepoint (hr) Value: 6
  misc_feature: MA Experiment 20001558 PARAMETER Experiment Name: At_Drought_Soil_Dry_P Parameter: Post-Treatment Value: Re-Water vs. No Drought
  misc_feature: MA Experiment 20001558 PARAMETER Experiment Name: At_Drought_Soil_Dry_P Parameter: Timepoint (day) Value: 13
  misc_feature: MA Experiment 20001558 PARAMETER Experiment Name: At_Drought_Soil_Dry_P Parameter: Treatment Value: Drought vs. No Drought
  misc_feature: MA Experiment ID: 20001560 Result: Up-regulated in Transcription
  misc_feature: MA Experiment 20001560 PARAMETER Experiment Name: At_Drought_Soil_Dry_P Parameter: Age (day) Value: 28
  misc_feature: MA Experiment 20001560 PARAMETER Experiment Name: At_Drought_Soil_Dry_P Parameter: Organism Value: A. thaliana
  misc_feature: MA Experiment 20001560 PARAMETER Experiment Name: At_Drought_Soil_Dry_P Parameter: Plant Line Value: WS
  misc_feature: MA Experiment 20001560 PARAMETER Experiment Name: At_Drought_Soil_Dry_P Parameter: Post Timepoint (hr) Value: None
  misc_feature: MA Experiment 20001560 PARAMETER Experiment Name: At_Drought_Soil_Dry_P Parameter: Post-Treatment Value: None
  misc_feature: MA Experiment 20001560 PARAMETER Experiment Name: At_Drought_Soil_Dry_P Parameter: Timepoint (day) Value: 14
  misc_feature: MA Experiment 20001560 PARAMETER Experiment Name: At_Drought_Soil_Dry_P Parameter: Treatment Value: Drought vs. No Drought
  misc_feature: MA Experiment ID: 20001757 Result: Up-regulated in Transcription
  misc_feature: MA Experiment 20001757 PARAMETER Experiment Name: At_50mM_NH4NO3_L-to-H_P Parameter: Timepoint (hr) Value: 6
  misc_feature: MA Experiment 20001757 PARAMETER Experiment Name: At_50mM_NH4NO3_L-to-H_P Parameter: Tissue Value: Leaf
  misc_feature: MA Experiment 20001757 PARAMETER Experiment Name: At_50mM_NH4NO3_L-to-H_P Parameter: Treatment Value: 50mM NH4NO3 vs 100mM Mannitol
  misc_feature: MA Experiment ID: 20001911 Result: Down-regulated in Transcription
  misc_feature: MA Experiment 20001911 PARAMETER Experiment Name: At_Drought_Reproduction_P Parameter: Age (day) Value: 40
  misc_feature: MA Experiment 20001911 PARAMETER Experiment Name: At_Drought_Reproduction_P Parameter: Organism Value: A. thaliana
  misc_feature: MA Experiment 20001911 PARAMETER Experiment Name: At_Drought_Reproduction_P Parameter: Plant Line Value: WS
  misc_feature: MA Experiment 20001911 PARAMETER Experiment Name: At_Drought_Reproduction_P Parameter: Timepoint (day) Value: 10
  misc_feature: MA Experiment 20001911 PARAMETER Experiment Name: At_Drought_Reproduction_P Parameter: Tissue Value: Flowers
  misc_feature: MA Experiment 20001911 PARAMETER Experiment Name: At_Drought_Reproduction_P Parameter: Treatment Value: Drought vs. No Drought
aaaatctctcgctctgttacgccattttcgtgagtaagaagaagaaaccctaagagtctctccccaaaacctcaaaccatggccgagggactcgtattgaagggcattatgcgcgcccacaccgacattgtcacggccatcgctacgccgatcgacaattccgacatcatcgtcacagcgtcgcgtgacaaatcaatcatcctctggaaactcacaaaggacgagaagtcttacggtgttgctcagcgtaggctcacaggtcactctcacttcgtggaagatgttgttctctcatcggacggtcagtttgcactctccggaagttgggacggtgagctccgtctctgggatctcgccacgggagaaacaactcgtcgattcgttggtcacacgaaagatgtgctctctgttgctttctctactgataaccgtcagatcgtgtctgcttctcgtgatcgtacgattaagctttggaacacacttggtgagtgcaagtataccatctctgaaggtgatggtcacaaggaatgggttagttgtgttaggtttagtcctaatactcttgtaccaactattgtatctgcttcttgggataaaactgtgaaagtttggaatctccagaactgtaagctgaggaactctcttgttggtcactctggttacctcaacactgttgctgtctcgcctgatggttcgctatgcgccagtggtgggaaagatggtgttatcttgttgtgggatttggctgaaggaaagaagctttactcgcttgaggctggttcgattattcactcgctttgcttcagtcctaacagatactggttgtgtgctgctactgagaatagcattaggatttgggatcttgagagcaagtctgttgttgaggacttgaaggttgatctcaagtctgaggcagagaagaatgaaggtggtgttggaactggtaaccagaagaaggttatctactgcacaagcttgaactggagtgcagatggaagcacattgttcagtggttacactgatggagttgtcagggtctggggtattggtcgttactagagatcacaacaagatgaagaagaagtcacgaaatctccggaaaaaagtagctgcttttaatttttccagactgcgtcagtattgtattagtctctcgcaaacttctattttggcaatttttgtttaatttcc

SEQ ID NO: 39367 - protein, 326 aa, Arabidopsis thaliana
  peptide (1)..(326): Ceres Seq. ID no. 13489081
  misc_feature (1)..(326): Homolog of NCBI NO: 3023857 NR Description: GUANINE NUCLEOTIDE-BINDING PROTEIN BETA
  misc_feature (1)..(326): Homolog of NCBI NO: 2289095 NR Description: WD-40 repeat protein [Arabidopsis thaliana]
  misc_feature (1)..(326): Homolog of NCBI NO: 15220941 NR Description: WD-40 repeat auxin-dependent protein ARCA
  misc_feature (1)..(326): Homolog of NCBI NO: 21593440 NR Description: guanine nucleotide-binding protein, putative
  misc_feature (1)..(326): Homolog of NCBI NO: 15221916 NR Description: WD-40 repeat auxin-dependent protein ARCA,
  misc_feature (1)..(326): Homolog of NCBI NO: 15229589 NR Description: guanine nucleotide-binding protein / activated
MAEGLVLKGIMRAHTDIVTAIATPIDNSDIIVTASRDKSIILWKLTKDEKSYGVAQRRLTGHSHFVEDVVLSSDGQFALSGSWDGELRLWDLATGETTRRFVGHTKDVLSVAFSTDNRQIVSASRDRTIKLWNTLGECKYTISEGDGHKEWVSCVRFSPNTLVPTIVSASWDKTVKVWNLQNCKLRNSLVGHSGYLNTVAVSPDGSLCASGGKDGVILLWDLAEGKKLYSLEAGSIIHSLCFSPNRYWLCAATENSIRIWDLESKSVVEDLKVDLKSEAEKNEGGVGTGNQKKVIYCTSLNWSADGSTLFSGYTDGVVRVWGIGRY

SEQ ID NO: 39368 - protein, 316 aa, Arabidopsis thaliana
  peptide (1)..(316): Ceres Seq. ID no. 13489082
  misc_feature (1)..(316): Homolog of NCBI NO: 3023857 NR Description: GUANINE NUCLEOTIDE-BINDING PROTEIN BETA
  misc_feature (1)..(316): Homolog of NCBI NO: 2289095 NR Description: WD-40 repeat protein [Arabidopsis thaliana]
  misc_feature (1)..(316): Homolog of NCBI NO: 15220941 NR Description: WD-40 repeat auxin-dependent protein ARCA
  misc_feature (1)..(316): Homolog of NCBI NO: 21593440 NR Description: guanine nucleotide-binding protein, putative
  misc_feature (1)..(316): Homolog of NCBI NO: 15221916 NR Description: WD-40 repeat auxin-dependent protein ARCA,
  misc_feature (1)..(316): Homolog of NCBI NO: 15229589 NR Description: guanine nucleotide-binding protein / activated
MRAHTDIVTAIATPIDNSDIIVTASRDKSIILWKLTKDEKSYGVAQRRLTGHSHFVEDVVLSSDGQFALSGSWDGELRLWDLATGETTRRFVGHTKDVLSVAFSTDNRQIVSASRDRTIKLWNTLGECKYTISEGDGHKEWVSCVRFSPNTLVPTIVSASWDKTVKVWNLQNCKLRNSLVGHSGYLNTVAVSPDGSLCASGGKDGVILLWDLAEGKKLYSLEAGSIIHSLCFSPNRYWLCAATENSIRIWDLESKSVVEDLKVDLKSEAEKNEGGVGTGNQKKVIYCTSLNWSADGSTLFSGYTDGVVRVWGIGRY

SEQ ID NO: 39369 - DNA, 1004 bp, Arabidopsis thaliana
  misc_feature (1)..(1004): Ceres Seq. ID no. 12559953
  misc_feature: MA Experiment ID: 20000184 Result: Up-regulated in Transcription
  misc_feature: MA Experiment 20000184 PARAMETER Experiment Name: At_Shoots__P Parameter: Age (day) Value: 7
  misc_feature: MA Experiment 20000184 PARAMETER Experiment Name: At_Shoots__P Parameter: Tissue Value: Shoots vs. Whole Plant
  misc_feature: MA Experiment ID: 20000185 Result: Down-regulated in Transcription
  misc_feature: MA Experiment 20000185 PARAMETER Experiment Name: At_Roots__P Parameter: Age (day) Value: 7 vs. 21
  misc_feature: MA Experiment 20000185 PARAMETER Experiment Name: At_Roots__P Parameter: Organism Value: A. thaliana
  misc_feature: MA Experiment 20000185 PARAMETER Experiment Name: At_Roots__P Parameter: Tissue Value: Roots vs. Whole Plant
  misc_feature: MA Experiment ID: 20000265 Result: Up-regulated in Transcription
  misc_feature: MA Experiment 20000265 PARAMETER Experiment Name: At_Open_Flower_P Parameter: Age (day) Value: 21
  misc_feature: MA Experiment 20000265 PARAMETER Experiment Name: At_Open_Flower_P Parameter: Plant Line Value: WS
  misc_feature: MA Experiment 20000265 PARAMETER Experiment Name: At_Open_Flower_P Parameter: Tissue Value: Closed Flower vs. Whole Plant
  misc_feature: MA Experiment ID: 20000286 Result: Up-regulated in Transcription
  misc_feature: MA Experiment 20000286 PARAMETER Experiment Name: At_Open_Flower_P Parameter: Age (day) Value: 21
  misc_feature: MA Experiment 20000286 PARAMETER Experiment Name: At_Open_Flower_P Parameter: Plant Line Value: WS
  misc_feature: MA Experiment 20000286 PARAMETER Experiment Name: At_Open_Flower_P Parameter: Tissue Value: Half Open vs. Whole Plant
  misc_feature: MA Experiment ID: 20000437 Result: Down-regulated in Transcription
  misc_feature: MA Experiment 20000437 PARAMETER Experiment Name: At_Drought_P Parameter: Age (day) Value: 8
  misc_feature: MA Experiment 20000437 PARAMETER Experiment Name: At_Drought_P Parameter: Organism Value: A. thaliana
  misc_feature: MA Experiment 20000437 PARAMETER Experiment Name: At_Drought_P Parameter: Plant Line Value: WS
  misc_feature: MA Experiment 20000437 PARAMETER Experiment Name: At_Drought_P Parameter: Timepoint (hr) Value: 24
  misc_feature: MA Experiment 20000437 PARAMETER Experiment Name: At_Drought_P Parameter: Tissue Value: Whole Plant
  misc_feature: MA Experiment 20000437 PARAMETER Experiment Name: At_Drought_P Parameter: Treatment Value: Drought vs. No Drought
  misc_feature: MA Experiment ID: 20000438 Result: Up-regulated in Transcription
  misc_feature: MA Experiment 20000438 PARAMETER Experiment Name: At_Shoots__P Parameter: Age (day) Value: 14
  misc_feature: MA Experiment 20000438 PARAMETER Experiment Name: At_Shoots__P Parameter: Tissue Value: Shoots vs. Whole Plant
  misc_feature: MA Experiment ID: 20000439 Result: Down-regulated in Transcription
  misc_feature: MA Experiment 20000439 PARAMETER Experiment Name: At_Roots__P Parameter: Age (day) Value: 14 vs. 21
  misc_feature: MA Experiment 20000439 PARAMETER Experiment Name: At_Roots__P Parameter: Organism Value: A. thaliana
  misc_feature: MA Experiment 20000439 PARAMETER Experiment Name: At_Roots__P Parameter: Tissue Value: Roots vs. Whole Plant
  misc_feature: MA Experiment ID: 20001248 Result: Down-regulated in Transcription
  misc_feature: MA Experiment 20001248 PARAMETER Experiment Name: At_Far-red-induction_P Parameter: Age (day) Value: 7
  misc_feature: MA Experiment 20001248 PARAMETER Experiment Name: At_Far-red-induction_P Parameter: Light Value: Far-red vs. White
  misc_feature: MA Experiment 20001248 PARAMETER Experiment Name: At_Far-red-induction_P Parameter: Organism Value: A. thaliana
  misc_feature: MA Experiment 20001248 PARAMETER Experiment Name: At_Far-red-induction_P Parameter: Plant Line Value: Columbia
  misc_feature: MA Experiment 20001248 PARAMETER Experiment Name: At_Far-red-induction_P Parameter: Timepoint (hr) Value: 4
  misc_feature: MA Experiment 20001248 PARAMETER Experiment Name: At_Far-red-induction_P Parameter: Tissue Value: Whole Plant
  misc_feature: MA Experiment ID: 20001757 Result: Up-regulated in Transcription
  misc_feature: MA Experiment 20001757 PARAMETER Experiment Name: At_50mM_NH4NO3_L-to-H_P Parameter: Timepoint (hr) Value: 6
  misc_feature: MA Experiment 20001757 PARAMETER Experiment Name: At_50mM_NH4NO3_L-to-H_P Parameter: Tissue Value: Leaf
  misc_feature: MA Experiment 20001757 PARAMETER Experiment Name: At_50mM_NH4NO3_L-to-H_P Parameter: Treatment Value: 50mM NH4NO3 vs 100mM Mannitol
  misc_feature: MA Experiment ID: 20001904 Result: Down-regulated in Transcription
  misc_feature: MA Experiment 20001904 PARAMETER Experiment Name: At_Drought_Reproduction_P Parameter: Age (day) Value: 37
  misc_feature: MA Experiment 20001904 PARAMETER Experiment Name: At_Drought_Reproduction_P Parameter: Organism Value: A. thaliana
  misc_feature: MA Experiment 20001904 PARAMETER Experiment Name: At_Drought_Reproduction_P Parameter: Plant Line Value: WS
  misc_feature: MA Experiment 20001904 PARAMETER Experiment Name: At_Drought_Reproduction_P Parameter: Timepoint (day) Value: 7
  misc_feature: MA Experiment 20001904 PARAMETER Experiment Name: At_Drought_Reproduction_P Parameter: Tissue Value: Rosettes
  misc_feature: MA Experiment 20001904 PARAMETER Experiment Name: At_Drought_Reproduction_P Parameter: Treatment Value: Drought vs. No Drought
  misc_feature: MA Experiment ID: 20001905 Result: Down-regulated in Transcription
  misc_feature: MA Experiment 20001905 PARAMETER Experiment Name: At_Drought_Reproduction_P Parameter: Age (day) Value: 40
  misc_feature: MA Experiment 20001905 PARAMETER Experiment Name: At_Drought_Reproduction_P Parameter: Organism Value: A. thaliana
  misc_feature: MA Experiment 20001905 PARAMETER Experiment Name: At_Drought_Reproduction_P Parameter: Plant Line Value: WS
  misc_feature: MA Experiment 20001905 PARAMETER Experiment Name: At_Drought_Reproduction_P Parameter: Timepoint (day) Value: 10
  misc_feature: MA Experiment 20001905 PARAMETER Experiment Name: At_Drought_Reproduction_P Parameter: Tissue Value: Rosettes
  misc_feature: MA Experiment 20001905 PARAMETER Experiment Name: At_Drought_Reproduction_P Parameter: Treatment Value: Drought vs. No Drought
aagatcatggtggggttttttattttctccttatcaagaatcctctgatcagtcaaatacccatcaatcaatcaaatccccaaacactcccaaaaaaagatcagcttccaatatttttccccttcttacaaaaaagatgtctatgtcgtctatgtcctccccttcctcagctgtttgttcaccggaccacttctctccttccgaccatctctgctatgtccaatgcaacttttgccaaaccatccttgcggttaatgttccttacacaagcttgttcaagaccgtaactgtccgatgtggttgctgtaccaatctcctttcggtgaacatgagatcatatgtcctcccagcttctaaccagctccagctccagctcggtcctcactcttacttcaatccccaggatattctggaggagctgagagatgcaccgtctaacatgaatatgatgatgatgaatcaacatcctactatgaatgacataccatctttcatggatcttcatcaacaacatgagattcctaaagcaccacccgttaaccgccctccagagaaaagacagagagtcccatccgcatataaccgattcatcaaggaggagatccaacgtatcaaagctggtaatcctgatataagccacagagaagcctttagtgctgctgccaagaattgggcccacttcccccacatacacttcgggctcgtgccagacaatcaacccgtgaagaaaaccaacatgccccaacaggagggagaggataacatggtgatgaaagaagggttctacgctcctgcagctgctaacgttggtgtgactccttattaaagagataaatataatcgactaagtatttgaggaattgaaatccaatttcttagggtttatcatgtccaaaagttgtggtttcttttcctttcttgaacttatttatatatattataaatatgcatgtgtctttttctgttgttgtaatcaaaaatcttgctaattaatggggtttctt

SEQ ID NO: 39370 - protein, 274 aa, Arabidopsis thaliana
  peptide (1)..(274): Ceres Seq. ID no. 12559954
  misc_feature (61)..(234): Pfam Name: YABBY protein Pfam Description: YABBY protein
  misc_feature (179)..(242): Homolog of NCBI NO: 30683176 NR Description: expressed protein [Arabidopsis thaliana]
  misc_feature (46)..(110): Homolog of NCBI NO: 7486543 NR Description: hypothetical protein F6N15.22 - Arabidopsis
  misc_feature (183)..(262): Homolog of NCBI NO: 7486543 NR Description: hypothetical protein F6N15.22 - Arabidopsis
  misc_feature (47)..(118): Homolog of NCBI NO: 37551421 NR Description: FIL-like protein [Triticum aestivum]
  misc_feature (177)..(274): Homolog of NCBI NO: 37551421 NR Description: FIL-like protein [Triticum aestivum]
  misc_feature (47)..(118): Homolog of NCBI NO: 37535908 NR Description: hypothetical protein [Oryza sativa (japonica
  misc_feature (179)..(274): Homolog of NCBI NO: 37535908 NR Description: hypothetical protein [Oryza sativa (japonica
  misc_feature (46)..(271): Homolog of NCBI NO: 18411242 NR Description: putative YABBY3 axial regulator
  misc_feature (55)..(274): Homolog of NCBI NO: 27804377 NR Description: MADS-box transcription factor CDM51
  misc_feature (46)..(274): Homolog of NCBI NO: 18406725 NR Description: expressed protein
RSWWGFLFSPYQESSDQSNTHQSIKSPNTPKKRSASNIFPLLTKKMSMSSMSSPSSAVCSPDHFSPSDHLCYVQCNFCQTILAVNVPYTSLFKTVTVRCGCCTNLLSVNMRSYVLPASNQLQLQLGPHSYFNPQDILEELRDAPSNMNMMMMNQHPTMNDIPSFMDLHQQHEIPKAPPVNRPPEKRQRVPSAYNRFIKEEIQRIKAGNPDISHREAFSAAAKNWAHFPHIHFGLVPDNQPVKKTNMPQQEGEDNMVMKEGFYAPAAANVGVTPY

SEQ ID NO: 39371 - protein, 229 aa, Arabidopsis thaliana
  peptide (1)..(229): Ceres Seq. ID no. 12559955
  misc_feature (16)..(189): Pfam Name: YABBY protein Pfam Description: YABBY protein
  misc_feature (134)..(197): Homolog of NCBI NO: 30683176 NR Description: expressed protein [Arabidopsis thaliana]
  misc_feature (1)..(65): Homolog of NCBI NO: 7486543 NR Description: hypothetical protein F6N15.22 - Arabidopsis
  misc_feature (138)..(217): Homolog of NCBI NO: 7486543 NR Description: hypothetical protein F6N15.22 - Arabidopsis
  misc_feature (2)..(73): Homolog of NCBI NO: 37551421 NR Description: FIL-like protein [Triticum aestivum]
  misc_feature (132)..(229): Homolog of NCBI NO: 37551421 NR Description: FIL-like protein [Triticum aestivum]
  misc_feature (2)..(73): Homolog of NCBI NO: 37535908 NR Description: hypothetical protein [Oryza sativa (japonica
  misc_feature (134)..(229): Homolog of NCBI NO: 37535908 NR Description: hypothetical protein [Oryza sativa (japonica
  misc_feature (1)..(226): Homolog of NCBI NO: 18411242 NR Description: putative YABBY3 axial regulator
  misc_feature (10)..(229): Homolog of NCBI NO: 27804377 NR Description: MADS-box transcription factor CDM51
  misc_feature (1)..(229): Homolog of NCBI NO: 18406725 NR Description: expressed protein
MSMSSMSSPSSAVCSPDHFSPSDHLCYVQCNFCQTILAVNVPYTSLFKTVTVRCGCCTNLLSVNMRSYVLPASNQLQLQLGPHSYFNPQDILEELRDAPSNMNMMMMNQHPTMNDIPSFMDLHQQHEIPKAPPVNRPPEKRQRVPSAYNRFIKEEIQRIKAGNPDISHREAFSAAAKNWAHFPHIHFGLVPDNQPVKKTNMPQQEGEDNMVMKEGFYAPAAANVGVTPY

SEQ ID NO: 39372 - protein, 227 aa, Arabidopsis thaliana
  peptide (1)..(227): Ceres Seq. ID no. 12559956
  misc_feature (14)..(187): Pfam Name: YABBY protein Pfam Description: YABBY protein
  misc_feature (132)..(195): Homolog of NCBI NO: 30683176 NR Description: expressed protein [Arabidopsis thaliana]
  misc_feature (1)..(63): Homolog of NCBI NO: 7486543 NR Description: hypothetical protein F6N15.22 - Arabidopsis
  misc_feature (136)..(215): Homolog of NCBI NO: 7486543 NR Description: hypothetical protein F6N15.22 - Arabidopsis
  misc_feature (1)..(71): Homolog of NCBI NO: 37551421 NR Description: FIL-like protein [Triticum aestivum]
  misc_feature (130)..(227): Homolog of NCBI NO: 37551421 NR Description: FIL-like protein [Triticum aestivum]
  misc_feature (1)..(71): Homolog of NCBI NO: 37535908 NR Description: hypothetical protein [Oryza sativa (japonica
  misc_feature (132)..(227): Homolog of NCBI NO: 37535908 NR Description: hypothetical protein [Oryza sativa (japonica
  misc_feature (1)..(224): Homolog of NCBI NO: 18411242 NR Description: putative YABBY3 axial regulator
  misc_feature (8)..(227): Homolog of NCBI NO: 27804377 NR Description: MADS-box transcription factor CDM51
  misc_feature (1)..(227): Homolog of NCBI NO: 18406725 NR Description: expressed protein
MSSMSSPSSAVCSPDHFSPSDHLCYVQCNFCQTILAVNVPYTSLFKTVTVRCGCCTNLLSVNMRSYVLPASNQLQLQLGPHSYFNPQDILEELRDAPSNMNMMMMNQHPTMNDIPSFMDLHQQHEIPKAPPVNRPPEKRQRVPSAYNRFIKEEIQRIKAGNPDISHREAFSAAAKNWAHFPHIHFGLVPDNQPVKKTNMPQQEGEDNMVMKEGFYAPAAANVGVTPY

SEQ ID NO: 39373 - DNA, 1394 bp, Arabidopsis thaliana; identical to SEQ ID NO: 24208
  misc_feature (1)..(1394): Ceres Seq. ID no. 12394405
  misc_feature: MA Experiment ID: 108434 Result: Up-regulated in Transcription
  misc_feature: MA Experiment 108434 PARAMETER Experiment Name: At_Root_Tips_cDNA_P Parameter: Tissue Value: Root Tips
  misc_feature: MA Experiment ID: 108595 Result: Up-regulated in Transcription
  misc_feature: MA Experiment 108595 PARAMETER Experiment Name: At_Ler-pi_Ovule_cDNA_P Parameter: Plant Line Value: null
  misc_feature: MA Experiment ID: 20000069 Result: Down-regulated in Transcription
  misc_feature: MA Experiment 20000069 PARAMETER Experiment Name: At_100uM_ABA_Mutants_cDNA_P Parameter: Plant Line Value: CS23
  misc_feature: MA Experiment 20000069 PARAMETER Experiment Name: At_100uM_ABA_Mutants_cDNA_P Parameter: Timepoint (hr) Value: 6
  misc_feature: MA Experiment 20000069 PARAMETER Experiment Name: At_100uM_ABA_Mutants_cDNA_P Parameter: Tissue Value: Aerial
  misc_feature: MA Experiment 20000069 PARAMETER Experiment Name: At_100uM_ABA_Mutants_cDNA_P Parameter: Treatment Value: 100uM ABA vs. No Treatment
  misc_feature: MA Experiment ID: 20000071 Result: Down-regulated in Transcription
  misc_feature: MA Experiment 20000071 PARAMETER Experiment Name: At_100uM_ABA_Mutants_cDNA_P Parameter: Plant Line Value: CS8104
  misc_feature: MA Experiment 20000071 PARAMETER Experiment Name: At_100uM_ABA_Mutants_cDNA_P Parameter: Timepoint (hr) Value: 6
  misc_feature: MA Experiment 20000071 PARAMETER Experiment Name: At_100uM_ABA_Mutants_cDNA_P Parameter: Tissue Value: Aerial
  misc_feature: MA Experiment 20000071 PARAMETER Experiment Name: At_100uM_ABA_Mutants_cDNA_P Parameter: Treatment Value: 100uM ABA vs. No Treatment
  misc_feature: MA Experiment ID: 20000072 Result: Down-regulated in Transcription
  misc_feature: MA Experiment 20000072 PARAMETER Experiment Name: At_100uM_ABA_Mutants_cDNA_P Parameter: Plant Line Value: CS8105
  misc_feature: MA Experiment 20000072 PARAMETER Experiment Name: At_100uM_ABA_Mutants_cDNA_P Parameter: Timepoint (hr) Value: 6
  misc_feature: MA Experiment 20000072 PARAMETER Experiment Name: At_100uM_ABA_Mutants_cDNA_P Parameter: Tissue Value: Aerial
  misc_feature: MA Experiment 20000072 PARAMETER Experiment Name: At_100uM_ABA_Mutants_cDNA_P Parameter: Treatment Value: 100uM ABA vs. No Treatment
  misc_feature: MA Experiment ID: 20000089 Result: Down-regulated in Transcription
  misc_feature: MA Experiment ID: 20000264 Result: Up-regulated in Transcription
  misc_feature: MA Experiment 20000264 PARAMETER Experiment Name: At_Open_Flower_P Parameter: Age (day) Value: 21
  misc_feature: MA Experiment 20000264 PARAMETER Experiment Name: At_Open_Flower_P Parameter: Plant Line Value: WS
  misc_feature: MA Experiment 20000264 PARAMETER Experiment Name: At_Open_Flower_P Parameter: Tissue Value: Open Flower vs. Whole Plant
  misc_feature: MA Experiment ID: 20000286 Result: Up-regulated in Transcription
  misc_feature: MA Experiment 20000286 PARAMETER Experiment Name: At_Open_Flower_P Parameter: Age (day) Value: 21
  misc_feature: MA Experiment 20000286 PARAMETER Experiment Name: At_Open_Flower_P Parameter: Plant Line Value: WS
  misc_feature: MA Experiment 20000286 PARAMETER Experiment Name: At_Open_Flower_P Parameter: Tissue Value: Half Open vs. Whole Plant

SEQ ID NO: 39374 - protein, 393 aa, Arabidopsis thaliana; identical to SEQ ID NO: 24209
  peptide (1)..(393): Ceres Seq. ID no. 12394406
  misc_feature (174)..(252): Pfam Name: SBP domain Pfam Description: SBP domain
  misc_feature (174)..(252): Pfam Name: SBP domain Pfam Description: SBP domain
  misc_feature (127)..(373): Homolog of NCBI NO: 15227896 NR Description: putative squamosa-promoter binding protein
  misc_feature (117)..(381): Homolog of NCBI NO: 21536841 NR Description: unknown [Arabidopsis thaliana]
  misc_feature (117)..(381): Homolog of NCBI NO: 18423163 NR Description: putative protein
  misc_feature (1)..(291): Homolog of NCBI NO: 15239820 NR Description: squamosa promoter binding protein-like 2
  misc_feature (1)..(371): Homolog of NCBI NO: 25456646 NR Description: squamosa promoter binding protein 2
  misc_feature (127)..(373): Homolog of NCBI NO: 15227896 NR Description: putative squamosa-promoter binding protein
  misc_feature (117)..(381): Homolog of NCBI NO: 18423163 NR Description: putative protein
  misc_feature (1)..(371): Homolog of NCBI NO: 25456646 NR Description: squamosa promoter binding protein 2
  misc_feature (1)..(393): Homolog of NCBI NO: 18396302 NR Description: putative squamosa-promoter binding protein 2
  misc_feature (5)..(393): Homolog of NCBI NO: 25403307 NR Description: protein F17L21.14 [imported] - Arabidopsis
  misc_feature (1)..(378): Homolog of NCBI NO: 22329813 NR Description: putative squamosa-promoter binding protein 2
  misc_feature (1)..(378): Homolog of NCBI NO: 18650611 NR Description: At1g27370/F17L21_16 [Arabidopsis thaliana]
  misc_feature (5)..(378): Homolog of NCBI NO: 9802546 NR Description: F17L21.15 [Arabidopsis thaliana]
  misc_feature (1)..(291): Homolog of NCBI NO: 15239820 NR Description: squamosa promoter binding protein-like 2
  misc_feature (117)..(381): Homolog of NCBI NO: 21536841 NR Description: unknown [Arabidopsis thaliana]
  misc_feature (5)..(378): Homolog of NCBI NO: 9802546 NR Description: F17L21.15 [Arabidopsis thaliana]
  misc_feature (1)..(378): Homolog of NCBI NO: 18650611 NR Description: At1g27370/F17L21_16 [Arabidopsis thaliana]
  misc_feature (1)..(378): Homolog of NCBI NO: 22329813 NR Description: putative squamosa-promoter binding protein 2
  misc_feature (5)..(393): Homolog of NCBI NO: 25403307 NR Description: protein F17L21.14 [imported] - Arabidopsis
  misc_feature (1)..(393): Homolog of NCBI NO: 18396302 NR Description: putative squamosa-promoter binding protein 2

SEQ ID NO: 39375 - protein, 389 aa, Arabidopsis thaliana; identical to SEQ ID NO: 24210
  peptide (1)..(389): Ceres Seq. ID no. 12394407
  misc_feature (170)..(248): Pfam Name: SBP domain Pfam Description: SBP domain
  misc_feature (170)..(248): Pfam Name: SBP domain Pfam Description: SBP domain
  misc_feature (123)..(369): Homolog of NCBI NO: 15227896 NR Description: putative squamosa-promoter binding protein
  misc_feature (113)..(377): Homolog of NCBI NO: 21536841 NR Description: unknown [Arabidopsis thaliana]
  misc_feature (113)..(377): Homolog of NCBI NO: 18423163 NR Description: putative protein
  misc_feature (1)..(287): Homolog of NCBI NO: 15239820 NR Description: squamosa promoter binding protein-like 2
  misc_feature (1)..(367): Homolog of NCBI NO: 25456646 NR Description: squamosa promoter binding protein 2
  misc_feature (123)..(369): Homolog of NCBI NO: 15227896 NR Description: putative squamosa-promoter binding protein
  misc_feature (113)..(377): Homolog of NCBI NO: 18423163 NR Description: putative protein
  misc_feature (1)..(367): Homolog of NCBI NO: 25456646 NR Description: squamosa promoter binding protein 2
  misc_feature (1)..(389): Homolog of NCBI NO: 18396302 NR Description: putative squamosa-promoter binding protein 2
  misc_feature (1)..(389): Homolog of NCBI NO: 25403307 NR Description: protein F17L21.14 [imported] - Arabidopsis
  misc_feature (1)..(374): Homolog of NCBI NO: 22329813 NR Description: putative squamosa-promoter binding protein 2
  misc_feature (1)..(374): Homolog of NCBI NO: 18650611 NR Description: At1g27370/F17L21_16 [Arabidopsis thaliana]
  misc_feature (1)..(374): Homolog of NCBI NO: 9802546 NR Description: F17L21.15 [Arabidopsis thaliana]
  misc_feature (1)..(287): Homolog of NCBI NO: 15239820 NR Description: squamosa promoter binding protein-like 2
  misc_feature (113)..(377): Homolog of NCBI NO: 21536841 NR Description: unknown [Arabidopsis thaliana]
  misc_feature (1)..(374): Homolog of NCBI NO: 9802546 NR Description: F17L21.15 [Arabidopsis thaliana]
  misc_feature (1)..(374): Homolog of NCBI NO: 18650611 NR Description: At1g27370/F17L21_16 [Arabidopsis thaliana]
  misc_feature (1)..(374): Homolog of NCBI NO: 22329813 NR Description: putative squamosa-promoter binding protein 2
  misc_feature (1)..(389): Homolog of NCBI NO: 25403307 NR Description: protein F17L21.14 [imported] - Arabidopsis
  misc_feature (1)..(389): Homolog of NCBI NO: 18396302 NR Description: putative squamosa-promoter binding protein 2

SEQ ID NO: 39376 - protein, 376 aa, Arabidopsis thaliana; identical to SEQ ID NO: 24211
  peptide (1)..(376): Ceres Seq. ID no. 12394408
  misc_feature (157)..(235): Pfam Name: SBP domain Pfam Description: SBP domain
  misc_feature (157)..(235): Pfam Name: SBP domain Pfam Description: SBP domain
  misc_feature (110)..(356): Homolog of NCBI NO: 15227896 NR Description: putative squamosa-promoter binding protein
  misc_feature (100)..(364): Homolog of NCBI NO: 21536841 NR Description: unknown [Arabidopsis thaliana]
  misc_feature (100)..(364): Homolog of NCBI NO: 18423163 NR Description: putative protein
  misc_feature (1)..(274): Homolog of NCBI NO: 15239820 NR Description: squamosa promoter binding protein-like 2
  misc_feature (1)..(354): Homolog of NCBI NO: 25456646 NR Description: squamosa promoter binding protein 2
  misc_feature (110)..(356): Homolog of NCBI NO: 15227896 NR Description: putative squamosa-promoter binding protein
  misc_feature (100)..(364): Homolog of NCBI NO: 18423163 NR Description: putative protein
  misc_feature (1)..(354): Homolog of NCBI NO: 25456646 NR Description: squamosa promoter binding protein 2
  misc_feature (1)..(376): Homolog of NCBI NO: 18396302 NR Description: putative squamosa-promoter binding protein 2
  misc_feature (1)..(376): Homolog of NCBI NO: 25403307 NR Description: protein F17L21.14 [imported] - Arabidopsis
  misc_feature (1)..(361): Homolog of NCBI NO: 22329813 NR Description: putative squamosa-promoter binding protein 2
  misc_feature (1)..(361): Homolog of NCBI NO: 18650611 NR Description: At1g27370/F17L21_16 [Arabidopsis thaliana]
  misc_feature (1)..(361): Homolog of NCBI NO: 9802546 NR Description: F17L21.15 [Arabidopsis thaliana]
  misc_feature (1)..(274): Homolog of NCBI NO: 15239820 NR Description: squamosa promoter binding protein-like 2
  misc_feature (100)..(364): Homolog of NCBI NO: 21536841 NR Description: unknown [Arabidopsis thaliana]
  misc_feature (1)..(361): Homolog of NCBI NO: 9802546 NR Description: F17L21.15 [Arabidopsis thaliana]
  misc_feature (1)..(361): Homolog of NCBI NO: 18650611 NR Description: At1g27370/F17L21_16 [Arabidopsis thaliana]
  misc_feature (1)..(361): Homolog of NCBI NO: 22329813 NR Description: putative squamosa-promoter binding protein 2
  misc_feature (1)..(376): Homolog of NCBI NO: 25403307 NR Description: protein F17L21.14 [imported] - Arabidopsis
  misc_feature (1)..(376): Homolog of NCBI NO: 18396302 NR Description: putative squamosa-promoter binding protein 2

SEQ ID NO: 39377 - DNA, 1284 bp, Arabidopsis thaliana
  misc_feature (1)..(1284): Ceres Seq. ID no. 12328584
  misc_feature: MA Experiment ID: 108433 Result: Up-regulated in Transcription
  misc_feature: MA Experiment 108433 PARAMETER Experiment Name: At_rhl_Mutant2_cDNA_P Parameter: Age (day) Value: 7
  misc_feature: MA Experiment 108433 PARAMETER Experiment Name: At_rhl_Mutant2_cDNA_P Parameter: Organism Value: A. thaliana
  misc_feature: MA Experiment 108433 PARAMETER Experiment Name: At_rhl_Mutant2_cDNA_P Parameter: Plant Line Value: rhl Mutant vs. wt landsburg
  misc_feature: MA Experiment 108433 PARAMETER Experiment Name: At_rhl_Mutant2_cDNA_P Parameter: Tissue Value: Roots
  misc_feature: MA Experiment ID: 108462 Result: Up-regulated in Transcription
  misc_feature: MA Experiment 108462 PARAMETER Experiment Name: At_Germinating_Seeds_cDNA_P Parameter: Age (day) Value: 2 vs. 0
  misc_feature: MA Experiment 108462 PARAMETER Experiment Name: At_Germinating_Seeds_cDNA_P Parameter: Tissue Value: Germinating Seeds
  misc_feature: MA Experiment ID: 108569 Result: Down-regulated in Transcription
  misc_feature: MA Experiment 108569 PARAMETER Experiment Name: At_0.001%_MeJA__cDNA_P Parameter: Timepoint (hr) Value: 6
  misc_feature: MA Experiment 108569 PARAMETER Experiment Name: At_0.001%_MeJA__cDNA_P Parameter: Tissue Value: Aerial
  misc_feature: MA Experiment 108569 PARAMETER Experiment Name: At_0.001%_MeJA__cDNA_P Parameter: Treatment Value: 0.001% MeJA vs. No Treatment
  misc_feature: MA Experiment ID: 20000070 Result: Down-regulated in Transcription
  misc_feature: MA Experiment 20000070 PARAMETER Experiment Name: At_100uM_ABA_Mutants_cDNA_P Parameter: Plant Line Value: CS24
  misc_feature: MA Experiment 20000070 PARAMETER Experiment Name: At_100uM_ABA_Mutants_cDNA_P Parameter: Timepoint (hr) Value: 6
  misc_feature: MA Experiment 20000070 PARAMETER Experiment Name: At_100uM_ABA_Mutants_cDNA_P Parameter: Tissue Value: Aerial
  misc_feature: MA Experiment 20000070 PARAMETER Experiment Name: At_100uM_ABA_Mutants_cDNA_P Parameter: Treatment Value: 100uM ABA vs. No Treatment
  misc_feature: MA Experiment ID: 20000071 Result: Down-regulated in Transcription
  misc_feature: MA Experiment 20000071 PARAMETER Experiment Name: At_100uM_ABA_Mutants_cDNA_P Parameter: Plant Line Value: CS8104
  misc_feature: MA Experiment 20000071 PARAMETER Experiment Name: At_100uM_ABA_Mutants_cDNA_P Parameter: Timepoint (hr) Value: 6
  misc_feature: MA Experiment 20000071 PARAMETER Experiment Name: At_100uM_ABA_Mutants_cDNA_P Parameter: Tissue Value: Aerial
  misc_feature: MA Experiment 20000071 PARAMETER Experiment Name: At_100uM_ABA_Mutants_cDNA_P Parameter: Treatment Value: 100uM ABA vs. No Treatment
  misc_feature: MA Experiment ID: 20000072 Result: Down-regulated in Transcription
  misc_feature: MA Experiment 20000072 PARAMETER Experiment Name: At_100uM_ABA_Mutants_cDNA_P Parameter: Plant Line Value: CS8105
  misc_feature: MA Experiment 20000072 PARAMETER Experiment Name: At_100uM_ABA_Mutants_cDNA_P Parameter: Timepoint (hr) Value: 6
  misc_feature: MA Experiment 20000072 PARAMETER Experiment Name: At_100uM_ABA_Mutants_cDNA_P Parameter: Tissue Value: Aerial
  misc_feature: MA Experiment 20000072 PARAMETER Experiment Name: At_100uM_ABA_Mutants_cDNA_P Parameter: Treatment Value: 100uM ABA vs. No Treatment
  misc_feature: MA Experiment ID: 20000111 Result: Up-regulated in Transcription
  misc_feature: MA Experiment 20000111 PARAMETER Experiment Name: At_42deg_Heat_cDNA_P Parameter: Temperature (deg C) Value: 42 vs. 22
  misc_feature: MA Experiment 20000111 PARAMETER Experiment Name: At_42deg_Heat_cDNA_P Parameter: Timepoint (hr) Value: 6
  misc_feature: MA Experiment 20000111 PARAMETER Experiment Name: At_42deg_Heat_cDNA_P Parameter: Tissue Value: Aerial
  misc_feature: MA Experiment ID: 20000180 Result: Up-regulated in Transcription
  misc_feature: MA Experiment 20000180 PARAMETER Experiment Name: At_Germinating_Seeds_P Parameter: Age (hr) Value: 24 vs. 0
  misc_feature: MA Experiment 20000180 PARAMETER Experiment Name: At_Germinating_Seeds_P Parameter: Tissue Value: Germinating Seeds
  misc_feature: MA Experiment ID: 20000227 Result: Up-regulated in Transcription
  misc_feature: MA Experiment 20000227 PARAMETER Experiment Name: At_Root-Tips-vs-Tops_P Parameter: Tissue Value: Root Tips vs. Root Tops
  misc_feature: MA Experiment ID: 20000235 Result: Down-regulated in Transcription
  misc_feature: MA Experiment 20000235 PARAMETER Experiment Name: At_Siliques_P Parameter: Age (day) Value: 21
  misc_feature: MA Experiment 20000235 PARAMETER Experiment Name: At_Siliques_P Parameter: Organism Value: A. thaliana
  misc_feature: MA Experiment 20000235 PARAMETER Experiment Name: At_Siliques_P Parameter: Plant Line Value: WS
  misc_feature: MA Experiment 20000235 PARAMETER Experiment Name: At_Siliques_P Parameter: Tissue Value: 5-10mm Siliques vs. Whole Plant
  misc_feature: MA Experiment ID: 20000264 Result: Down-regulated in Transcription
  misc_feature: MA Experiment 20000264 PARAMETER Experiment Name: At_Open_Flower_P Parameter: Age (day) Value: 21
  misc_feature: MA Experiment 20000264 PARAMETER Experiment Name: At_Open_Flower_P Parameter: Plant Line Value: WS
  misc_feature: MA Experiment 20000264 PARAMETER Experiment Name: At_Open_Flower_P Parameter: Tissue Value: Open Flower vs. Whole Plant
  misc_feature: MA Experiment ID: 20000265 Result: Down-regulated in Transcription
  misc_feature: MA Experiment 20000265 PARAMETER Experiment Name: At_Open_Flower_P Parameter: Age (day) Value: 21
  misc_feature: MA Experiment 20000265 PARAMETER Experiment Name: At_Open_Flower_P Parameter: Plant Line Value: WS
  misc_feature: MA Experiment 20000265 PARAMETER Experiment Name: At_Open_Flower_P Parameter: Tissue Value: Closed Flower vs. Whole Plant
  misc_feature: MA Experiment ID: 20000268 Result: Down-regulated in Transcription
  misc_feature: MA Experiment 20000268 PARAMETER Experiment Name: At_100mM_NaCl__P Parameter: Age (day) Value: 14
  misc_feature: MA Experiment 20000268 PARAMETER Experiment Name: At_100mM_NaCl__P Parameter: Organism Value: A. thaliana
  misc_feature: MA Experiment 20000268 PARAMETER Experiment Name: At_100mM_NaCl__P Parameter: Plant Line Value: WS
  misc_feature: MA Experiment 20000268 PARAMETER Experiment Name: At_100mM_NaCl__P Parameter: Timepoint (hr) Value: 6
  misc_feature: MA Experiment 20000268 PARAMETER Experiment Name: At_100mM_NaCl__P Parameter: Tissue Value: Whole Plant
  misc_feature: MA Experiment 20000268 PARAMETER Experiment Name: At_100mM_NaCl__P Parameter: Treatment Value: 100mM NaCl vs. No Treatment
  misc_feature: MA Experiment ID: 20000308 Result: Down-regulated in Transcription
  misc_feature: MA Experiment 20000308 PARAMETER Experiment Name: At_100mM_NaCl__P Parameter: Age (day) Value: 17
  misc_feature: MA Experiment 20000308 PARAMETER Experiment Name: At_100mM_NaCl__P Parameter: Organism Value: A. thaliana
  misc_feature: MA Experiment 20000308 PARAMETER Experiment Name: At_100mM_NaCl__P Parameter: Plant Line Value: WS
  misc_feature: MA Experiment 20000308 PARAMETER Experiment Name: At_100mM_NaCl__P Parameter: Timepoint (hr) Value: 72
  misc_feature: MA Experiment 20000308 PARAMETER Experiment Name: At_100mM_NaCl__P Parameter: Tissue Value: Whole Plant
  misc_feature: MA Experiment 20000308 PARAMETER Experiment Name: At_100mM_NaCl__P Parameter: Treatment Value: 100mM NaCl vs. No Treatment
  misc_feature: MA Experiment ID: 20000437 Result: Down-regulated in Transcription
  misc_feature: MA Experiment 20000437 PARAMETER Experiment Name: At_Drought_P Parameter: Age (day) Value: 8
  misc_feature: MA Experiment 20000437 PARAMETER Experiment Name: At_Drought_P Parameter: Organism Value: A. thaliana
  misc_feature: MA Experiment 20000437 PARAMETER Experiment Name: At_Drought_P Parameter: Plant Line Value: WS
  misc_feature: MA Experiment 20000437 PARAMETER Experiment Name: At_Drought_P Parameter: Timepoint (hr) Value: 24
  misc_feature: MA Experiment 20000437 PARAMETER Experiment Name: At_Drought_P Parameter: Tissue Value: Whole Plant
  misc_feature: MA Experiment 20000437 PARAMETER Experiment Name: At_Drought_P Parameter: Treatment Value: Drought vs. No Drought
  misc_feature: MA Experiment ID: 20000439 Result: Down-regulated in Transcription
  misc_feature: MA Experiment 20000439 PARAMETER Experiment Name: At_Roots__P Parameter: Age (day) Value: 14 vs. 21
  misc_feature: MA Experiment 20000439 PARAMETER Experiment Name: At_Roots__P Parameter: Organism Value: A. thaliana
  misc_feature: MA Experiment 20000439 PARAMETER Experiment Name: At_Roots__P Parameter: Tissue Value: Roots vs. Whole Plant
  misc_feature: MA Experiment ID: 20000441 Result: Up-regulated in Transcription
  misc_feature: MA Experiment 20000441 PARAMETER Experiment Name: At_1uM_BR-BRZ__P Parameter: Tissue Value: Shoot Apices
  misc_feature: MA Experiment 20000441 PARAMETER Experiment Name: At_1uM_BR-BRZ__P Parameter: Treatment Value: 1uM BR vs. No Treatment
  misc_feature: MA Experiment ID: 20000445 Result: Up-regulated in Transcription
  misc_feature: MA Experiment 20000445 PARAMETER Experiment Name: At_100uM_NAA__P Parameter: Age (day) Value: 14
  misc_feature: MA Experiment 20000445 PARAMETER Experiment Name: At_100uM_NAA__P Parameter: Organism Value: A. thaliana
  misc_feature: MA Experiment 20000445 PARAMETER Experiment Name: At_100uM_NAA__P Parameter: Plant Line Value: WS
  misc_feature: MA Experiment 20000445 PARAMETER Experiment Name: At_100uM_NAA__P Parameter: Timepoint (hr) Value: 6
  misc_feature: MA Experiment 20000445 PARAMETER Experiment Name: At_100uM_NAA__P Parameter: Tissue Value: Aerial
  misc_feature: MA Experiment 20000445 PARAMETER Experiment Name: At_100uM_NAA__P Parameter: Treatment Value: 100uM NAA vs. No Treatment
  misc_feature: MA Experiment ID: 20000460 Result: Up-regulated in Transcription
  misc_feature: MA Experiment 20000460 PARAMETER Experiment Name: At_10percent_PEG_P Parameter: Age (day) Value: 12
  misc_feature: MA Experiment 20000460 PARAMETER Experiment Name: At_10percent_PEG_P Parameter: Organism Value: A. thaliana
  misc_feature: MA Experiment 20000460 PARAMETER Experiment Name: At_10percent_PEG_P Parameter: Plant Line Value: WS
  misc_feature: MA Experiment 20000460 PARAMETER Experiment Name: At_10percent_PEG_P Parameter: Timepoint (day) Value: 12
  misc_feature: MA Experiment 20000460 PARAMETER Experiment Name: At_10percent_PEG_P Parameter: Tissue Value: Whole Plant
  misc_feature: MA Experiment 20000460 PARAMETER Experiment Name: At_10percent_PEG_P Parameter: Treatment Value: 10percent PEG vs. No Treatment
  misc_feature: MA Experiment ID: 20000527 Result: Up-regulated in Transcription
  misc_feature: MA Experiment 20000527 PARAMETER Experiment Name: At_10percent_PEG_P Parameter: Age (day) Value: 20
  misc_feature: MA Experiment 20000527 PARAMETER Experiment Name: At_10percent_PEG_P Parameter: Organism Value: A. thaliana
  misc_feature: MA Experiment 20000527 PARAMETER Experiment Name: At_10percent_PEG_P Parameter: Plant Line Value: WS
  misc_feature: MA Experiment 20000527 PARAMETER Experiment Name: At_10percent_PEG_P Parameter: Timepoint (day) Value: 20
  misc_feature: MA Experiment 20000527 PARAMETER Experiment Name: At_10percent_PEG_P Parameter: Tissue Value: Whole Plant
  misc_feature: MA Experiment 20000527 PARAMETER Experiment Name: At_10percent_PEG_P Parameter: Treatment Value: 10percent PEG vs. No Treatment
  misc_feature: MA Experiment ID: 20000573 Result: Down-regulated in Transcription
  misc_feature: MA Experiment 20000573 PARAMETER Experiment Name: At_100uM_ABA_Mutants__P Parameter: Organism Value: A. thaliana
  misc_feature: MA Experiment 20000573 PARAMETER Experiment Name: At_100uM_ABA_Mutants__P Parameter: Plant Line Value: CS22 vs. Ler wt
  misc_feature: MA Experiment 20000573 PARAMETER Experiment Name: At_100uM_ABA_Mutants__P Parameter: Timepoint (hr) Value: N/A
  misc_feature: MA Experiment 20000573 PARAMETER Experiment Name: At_100uM_ABA_Mutants__P Parameter: Tissue Value: Whole Plant
  misc_feature: MA Experiment 20000573 PARAMETER Experiment Name: At_100uM_ABA_Mutants__P Parameter: Treatment Value: None
  misc_feature: MA Experiment ID: 20000574 Result: Down-regulated in Transcription
  misc_feature: MA Experiment 20000574 PARAMETER Experiment Name: At_100uM_ABA_Mutants__P Parameter: Organism Value: A. thaliana
  misc_feature: MA Experiment 20000574 PARAMETER Experiment Name: At_100uM_ABA_Mutants__P Parameter: Plant Line Value: CS23 vs. Ler wt
  misc_feature: MA Experiment 20000574 PARAMETER Experiment Name: At_100uM_ABA_Mutants__P Parameter: Timepoint (hr) Value: N/A
  misc_feature: MA Experiment 20000574 PARAMETER Experiment Name: At_100uM_ABA_Mutants__P Parameter: Tissue Value: Whole Plant
  misc_feature: MA Experiment 20000574 PARAMETER Experiment Name: At_100uM_ABA_Mutants__P Parameter: Treatment Value: None
  misc_feature: MA Experiment ID: 20000794 Result: Down-regulated in Transcription
  misc_feature: MA Experiment 20000794 PARAMETER Experiment Name: At_Petals_P Parameter: Age (day) Value: 23-25 days
  misc_feature: MA Experiment 20000794 PARAMETER Experiment Name: At_Petals_P Parameter: Plant Line Value: WS
  misc_feature: MA Experiment 20000794 PARAMETER Experiment Name: At_Petals_P Parameter: Tissue Value: Petals vs. Whole plant
  misc_feature: MA Experiment ID: 20001247 Result: Up-regulated in Transcription
  misc_feature: MA Experiment 20001247 PARAMETER Experiment Name: At_Far-red-induction_P Parameter: Age (day) Value: 7
  misc_feature: MA Experiment 20001247 PARAMETER Experiment Name: At_Far-red-induction_P Parameter: Light Value: Far-red vs. White
  misc_feature: MA Experiment 20001247 PARAMETER Experiment Name: At_Far-red-induction_P Parameter: Organism Value: A. thaliana
  misc_feature: MA Experiment 20001247 PARAMETER Experiment Name: At_Far-red-induction_P Parameter: Plant Line Value: Columbia
  misc_feature: MA Experiment 20001247 PARAMETER Experiment Name: At_Far-red-induction_P Parameter: Timepoint (hr) Value: 1
  misc_feature: MA Experiment 20001247 PARAMETER Experiment Name: At_Far-red-induction_P Parameter: Tissue Value: Whole Plant
  misc_feature: MA Experiment ID: 20001450 Result: Up-regulated in Transcription
  misc_feature: MA Experiment 20001450 PARAMETER Experiment Name: At_Far-red-induction_P Parameter: Age (day) Value: 7
  misc_feature: MA Experiment 20001450 PARAMETER Experiment Name: At_Far-red-induction_P Parameter: Light Value: Far-red vs. White
  misc_feature: MA Experiment 20001450 PARAMETER Experiment Name: At_Far-red-induction_P Parameter: Organism Value: A. thaliana
  misc_feature: MA Experiment 20001450 PARAMETER Experiment Name: At_Far-red-induction_P Parameter: Plant Line Value: Columbia
  misc_feature: MA Experiment 20001450 PARAMETER Experiment Name: At_Far-red-induction_P Parameter: Timepoint (hr) Value: 8
  misc_feature: MA Experiment 20001450 PARAMETER Experiment Name: At_Far-red-induction_P Parameter: Tissue Value: Whole Plant
  misc_feature: MA Experiment ID: 20001451 Result: Up-regulated in Transcription
  misc_feature: MA Experiment 20001451 PARAMETER Experiment Name: At_Far-red-induction_P Parameter: Age (day) Value: 7
  misc_feature: MA Experiment 20001451 PARAMETER Experiment Name: At_Far-red-induction_P Parameter: Light Value: Far-red vs. White
  misc_feature: MA Experiment 20001451 PARAMETER Experiment Name: At_Far-red-induction_P Parameter: Organism Value: A. thaliana
  misc_feature: MA Experiment 20001451 PARAMETER Experiment Name: At_Far-red-induction_P Parameter: Plant Line Value: Columbia
  misc_feature: MA Experiment 20001451 PARAMETER Experiment Name: At_Far-red-induction_P Parameter: Timepoint (hr) Value: 24
  misc_feature: MA Experiment 20001451 PARAMETER Experiment Name: At_Far-red-induction_P Parameter: Tissue Value: Whole Plant
  misc_feature: MA Experiment ID: 20001554 Result: Down-regulated in Transcription
  misc_feature: MA Experiment 20001554 PARAMETER Experiment Name: At_Drought_Soil_Dry_P Parameter: Age (day) Value: 21
  misc_feature: MA Experiment 20001554 PARAMETER Experiment Name: At_Drought_Soil_Dry_P Parameter: Organism Value: A. thaliana
  misc_feature: MA Experiment 20001554 PARAMETER Experiment Name: At_Drought_Soil_Dry_P Parameter: Plant Line Value: WS
  misc_feature: MA Experiment 20001554 PARAMETER Experiment Name: At_Drought_Soil_Dry_P Parameter: Post Timepoint (hr) Value: None
  misc_feature: MA Experiment 20001554 PARAMETER Experiment Name: At_Drought_Soil_Dry_P Parameter: Post-Treatment Value: None
  misc_feature: MA Experiment 20001554 PARAMETER Experiment Name: At_Drought_Soil_Dry_P Parameter: Timepoint (day) Value: 7
  misc_feature: MA Experiment 20001554 PARAMETER Experiment Name: At_Drought_Soil_Dry_P Parameter: Treatment Value: Drought vs. No Drought
  misc_feature: MA Experiment ID: 20001555 Result: Down-regulated in Transcription
  misc_feature: MA Experiment 20001555 PARAMETER Experiment Name: At_Drought_Soil_Dry_P Parameter: Age (day) Value: 24
  misc_feature: MA Experiment 20001555 PARAMETER Experiment Name: At_Drought_Soil_Dry_P Parameter: Organism Value: A. thaliana
  misc_feature: MA Experiment 20001555 PARAMETER Experiment Name: At_Drought_Soil_Dry_P Parameter: Plant Line Value: WS
  misc_feature: MA Experiment 20001555 PARAMETER Experiment Name: At_Drought_Soil_Dry_P Parameter: Post Timepoint (hr) Value: None
  misc_feature: MA Experiment 20001555 PARAMETER Experiment Name: At_Drought_Soil_Dry_P Parameter: Post-Treatment Value: None
  misc_feature: MA Experiment 20001555 PARAMETER Experiment Name: At_Drought_Soil_Dry_P Parameter: Timepoint (day) Value: 10
  misc_feature: MA Experiment 20001555 PARAMETER Experiment Name: At_Drought_Soil_Dry_P Parameter: Treatment Value: Drought vs. No Drought
  misc_feature: MA Experiment ID: 20001556 Result: Down-regulated in Transcription
  misc_feature: MA Experiment 20001556 PARAMETER Experiment Name: At_Drought_Soil_Dry_P Parameter: Age (day) Value: 26
  misc_feature: MA Experiment 20001556 PARAMETER Experiment Name: At_Drought_Soil_Dry_P Parameter: Organism Value: A. thaliana
  misc_feature: MA Experiment 20001556 PARAMETER Experiment Name: At_Drought_Soil_Dry_P Parameter: Plant Line Value: WS
  misc_feature: MA Experiment 20001556 PARAMETER Experiment Name: At_Drought_Soil_Dry_P Parameter: Post Timepoint (hr) Value: None
  misc_feature: MA Experiment 20001556 PARAMETER Experiment Name: At_Drought_Soil_Dry_P Parameter: Post-Treatment Value: None
  misc_feature: MA Experiment 20001556 PARAMETER Experiment Name: At_Drought_Soil_Dry_P Parameter: Timepoint (day) Value: 12
  misc_feature: MA Experiment 20001556 PARAMETER Experiment Name: At_Drought_Soil_Dry_P Parameter: Treatment Value: Drought vs. No Drought
  misc_feature: MA Experiment ID: 20001904 Result: Down-regulated in Transcription
  misc_feature: MA Experiment 20001904 PARAMETER Experiment Name: At_Drought_Reproduction_P Parameter: Age (day) Value: 37
  misc_feature: MA Experiment 20001904 PARAMETER Experiment Name: At_Drought_Reproduction_P Parameter: Organism Value: A. thaliana
  misc_feature: MA Experiment 20001904 PARAMETER Experiment Name: At_Drought_Reproduction_P Parameter: Plant Line Value: WS
  misc_feature: MA Experiment 20001904 PARAMETER Experiment Name: At_Drought_Reproduction_P Parameter: Timepoint (day) Value: 7
  misc_feature: MA Experiment 20001904 PARAMETER Experiment Name: At_Drought_Reproduction_P Parameter: Tissue Value: Rosettes
  misc_feature: MA Experiment 20001904 PARAMETER Experiment Name: At_Drought_Reproduction_P Parameter: Treatment Value: Drought vs. No Drought
  misc_feature: MA Experiment ID: 20001911 Result: Down-regulated in Transcription
  misc_feature: MA Experiment 20001911 PARAMETER Experiment Name: At_Drought_Reproduction_P Parameter: Age (day) Value: 40
  misc_feature: MA Experiment 20001911 PARAMETER Experiment Name: At_Drought_Reproduction_P Parameter: Organism Value: A. thaliana
  misc_feature: MA Experiment 20001911 PARAMETER Experiment Name: At_Drought_Reproduction_P Parameter: Plant Line Value: WS
  misc_feature: MA Experiment 20001911 PARAMETER Experiment Name: At_Drought_Reproduction_P Parameter: Timepoint (day) Value: 10
  misc_feature: MA Experiment 20001911 PARAMETER Experiment Name: At_Drought_Reproduction_P Parameter: Tissue Value: Flowers
  misc_feature: MA Experiment 20001911 PARAMETER Experiment Name: At_Drought_Reproduction_P Parameter: Treatment Value: Drought vs. No Drought
atgtactaagcacattttctttttctggtatagggtttacgtaaaacatgcgacaacgacaaagattgccggaaaactagccggaacttaggggagctaggtgagaccagcggcggttccatcctcgtgagtaaagcagtgatcgtcggtccgttcaaatccgacaacttcacaaccatcaccgatgctattgcagccgcacctaataacactagaccagaggatggttactttgttatctacgcaagagaaggtgtctatgaagaatatattgttgttcccatcaacaaaaagaacttaatgcttatcggagatgggatcaagaagacgattattacagggaaccataatgttgttgatggttggactacgtataattgctcgagcttcgctgtggttggagagcggttcatggcggttgatgttacattcagaaacacagctggacctgaaaaacatcaggctgtggctttgaggaacaatgcggaaggatcaagtttttatcggtgtagttttgaaggctatcaagatactctctacgtccattctcttagacaattctatcgcgaatgcgatatatatggtaccgtcgattttatattcggaaatgcagccgcaatttttcaaaactgcaacatatatgctcgaaaaccgatggccaagcaaaagaacgcaataacagcgcatggaagactcgatccaaaccagaataccggaatctctatcatcaattgtacaataaaagccgccccagatcttgcagctgatcctaaatcagccatgacatttttagggagaccgtggaagccctactcaaggacggttttcatgcaatcatacattagtgacattgttcaaccagtcggatggctcgaatggaacggtacaattggactagacacaatctactacggtgagtatagtaactttggaccaggtgctaacacgaaccagagagtgcagtggttagggtacaatttattgaacttggcagaagccatgaacttcacggtctacaacttcaccatgggagatacatggttgcctcaaaccgatattcctttctatggtggtttgcttagcaaagaatgaaattgatgaacaacatattatatgtaaacatatttaattatacgtacttcctcatttaaaaaataaatcaagaaattttcatttgttctagttgttgggacgagtcaatgggagtggttctcatgtaaatctagacgtgcttctaactttatttattgcttcagataaccaataaagctaagttttgatgcc

SEQ ID NO: 39378 - protein, 263 aa, Arabidopsis thaliana
  peptide (1)..(263): Ceres Seq. ID no. 12328585
  misc_feature (1)..(245): Pfam Name: Pectinesterase Pfam Description: Pectinesterase
  misc_feature (1)..(261): Homolog of NCBI NO: 18407388 NR Description: pectinesterase family
  misc_feature (1)..(259): Homolog of NCBI NO: 34894528 NR Description: putative pectinesterase [Oryza sativa (japonica
  misc_feature (1)..(261): Homolog of NCBI NO: 18379010 NR Description: pectinesterase family; protein id: At1g02810.1
  misc_feature (1)..(261): Homolog of NCBI NO: 19424045 NR Description: unknown protein [Arabidopsis thaliana]
  misc_feature (1)..(261): Homolog of NCBI NO: 18411914 NR Description: hypothetical protein
  misc_feature (1)..(263): Homolog of NCBI NO: 18398974 NR Description: putative pectinesterase [Arabidopsis thaliana]
  misc_feature (1)..(263): Homolog of NCBI NO: 21618192 NR Description: putative pectinesterase [Arabidopsis thaliana]
  misc_feature (1)..(263): Homolog of NCBI NO: 15238378 NR Description: pectinesterase; protein id: At5g04970.1
  misc_feature (1)..(263): Homolog of NCBI NO: 30681457 NR Description: pectinesterase, putative [Arabidopsis thaliana]
  misc_feature (1)..(263): Homolog of NCBI NO: 6630558 NR Description: putative pectinesterase [Arabidopsis thaliana]
MLIGDGIKKTIITGNHNVVDGWTTYNCSSFAVVGERFMAVDVTFRNTAGPEKHQAVALRNNAEGSSFYRCSFEGYQDTLYVHSLRQFYRECDIYGTVDFIFGNAAAIFQNCNIYARKPMAKQKNAITAHGRLDPNQNTGISIINCTIKAAPDLAADPKSAMTFLGRPWKPYSRTVFMQSYISDIVQPVGWLEWNGTIGLDTIYYGEYSNFGPGANTNQRVQWLGYNLLNLAEAMNFTVYNFTMGDTWLPQTDIPFYGGLLSKE

SEQ ID NO: 39379 - protein, 226 aa, Arabidopsis thaliana
  peptide (1)..(226): Ceres Seq. ID no. 12328586
  misc_feature (1)..(208): Pfam Name: Pectinesterase Pfam Description: Pectinesterase
  misc_feature (1)..(224): Homolog of NCBI NO: 18407388 NR Description: pectinesterase family
  misc_feature (1)..(222): Homolog of NCBI NO: 34894528 NR Description: putative pectinesterase [Oryza sativa (japonica
  misc_feature (1)..(224): Homolog of NCBI NO: 18379010 NR Description: pectinesterase family; protein id: At1g02810.1
  misc_feature (1)..(224): Homolog of NCBI NO: 19424045 NR Description: unknown protein [Arabidopsis thaliana]
  misc_feature (1)..(224): Homolog of NCBI NO: 18411914 NR Description: hypothetical protein
  misc_feature (1)..(226): Homolog of NCBI NO: 18398974 NR Description: putative pectinesterase [Arabidopsis thaliana]
  misc_feature (1)..(226): Homolog of NCBI NO: 21618192 NR Description: putative pectinesterase [Arabidopsis thaliana]
  misc_feature (1)..(226): Homolog of NCBI NO: 15238378 NR Description: pectinesterase; protein id: At5g04970.1
  misc_feature (1)..(226): Homolog of NCBI NO: 30681457 NR Description: pectinesterase, putative [Arabidopsis thaliana]
  misc_feature (1)..(226): Homolog of NCBI NO: 6630558 NR Description: putative pectinesterase [Arabidopsis thaliana]
MAVDVTFRNTAGPEKHQAVALRNNAEGSSFYRCSFEGYQDTLYVHSLRQFYRECDIYGTVDFIFGNAAAIFQNCNIYARKPMAKQKNAITAHGRLDPNQNTGISIINCTIKAAPDLAADPKSAMTFLGRPWKPYSRTVFMQSYISDIVQPVGWLEWNGTIGLDTIYYGEYSNFGPGANTNQRVQWLGYNLLNLAEAMNFTVYNFTMGDTWLPQTDIPFYGGLLSKE

SEQ ID NO: 39380 - protein, 145 aa, Arabidopsis thaliana
  peptide (1)..(145): Ceres Seq. ID no. 12328587
  misc_feature (1)..(127): Pfam Name: Pectinesterase Pfam Description: Pectinesterase
  misc_feature (1)..(143): Homolog of NCBI NO: 18407388 NR Description: pectinesterase family
  misc_feature (1)..(141): Homolog of NCBI NO: 34894528 NR Description: putative pectinesterase [Oryza sativa (japonica
  misc_feature (1)..(143): Homolog of NCBI NO: 18379010 NR Description: pectinesterase family; protein id: At1g02810.1
  misc_feature (1)..(143): Homolog of NCBI NO: 19424045 NR Description: unknown protein [Arabidopsis thaliana]
  misc_feature (1)..(143): Homolog of NCBI NO: 18411914 NR Description: hypothetical protein
  misc_feature (1)..(145): Homolog of NCBI NO: 18398974 NR Description: putative pectinesterase [Arabidopsis thaliana]
  misc_feature (1)..(145): Homolog of NCBI NO: 21618192 NR Description: putative pectinesterase [Arabidopsis thaliana]
  misc_feature (1)..(145): Homolog of NCBI NO: 15238378 NR Description: pectinesterase; protein id: At5g04970.1
  misc_feature (1)..(145): Homolog of NCBI NO: 30681457 NR Description: pectinesterase, putative [Arabidopsis thaliana]
  misc_feature (1)..(145): Homolog of NCBI NO: 6630558 NR Description: putative pectinesterase [Arabidopsis thaliana]
MAKQKNAITAHGRLDPNQNTGISIINCTIKAAPDLAADPKSAMTFLGRPWKPYSRTVFMQSYISDIVQPVGWLEWNGTIGLDTIYYGEYSNFGPGANTNQRVQWLGYNLLNLAEAMNFTVYNFTMGDTWLPQTDIPFYGGLLSKE

SEQ ID NO: 39381 - DNA, 1045 bp, Arabidopsis thaliana
  misc_feature (1)..(1045): Ceres Seq. ID no. 12339663
  misc_feature: MA Experiment ID: 108434 Result: Down-regulated in Transcription
  misc_feature: MA Experiment 108434 PARAMETER Experiment Name: At_Root_Tips_cDNA_P Parameter: Tissue Value: Root Tips
  misc_feature: MA Experiment ID: 108573 Result: Up-regulated in Transcription
  misc_feature: MA Experiment 108573 PARAMETER Experiment Name: At_Drought_cDNA_P Parameter: Timepoint (hr) Value: 6
  misc_feature: MA Experiment 108573 PARAMETER Experiment Name: At_Drought_cDNA_P Parameter: Tissue Value: Aerial
  misc_feature: MA Experiment 108573 PARAMETER Experiment Name: At_Drought_cDNA_P Parameter: Treatment Value: Drought vs. No Drought
  misc_feature: MA Experiment ID: 108585 Result: Up-regulated in Transcription
  misc_feature: MA Experiment 108585 PARAMETER Experiment Name: At_5mM_NaNP_cDNA_P Parameter: Timepoint (hr) Value: 6
  misc_feature: MA Experiment 108585 PARAMETER Experiment Name: At_5mM_NaNP_cDNA_P Parameter: Tissue Value: Aerial
  misc_feature: MA Experiment 108585 PARAMETER Experiment Name: At_5mM_NaNP_cDNA_P Parameter: Treatment Value: null
  misc_feature: MA Experiment ID: 108668 Result: Up-regulated in Transcription
  misc_feature: MA Experiment 108668 PARAMETER Experiment Name: At_2mM_SA_cDNA_P Parameter: Plant Line Value: WS
  misc_feature: MA Experiment 108668 PARAMETER Experiment Name: At_2mM_SA_cDNA_P Parameter: Timepoint (hr) Value: 6
  misc_feature: MA Experiment 108668 PARAMETER Experiment Name: At_2mM_SA_cDNA_P Parameter: Treatment Value: 2mM SA vs. No Treatment
  misc_feature: MA Experiment ID: 20000112 Result: Up-regulated in Transcription
  misc_feature: MA Experiment 20000112 PARAMETER Experiment Name: At_42deg_Heat_cDNA_P Parameter: Temperature (deg C) Value: 42 vs. 22
  misc_feature: MA Experiment 20000112 PARAMETER Experiment Name: At_42deg_Heat_cDNA_P Parameter: Timepoint (hr) Value: 2
  misc_feature: MA Experiment 20000112 PARAMETER Experiment Name: At_42deg_Heat_cDNA_P Parameter: Tissue Value: Aerial
  misc_feature: MA Experiment ID: 20000182 Result: Up-regulated in Transcription
  misc_feature: MA Experiment 20000182 PARAMETER Experiment Name: At_2mM_SA_P Parameter: Age (day) Value: 14
  misc_feature: MA Experiment 20000182 PARAMETER Experiment Name: At_2mM_SA_P Parameter: Organism Value: A. thaliana
  misc_feature: MA Experiment 20000182 PARAMETER Experiment Name: At_2mM_SA_P Parameter: Plant Line Value: WS
  misc_feature: MA Experiment 20000182 PARAMETER Experiment Name: At_2mM_SA_P Parameter: Timepoint (hr) Value: 6
  misc_feature: MA Experiment 20000182 PARAMETER Experiment Name: At_2mM_SA_P Parameter: Tissue Value: Aerial
  misc_feature: MA Experiment 20000182 PARAMETER Experiment Name: At_2mM_SA_P Parameter: Treatment Value: 2mM SA vs. No Treatment
  misc_feature: MA Experiment ID: 20000224 Result: Down-regulated in Transcription
  misc_feature: MA Experiment ID: 20001911 Result: Up-regulated in Transcription
  misc_feature: MA Experiment 20001911 PARAMETER Experiment Name: At_Drought_Reproduction_P Parameter: Age (day) Value: 40
  misc_feature: MA Experiment 20001911 PARAMETER Experiment Name: At_Drought_Reproduction_P Parameter: Organism Value: A. thaliana
  misc_feature: MA Experiment 20001911 PARAMETER Experiment Name: At_Drought_Reproduction_P Parameter: Plant Line Value: WS
  misc_feature: MA Experiment 20001911 PARAMETER Experiment Name: At_Drought_Reproduction_P Parameter: Timepoint (day) Value: 10
  misc_feature: MA Experiment 20001911 PARAMETER Experiment Name: At_Drought_Reproduction_P Parameter: Tissue Value: Flowers
  misc_feature: MA Experiment 20001911 PARAMETER Experiment Name: At_Drought_Reproduction_P Parameter: Treatment Value: Drought vs. No Drought
aataaaaatttgtttctttcttctctgtttttttttgctttcgtcttcaagagagagagagagagagatacaaagagagaaatttggttgtttgttgacggaagcttcttcggtctctcttctccgtcttacgattgtcaacgcgtggttccatcttcaattttgtttctattttagcagaagtttctcgagcttcaaatactgtttcagatcaatcaatcagtcaatcatggctagctctggaaacaagaacatcaacgccaaattggtattactaggagatgttggagctggaaaatcaagtcttgtgctacggtttgtgaaagatcagtttgttgaatttcaggaatcaaccattggtgcagcttttttctctcaaacattggctgtgaatgatgcgactgtgaagtttgagatatgggatacagctggtcaggaacgataccacagtttggctccaatgtactacaggggtgcagctgctgctattattgtctttgacattactaatcaagcctcatttgagagggcgaagaaatgggttcaggaactgcaggcacaaggtaaccctaatatggtgatggctcttgctggaaacaaagctgatttattagacgcaaggaaggtgtctgcagaggaggcagagatatatgctcaagagaacagccttttctttatggaaacctcagcgaagaccgcaacaaatgtcaaagacatattctacgaaatagcgaaaaggctaccacgtgtacagccagctgaaaacccgacaggaatggttctcccaaacgggccaggggctacggcagtgagttcatcgtgttgtgcttagattcgtacctgaagagagatctcatttggttagtcacatagtagagaacatctggactttcatgtgtttgcttcttcttcgtctttgttactttactttgcttgcattgacaacaacaacagtgtatatcatgatgatacttattctgcctttgtgaaatctgaagatatttgtatttggagagatttatatatatatatctcttttgtaaag

SEQ ID NO: 39382 - protein, 276 aa, Arabidopsis thaliana
  peptide (1)..(276): Ceres Seq. ID no. 12339664
  misc_feature (88)..(249): Pfam Name: Ras family Pfam Description: Ras family
  misc_feature (77)..(275): Homolog of NCBI NO: 266879 NR Description: RAS-RELATED PROTEIN RAB5
  misc_feature (77)..(276): Homolog of NCBI NO: 6010031 NR Description: GTP binding protein [Cichorium intybus x
  misc_feature (77)..(276): Homolog of NCBI NO: 6010033 NR Description: GTP binding protein [Cichorium intybus x
  misc_feature (77)..(276): Homolog of NCBI NO: 1076545 NR Description: guanine nucleotide regulatory protein - fava bean
  misc_feature (77)..(276): Homolog of NCBI NO: 12311682 NR Description: GTP binding protein [Cichorium intybus x
  misc_feature (77)..(276): Homolog of NCBI NO: 12311684 NR Description: GTP binding protein [Cichorium intybus x
  misc_feature (77)..(276): Homolog of NCBI NO: 1370178 NR Description: RAB5A [Lotus japonicus]
  misc_feature (77)..(276): Homolog of NCBI NO: 421941 NR Description: GTP-binding protein, ras-related - common tobacco
  misc_feature (77)..(276): Homolog of NCBI NO: 15235113 NR Description: GTP-binding protein, putative
  misc_feature (77)..(276): Homolog of NCBI NO: 15242309 NR Description: ras-related GTP-binding protein RHA1 (sp|P31582)
IKICFFLLCFFLLSSSREREREIQREKFGCLLTEASSVSLLRLTIVNAWFHLQFCFYFSRSFSSFKYCFRSINQSIMASSGNKNINAKLVLLGDVGAGKSSLVLRFVKDQFVEFQESTIGAAFFSQTLAVNDATVKFEIWDTAGQERYHSLAPMYYRGAAAAIIVFDITNQASFERAKKWVQELQAQGNPNMVMALAGNKADLLDARKVSAEEAEIYAQENSLFFMETSAKTATNVKDIFYEIAKRLPRVQPAENPTGMVLPNGPGATAVSSSCCA

SEQ ID NO: 39383 - protein, 200 aa, Arabidopsis thaliana; identical to SEQ ID NO: 24213
  peptide (1)..(200): Ceres Seq. ID no. 12339665
  misc_feature (12)..(173): Pfam Name: Ras family Pfam Description: Ras family
  misc_feature (1)..(199): Homolog of NCBI NO: 266879 NR Description: RAS-RELATED PROTEIN RAB5
  misc_feature (1)..(200): Homolog of NCBI NO: 6010031 NR Description: GTP binding protein [Cichorium intybus x
  misc_feature (1)..(200): Homolog of NCBI NO: 6010033 NR Description: GTP binding protein [Cichorium intybus x
  misc_feature (1)..(200): Homolog of NCBI NO: 1076545 NR Description: guanine nucleotide regulatory protein - fava bean
  misc_feature (1)..(200): Homolog of NCBI NO: 12311682 NR Description: GTP binding protein [Cichorium intybus x
  misc_feature (1)..(200): Homolog of NCBI NO: 12311684 NR Description: GTP binding protein [Cichorium intybus x
  misc_feature (1)..(200): Homolog of NCBI NO: 1370178 NR Description: RAB5A [Lotus japonicus]
  misc_feature (1)..(200): Homolog of NCBI NO: 421941 NR Description: GTP-binding protein, ras-related - common tobacco
  misc_feature (1)..(200): Homolog of NCBI NO: 15235113 NR Description: GTP-binding protein, putative
  misc_feature (1)..(200): Homolog of NCBI NO: 15242309 NR Description: ras-related GTP-binding protein RHA1 (sp|P31582)

SEQ ID NO: 39384 - DNA, 1309 bp, Arabidopsis thaliana
  misc_feature (1)..(1309): Ceres Seq. ID no. 13501404
  misc_feature: MA Experiment ID: 108435 Result: Down-regulated in Transcription
  misc_feature: MA Experiment 108435 PARAMETER Experiment Name: At_stm_Mutants_cDNA_P Parameter: Plant Line Value: wt Landsburg vs stm
  misc_feature: MA Experiment 108435 PARAMETER Experiment Name: At_stm_Mutants_cDNA_P Parameter: Tissue Value: Shoot Apical Meristem Region
  misc_feature: MA Experiment ID: 108464 Result: Up-regulated in Transcription
  misc_feature: MA Experiment 108464 PARAMETER Experiment Name: At_Germinating_Seeds_cDNA_P Parameter: Age (day) Value: 4 vs. 0
  misc_feature: MA Experiment 108464 PARAMETER Experiment Name: At_Germinating_Seeds_cDNA_P Parameter: Tissue Value: Germinating Seeds
  misc_feature: MA Experiment ID: 108595 Result: Down-regulated in Transcription
  misc_feature: MA Experiment 108595 PARAMETER Experiment Name: At_Ler-pi_Ovule_cDNA_P Parameter: Plant Line Value: null
  misc_feature: MA Experiment ID: 108668 Result: Down-regulated in Transcription
  misc_feature: MA Experiment 108668 PARAMETER Experiment Name: At_2mM_SA_cDNA_P Parameter: Plant Line Value: WS
  misc_feature: MA Experiment 108668 PARAMETER Experiment Name: At_2mM_SA_cDNA_P Parameter: Timepoint (hr) Value: 6
  misc_feature: MA Experiment 108668 PARAMETER Experiment Name: At_2mM_SA_cDNA_P Parameter: Treatment Value: 2mM SA vs. No Treatment
  misc_feature: MA Experiment ID: 20000185 Result: Down-regulated in Transcription
  misc_feature: MA Experiment 20000185 PARAMETER Experiment Name: At_Roots__P Parameter: Age (day) Value: 7 vs. 21
  misc_feature: MA Experiment 20000185 PARAMETER Experiment Name: At_Roots__P Parameter: Organism Value: A. thaliana
  misc_feature: MA Experiment 20000185 PARAMETER Experiment Name: At_Roots__P Parameter: Tissue Value: Roots vs. Whole Plant
  misc_feature: MA Experiment ID: 20000224 Result: Up-regulated in Transcription
  misc_feature: MA Experiment ID: 20000265 Result: Down-regulated in Transcription
  misc_feature: MA Experiment 20000265 PARAMETER Experiment Name: At_Open_Flower_P Parameter: Age (day) Value: 21
  misc_feature: MA Experiment 20000265 PARAMETER Experiment Name: At_Open_Flower_P Parameter: Plant Line Value: WS
  misc_feature: MA Experiment 20000265 PARAMETER Experiment Name: At_Open_Flower_P Parameter: Tissue Value: Closed Flower vs. Whole Plant
  misc_feature: MA Experiment ID: 20000439 Result: Down-regulated in Transcription
  misc_feature: MA Experiment 20000439 PARAMETER Experiment Name: At_Roots__P Parameter: Age (day) Value: 14 vs. 21
  misc_feature: MA Experiment 20000439 PARAMETER Experiment Name: At_Roots__P Parameter: Organism Value: A. thaliana
  misc_feature: MA Experiment 20000439 PARAMETER Experiment Name: At_Roots__P Parameter: Tissue Value: Roots vs. Whole Plant
  misc_feature: MA Experiment ID: 20001555 Result: Down-regulated in Transcription
  misc_feature: MA Experiment 20001555 PARAMETER Experiment Name: At_Drought_Soil_Dry_P Parameter: Age (day) Value: 24
  misc_feature: MA Experiment 20001555 PARAMETER Experiment Name: At_Drought_Soil_Dry_P Parameter: Organism Value: A. thaliana
  misc_feature: MA Experiment 20001555 PARAMETER Experiment Name: At_Drought_Soil_Dry_P Parameter: Plant Line Value: WS
  misc_feature: MA Experiment 20001555 PARAMETER Experiment Name: At_Drought_Soil_Dry_P Parameter: Post Timepoint (hr) Value: None
  misc_feature: MA Experiment 20001555 PARAMETER Experiment Name: At_Drought_Soil_Dry_P Parameter: Post-Treatment Value: None
  misc_feature: MA Experiment 20001555 PARAMETER Experiment Name: At_Drought_Soil_Dry_P Parameter: Timepoint (day) Value: 10
  misc_feature: MA Experiment 20001555 PARAMETER Experiment Name: At_Drought_Soil_Dry_P Parameter: Treatment Value: Drought vs. No Drought
  misc_feature: MA Experiment ID: 20001556 Result: Down-regulated in Transcription
  misc_feature: MA Experiment 20001556 PARAMETER Experiment Name: At_Drought_Soil_Dry_P Parameter: Age (day) Value: 26
  misc_feature: MA Experiment 20001556 PARAMETER Experiment Name: At_Drought_Soil_Dry_P Parameter: Organism Value: A. thaliana
  misc_feature: MA Experiment 20001556 PARAMETER Experiment Name: At_Drought_Soil_Dry_P Parameter: Plant Line Value: WS
  misc_feature: MA Experiment 20001556 PARAMETER Experiment Name: At_Drought_Soil_Dry_P Parameter: Post Timepoint (hr) Value: None
  misc_feature: MA Experiment 20001556 PARAMETER Experiment Name: At_Drought_Soil_Dry_P Parameter: Post-Treatment Value: None
  misc_feature: MA Experiment 20001556 PARAMETER Experiment Name: At_Drought_Soil_Dry_P Parameter: Timepoint (day) Value: 12
  misc_feature: MA Experiment 20001556 PARAMETER Experiment Name: At_Drought_Soil_Dry_P Parameter: Treatment Value: Drought vs. No Drought
  misc_feature: MA Experiment ID: 20001558 Result: Down-regulated in Transcription
  misc_feature: MA Experiment 20001558 PARAMETER Experiment Name: At_Drought_Soil_Dry_P Parameter: Age (day) Value: 27
  misc_feature: MA Experiment 20001558 PARAMETER Experiment Name: At_Drought_Soil_Dry_P Parameter: Organism Value: A. thaliana
  misc_feature: MA Experiment 20001558 PARAMETER Experiment Name: At_Drought_Soil_Dry_P Parameter: Plant Line Value: WS
  misc_feature: MA Experiment 20001558 PARAMETER Experiment Name: At_Drought_Soil_Dry_P Parameter: Post Timepoint (hr) Value: 6
  misc_feature: MA Experiment 20001558 PARAMETER Experiment Name: At_Drought_Soil_Dry_P Parameter: Post-Treatment Value: Re-Water vs. No Drought
  misc_feature: MA Experiment 20001558 PARAMETER Experiment Name: At_Drought_Soil_Dry_P Parameter: Timepoint (day) Value: 13
  misc_feature: MA Experiment 20001558 PARAMETER Experiment Name: At_Drought_Soil_Dry_P Parameter: Treatment Value: Drought vs. No Drought
  misc_feature: MA Experiment ID: 20001559 Result: Down-regulated in Transcription
  misc_feature: MA Experiment 20001559 PARAMETER Experiment Name: At_Drought_Soil_Dry_P Parameter: Age (day) Value: 28
  misc_feature: MA Experiment 20001559 PARAMETER Experiment Name: At_Drought_Soil_Dry_P Parameter: Organism Value: A. thaliana
  misc_feature: MA Experiment 20001559 PARAMETER Experiment Name: At_Drought_Soil_Dry_P Parameter: Plant Line Value: WS
  misc_feature: MA Experiment 20001559 PARAMETER Experiment Name: At_Drought_Soil_Dry_P Parameter: Post Timepoint (hr) Value: 29
  misc_feature: MA Experiment 20001559 PARAMETER Experiment Name: At_Drought_Soil_Dry_P Parameter: Post-Treatment Value: Re-Water vs. No Drought
  misc_feature: MA Experiment 20001559 PARAMETER Experiment Name: At_Drought_Soil_Dry_P Parameter: Timepoint (day) Value: 14
  misc_feature: MA Experiment 20001559 PARAMETER Experiment Name: At_Drought_Soil_Dry_P Parameter: Treatment Value: Drought vs. No Drought
  misc_feature: MA Experiment ID: 20001560 Result: Down-regulated in Transcription
  misc_feature: MA Experiment 20001560 PARAMETER Experiment Name: At_Drought_Soil_Dry_P Parameter: Age (day) Value: 28
  misc_feature: MA Experiment 20001560 PARAMETER Experiment Name: At_Drought_Soil_Dry_P Parameter: Organism Value: A. thaliana
  misc_feature: MA Experiment 20001560 PARAMETER Experiment Name: At_Drought_Soil_Dry_P Parameter: Plant Line Value: WS
  misc_feature: MA Experiment 20001560 PARAMETER Experiment Name: At_Drought_Soil_Dry_P Parameter: Post Timepoint (hr) Value: None
  misc_feature: MA Experiment 20001560 PARAMETER Experiment Name: At_Drought_Soil_Dry_P Parameter: Post-Treatment Value: None
  misc_feature: MA Experiment 20001560 PARAMETER Experiment Name: At_Drought_Soil_Dry_P Parameter: Timepoint (day) Value: 14
  misc_feature: MA Experiment 20001560 PARAMETER Experiment Name: At_Drought_Soil_Dry_P Parameter: Treatment Value: Drought vs. No Drought
aaatatttaaggaaacaaataaaaaacaaaaagattcatcttccaatacccaacgcatattacgcagccaccacacagcggagagagagagagaagaaacagaaacagaaacagagctcgagctcgagacgctcaatattaatggcggccgcatcagcacgagctttcttcatgctctctcgtgtaactgacctttcaaagaaaaagctaatccttcaccaaccaccaccgtcgtcatctcctcaccggctaccttatgctccgaatcgtgcggtgtcttcctccgctgtaatcagctgtctcagcggtggtggtgtttcctccgacgattcgtatgtatctactcgtcggtctaagttagatcgaggtttcgctgtgatcgcgaatttggtgaatcggatccagccgcttgatacgtctgttatctctaaaggcttatctgattcagctaaggattcgatgaaacagacgatttcttctatgcttggtcttcttccttccgatcaattttccgtttccgttactatctccgaacagcctctttatcgtctccttatttcttccatcatcaccgggtatacattgtggaatgcggagtatcgtgtatcactgaggaggaattttgatataccgattgatcctagaaaggaggaggaggatcaatcttcgaaagacaatgttagatttggttcagagaagggaatgagtgaggatttagggaattgtgttgaggaatttgagagactgagtcctcaggtgtttggagacttgtcacctgaagcgttgagttatattcagcttttgcagtctgagctatcttccatgaaagaggagctagattcacaaaagaagaaagctttgaggatagaatgtgagaaaggaaacaggaatgatttgttggattatttgcgttctttagatcccgagatggtgactgagttatctcaactgtcttcaccggaagtggaagagattgtgaaccagcttgtccaaaacgtattagagaggctcttcgaagaccagactacttcaaatttcatgcaaaatcctggcataaggactacagaaggtggtgatggaactggtagaaaggtggacacatccagggattaccttgcaaagctccttttctggtgcatgctattgggacatcatttaagaggtttggagaatagattacatctcagctgtgttgttgggttgctgtaatatcagagaatcataaaaaggagacaagataaaaaagaaacacaaatgtatattcttctcccccattttgatttctttaatctaagcgttaagttattat

SEQ ID NO: 39385 - protein, 402 aa, Arabidopsis thaliana
  peptide (1)..(402): Ceres Seq. ID no. 13501405
  misc_feature (75)..(337): Homolog of NCBI NO: 40538958 NR Description: expressed protein [Oryza sativa (japonica
  misc_feature (48)..(402): Homolog of NCBI NO: 21536629 NR Description: seed maturation-like protein [Arabidopsis
  misc_feature (48)..(402): Homolog of NCBI NO: 15242177 NR Description: seed maturation -related protein [Arabidopsis
  misc_feature (75)..(337): Homolog of NCBI NO: 40538958 NR Description: expressed protein [Oryza sativa (japonica
  misc_feature (48)..(402): Homolog of NCBI NO: 21536629 NR Description: seed maturation-like protein [Arabidopsis
  misc_feature (48)..(402): Homolog of NCBI NO: 15242177 NR Description: seed maturation -related protein [Arabidopsis
KYLRKQIKNKKIHLPIPNAYYAATTQRREREKKQKQKQSSSSRRSILMAAASARAFFMLSRVTDLSKKKLILHQPPPSSSPHRLPYAPNRAVSSSAVISCLSGGGVSSDDSYVSTRRSKLDRGFAVIANLVNRIQPLDTSVISKGLSDSAKDSMKQTISSMLGLLPSDQFSVSVTISEQPLYRLLISSIITGYTLWNAEYRVSLRRNFDIPIDPRKEEEDQSSKDNVRFGSEKGMSEDLGNCVEEFERLSPQVFGDLSPEALSYIQLLQSELSSMKEELDSQKKKALRIECEKGNRNDLLDYLRSLDPEMVTELSQLSSPEVEEIVNQLVQNVLERLFEDQTTSNFMQNPGIRTTEGGDGTGRKVDTSRDYLAKLLFWCMLLGHHLRGLENRLHLSCVVGLL

SEQ ID NO: 39386 - protein, 355 aa, Arabidopsis thaliana
  peptide (1)..(355): Ceres Seq. ID no. 13501406
  misc_feature (28)..(290): Homolog of NCBI NO: 40538958 NR Description: expressed protein [Oryza sativa (japonica
  misc_feature (1)..(355): Homolog of NCBI NO: 21536629 NR Description: seed maturation-like protein [Arabidopsis
  misc_feature (1)..(355): Homolog of NCBI NO: 15242177 NR Description: seed maturation -related protein [Arabidopsis
  misc_feature (28)..(290): Homolog of NCBI NO: 40538958 NR Description: expressed protein [Oryza sativa (japonica
  misc_feature (1)..(355): Homolog of NCBI NO: 21536629 NR Description: seed maturation-like protein [Arabidopsis
  misc_feature (1)..(355): Homolog of NCBI NO: 15242177 NR Description: seed maturation -related protein [Arabidopsis
MAAASARAFFMLSRVTDLSKKKLILHQPPPSSSPHRLPYAPNRAVSSSAVISCLSGGGVSSDDSYVSTRRSKLDRGFAVIANLVNRIQPLDTSVISKGLSDSAKDSMKQTISSMLGLLPSDQFSVSVTISEQPLYRLLISSIITGYTLWNAEYRVSLRRNFDIPIDPRKEEEDQSSKDNVRFGSEKGMSEDLGNCVEEFERLSPQVFGDLSPEALSYIQLLQSELSSMKEELDSQKKKALRIECEKGNRNDLLDYLRSLDPEMVTELSQLSSPEVEEIVNQLVQNVLERLFEDQTTSNFMQNPGIRTTEGGDGTGRKVDTSRDYLAKLLFWCMLLGHHLRGLENRLHLSCVVGLL

SEQ ID NO: 39387 - protein, 345 aa, Arabidopsis thaliana
  peptide (1)..(345): Ceres Seq. ID no. 13501407
  misc_feature (18)..(280): Homolog of NCBI NO: 40538958 NR Description: expressed protein [Oryza sativa (japonica
  misc_feature (1)..(345): Homolog of NCBI NO: 21536629 NR Description: seed maturation-like protein [Arabidopsis
  misc_feature (1)..(345): Homolog of NCBI NO: 15242177 NR Description: seed maturation -related protein [Arabidopsis
  misc_feature (18)..(280): Homolog of NCBI NO: 40538958 NR Description: expressed protein [Oryza sativa (japonica
  misc_feature (1)..(345): Homolog of NCBI NO: 21536629 NR Description: seed maturation-like protein [Arabidopsis
  misc_feature (1)..(345): Homolog of NCBI NO: 15242177 NR Description: seed maturation -related protein [Arabidopsis
MLSRVTDLSKKKLILHQPPPSSSPHRLPYAPNRAVSSSAVISCLSGGGVSSDDSYVSTRRSKLDRGFAVIANLVNRIQPLDTSVISKGLSDSAKDSMKQTISSMLGLLPSDQFSVSVTISEQPLYRLLISSIITGYTLWNAEYRVSLRRNFDIPIDPRKEEEDQSSKDNVRFGSEKGMSEDLGNCVEEFERLSPQVFGDLSPEALSYIQLLQSELSSMKEELDSQKKKALRIECEKGNRNDLLDYLRSLDPEMVTELSQLSSPEVEEIVNQLVQNVLERLFEDQTTSNFMQNPGIRTTEGGDGTGRKVDTSRDYLAKLLFWCMLLGHHLRGLENRLHLSCVVGLL

SEQ ID NO: 39388 - DNA, 1906 bp, Arabidopsis thaliana
  misc_feature (1)..(1906): Ceres Seq. ID no. 13489601
  misc_feature: MA Experiment ID: 108434 Result: Up-regulated in Transcription
  misc_feature: MA Experiment 108434 PARAMETER Experiment Name: At_Root_Tips_cDNA_P Parameter: Tissue Value: Root Tips
  misc_feature: MA Experiment ID: 108462 Result: Down-regulated in Transcription
  misc_feature: MA Experiment 108462 PARAMETER Experiment Name: At_Germinating_Seeds_cDNA_P Parameter: Age (day) Value: 2 vs. 0
  misc_feature: MA Experiment 108462 PARAMETER Experiment Name: At_Germinating_Seeds_cDNA_P Parameter: Tissue Value: Germinating Seeds
  misc_feature: MA Experiment ID: 108463 Result: Down-regulated in Transcription
  misc_feature: MA Experiment 108463 PARAMETER Experiment Name: At_Germinating_Seeds_cDNA_P Parameter: Age (day) Value: 3 vs. 0
  misc_feature: MA Experiment 108463 PARAMETER Experiment Name: At_Germinating_Seeds_cDNA_P Parameter: Tissue Value: Germinating Seeds
  misc_feature: MA Experiment ID: 108464 Result: Down-regulated in Transcription
  misc_feature: MA Experiment 108464 PARAMETER Experiment Name: At_Germinating_Seeds_cDNA_P Parameter: Age (day) Value: 4 vs. 0
  misc_feature: MA Experiment 108464 PARAMETER Experiment Name: At_Germinating_Seeds_cDNA_P Parameter: Tissue Value: Germinating Seeds
  misc_feature: MA Experiment ID: 108569 Result: Up-regulated in Transcription
  misc_feature: MA Experiment 108569 PARAMETER Experiment Name: At_0.001%_MeJA__cDNA_P Parameter: Timepoint (hr) Value: 6
  misc_feature: MA Experiment 108569 PARAMETER Experiment Name: At_0.001%_MeJA__cDNA_P Parameter: Tissue Value: Aerial
  misc_feature: MA Experiment 108569 PARAMETER Experiment Name: At_0.001%_MeJA__cDNA_P Parameter: Treatment Value: 0.001% MeJA vs. No Treatment
  misc_feature: MA Experiment ID: 108573 Result: Up-regulated in Transcription
  misc_feature: MA Experiment 108573 PARAMETER Experiment Name: At_Drought_cDNA_P Parameter: Timepoint (hr) Value: 6
  misc_feature: MA Experiment 108573 PARAMETER Experiment Name: At_Drought_cDNA_P Parameter: Tissue Value: Aerial
  misc_feature: MA Experiment 108573 PARAMETER Experiment Name: At_Drought_cDNA_P Parameter: Treatment Value: Drought vs. No Drought
  misc_feature: MA Experiment ID: 108576 Result: Down-regulated in Transcription
  misc_feature: MA Experiment 108576 PARAMETER Experiment Name: At_42deg_Heat_cDNA_P Parameter: Temperature (deg C) Value: 42 vs. 22
  misc_feature: MA Experiment 108576 PARAMETER Experiment Name: At_42deg_Heat_cDNA_P Parameter: Timepoint (hr) Value: 1
  misc_feature: MA Experiment 108576 PARAMETER Experiment Name: At_42deg_Heat_cDNA_P Parameter: Tissue Value: Aerial
  misc_feature: MA Experiment ID: 108595 Result: Down-regulated in Transcription
  misc_feature: MA Experiment 108595 PARAMETER Experiment Name: At_Ler-pi_Ovule_cDNA_P Parameter: Plant Line Value: null
  misc_feature: MA Experiment ID: 20000087 Result: Down-regulated in Transcription
  misc_feature: MA Experiment 20000087 PARAMETER Experiment Name: At_100uM_ABA_Mutants_cDNA_P Parameter: Plant Line Value: WS
  misc_feature: MA Experiment 20000087 PARAMETER Experiment Name: At_100uM_ABA_Mutants_cDNA_P Parameter: Timepoint (hr) Value: 6
  misc_feature: MA Experiment 20000087 PARAMETER Experiment Name: At_100uM_ABA_Mutants_cDNA_P Parameter: Tissue Value: Aerial
  misc_feature: MA Experiment 20000087 PARAMETER Experiment Name: At_100uM_ABA_Mutants_cDNA_P Parameter: Treatment Value: 100uM ABA vs. No Treatment
  misc_feature: MA Experiment ID: 20000327 Result: Down-regulated in Transcription
  misc_feature: MA Experiment 20000327 PARAMETER Experiment Name: At_42deg_Heat_Sub_P Parameter: Age (day) Value: 14
  misc_feature: MA Experiment 20000327 PARAMETER Experiment Name: At_42deg_Heat_Sub_P Parameter: Organism Value: A. thaliana
  misc_feature: MA Experiment 20000327 PARAMETER Experiment Name: At_42deg_Heat_Sub_P Parameter: Plant Line Value: WS
  misc_feature: MA Experiment 20000327 PARAMETER Experiment Name: At_42deg_Heat_Sub_P Parameter: Temperature (deg C) Value: 42 vs. 22
  misc_feature: MA Experiment 20000327 PARAMETER Experiment Name: At_42deg_Heat_Sub_P Parameter: Timepoint (hr) Value: 1
  misc_feature: MA Experiment 20000327 PARAMETER Experiment Name: At_42deg_Heat_Sub_P Parameter: Tissue Value: Aerial
  misc_feature: MA Experiment ID: 20000355 Result: Down-regulated in Transcription
  misc_feature: MA Experiment 20000355 PARAMETER Experiment Name: At_Siliques_Sub_P Parameter: Age (day) Value: 21
  misc_feature: MA Experiment 20000355 PARAMETER Experiment Name: At_Siliques_Sub_P Parameter: Organism Value: A. thaliana
  misc_feature: MA Experiment 20000355 PARAMETER Experiment Name: At_Siliques_Sub_P Parameter: Plant Line Value: WS
  misc_feature: MA Experiment 20000355 PARAMETER Experiment Name: At_Siliques_Sub_P Parameter: Tissue Value: Less Than 5mm Siliques vs. Whole Plant
atcttcttcgcaaatctcaacaatggtgtttgaagcattcgaagtcggcacagtcccattcaattccgatggttggggaccaccagatgcttccgacacttcctccaccagcgtcgcggcggcgaatctcctcccaaacgtccccttcgcttccttctcacgatccgaaaaactcggacgcgttgctgattggactcgagctctctcaaatccatcagctcgtcctcacaccggatccaaatcagatccatcagcgatcttcgatttctcagcttttgcagtagatgaaggatttggtctaacaaactcaggtggaaacgccgacgaagacgccgctttccgattagtcgacggaaaaccaccgccgcgtcctaaattcggacctaaatggagattcaatcaataccataaccgaaatcagcttcctcaacgtcgtgatgaagaagttgaagctaagaaacgtgaagctgagaaagatcgagctcgtcgtgatcgtctctacaataacaatcgtaacaatattcatcagcaacgccgtgaagccgccgcgtttaaatcatcagttgatattcaaccggaatggaatatgcttgagcagattccgttttcgactttctctaagctttcgtttacagtttctgaacctgaagatcttcttctttgtggtggacttgagtcttatgatcggagttttgatcgtattactcctaaagctgatcgtagacttgagcgtttcaagaacagaagctttaaggttactacaagtgatgatcttgtgatcagacgtcttgctaaagaagataaagctactgtttttgctactgatgctattctagctgctcttatgtgtgctcctagatcggtttattcatgggatcttgtgattcaacgtgttgggaataagcttttctttgataagagagatgggtcaccgcttgatttgttatctgttcatgagacttctcaagagcctttgcctgagggtaaagatgatattaactctgctcattctctaggtctggaggctgcttatattaatcagaattttgctcagcaggttttggttaagaatgggaaaagggaaacttttgatgagccaattcctaatgttaatgaaggtgaagagaatgcttctattgcttataggtataggagatggaagcttgatgatagtatgtatctagttgctaggtgtgagttacagagcactgttgatttgaataaccagagatcgtttttaactttgaatgctcttaacgagtttgatcctaagtactctggtgttgattggagacagaagcttgagactcagagaggtgcggttttagctaatgagttgaagaacaatggtaataagttagctaaatggactgcgcaggctctcttggctaatgcggatatgatgaagattgggtttgtttcgagggttcatcctcgtgatcattttaaccatgttatattatcggttttggggtataagccgaaagatttcgctgggcagatcaatctgaacactaacaatatgtggggaattgtgaagtcgattgttgatctgtgtatgaagttaagtgaaggaaagtatgttctagtgaaggatccatcgaagcctcaagttaggatttacgaagttccggctgatgcatttgacaatgattatgtggaggagccactccctgaagatgaacaggttcagccacctgaggagaacactgatgcaggagcagagactaatggggtttcctctactaatgtagctgtagaggataagaaatccgaagttgaagcctgattttgatgatatgggtatatttcaagtcgtgttgttttgagttacttttaaaaaatgttcgaaagcttgttcactttttcatagactatttatgttccaaaatgttggttcatgcct

SEQ ID NO: 39389 - protein, 595 aa, Arabidopsis thaliana
  peptide (1)..(595): Ceres Seq. ID no. 13489602
  misc_feature (10)..(561): Pfam Name: Eukaryotic translation initiation factor 3 Pfam Description: Eukaryotic translation initiation factor 3
  misc_feature (2)..(564): Homolog of NCBI NO: 24649360 NR Description: Eukaryotic initiation factor 3 p66 subunit
  misc_feature (13)..(568): Homolog of NCBI NO: 34866902 NR Description: similar to eukaryotic translation initiation
  misc_feature (13)..(570): Homolog of NCBI NO: 38174024 NR Description: Unknown (protein for MGC:75703) [Silurana
  misc_feature (13)..(568): Homolog of NCBI NO: 4503523 NR Description: eukaryotic translation initiation factor 3
  misc_feature (13)..(567): Homolog of NCBI NO: 27882463 NR Description: Similar to eukaryotic translation initiation
  misc_feature (13)..(569): Homolog of NCBI NO: 31418925 NR Description: Unknown (protein for MGC:64097) [Danio rerio]
  misc_feature (13)..(595): Homolog of NCBI NO: 31207329 NR Description: ENSANGP00000015368 [Anopheles gambiae]
  misc_feature (177)..(595): Homolog of NCBI NO: 12407755 NR Description: initiation factor 3d [Arabidopsis thaliana]
  misc_feature (8)..(595): Homolog of NCBI NO: 17528988 NR Description: putative translation initiation factor eIF3
  misc_feature (8)..(595): Homolog of NCBI NO: 15233469 NR Description: translation initiation factor eIF3 - like protein
SSSQISTMVFEAFEVGTVPFNSDGWGPPDASDTSSTSVAAANLLPNVPFASFSRSEKLGRVADWTRALSNPSARPHTGSKSDPSAIFDFSAFAVDEGFGLTNSGGNADEDAAFRLVDGKPPPRPKFGPKWRFNQYHNRNQLPQRRDEEVEAKKREAEKDRARRDRLYNNNRNNIHQQRREAAAFKSSVDIQPEWNMLEQIPFSTFSKLSFTVSEPEDLLLCGGLESYDRSFDRITPKADRRLERFKNRSFKVTTSDDLVIRRLAKEDKATVFATDAILAALMCAPRSVYSWDLVIQRVGNKLFFDKRDGSPLDLLSVHETSQEPLPEGKDDINSAHSLGLEAAYINQNFAQQVLVKNGKRETFDEPIPNVNEGEENASIAYRYRRWKLDDSMYLVARCELQSTVDLNNQRSFLTLNALNEFDPKYSGVDWRQKLETQRGAVLANELKNNGNKLAKWTAQALLANADMMKIGFVSRVHPRDHFNHVILSVLGYKPKDFAGQINLNTNNMWGIVKSIVDLCMKLSEGKYVLVKDPSKPQVRIYEVPADAFDNDYVEEPLPEDEQVQPPEENTDAGAETNGVSSTNVAVEDKKSEVEA

SEQ ID NO: 39390 - protein, 588 aa, Arabidopsis thaliana
  peptide (1)..(588): Ceres Seq. ID no. 13489603
  misc_feature (3)..(554): Pfam Name: Eukaryotic translation initiation factor 3 Pfam Description: Eukaryotic translation initiation factor 3
  misc_feature (1)..(557): Homolog of NCBI NO: 24649360 NR Description: Eukaryotic initiation factor 3 p66 subunit
  misc_feature (6)..(561): Homolog of NCBI NO: 34866902 NR Description: similar to eukaryotic translation initiation
  misc_feature (6)..(563): Homolog of NCBI NO: 38174024 NR Description: Unknown (protein for MGC:75703) [Silurana
  misc_feature (6)..(561): Homolog of NCBI NO: 4503523 NR Description: eukaryotic translation initiation factor 3
  misc_feature (6)..(560): Homolog of NCBI NO: 27882463 NR Description: Similar to eukaryotic translation initiation
  misc_feature (6)..(562): Homolog of NCBI NO: 31418925 NR Description: Unknown (protein for MGC:64097) [Danio rerio]
  misc_feature (6)..(588): Homolog of NCBI NO: 31207329 NR Description: ENSANGP00000015368 [Anopheles gambiae]
  misc_feature (170)..(588): Homolog of NCBI NO: 12407755 NR Description: initiation factor 3d [Arabidopsis thaliana]
  misc_feature (1)..(588): Homolog of NCBI NO: 17528988 NR Description: putative translation initiation factor eIF3
  misc_feature (1)..(588): Homolog of NCBI NO: 15233469 NR Description: translation initiation factor eIF3 - like protein
MVFEAFEVGTVPFNSDGWGPPDASDTSSTSVAAANLLPNVPFASFSRSEKLGRVADWTRALSNPSARPHTGSKSDPSAIFDFSAFAVDEGFGLTNSGGNADEDAAFRLVDGKPPPRPKFGPKWRFNQYHNRNQLPQRRDEEVEAKKREAEKDRARRDRLYNNNRNNIHQQRREAAAFKSSVDIQPEWNMLEQIPFSTFSKLSFTVSEPEDLLLCGGLESYDRSFDRITPKADRRLERFKNRSFKVTTSDDLVIRRLAKEDKATVFATDAILAALMCAPRSVYSWDLVIQRVGNKLFFDKRDGSPLDLLSVHETSQEPLPEGKDDINSAHSLGLEAAYINQNFAQQVLVKNGKRETFDEPIPNVNEGEENASIAYRYRRWKLDDSMYLVARCELQSTVDLNNQRSFLTLNALNEFDPKYSGVDWRQKLETQRGAVLANELKNNGNKLAKWTAQALLANADMMKIGFVSRVHPRDHFNHVILSVLGYKPKDFAGQINLNTNNMWGIVKSIVDLCMKLSEGKYVLVKDPSKPQVRIYEVPADAFDNDYVEEPLPEDEQVQPPEENTDAGAETNGVSSTNVAVEDKKSEVEA

SEQ ID NO: 39391 - protein, 400 aa, Arabidopsis thaliana
  peptide (1)..(400): Ceres Seq. ID no. 13489604
  misc_feature (1)..(366): Pfam Name: Eukaryotic translation initiation factor 3 Pfam Description: Eukaryotic translation initiation factor 3
  misc_feature (1)..(369): Homolog of NCBI NO: 24649360 NR Description: Eukaryotic initiation factor 3 p66 subunit
  misc_feature (1)..(373): Homolog of NCBI NO: 34866902 NR Description: similar to eukaryotic translation initiation
  misc_feature (1)..(375): Homolog of NCBI NO: 38174024 NR Description: Unknown (protein for MGC:75703) [Silurana
  misc_feature (1)..(373): Homolog of NCBI NO: 4503523 NR Description: eukaryotic translation initiation factor 3
  misc_feature (1)..(372): Homolog of NCBI NO: 27882463 NR Description: Similar to eukaryotic translation initiation
  misc_feature (1)..(374): Homolog of NCBI NO: 31418925 NR Description: Unknown (protein for MGC:64097) [Danio rerio]
  misc_feature (1)..(400): Homolog of NCBI NO: 31207329 NR Description: ENSANGP00000015368 [Anopheles gambiae]
  misc_feature (1)..(400): Homolog of NCBI NO: 12407755 NR Description: initiation factor 3d [Arabidopsis thaliana]
  misc_feature (1)..(400): Homolog of NCBI NO: 17528988 NR Description: putative translation initiation factor eIF3
  misc_feature (1)..(400): Homolog of NCBI NO: 15233469 NR Description: translation initiation factor eIF3 - like protein
MLEQIPFSTFSKLSFTVSEPEDLLLCGGLESYDRSFDRITPKADRRLERFKNRSFKVTTSDDLVIRRLAKEDKATVFATDAILAALMCAPRSVYSWDLVIQRVGNKLFFDKRDGSPLDLLSVHETSQEPLPEGKDDINSAHSLGLEAAYINQNFAQQVLVKNGKRETFDEPIPNVNEGEENASIAYRYRRWKLDDSMYLVARCELQSTVDLNNQRSFLTLNALNEFDPKYSGVDWRQKLETQRGAVLANELKNNGNKLAKWTAQALLANADMMKIGFVSRVHPRDHFNHVILSVLGYKPKDFAGQINLNTNNMWGIVKSIVDLCMKLSEGKYVLVKDPSKPQVRIYEVPADAFDNDYVEEPLPEDEQVQPPEENTDAGAETNGVSSTNVAVEDKKSEVEA

SEQ ID NO: 39392 - DNA, 1289 bp, Arabidopsis thaliana
  misc_feature (1)..(1289): Ceres Seq. ID no. 12329055
  misc_feature: MA Experiment ID: 108434 Result: Up-regulated in Transcription
  misc_feature: MA Experiment 108434 PARAMETER Experiment Name: At_Root_Tips_cDNA_P Parameter: Tissue Value: Root Tips
  misc_feature: MA Experiment ID: 108461 Result: Up-regulated in Transcription
  misc_feature: MA Experiment 108461 PARAMETER Experiment Name: At_Germinating_Seeds_cDNA_P Parameter: Age (day) Value: 1 vs. 0
  misc_feature: MA Experiment 108461 PARAMETER Experiment Name: At_Germinating_Seeds_cDNA_P Parameter: Tissue Value: Germinating Seeds
  misc_feature: MA Experiment ID: 108464 Result: Down-regulated in Transcription
  misc_feature: MA Experiment 108464 PARAMETER Experiment Name: At_Germinating_Seeds_cDNA_P Parameter: Age (day) Value: 4 vs. 0
  misc_feature: MA Experiment 108464 PARAMETER Experiment Name: At_Germinating_Seeds_cDNA_P Parameter: Tissue Value: Germinating Seeds
  misc_feature: MA Experiment ID: 108573 Result: Down-regulated in Transcription
  misc_feature: MA Experiment 108573 PARAMETER Experiment Name: At_Drought_cDNA_P Parameter: Timepoint (hr) Value: 6
  misc_feature: MA Experiment 108573 PARAMETER Experiment Name: At_Drought_cDNA_P Parameter: Tissue Value: Aerial
  misc_feature: MA Experiment 108573 PARAMETER Experiment Name: At_Drought_cDNA_P Parameter: Treatment Value: Drought vs. No Drought
  misc_feature: MA Experiment ID: 20000180 Result: Up-regulated in Transcription
  misc_feature: MA Experiment 20000180 PARAMETER Experiment Name: At_Germinating_Seeds_P Parameter: Age (hr) Value: 24 vs. 0
  misc_feature: MA Experiment 20000180 PARAMETER Experiment Name: At_Germinating_Seeds_P Parameter: Tissue Value: Germinating Seeds
  misc_feature: MA Experiment ID: 20001911 Result: Down-regulated in Transcription
  misc_feature: MA Experiment 20001911 PARAMETER Experiment Name: At_Drought_Reproduction_P Parameter: Age (day) Value: 40
  misc_feature: MA Experiment 20001911 PARAMETER Experiment Name: At_Drought_Reproduction_P Parameter: Organism Value: A. thaliana
  misc_feature: MA Experiment 20001911 PARAMETER Experiment Name: At_Drought_Reproduction_P Parameter: Plant Line Value: WS
  misc_feature: MA Experiment 20001911 PARAMETER Experiment Name: At_Drought_Reproduction_P Parameter: Timepoint (day) Value: 10
  misc_feature: MA Experiment 20001911 PARAMETER Experiment Name: At_Drought_Reproduction_P Parameter: Tissue Value: Flowers
  misc_feature: MA Experiment 20001911 PARAMETER Experiment Name: At_Drought_Reproduction_P Parameter: Treatment Value: Drought vs. No Drought
atcttaccctaaaaaccacatttcttaacttcctcaataaaaaaaagaaaagcttcaccctttaattttaccctcaaccccaaaacaaaaaccccttcctccacgagggcatacagaaatatcaaagacccaatctttctttcacttccccaatctctagatgacaatctaacgatacagttccttttagatcgattaccaaatacaaaggatcaatttttcttacatgaacactctgttgtaatggcagaggaaaatctagaactgagtcttttatgtacagagagcaacgttgatgatgagggcatgattgttgacgaaactccgattgaaatttcgattcctcagatgggtttttctcaatcggagagtgaggagattatcatggagatggtggagaaggagaagcagcatttgccaagtgatgattacatcaagagacttagaagtggagatttggatttgaatgttggaagaagagatgccctcaattggatttggaaggcttgtgaagtacaccagtttggaccattgtgtttttgcttagcaatgaactacttggatcgattcttatcggttcatgatttgcctagtggcaaaggttggatattgcagttgttggctgtggcttgtttatcattggcagccaaaattgaagaaactgaagttccaatgttgatagatcttcaggttggagatcctcagtttgtgtttgaggctaaatcagtccaaagaatggagcttttggtgttgaacaaattgaaatggagattgagagcaataactccatgctcatacataagatatttcctgagaaagatgagtaaatgtgatcaagaaccatccaacacattgatatctagatcattacaagtgatagccagcacaaccaaaggtattgactttttggagtttagaccttctgaagctgctgctgctgtggcactttctgtttctggagaattgcagagagtacactttgacaactcttccttctctcctcttttctcactacttcaaaaggagagagtgaagaagataggggaaatgatagagagtgatggctcagacttatgttcacaaacacccaatggggttttagaagtatcggcttgttgtttcagctttaagacccatgattcttcttcttcttatacacatctttcttaaaaaaaaaactgtttttttcttacattattataatcagtatgatgtctgatgagaggttgaaaaaagaggacaataaatcaaagcaaaaatttttaaataaataaaagtgtattaatttc

SEQ ID NO: 39393 - protein, 308 aa, Arabidopsis thaliana
  peptide (1)..(308): Ceres Seq. ID no. 12329056
  misc_feature (45)..(178): Pfam Name: Cyclin, N-terminal domain Pfam Description: Cyclin, N-terminal domain
  misc_feature (32)..(272): Homolog of NCBI NO: 15227224 NR Description: Cyclin D2;1; protein id: At2g22490.1 [Arabidopsis
  misc_feature (32)..(272): Homolog of NCBI NO: 1076312 NR Description: cyclin delta-2 - Arabidopsis thaliana
  misc_feature (9)..(299): Homolog of NCBI NO: 22091622 NR Description: cyclin D2 [Daucus carota]
  misc_feature (22)..(303): Homolog of NCBI NO: 7484663 NR Description: cyclin D-like protein - red goosefoot
  misc_feature (9)..(299): Homolog of NCBI NO: 4160298 NR Description: cyclin D2.1 protein [Nicotiana tabacum]
  misc_feature (15)..(303): Homolog of NCBI NO: 11357238 NR Description: cyclin protein-like - Arabidopsis thaliana
  misc_feature (15)..(308): Homolog of NCBI NO: 30683167 NR Description: cyclin family [Arabidopsis thaliana]
  misc_feature (1)..(308): Homolog of NCBI NO: 21536631 NR Description: D-type cyclin [Arabidopsis thaliana]
  misc_feature (1)..(308): Homolog of NCBI NO: 15238462 NR Description: Cyclin D4;1; protein id: At5g65420.1, supported
  misc_feature (1)..(308): Homolog of NCBI NO: 4688615 NR Description: D-type cyclin [Arabidopsis thaliana]
MAEENLELSLLCTESNVDDEGMIVDETPIEISIPQMGFSQSESEEIIMEMVEKEKQHLPSDDYIKRLRSGDLDLNVGRRDALNWIWKACEVHQFGPLCFCLAMNYLDRFLSVHDLPSGKGWILQLLAVACLSLAAKIEETEVPMLIDLQVGDPQFVFEAKSVQRMELLVLNKLKWRLRAITPCSYIRYFLRKMSKCDQEPSNTLISRSLQVIASTTKGIDFLEFRPSEAAAAVALSVSGELQRVHFDNSSFSPLFSLLQKERVKKIGEMIESDGSDLCSQTPNGVLEVSACCFSFKTHDSSSSYTHLS

SEQ ID NO: 39394 - protein, 287 aa, Arabidopsis thaliana
  peptide (1)..(287): Ceres Seq. ID no. 12329057
  misc_feature (24)..(157): Pfam Name: Cyclin, N-terminal domain Pfam Description: Cyclin, N-terminal domain
  misc_feature (11)..(251): Homolog of NCBI NO: 15227224 NR Description: Cyclin D2;1; protein id: At2g22490.1 [Arabidopsis
  misc_feature (11)..(251): Homolog of NCBI NO: 1076312 NR Description: cyclin delta-2 - Arabidopsis thaliana
  misc_feature (1)..(278): Homolog of NCBI NO: 22091622 NR Description: cyclin D2 [Daucus carota]
  misc_feature (1)..(282): Homolog of NCBI NO: 7484663 NR Description: cyclin D-like protein - red goosefoot
  misc_feature (1)..(278): Homolog of NCBI NO: 4160298 NR Description: cyclin D2.1 protein [Nicotiana tabacum]
  misc_feature (1)..(282): Homolog of NCBI NO: 11357238 NR Description: cyclin protein-like - Arabidopsis thaliana
  misc_feature (1)..(287): Homolog of NCBI NO: 30683167 NR Description: cyclin family [Arabidopsis thaliana]
  misc_feature (1)..(287): Homolog of NCBI NO: 21536631 NR Description: D-type cyclin [Arabidopsis thaliana]
  misc_feature (1)..(287): Homolog of NCBI NO: 15238462 NR Description: Cyclin D4;1; protein id: At5g65420.1, supported
  misc_feature (1)..(287): Homolog of NCBI NO: 4688615 NR Description: D-type cyclin [Arabidopsis thaliana]
MIVDETPIEISIPQMGFSQSESEEIIMEMVEKEKQHLPSDDYIKRLRSGDLDLNVGRRDALNWIWKACEVHQFGPLCFCLAMNYLDRFLSVHDLPSGKGWILQLLAVACLSLAAKIEETEVPMLIDLQVGDPQFVFEAKSVQRMELLVLNKLKWRLRAITPCSYIRYFLRKMSKCDQEPSNTLISRSLQVIASTTKGIDFLEFRPSEAAAAVALSVSGELQRVHFDNSSFSPLFSLLQKERVKKIGEMIESDGSDLCSQTPNGVLEVSACCFSFKTHDSSSSYTHLS

SEQ ID NO: 39395 - protein, 273 aa, Arabidopsis thaliana
  peptide (1)..(273): Ceres Seq. ID no. 12329058
  misc_feature (10)..(143): Pfam Name: Cyclin, N-terminal domain Pfam Description: Cyclin, N-terminal domain
  misc_feature (1)..(237): Homolog of NCBI NO: 15227224 NR Description: Cyclin D2;1; protein id: At2g22490.1 [Arabidopsis
  misc_feature (1)..(237): Homolog of NCBI NO: 1076312 NR Description: cyclin delta-2 - Arabidopsis thaliana
  misc_feature (1)..(264): Homolog of NCBI NO: 22091622 NR Description: cyclin D2 [Daucus carota]
  misc_feature (1)..(268): Homolog of NCBI NO: 7484663 NR Description: cyclin D-like protein - red goosefoot
  misc_feature (1)..(264): Homolog of NCBI NO: 4160298 NR Description: cyclin D2.1 protein [Nicotiana tabacum]
  misc_feature (1)..(268): Homolog of NCBI NO: 11357238 NR Description: cyclin protein-like - Arabidopsis thaliana
  misc_feature (1)..(273): Homolog of NCBI NO: 30683167 NR Description: cyclin family [Arabidopsis thaliana]
  misc_feature (1)..(273): Homolog of NCBI NO: 21536631 NR Description: D-type cyclin [Arabidopsis thaliana]
  misc_feature (1)..(273): Homolog of NCBI NO: 15238462 NR Description: Cyclin D4;1; protein id: At5g65420.1, supported
  misc_feature (1)..(273): Homolog of NCBI NO: 4688615 NR Description: D-type cyclin [Arabidopsis thaliana]
MGFSQSESEEIIMEMVEKEKQHLPSDDYIKRLRSGDLDLNVGRRDALNWIWKACEVHQFGPLCFCLAMNYLDRFLSVHDLPSGKGWILQLLAVACLSLAAKIEETEVPMLIDLQVGDPQFVFEAKSVQRMELLVLNKLKWRLRAITPCSYIRYFLRKMSKCDQEPSNTLISRSLQVIASTTKGIDFLEFRPSEAAAAVALSVSGELQRVHFDNSSFSPLFSLLQKERVKKIGEMIESDGSDLCSQTPNGVLEVSACCFSFKTHDSSSSYTHLS

SEQ ID NO: 39396 - DNA, 1389 bp, Arabidopsis thaliana
  misc_feature (1)..(1389): Ceres Seq. ID no. 12328262
  misc_feature: MA Experiment ID: 20000171 Result: Down-regulated in Transcription
  misc_feature: MA Experiment 20000171 PARAMETER Experiment Name: At_42deg_Heat_P Parameter: Age (day) Value: 14
  misc_feature: MA Experiment 20000171 PARAMETER Experiment Name: At_42deg_Heat_P Parameter: Organism Value: A. thaliana
  misc_feature: MA Experiment 20000171 PARAMETER Experiment Name: At_42deg_Heat_P Parameter: Plant Line Value: WS
  misc_feature: MA Experiment 20000171 PARAMETER Experiment Name: At_42deg_Heat_P Parameter: Temperature (deg C) Value: 42 vs. 22
  misc_feature: MA Experiment 20000171 PARAMETER Experiment Name: At_42deg_Heat_P Parameter: Timepoint (hr) Value: 1
  misc_feature: MA Experiment 20000171 PARAMETER Experiment Name: At_42deg_Heat_P Parameter: Tissue Value: Aerial
  misc_feature: MA Experiment ID: 20000184 Result: Down-regulated in Transcription
  misc_feature: MA Experiment 20000184 PARAMETER Experiment Name: At_Shoots__P Parameter: Age (day) Value: 7
  misc_feature: MA Experiment 20000184 PARAMETER Experiment Name: At_Shoots__P Parameter: Tissue Value: Shoots vs. Whole Plant
  misc_feature: MA Experiment ID: 20000224 Result: Up-regulated in Transcription
  misc_feature: MA Experiment ID: 20001248 Result: Up-regulated in Transcription
  misc_feature: MA Experiment 20001248 PARAMETER Experiment Name: At_Far-red-induction_P Parameter: Age (day) Value: 7
  misc_feature: MA Experiment 20001248 PARAMETER Experiment Name: At_Far-red-induction_P Parameter: Light Value: Far-red vs. White
  misc_feature: MA Experiment 20001248 PARAMETER Experiment Name: At_Far-red-induction_P Parameter: Organism Value: A. thaliana
  misc_feature: MA Experiment 20001248 PARAMETER Experiment Name: At_Far-red-induction_P Parameter: Plant Line Value: Columbia
  misc_feature: MA Experiment 20001248 PARAMETER Experiment Name: At_Far-red-induction_P Parameter: Timepoint (hr) Value: 4
  misc_feature: MA Experiment 20001248 PARAMETER Experiment Name: At_Far-red-induction_P Parameter: Tissue Value: Whole Plant
  misc_feature: MA Experiment ID: 20001450 Result: Up-regulated in Transcription
  misc_feature: MA Experiment 20001450 PARAMETER Experiment Name: At_Far-red-induction_P Parameter: Age (day) Value: 7
  misc_feature: MA Experiment 20001450 PARAMETER Experiment Name: At_Far-red-induction_P Parameter: Light Value: Far-red vs. White
  misc_feature: MA Experiment 20001450 PARAMETER Experiment Name: At_Far-red-induction_P Parameter: Organism Value: A. thaliana
  misc_feature: MA Experiment 20001450 PARAMETER Experiment Name: At_Far-red-induction_P Parameter: Plant Line Value: Columbia
  misc_feature: MA Experiment 20001450 PARAMETER Experiment Name: At_Far-red-induction_P Parameter: Timepoint (hr) Value: 8
  misc_feature: MA Experiment 20001450 PARAMETER Experiment Name: At_Far-red-induction_P Parameter: Tissue Value: Whole Plant
ccacaaagatatttttctttattctctcgcagttcaattagggtttcaatctctctgctctgcttgtcatcaccaccaccaccaccaccgtcgtcgtctctctgtatctctccggcgggttctctctctacttcccccggaggattaaaagatggaccagtcttttattttgatattccgttagcttgttcagttattgtagaagctgtgtcgtcaagacttttaatatctcaaatggatgatggtgggcatcgtgagaatggtcggcataaagcagcagttcagggccagcatcagccgtcgatgaaacaagtgatgtcgataatagcagagcgcgatgcagcgattcaggagagaaatctgacgatatcagagaaaaaagcagcagtagctgaaagggacatggcgtttcttcagagggacaccgccattgctgagcgcaacaatgcgataatggagagagacagtgctcttacagctctccaataccgtgagaactctatggttactgctcctgctgccaatatgtcagcatgtccaccgggttgtcaaatatcacgtggtgtaaaacacttgcaccatccgcacatgcatcatcatcatcaacaacatcacatacctcagttgactgaaaatgcatatgaaaccagagaaatggagccaaacgatggtctcccgacatcaccacctgctggatccaccttggaatctgccaaaccaaagcgcggtaaaagagtgaacccaaaggcgacaacacaaaccgctgctaataagagagggccaaaaaatcagaggaaggttaagaaagagagcgaggacgacttaaacaagataatgtttgtaaagacgacccatgactacacagacgaagattcaagtaagcatatcttaataggatcaaaatctgactggaaaagtcaagaaatggtggggctgaaccaagtggtttacgacgagacaacgatgccaccacctgtatgttcatgtacaggagttctcagacagtgctacaaatggggaaatggaggttggcaatcatcgtgttgcacaactacactatcaatgtatcctttacctgcactgcccaacaaaaggcatgctcgagttggtggacggaaaatgagcggaagcgcgttcaacaagcttctaagccggcttgctgcagaagggcatcatgatctttcaaacctggtcgatctgaaggaccattgggcaaagcacggtacaaaccgctacattacgattaaatgatatgtgcatttaggtgtgagttgttcttacgacattatctgattttaaatcatgtgtactaaattcaaataaactcgagaggaaaagaattgtatgtggagccaatgttatgttgtattatataattcgaaaaatttt

SEQ ID NO: 39397 - protein, 416 aa, Arabidopsis thaliana
  peptide (1)..(416): Ceres Seq. ID no. 12328263
  misc_feature (191)..(416): Homolog of NCBI NO: 26190436 NR Description: barley B recombinant [Hordeum vulgare]
  misc_feature (111)..(162): Homolog of NCBI NO: 6006362 NR Description: Similar to Arabidopsis thaliana chromosome II BAC
  misc_feature (353)..(416): Homolog of NCBI NO: 6006362 NR Description: Similar to Arabidopsis thaliana chromosome II BAC
  misc_feature (79)..(180): Homolog of NCBI NO: 9759488 NR Description: gb|AAF18661.1~gene_id:MDH9.22~similar to unknown
  misc_feature (246)..(416): Homolog of NCBI NO: 18399638 NR Description: expressed protein
  misc_feature (300)..(387): Homolog of NCBI NO: 15234867 NR Description: putative protein; protein id: At4g38910.1
  misc_feature (78)..(168): Homolog of NCBI NO: 15234867 NR Description: putative protein; protein id: At4g38910.1
  misc_feature (139)..(416): Homolog of NCBI NO: 9759488 NR Description: gb|AAF18661.1~gene_id:MDH9.22~similar to unknown
  misc_feature (79)..(416): Homolog of NCBI NO: 18422219 NR Description: putative protein
PQRYFSLFSRSSIRVSISLLCLSSPPPPPPSSSLCISPAGSLSTSPGGLKDGPVFYFDIPLACSVIVEAVSSRLLISQMDDGGHRENGRHKAAVQGQHQPSMKQVMSIIAERDAAIQERNLTISEKKAAVAERDMAFLQRDTAIAERNNAIMERDSALTALQYRENSMVTAPAANMSACPPGCQISRGVKHLHHPHMHHHHQQHHIPQLTENAYETREMEPNDGLPTSPPAGSTLESAKPKRGKRVNPKATTQTAANKRGPKNQRKVKKESEDDLNKIMFVKTTHDYTDEDSSKHILIGSKSDWKSQEMVGLNQVVYDETTMPPPVCSCTGVLRQCYKWGNGGWQSSCCTTTLSMYPLPALPNKRHARVGGRKMSGSAFNKLLSRLAAEGHHDLSNLVDLKDHWAKHGTNRYITIK

SEQ ID NO: 39398 - protein, 338 aa, Arabidopsis thaliana
  peptide (1)..(338): Ceres Seq. ID no. 12328264
  misc_feature (113)..(338): Homolog of NCBI NO: 26190436 NR Description: barley B recombinant [Hordeum vulgare]
  misc_feature (33)..(84): Homolog of NCBI NO: 6006362 NR Description: Similar to Arabidopsis thaliana chromosome II BAC
  misc_feature (275)..(338): Homolog of NCBI NO: 6006362 NR Description: Similar to Arabidopsis thaliana chromosome II BAC
  misc_feature (1)..(102): Homolog of NCBI NO: 9759488 NR Description: gb|AAF18661.1~gene_id:MDH9.22~similar to unknown
  misc_feature (168)..(338): Homolog of NCBI NO: 18399638 NR Description: expressed protein
  misc_feature (222)..(309): Homolog of NCBI NO: 15234867 NR Description: putative protein; protein id: At4g38910.1
  misc_feature (1)..(90): Homolog of NCBI NO: 15234867 NR Description: putative protein; protein id: At4g38910.1
  misc_feature (61)..(338): Homolog of NCBI NO: 9759488 NR Description: gb|AAF18661.1~gene_id:MDH9.22~similar to unknown
  misc_feature (1)..(338): Homolog of NCBI NO: 18422219 NR Description: putative protein
MDDGGHRENGRHKAAVQGQHQPSMKQVMSIIAERDAAIQERNLTISEKKAAVAERDMAFLQRDTAIAERNNAIMERDSALTALQYRENSMVTAPAANMSACPPGCQISRGVKHLHHPHMHHHHQQHHIPQLTENAYETREMEPNDGLPTSPPAGSTLESAKPKRGKRVNPKATTQTAANKRGPKNQRKVKKESEDDLNKIMFVKTTHDYTDEDSSKHILIGSKSDWKSQEMVGLNQVVYDETTMPPPVCSCTGVLRQCYKWGNGGWQSSCCTTTLSMYPLPALPNKRHARVGGRKMSGSAFNKLLSRLAAEGHHDLSNLVDLKDHWAKHGTNRYITIK

SEQ ID NO: 39399 - protein, 315 aa, Arabidopsis thaliana
  peptide (1)..(315): Ceres Seq. ID no. 12328265
  misc_feature (90)..(315): Homolog of NCBI NO: 26190436 NR Description: barley B recombinant [Hordeum vulgare]
  misc_feature (10)..(61): Homolog of NCBI NO: 6006362 NR Description: Similar to Arabidopsis thaliana chromosome II BAC
  misc_feature (252)..(315): Homolog of NCBI NO: 6006362 NR Description: Similar to Arabidopsis thaliana chromosome II BAC
  misc_feature (1)..(79): Homolog of NCBI NO: 9759488 NR Description: gb|AAF18661.1~gene_id:MDH9.22~similar to unknown
  misc_feature (145)..(315): Homolog of NCBI NO: 18399638 NR Description: expressed protein
  misc_feature (199)..(286): Homolog of NCBI NO: 15234867 NR Description: putative protein; protein id: At4g38910.1
  misc_feature (1)..(67): Homolog of NCBI NO: 15234867 NR Description: putative protein; protein id: At4g38910.1
  misc_feature (38)..(315): Homolog of NCBI NO: 9759488 NR Description: gb|AAF18661.1~gene_id:MDH9.22~similar to unknown
  misc_feature (1)..(315): Homolog of NCBI NO: 18422219 NR Description: putative protein
MKQVMSIIAERDAAIQERNLTISEKKAAVAERDMAFLQRDTAIAERNNAIMERDSALTALQYRENSMVTAPAANMSACPPGCQISRGVKHLHHPHMHHHHQQHHIPQLTENAYETREMEPNDGLPTSPPAGSTLESAKPKRGKRVNPKATTQTAANKRGPKNQRKVKKESEDDLNKIMFVKTTHDYTDEDSSKHILIGSKSDWKSQEMVGLNQVVYDETTMPPPVCSCTGVLRQCYKWGNGGWQSSCCTTTLSMYPLPALPNKRHARVGGRKMSGSAFNKLLSRLAAEGHHDLSNLVDLKDHWAKHGTNRYITIK

SEQ ID NO: 39400 - DNA, 2646 bp, Arabidopsis thaliana
  misc_feature (1)..(2646): Ceres Seq. ID no. 13491697
  misc_feature: MA Experiment ID: 108463 Result: Down-regulated in Transcription
  misc_feature: MA Experiment 108463 PARAMETER Experiment Name: At_Germinating_Seeds_cDNA_P Parameter: Age (day) Value: 3 vs. 0
  misc_feature: MA Experiment 108463 PARAMETER Experiment Name: At_Germinating_Seeds_cDNA_P Parameter: Tissue Value: Germinating Seeds
  misc_feature: MA Experiment ID: 108464 Result: Down-regulated in Transcription
  misc_feature: MA Experiment 108464 PARAMETER Experiment Name: At_Germinating_Seeds_cDNA_P Parameter: Age (day) Value: 4 vs. 0
  misc_feature: MA Experiment 108464 PARAMETER Experiment Name: At_Germinating_Seeds_cDNA_P Parameter: Tissue Value: Germinating Seeds
  misc_feature: MA Experiment ID: 108573 Result: Up-regulated in Transcription
  misc_feature: MA Experiment 108573 PARAMETER Experiment Name: At_Drought_cDNA_P Parameter: Timepoint (hr) Value: 6
  misc_feature: MA Experiment 108573 PARAMETER Experiment Name: At_Drought_cDNA_P Parameter: Tissue Value: Aerial
  misc_feature: MA Experiment 108573 PARAMETER Experiment Name: At_Drought_cDNA_P Parameter: Treatment Value: Drought vs. No Drought
  misc_feature: MA Experiment ID: 108577 Result: Down-regulated in Transcription
  misc_feature: MA Experiment 108577 PARAMETER Experiment Name: At_42deg_Heat_cDNA_P Parameter: Temperature (deg C) Value: 42 vs. 22
  misc_feature: MA Experiment 108577 PARAMETER Experiment Name: At_42deg_Heat_cDNA_P Parameter: Timepoint (hr) Value: 6
  misc_feature: MA Experiment 108577 PARAMETER Experiment Name: At_42deg_Heat_cDNA_P Parameter: Tissue Value: Aerial
  misc_feature: MA Experiment ID: 108585 Result: Up-regulated in Transcription
  misc_feature: MA Experiment 108585 PARAMETER Experiment Name: At_5mM_NaNP_cDNA_P Parameter: Timepoint (hr) Value: 6
  misc_feature: MA Experiment 108585 PARAMETER Experiment Name: At_5mM_NaNP_cDNA_P Parameter: Tissue Value: Aerial
  misc_feature: MA Experiment 108585 PARAMETER Experiment Name: At_5mM_NaNP_cDNA_P Parameter: Treatment Value: null
  misc_feature: MA Experiment ID: 20000184 Result: Up-regulated in Transcription
  misc_feature: MA Experiment 20000184 PARAMETER Experiment Name: At_Shoots__P Parameter: Age (day) Value: 7
  misc_feature: MA Experiment 20000184 PARAMETER Experiment Name: At_Shoots__P Parameter: Tissue Value: Shoots vs. Whole Plant
  misc_feature: MA Experiment ID: 20000234 Result: Up-regulated in Transcription
  misc_feature: MA Experiment 20000234 PARAMETER Experiment Name: At_Siliques_P Parameter: Age (day) Value: 21
  misc_feature: MA Experiment 20000234 PARAMETER Experiment Name: At_Siliques_P Parameter: Organism Value: A. thaliana
  misc_feature: MA Experiment 20000234 PARAMETER Experiment Name: At_Siliques_P Parameter: Plant Line Value: WS
  misc_feature: MA Experiment 20000234 PARAMETER Experiment Name: At_Siliques_P Parameter: Tissue Value: Less Than 5mm Siliques vs. Whole Plant
  misc_feature: MA Experiment ID: 20000437 Result: Down-regulated in Transcription
  misc_feature: MA Experiment 20000437 PARAMETER Experiment Name: At_Drought_P Parameter: Age (day) Value: 8
  misc_feature: MA Experiment 20000437 PARAMETER Experiment Name: At_Drought_P Parameter: Organism Value: A. thaliana
  misc_feature: MA Experiment 20000437 PARAMETER Experiment Name: At_Drought_P Parameter: Plant Line Value: WS
  misc_feature: MA Experiment 20000437 PARAMETER Experiment Name: At_Drought_P Parameter: Timepoint (hr) Value: 24
  misc_feature: MA Experiment 20000437 PARAMETER Experiment Name: At_Drought_P Parameter: Tissue Value: Whole Plant
  misc_feature: MA Experiment 20000437 PARAMETER Experiment Name: At_Drought_P Parameter: Treatment Value: Drought vs. No Drought
  misc_feature: MA Experiment ID: 20000495 Result: Up-regulated in Transcription
  misc_feature: MA Experiment 20000495 PARAMETER Experiment Name: At_Guard_Cells_P Parameter: Harvest Date Value: 8/2/2002
  misc_feature: MA Experiment 20000495 PARAMETER Experiment Name: At_Guard_Cells_P Parameter: Organism Value: A. thaliana
  misc_feature: MA Experiment 20000495 PARAMETER Experiment Name: At_Guard_Cells_P Parameter: Tissue Value: Guard Cells vs. Leaves
  misc_feature: MA Experiment ID: 20001451 Result: Up-regulated in Transcription
  misc_feature: MA Experiment 20001451 PARAMETER Experiment Name: At_Far-red-induction_P Parameter: Age (day) Value: 7
  misc_feature: MA Experiment 20001451 PARAMETER Experiment Name: At_Far-red-induction_P Parameter: Light Value: Far-red vs. White
  misc_feature: MA Experiment 20001451 PARAMETER Experiment Name: At_Far-red-induction_P Parameter: Organism Value: A. thaliana
  misc_feature: MA Experiment 20001451 PARAMETER Experiment Name: At_Far-red-induction_P Parameter: Plant Line Value: Columbia
  misc_feature: MA Experiment 20001451 PARAMETER Experiment Name: At_Far-red-induction_P Parameter: Timepoint (hr) Value: 24
  misc_feature: MA Experiment 20001451 PARAMETER Experiment Name: At_Far-red-induction_P Parameter: Tissue Value: Whole Plant
  misc_feature: MA Experiment ID: 20001558 Result: Up-regulated in Transcription
  misc_feature: MA Experiment 20001558 PARAMETER Experiment Name: At_Drought_Soil_Dry_P Parameter: Age (day) Value: 27
  misc_feature: MA Experiment 20001558 PARAMETER Experiment Name: At_Drought_Soil_Dry_P Parameter: Organism Value: A. thaliana
  misc_feature: MA Experiment 20001558 PARAMETER Experiment Name: At_Drought_Soil_Dry_P Parameter: Plant Line Value: WS
  misc_feature: MA Experiment 20001558 PARAMETER Experiment Name: At_Drought_Soil_Dry_P Parameter: Post Timepoint (hr) Value: 6
  misc_feature: MA Experiment 20001558 PARAMETER Experiment Name: At_Drought_Soil_Dry_P Parameter: Post-Treatment Value: Re-Water vs. No Drought
  misc_feature: MA Experiment 20001558 PARAMETER Experiment Name: At_Drought_Soil_Dry_P Parameter: Timepoint (day) Value: 13
  misc_feature: MA Experiment 20001558 PARAMETER Experiment Name: At_Drought_Soil_Dry_P Parameter: Treatment Value: Drought vs. No Drought
  misc_feature: MA Experiment ID: 20001905 Result: Down-regulated in Transcription
  misc_feature: MA Experiment 20001905 PARAMETER Experiment Name: At_Drought_Reproduction_P Parameter: Age (day) Value: 40
  misc_feature: MA Experiment 20001905 PARAMETER Experiment Name: At_Drought_Reproduction_P Parameter: Organism Value: A. thaliana
  misc_feature: MA Experiment 20001905 PARAMETER Experiment Name: At_Drought_Reproduction_P Parameter: Plant Line Value: WS
  misc_feature: MA Experiment 20001905 PARAMETER Experiment Name: At_Drought_Reproduction_P Parameter: Timepoint (day) Value: 10
  misc_feature: MA Experiment 20001905 PARAMETER Experiment Name: At_Drought_Reproduction_P Parameter: Tissue Value: Rosettes
  misc_feature: MA Experiment 20001905 PARAMETER Experiment Name: At_Drought_Reproduction_P Parameter: Treatment Value: Drought vs. No Drought
  misc_feature: MA Experiment ID: 20001911 Result: Down-regulated in Transcription
  misc_feature: MA Experiment 20001911 PARAMETER Experiment Name: At_Drought_Reproduction_P Parameter: Age (day) Value: 40
  misc_feature: MA Experiment 20001911 PARAMETER Experiment Name: At_Drought_Reproduction_P Parameter: Organism Value: A. thaliana
  misc_feature: MA Experiment 20001911 PARAMETER Experiment Name: At_Drought_Reproduction_P Parameter: Plant Line Value: WS
  misc_feature: MA Experiment 20001911 PARAMETER Experiment Name: At_Drought_Reproduction_P Parameter: Timepoint (day) Value: 10
  misc_feature: MA Experiment 20001911 PARAMETER Experiment Name: At_Drought_Reproduction_P Parameter: Tissue Value: Flowers
  misc_feature: MA Experiment 20001911 PARAMETER Experiment Name: At_Drought_Reproduction_P Parameter: Treatment Value: Drought vs. No Drought
acacactagggaaaccacagttctcttctatcctctctttctccgcttctgtagcaatgtcaatgtggtaccctctaccttcttcttcttcctccactcactaaccaaatccagaatcaacaataatagaaaaagccctaactttctctgtcaatggctttcttcttctactttttcttcctcttgactctttcttctccttcttcttctgcttcctcttcaaactccttgacttacatcgtccacgtcgaccacgaagctaaaccctcaatcttccccactcatcttcactggtacacttcctctcttgcctcactcacatcttctcctccctccattatccacacatacaacaccgttttccatggcttctccgctagactcacttcacaagacgctagtcaactcttagaccatcctcatgtcatctccgttatcccggaacaagtccgtcacttgcacaccactcgttcccctgagtttcttggactcaggtccaccgacaaagcgggtctactcgaagagtctgatttcgggtcggatctagttatcggagttatcgatactggtgtttggcccgaaagacctagctttgatgaccgtggtcttggtcctgttcccattaaatggaaaggccaatgtatcgcttcccaagattttccggagtctgcttgtaaccgtaaactcgtcggagctagattcttctgcggtgggtatgaagcaaccaacgggaaaatgaatgaaacgactgagtttcgctctccgcgtgactccgatggacatgggactcacacagcttcaatctccgcgggccgttacgtttttccggcatcaactctcggctacgctcacggtgtcgctgctgggatggctccgaaagctagactcgctgcgtacaaagtctgttggaactccggttgttacgactcagatatcttagccgctttcgacaccgccgttgccgacggtgtcgatgtcatctctctctccgttggaggcgttgtggttccttattacctagacgctatcgccataggagcttttggagctattgacagaggaatattcgtctctgcttccgccggaaacggaggtcccggtgctttaacggtgacgaatgttgctccgtggatgacaacagtcggagctggaacaatcgatagggattttccagccaatgtgaaactcggtaacggaaagatgatttctggtgttagtgtatacggtggaccgggtctggatccgggtcgaatgtacccgcttgtttacggtggtagtttactaggcggcgatggttactcatcgtctctgtgtcttgaaggctcgttggatccgaatttggtgacgggaaagatcgttctttgtgatagaggaatcaattctagagcaaccaaaggtgagatcgtacggaaaaatggaggcttggggatgattatagcgaatggtgtgtttgacggtgaaggtttagtagctgattgccacgtgttaccggcgacatctgttggtgcttctggaggagatgagattcgtaggtatatctctgaatcatccaaatctcgttcatcgaaacatccaacggctacgattgttttcaaagggactcgacttgggatccgacctgcaccggttgttgcatctttctctgcacgtggtcctaatccagagacgccggagattcttaaaccggatgtaatcgcacctggtttgaatattctagctgcttggcctgaccggattggtccatctggtgttacttctgataaccggagaactgagttcaacattttatcaggcacttcgatggcgtgccctcatgtttctggtctagctgctttgcttaaggcggctcatccggattggagccccgcggcgataagatcagcattgatgaccacggcttacacggttgataacagcggtgagccgatgatggatgagtccactggcaatacgtcttcggttacggattatggttcgggtcatgttcacccaaccagagctatggatccgggactagtctacgatataacatcttatgattatatcaacttcttgtgtaattctaactacactggaaccaacattgtgacgataacccgtcgccaagcggactgcgacggtgcgaggcgagcgggacacgtcggaaatttgaactacccgtcgttctctgtcgtgtttcagcagtatggagagagtaaaatgtcgacacatttcattaggactgtgacaaatgtaggcgattcggattcggtttacgagattaagattaggccgcctagagggactacagtgacggttgagccggagaagctatcgttcagacgggtggggcagaaactgagttttgttgttagggttaagaccacagaggtgaagttgtcaccaggagcgacaaatgtggagactggtcatatggtttggtcagatgggaaacggaatgtgacaagtcccttggtggtcactcttcaacaacctctttgaagggttttagaatctggtgaccgggaaaattctggtctctgtttgttgtactagtgaaaaagaaagatcataagttgttgttgtcgtcgtctatgatctttgttggtgtaatataaatatgtatctttgttttgttgttaagaaagatagagcgtctaaagaaat

SEQ ID NO: 39401 - protein, 775 aa, Arabidopsis thaliana
  peptide (1)..(775): Ceres Seq. ID no. 15222869
  misc_feature (361)..(462): Pfam Name: PA domain Pfam Description: PA domain
  misc_feature (63)..(769): Homolog of NCBI NO: 18414296 NR Description: subtilisin-like serine protease [Arabidopsis
  misc_feature (1)..(775): Homolog of NCBI NO: 18423316 NR Description: subtilisin-like serine protease [Arabidopsis
  misc_feature (1)..(769): Homolog of NCBI NO: 22331076 NR Description: subtilisin-like serine protease, putative
  misc_feature (1)..(767): Homolog of NCBI NO: 7435657 NR Description: subtilisin-like proteinase (EC 3.4.21.-) 1 -
  misc_feature (7)..(748): Homolog of NCBI NO: 20147211 NR Description: AT5g67360/K8K14_8 [Arabidopsis thaliana]
  misc_feature (7)..(748): Homolog of NCBI NO: 18425181 NR Description: subtilisin-like serine protease ARA12
  misc_feature (7)..(770): Homolog of NCBI NO: 1076414 NR Description: subtilisin-like proteinase (EC 3.4.21.-),
  misc_feature (14)..(770): Homolog of NCBI NO: 14488360 NR Description: putative serine protease [Oryza sativa (japonica
  misc_feature (10)..(775): Homolog of NCBI NO: 18418552 NR Description: subtilisin-like serine protease [Arabidopsis
  misc_feature (195)..(775): Homolog of NCBI NO: 16930701 NR Description: AT3g14240/MLN21_2 [Arabidopsis thaliana]
MAFFFYFFFLLTLSSPSSSASSSNSLTYIVHVDHEAKPSIFPTHLHWYTSSLASLTSSPPSIIHTYNTVFHGFSARLTSQDASQLLDHPHVISVIPEQVRHLHTTRSPEFLGLRSTDKAGLLEESDFGSDLVIGVIDTGVWPERPSFDDRGLGPVPIKWKGQCIASQDFPESACNRKLVGARFFCGGYEATNGKMNETTEFRSPRDSDGHGTHTASISAGRYVFPASTLGYAHGVAAGMAPKARLAAYKVCWNSGCYDSDILAAFDTAVADGVDVISLSVGGVVVPYYLDAIAIGAFGAIDRGIFVSASAGNGGPGALTVTNVAPWMTTVGAGTIDRDFPANVKLGNGKMISGVSVYGGPGLDPGRMYPLVYGGSLLGGDGYSSSLCLEGSLDPNLVTGKIVLCDRGINSRATKGEIVRKNGGLGMIIANGVFDGEGLVADCHVLPATSVGASGGDEIRRYISESSKSRSSKHPTATIVFKGTRLGIRPAPVVASFSARGPNPETPEILKPDVIAPGLNILAAWPDRIGPSGVTSDNRRTEFNILSGTSMACPHVSGLAALLKAAHPDWSPAAIRSALMTTAYTVDNSGEPMMDESTGNTSSVTDYGSGHVHPTRAMDPGLVYDITSYDYINFLCNSNYTGTNIVTITRRQADCDGARRAGHVGNLNYPSFSVVFQQYGESKMSTHFIRTVTNVGDSDSVYEIKIRPPRGTTVTVEPEKLSFRRVGQKLSFVVRVKTTEVKLSPGATNVETGHMVWSDGKRNVTSPLVVTLQQPL

SEQ ID NO: 39402 - protein, 581 aa, Arabidopsis thaliana
  peptide (1)..(581): Ceres Seq. ID no. 15222870
  misc_feature (167)..(268): Pfam Name: PA domain Pfam Description: PA domain
  misc_feature (1)..(575): Homolog of NCBI NO: 18414296 NR Description: subtilisin-like serine protease [Arabidopsis
  misc_feature (1)..(581): Homolog of NCBI NO: 18423316 NR Description: subtilisin-like serine protease [Arabidopsis
  misc_feature (1)..(575): Homolog of NCBI NO: 22331076 NR Description: subtilisin-like serine protease, putative
  misc_feature (1)..(573): Homolog of NCBI NO: 7435657 NR Description: subtilisin-like proteinase (EC 3.4.21.-) 1 -
  misc_feature (1)..(554): Homolog of NCBI NO: 20147211 NR Description: AT5g67360/K8K14_8 [Arabidopsis thaliana]
  misc_feature (1)..(554): Homolog of NCBI NO: 18425181 NR Description: subtilisin-like serine protease ARA12
  misc_feature (1)..(576): Homolog of NCBI NO: 1076414 NR Description: subtilisin-like proteinase (EC 3.4.21.-),
  misc_feature (1)..(576): Homolog of NCBI NO: 14488360 NR Description: putative serine protease [Oryza sativa (japonica
  misc_feature (1)..(581): Homolog of NCBI NO: 18418552 NR Description: subtilisin-like serine protease [Arabidopsis
  misc_feature (1)..(581): Homolog of NCBI NO: 16930701 NR Description: AT3g14240/MLN21_2 [Arabidopsis thaliana]
MNETTEFRSPRDSDGHGTHTASISAGRYVFPASTLGYAHGVAAGMAPKARLAAYKVCWNSGCYDSDILAAFDTAVADGVDVISLSVGGVVVPYYLDAIAIGAFGAIDRGIFVSASAGNGGPGALTVTNVAPWMTTVGAGTIDRDFPANVKLGNGKMISGVSVYGGPGLDPGRMYPLVYGGSLLGGDGYSSSLCLEGSLDPNLVTGKIVLCDRGINSRATKGEIVRKNGGLGMIIANGVFDGEGLVADCHVLPATSVGASGGDEIRRYISESSKSRSSKHPTATIVFKGTRLGIRPAPVVASFSARGPNPETPEILKPDVIAPGLNILAAWPDRIGPSGVTSDNRRTEFNILSGTSMACPHVSGLAALLKAAHPDWSPAAIRSALMTTAYTVDNSGEPMMDESTGNTSSVTDYGSGHVHPTRAMDPGLVYDITSYDYINFLCNSNYTGTNIVTITRRQADCDGARRAGHVGNLNYPSFSVVFQQYGESKMSTHFIRTVTNVGDSDSVYEIKIRPPRGTTVTVEPEKLSFRRVGQKLSFVVRVKTTEVKLSPGATNVETGHMVWSDGKRNVTSPLVVTLQQPL

SEQ ID NO: 39403 - protein, 537 aa, Arabidopsis thaliana
  peptide (1)..(537): Ceres Seq. ID no. 15222871
  misc_feature (123)..(224): Pfam Name: PA domain Pfam Description: PA domain
  misc_feature (1)..(531): Homolog of NCBI NO: 18414296 NR Description: subtilisin-like serine protease [Arabidopsis
  misc_feature (1)..(537): Homolog of NCBI NO: 18423316 NR Description: subtilisin-like serine protease [Arabidopsis
  misc_feature (1)..(531): Homolog of NCBI NO: 22331076 NR Description: subtilisin-like serine protease, putative
  misc_feature (1)..(529): Homolog of NCBI NO: 7435657 NR Description: subtilisin-like proteinase (EC 3.4.21.-) 1 -
  misc_feature (1)..(510): Homolog of NCBI NO: 20147211 NR Description: AT5g67360/K8K14_8 [Arabidopsis thaliana]
  misc_feature (1)..(510): Homolog of NCBI NO: 18425181 NR Description: subtilisin-like serine protease ARA12
  misc_feature (1)..(532): Homolog of NCBI NO: 1076414 NR Description: subtilisin-like proteinase (EC 3.4.21.-),
  misc_feature (1)..(532): Homolog of NCBI NO: 14488360 NR Description: putative serine protease [Oryza sativa (japonica
  misc_feature (1)..(537): Homolog of NCBI NO: 18418552 NR Description: subtilisin-like serine protease [Arabidopsis
  misc_feature (1)..(537): Homolog of NCBI NO: 16930701 NR Description: AT3g14240/MLN21_2 [Arabidopsis thaliana]
MAPKARLAAYKVCWNSGCYDSDILAAFDTAVADGVDVISLSVGGVVVPYYLDAIAIGAFGAIDRGIFVSASAGNGGPGALTVTNVAPWMTTVGAGTIDRDFPANVKLGNGKMISGVSVYGGPGLDPGRMYPLVYGGSLLGGDGYSSSLCLEGSLDPNLVTGKIVLCDRGINSRATKGEIVRKNGGLGMIIANGVFDGEGLVADCHVLPATSVGASGGDEIRRYISESSKSRSSKHPTATIVFKGTRLGIRPAPVVASFSARGPNPETPEILKPDVIAPGLNILAAWPDRIGPSGVTSDNRRTEFNILSGTSMACPHVSGLAALLKAAHPDWSPAAIRSALMTTAYTVDNSGEPMMDESTGNTSSVTDYGSGHVHPTRAMDPGLVYDITSYDYINFLCNSNYTGTNIVTITRRQADCDGARRAGHVGNLNYPSFSVVFQQYGESKMSTHFIRTVTNVGDSDSVYEIKIRPPRGTTVTVEPEKLSFRRVGQKLSFVVRVKTTEVKLSPGATNVETGHMVWSDGKRNVTSPLVVTLQQPL

SEQ ID NO: 39404 - DNA, 1071 bp, Arabidopsis thaliana
  misc_feature (1)..(1071): Ceres Seq. ID no. 13487212
  misc_feature: MA Experiment ID: 20000171 Result: Up-regulated in Transcription
  misc_feature: MA Experiment 20000171 PARAMETER Experiment Name: At_42deg_Heat_P Parameter: Age (day) Value: 14
  misc_feature: MA Experiment 20000171 PARAMETER Experiment Name: At_42deg_Heat_P Parameter: Organism Value: A. thaliana
  misc_feature: MA Experiment 20000171 PARAMETER Experiment Name: At_42deg_Heat_P Parameter: Plant Line Value: WS
  misc_feature: MA Experiment 20000171 PARAMETER Experiment Name: At_42deg_Heat_P Parameter: Temperature (deg C) Value: 42 vs. 22
  misc_feature: MA Experiment 20000171 PARAMETER Experiment Name: At_42deg_Heat_P Parameter: Timepoint (hr) Value: 1
  misc_feature: MA Experiment 20000171 PARAMETER Experiment Name: At_42deg_Heat_P Parameter: Tissue Value: Aerial
  misc_feature: MA Experiment ID: 20000437 Result: Up-regulated in Transcription
  misc_feature: MA Experiment 20000437 PARAMETER Experiment Name: At_Drought_P Parameter: Age (day) Value: 8
  misc_feature: MA Experiment 20000437 PARAMETER Experiment Name: At_Drought_P Parameter: Organism Value: A. thaliana
  misc_feature: MA Experiment 20000437 PARAMETER Experiment Name: At_Drought_P Parameter: Plant Line Value: WS
  misc_feature: MA Experiment 20000437 PARAMETER Experiment Name: At_Drought_P Parameter: Timepoint (hr) Value: 24
  misc_feature: MA Experiment 20000437 PARAMETER Experiment Name: At_Drought_P Parameter: Tissue Value: Whole Plant
  misc_feature: MA Experiment 20000437 PARAMETER Experiment Name: At_Drought_P Parameter: Treatment Value: Drought vs. No Drought
agagaaactttcaatttaattggttcaaaatcatcctaaatcgagtagattgttttgaatcgatttttgaagttgattcgaagttcagtgattgtgattagaatttataaccagacccagtttttgaggtgaagaaaaagcagattttgtgttcaatttccatggaagacgaaccaggaagcgaaaatgaagcagacaccatagttgcttcaccacttgcaaaatggagaatcgaattctcgaaatcgtttcagaattacttagacagatctgctcctaacattgttcgaagatggcttgtgactttagtcgctgcagtgatctatatctatagggtttactctgtttatggatacttcgttatctcttatggcttagctacttatatcttaaatctcttgattggtttcctttcccctaaagttgatcctgaacttgaagctttggatcctgattctttacctgttgatgagtctgatgagtataagccctttgttcgtcgtcttcctgagttcaagttctggtatgcagcgactaaagcatttgttgttgcatttgtgatgacattcttctctttcctggatgtgcctgtgttctggccgatcttgttgtgttactggttggttttgtattctttaactatgaaacgcttaatcgtgcacatgttcaagtatagatactttcctttcgatgtaagaaagcctgtgaagctgctcaagtttcttgtaaacagtgtcctgacctttttaagactcaagaagggtgatggtggagatgataggcccagcagcagcaattcatctcagggaaatgaaaaacaagattagatgcgaacagtagatcaggtactgatctcgacgtggtgataggcgaagcaagaaaggatacaaactaaggatatcaaagtaaaatatactatagccatgctggtggaataggaaaacaaagttcttgaagcttaacagaactaagaaatctctctgagttttgagtaatctcctgcattttccggtttttgcattgtaatgtgtaacagtgtattttacaattatacgtttaaatgaatttggg

SEQ ID NO: 39405 - protein, 221 aa, Arabidopsis thaliana
  peptide (1)..(221): Ceres Seq. ID no. 13487213
  misc_feature (5)..(186): Pfam Name: Rer1 family Pfam Description: Rer1 family
  misc_feature (26)..(182): Homolog of NCBI NO: 7488292 NR Description: probable integral membrane protein At2g23310
  misc_feature (122)..(182): Homolog of NCBI NO: 35210534 NR Description: putative endoplasmatic reticulum retrieval
  misc_feature (27)..(122): Homolog of NCBI NO: 35210534 NR Description: putative endoplasmatic reticulum retrieval
  misc_feature (3)..(180): Homolog of NCBI NO: 15234975 NR Description: AtRer1A [Arabidopsis thaliana]
  misc_feature (6)..(180): Homolog of NCBI NO: 15226596 NR Description: AtRer1B [Arabidopsis thaliana]
  misc_feature (6)..(180): Homolog of NCBI NO: 11281669 NR Description: endoplasmatic reticulum retrieval protein Rer1B
  misc_feature (6)..(180): Homolog of NCBI NO: 34894094 NR Description: putative Rer1A protein (AtRer1A)
  misc_feature (1)..(200): Homolog of NCBI NO: 25411844 NR Description: probable integral membrane protein
  misc_feature (1)..(221): Homolog of NCBI NO: 30680307 NR Description: integral membrane protein -related [Arabidopsis
  misc_feature (1)..(221): Homolog of NCBI NO: 18398679 NR Description: integral membrane protein -related [Arabidopsis
MEDEPGSENEADTIVASPLAKWRIEFSKSFQNYLDRSAPNIVRRWLVTLVAAVIYIYRVYSVYGYFVISYGLATYILNLLIGFLSPKVDPELEALDPDSLPVDESDEYKPFVRRLPEFKFWYAATKAFVVAFVMTFFSFLDVPVFWPILLCYWLVLYSLTMKRLIVHMFKYRYFPFDVRKPVKLLKFLVNSVLTFLRLKKGDGGDDRPSSSNSSQGNEKQD

SEQ ID NO: 39406 - DNA, 1369 bp, Arabidopsis thaliana
  misc_feature (1)..(1369): Ceres Seq. ID no. 13491698
  misc_feature: MA Experiment ID: 108434 Result: Up-regulated in Transcription
  misc_feature: MA Experiment 108434 PARAMETER Experiment Name: At_Root_Tips_cDNA_P Parameter: Tissue Value: Root Tips
  misc_feature: MA Experiment ID: 108595 Result: Down-regulated in Transcription
  misc_feature: MA Experiment 108595 PARAMETER Experiment Name: At_Ler-pi_Ovule_cDNA_P Parameter: Plant Line Value: null
tggatttgagaaatctttttcatcatcatcactcttcctccttccccattgcttagtgttggttcccaagtcccaacctgcttcaatttaggtcgcaaacgatctcaattattcacaatccaatcttttcttcaatcgatcttcgtttctgatcaagctaataataagctaggaagagagtttagtgaagtagtgaagatgcagaatcagattgatatggtgaaggatgaagcggaagtagctgcatcgatttcagcaattaagggtgaagaatggggaaattgttcatcagtggaagatcaaccatcttttcaagaagaagaagctgctaaagttccttatgttggtgataaggaacctctgtctagtttagctgcagagtatcaatcagggagtcccattttgctggagaagattaagatactggacagtcaatatatcggaatccggcgaacaagaggagatggaaattgcttcttccgaagttttatgttctcttaccttgagcatatattggaatcacaagatcgtgctgaagtcgatcgtatcaaggtcaatgttgagaaatgtagaaagactctgcaaaacttaggttatacagattttacatttgaggacttctttgcgttgttccttgagcaactagatgacattctccaaggaactgaagagtctataagctacgatgagctggttaacagaagtagagatcagtcagtctcagattacattgtaatgttctttaggtttgttactgctggtgatatacgaacgcgtgccgattttttcgagccttttataacaggcttatcaaatgcaacagtggatcagttttgcaagtcctcggtcgaaccaatgggggaagagagtgaccatattcacataactgctttgtcggacgcacttggtgttgcaatccgtgttgtgtatcttgaccgtagctcatgtgatagtgggggcgtcactgtgaatcatcatgactttgttcctgtgggcattaccaatgagaaagatgaagaagcttctgctccatttataaccttgctgtatcgtccaggccattacgatatcctctaccccaagccatcttgtaaggtatcagacaatgtggggaaatgatcatttgacatatcgtaaatcgcattaggagacgtttacaaaaaactgtggtaatatggattcatgtggatgaaaccatggaacaatcaacaattaccccatcgatttgcattttgattatgataaaagaaccctttttgcaacactatagaatggaccgtctctttactttgatattgccttgtatttttcatgaatcatgataatatcctttatgatatttctgatgagcaagtggaatcaaagggtt

SEQ ID NO: 39407 - protein, 306 aa, Arabidopsis thaliana
  peptide (1)..(306): Ceres Seq. ID no. 13491699
  misc_feature (87)..(289): Pfam Name: OTU-like cysteine protease Pfam Description: OTU-like cysteine protease
  misc_feature (35)..(266): Homolog of NCBI NO: 8923114 NR Description: ubiquitin-specific protease otubain 1 [Homo
  misc_feature (35)..(266): Homolog of NCBI NO: 34861851 NR Description: similar to HSPC263 [Rattus norvegicus]
  misc_feature (35)..(266): Homolog of NCBI NO: 19527388 NR Description: expressed sequence AI850305 [Mus musculus]
  misc_feature (35)..(266): Homolog of NCBI NO: 13960159 NR Description: Unknown (protein for MGC:4584) [Homo sapiens]
  misc_feature (35)..(266): Homolog of NCBI NO: 6841176 NR Description: HSPC263 [Homo sapiens]
  misc_feature (35)..(293): Homolog of NCBI NO: 27717729 NR Description: similar to expressed sequence AI850305
  misc_feature (32)..(294): Homolog of NCBI NO: 19921060 NR Description: CG4968-PA [Drosophila melanogaster]
  misc_feature (98)..(295): Homolog of NCBI NO: 38175546 NR Description: putative ubiquitin-specific protease otubain 1
  misc_feature (1)..(306): Homolog of NCBI NO: 21536634 NR Description: unknown [Arabidopsis thaliana]
  misc_feature (1)..(306): Homolog of NCBI NO: 18396650 NR Description: expressed protein [Arabidopsis thaliana]
MQNQIDMVKDEAEVAASISAIKGEEWGNCSSVEDQPSFQEEEAAKVPYVGDKEPLSSLAAEYQSGSPILLEKIKILDSQYIGIRRTRGDGNCFFRSFMFSYLEHILESQDRAEVDRIKVNVEKCRKTLQNLGYTDFTFEDFFALFLEQLDDILQGTEESISYDELVNRSRDQSVSDYIVMFFRFVTAGDIRTRADFFEPFITGLSNATVDQFCKSSVEPMGEESDHIHITALSDALGVAIRVVYLDRSSCDSGGVTVNHHDFVPVGITNEKDEEASAPFITLLYRPGHYDILYPKPSCKVSDNVGK

SEQ ID NO: 39408 - protein, 300 aa, Arabidopsis thaliana
  peptide (1)..(300): Ceres Seq. ID no. 13491700
  misc_feature (81)..(283): Pfam Name: OTU-like cysteine protease Pfam Description: OTU-like cysteine protease
  misc_feature (29)..(260): Homolog of NCBI NO: 8923114 NR Description: ubiquitin-specific protease otubain 1 [Homo
  misc_feature (29)..(260): Homolog of NCBI NO: 34861851 NR Description: similar to HSPC263 [Rattus norvegicus]
  misc_feature (29)..(260): Homolog of NCBI NO: 19527388 NR Description: expressed sequence AI850305 [Mus musculus]
  misc_feature (29)..(260): Homolog of NCBI NO: 13960159 NR Description: Unknown (protein for MGC:4584) [Homo sapiens]
  misc_feature (29)..(260): Homolog of NCBI NO: 6841176 NR Description: HSPC263 [Homo sapiens]
  misc_feature (29)..(287): Homolog of NCBI NO: 27717729 NR Description: similar to expressed sequence AI850305
  misc_feature (26)..(288): Homolog of NCBI NO: 19921060 NR Description: CG4968-PA [Drosophila melanogaster]
  misc_feature (92)..(289): Homolog of NCBI NO: 38175546 NR Description: putative ubiquitin-specific protease otubain 1
  misc_feature (1)..(300): Homolog of NCBI NO: 21536634 NR Description: unknown [Arabidopsis thaliana]
  misc_feature (1)..(300): Homolog of NCBI NO: 18396650 NR Description: expressed protein [Arabidopsis thaliana]
MVKDEAEVAASISAIKGEEWGNCSSVEDQPSFQEEEAAKVPYVGDKEPLSSLAAEYQSGSPILLEKIKILDSQYIGIRRTRGDGNCFFRSFMFSYLEHILESQDRAEVDRIKVNVEKCRKTLQNLGYTDFTFEDFFALFLEQLDDILQGTEESISYDELVNRSRDQSVSDYIVMFFRFVTAGDIRTRADFFEPFITGLSNATVDQFCKSSVEPMGEESDHIHITALSDALGVAIRVVYLDRSSCDSGGVTVNHHDFVPVGITNEKDEEASAPFITLLYRPGHYDILYPKPSCKVSDNVGK

SEQ ID NO: 39409 - protein, 209 aa, Arabidopsis thaliana
  peptide (1)..(209): Ceres Seq. ID no. 13491701
  misc_feature (1)..(192): Pfam Name: OTU-like cysteine protease Pfam Description: OTU-like cysteine protease
  misc_feature (1)..(169): Homolog of NCBI NO: 8923114 NR Description: ubiquitin-specific protease otubain 1 [Homo
  misc_feature (1)..(169): Homolog of NCBI NO: 34861851 NR Description: similar to HSPC263 [Rattus norvegicus]
  misc_feature (1)..(169): Homolog of NCBI NO: 13960159 NR Description: Unknown (protein for MGC:4584) [Homo sapiens]
  misc_feature (1)..(169): Homolog of NCBI NO: 19527388 NR Description: expressed sequence AI850305 [Mus musculus]
  misc_feature (1)..(169): Homolog of NCBI NO: 6841176 NR Description: HSPC263 [Homo sapiens]
  misc_feature (1)..(196): Homolog of NCBI NO: 27717729 NR Description: similar to expressed sequence AI850305
  misc_feature (1)..(197): Homolog of NCBI NO: 19921060 NR Description: CG4968-PA [Drosophila melanogaster]
  misc_feature (1)..(198): Homolog of NCBI NO: 38175546 NR Description: putative ubiquitin-specific protease otubain 1
  misc_feature (1)..(209): Homolog of NCBI NO: 21536634 NR Description: unknown [Arabidopsis thaliana]
  misc_feature (1)..(209): Homolog of NCBI NO: 18396650 NR Description: expressed protein [Arabidopsis thaliana]
MFSYLEHILESQDRAEVDRIKVNVEKCRKTLQNLGYTDFTFEDFFALFLEQLDDILQGTEESISYDELVNRSRDQSVSDYIVMFFRFVTAGDIRTRADFFEPFITGLSNATVDQFCKSSVEPMGEESDHIHITALSDALGVAIRVVYLDRSSCDSGGVTVNHHDFVPVGITNEKDEEASAPFITLLYRPGHYDILYPKPSCKVSDNVGK

SEQ ID NO: 39410 - DNA, 1621 bp, Arabidopsis thaliana
  misc_feature (1)..(1621): Ceres Seq. ID no. 12328588
  misc_feature: MA Experiment ID: 108434 Result: Up-regulated in Transcription
  misc_feature: MA Experiment 108434 PARAMETER Experiment Name: At_Root_Tips_cDNA_P Parameter: Tissue Value: Root Tips
  misc_feature: MA Experiment ID: 108576 Result: Down-regulated in Transcription
  misc_feature: MA Experiment 108576 PARAMETER Experiment Name: At_42deg_Heat_cDNA_P Parameter: Temperature (deg C) Value: 42 vs. 22
  misc_feature: MA Experiment 108576 PARAMETER Experiment Name: At_42deg_Heat_cDNA_P Parameter: Timepoint (hr) Value: 1
  misc_feature: MA Experiment 108576 PARAMETER Experiment Name: At_42deg_Heat_cDNA_P Parameter: Tissue Value: Aerial
  misc_feature: MA Experiment ID: 20000069 Result: Down-regulated in Transcription
  misc_feature: MA Experiment 20000069 PARAMETER Experiment Name: At_100uM_ABA_Mutants_cDNA_P Parameter: Plant Line Value: CS23
  misc_feature: MA Experiment 20000069 PARAMETER Experiment Name: At_100uM_ABA_Mutants_cDNA_P Parameter: Timepoint (hr) Value: 6
  misc_feature: MA Experiment 20000069 PARAMETER Experiment Name: At_100uM_ABA_Mutants_cDNA_P Parameter: Tissue Value: Aerial
  misc_feature: MA Experiment 20000069 PARAMETER Experiment Name: At_100uM_ABA_Mutants_cDNA_P Parameter: Treatment Value: 100uM ABA vs. No Treatment
  misc_feature: MA Experiment ID: 20000087 Result: Down-regulated in Transcription
  misc_feature: MA Experiment 20000087 PARAMETER Experiment Name: At_100uM_ABA_Mutants_cDNA_P Parameter: Plant Line Value: WS
  misc_feature: MA Experiment 20000087 PARAMETER Experiment Name: At_100uM_ABA_Mutants_cDNA_P Parameter: Timepoint (hr) Value: 6
  misc_feature: MA Experiment 20000087 PARAMETER Experiment Name: At_100uM_ABA_Mutants_cDNA_P Parameter: Tissue Value: Aerial
  misc_feature: MA Experiment 20000087 PARAMETER Experiment Name: At_100uM_ABA_Mutants_cDNA_P Parameter: Treatment Value: 100uM ABA vs. No Treatment
  misc_feature: MA Experiment ID: 20000111 Result: Down-regulated in Transcription
  misc_feature: MA Experiment 20000111 PARAMETER Experiment Name: At_42deg_Heat_cDNA_P Parameter: Temperature (deg C) Value: 42 vs. 22
  misc_feature: MA Experiment 20000111 PARAMETER Experiment Name: At_42deg_Heat_cDNA_P Parameter: Timepoint (hr) Value: 6
  misc_feature: MA Experiment 20000111 PARAMETER Experiment Name: At_42deg_Heat_cDNA_P Parameter: Tissue Value: Aerial
  misc_feature: MA Experiment ID: 20000171 Result: Down-regulated in Transcription
  misc_feature: MA Experiment 20000171 PARAMETER Experiment Name: At_42deg_Heat_P Parameter: Age (day) Value: 14
  misc_feature: MA Experiment 20000171 PARAMETER Experiment Name: At_42deg_Heat_P Parameter: Organism Value: A. thaliana
  misc_feature: MA Experiment 20000171 PARAMETER Experiment Name: At_42deg_Heat_P Parameter: Plant Line Value: WS
  misc_feature: MA Experiment 20000171 PARAMETER Experiment Name: At_42deg_Heat_P Parameter: Temperature (deg C) Value: 42 vs. 22
  misc_feature: MA Experiment 20000171 PARAMETER Experiment Name: At_42deg_Heat_P Parameter: Timepoint (hr) Value: 1
  misc_feature: MA Experiment 20000171 PARAMETER Experiment Name: At_42deg_Heat_P Parameter: Tissue Value: Aerial
  misc_feature: MA Experiment ID: 20000173 Result: Down-regulated in Transcription
  misc_feature: MA Experiment 20000173 PARAMETER Experiment Name: At_42deg_Heat_P Parameter: Age (day) Value: 14
  misc_feature: MA Experiment 20000173 PARAMETER Experiment Name: At_42deg_Heat_P Parameter: Organism Value: A. thaliana
  misc_feature: MA Experiment 20000173 PARAMETER Experiment Name: At_42deg_Heat_P Parameter: Plant Line Value: WS
  misc_feature: MA Experiment 20000173 PARAMETER Experiment Name: At_42deg_Heat_P Parameter: Temperature (deg C) Value: 42 vs. 22
  misc_feature: MA Experiment 20000173 PARAMETER Experiment Name: At_42deg_Heat_P Parameter: Timepoint (hr) Value: 6
  misc_feature: MA Experiment 20000173 PARAMETER Experiment Name: At_42deg_Heat_P Parameter: Tissue Value: Aerial
  misc_feature: MA Experiment ID: 20000264 Result: Up-regulated in Transcription
  misc_feature: MA Experiment 20000264 PARAMETER Experiment Name: At_Open_Flower_P Parameter: Age (day) Value: 21
  misc_feature: MA Experiment 20000264 PARAMETER Experiment Name: At_Open_Flower_P Parameter: Plant Line Value: WS
  misc_feature: MA Experiment 20000264 PARAMETER Experiment Name: At_Open_Flower_P Parameter: Tissue Value: Open Flower vs. Whole Plant
  misc_feature: MA Experiment ID: 20000286 Result: Up-regulated in Transcription
  misc_feature: MA Experiment 20000286 PARAMETER Experiment Name: At_Open_Flower_P Parameter: Age (day) Value: 21
  misc_feature: MA Experiment 20000286 PARAMETER Experiment Name: At_Open_Flower_P Parameter: Plant Line Value: WS
  misc_feature: MA Experiment 20000286 PARAMETER Experiment Name: At_Open_Flower_P Parameter: Tissue Value: Half Open vs. Whole Plant
  misc_feature: MA Experiment ID: 20000794 Result: Up-regulated in Transcription
  misc_feature: MA Experiment 20000794 PARAMETER Experiment Name: At_Petals_P Parameter: Age (day) Value: 23-25 days
  misc_feature: MA Experiment 20000794 PARAMETER Experiment Name: At_Petals_P Parameter: Plant Line Value: WS
  misc_feature: MA Experiment 20000794 PARAMETER Experiment Name: At_Petals_P Parameter: Tissue Value: Petals vs. Whole plant
  misc_feature: MA Experiment ID: 20001911 Result: Down-regulated in Transcription
  misc_feature: MA Experiment 20001911 PARAMETER Experiment Name: At_Drought_Reproduction_P Parameter: Age (day) Value: 40
  misc_feature: MA Experiment 20001911 PARAMETER Experiment Name: At_Drought_Reproduction_P Parameter: Organism Value: A. thaliana
  misc_feature: MA Experiment 20001911 PARAMETER Experiment Name: At_Drought_Reproduction_P Parameter: Plant Line Value: WS
  misc_feature: MA Experiment 20001911 PARAMETER Experiment Name: At_Drought_Reproduction_P Parameter: Timepoint (day) Value: 10
  misc_feature: MA Experiment 20001911 PARAMETER Experiment Name: At_Drought_Reproduction_P Parameter: Tissue Value: Flowers
  misc_feature: MA Experiment 20001911 PARAMETER Experiment Name: At_Drought_Reproduction_P Parameter: Treatment Value: Drought vs. No Drought
aattgatgctatgacaaacaacaacagcaagaaatttgtgtgagagtagagagtcttgcttcagttgaatcaaagattggtcctttttttttcgttttctctttcctgctttttttgtttgtagtttctgatctctcaggaaggctttttataaatttgccctcaatttctccgtccctactactctttttgatcaatttctacgggaaaaagcaccaatctttaaacccgggcatgtccttgtaatcgagtatgttgtgtaagtgatgaatttgtggtgagatctggtgagaagtttcctcttttttctcagattgcggtaaaaaaaaagagtttttaataaggaagagattgagattagattttatcgcttttgtttgtgtgatatgggtaacgtgaacgcgagagaagaagcgaatagtaacaacgcttctgctgttgaagacgaagacgctgagatttgttctcgtgaagctatgtctgctgcttctgatggtaaccatgtcgctcctcctgagcttatgggtcaatctcctcctcatagccctcgagctactcagtctcctctcatgtttgctcctcaggttccggtgcttccacttcaaagacctgatgaaattcatatccctaatccttcgtggatgcaatcgccatcttcgttgtatgaagaagcttctaacgaacaaggaatccctacgatgatcacttggtgtcatggaggcaaggagattgctgtggagggatcatgggataattggaagacaagaagtcggctgcagagatctgggaaggacttcactatcatgaaagtgttaccttcaggagtctatgagtacaggttcattgtggatggacagtggaggcatgcccctgagctccctttagctagagatgatgctgggaacactttcaacattttggatcttcaggactatgttcctgaagacattcaaagcatatctgggtttgagcctccgcaatctccagagaatagttacagcaacttgcttctcggagctgaggactactctaaagaaccgcctgtggttcccccgcacctacaaatgacactgctgaacttgccggcagccaatcctgacattccatctccgctgccgagacctcagcatgtcattctcaatcatctttacatgcagaagggcaaaagtggtccttctgtggttgcgcttggttccactcaccgatttctagcaaagtatgtaactgtggtgctctacaaatccctgcagaggtgagtgaagatgatgcaattccaatgggtagttagcatgtggatcctcggcatgctcttatctattttggtgttaaaacgttaactcatggagtatgggtgaggctatatagaaaggagacacacgaagagagttatttccaggcaaagtattccctcgatacagcgaattttgttgtctttaaaagttgtcaataaggtttaccaacagaatgaagatgcagtattcagtcagtgtctgtgtaatcttttgatttgaagacttcatcatctgttttttttttagcatagaagaatgcaggaacgacttcacttgtaaaaccggcaaatcttttttatggttttgttttggggctttcaagttttcac

SEQ ID NO: 39411 - protein, 289 aa, Arabidopsis thaliana
  peptide (1)..(289): Ceres Seq. ID no. 12328589
  misc_feature (197)..(287): Pfam Name: 5'-AMP-activated protein kinase, beta subunit, Pfam Description: 5'-AMP-activated protein kinase, beta subunit,
  misc_feature (29)..(287): Homolog of NCBI NO: 12018316 NR Description: AMP-activated protein kinase beta-2 regulatory
  misc_feature (29)..(287): Homolog of NCBI NO: 37805455 NR Description: Prkab2 protein [Mus musculus]
  misc_feature (49)..(289): Homolog of NCBI NO: 22324436 NR Description: AKIN beta1-like protein [Oryza sativa (japonica
  misc_feature (38)..(247): Homolog of NCBI NO: 29725558 NR Description: SNF1 kinase complex anchoring protein
  misc_feature (1)..(289): Homolog of NCBI NO: 6686782 NR Description: AKIN gamma [Arabidopsis thaliana]
  misc_feature (1)..(289): Homolog of NCBI NO: 15242175 NR Description: AKIN beta1; protein id: At5g21170.1, supported by
  misc_feature (1)..(289): Homolog of NCBI NO: 5702015 NR Description: GAL83 protein [Solanum tuberosum]
  misc_feature (62)..(289): Homolog of NCBI NO: 11935162 NR Description: SNF1-related kinase complex anchoring protein
  misc_feature (31)..(289): Homolog of NCBI NO: 15234895 NR Description: kinase like protein; protein id: At4g16360.1
  misc_feature (1)..(289): Homolog of NCBI NO: 6686784 NR Description: AKIN beta2 [Arabidopsis thaliana]
MGNVNAREEANSNNASAVEDEDAEICSREAMSAASDGNHVAPPELMGQSPPHSPRATQSPLMFAPQVPVLPLQRPDEIHIPNPSWMQSPSSLYEEASNEQGIPTMITWCHGGKEIAVEGSWDNWKTRSRLQRSGKDFTIMKVLPSGVYEYRFIVDGQWRHAPELPLARDDAGNTFNILDLQDYVPEDIQSISGFEPPQSPENSYSNLLLGAEDYSKEPPVVPPHLQMTLLNLPAANPDIPSPLPRPQHVILNHLYMQKGKSGPSVVALGSTHRFLAKYVTVVLYKSLQR

SEQ ID NO: 39412 - protein, 259 aa, Arabidopsis thaliana
  peptide (1)..(259): Ceres Seq. ID no. 12328590
  misc_feature (167)..(257): Pfam Name: 5'-AMP-activated protein kinase, beta subunit, Pfam Description: 5'-AMP-activated protein kinase, beta subunit,
  misc_feature (1)..(257): Homolog of NCBI NO: 12018316 NR Description: AMP-activated protein kinase beta-2 regulatory
  misc_feature (1)..(257): Homolog of NCBI NO: 37805455 NR Description: Prkab2 protein [Mus musculus]
  misc_feature (19)..(259): Homolog of NCBI NO: 22324436 NR Description: AKIN beta1-like protein [Oryza sativa (japonica
  misc_feature (8)..(217): Homolog of NCBI NO: 29725558 NR Description: SNF1 kinase complex anchoring protein
  misc_feature (1)..(259): Homolog of NCBI NO: 6686782 NR Description: AKIN gamma [Arabidopsis thaliana]
  misc_feature (1)..(259): Homolog of NCBI NO: 15242175 NR Description: AKIN beta1; protein id: At5g21170.1, supported by
  misc_feature (1)..(259): Homolog of NCBI NO: 5702015 NR Description: GAL83 protein [Solanum tuberosum]
  misc_feature (32)..(259): Homolog of NCBI NO: 11935162 NR Description: SNF1-related kinase complex anchoring protein
  misc_feature (1)..(259): Homolog of NCBI NO: 15234895 NR Description: kinase like protein; protein id: At4g16360.1
  misc_feature (1)..(259): Homolog of NCBI NO: 6686784 NR Description: AKIN beta2 [Arabidopsis thaliana]
MSAASDGNHVAPPELMGQSPPHSPRATQSPLMFAPQVPVLPLQRPDEIHIPNPSWMQSPSSLYEEASNEQGIPTMITWCHGGKEIAVEGSWDNWKTRSRLQRSGKDFTIMKVLPSGVYEYRFIVDGQWRHAPELPLARDDAGNTFNILDLQDYVPEDIQSISGFEPPQSPENSYSNLLLGAEDYSKEPPVVPPHLQMTLLNLPAANPDIPSPLPRPQHVILNHLYMQKGKSGPSVVALGSTHRFLAKYVTVVLYKSLQR

SEQ ID NO: 39413 - protein, 244 aa, Arabidopsis thaliana
  peptide (1)..(244): Ceres Seq. ID no. 12328591
  misc_feature (152)..(242): Pfam Name: 5'-AMP-activated protein kinase, beta subunit, Pfam Description: 5'-AMP-activated protein kinase, beta subunit,
  misc_feature (1)..(242): Homolog of NCBI NO: 12018316 NR Description: AMP-activated protein kinase beta-2 regulatory
  misc_feature (1)..(242): Homolog of NCBI NO: 37805455 NR Description: Prkab2 protein [Mus musculus]
  misc_feature (4)..(244): Homolog of NCBI NO: 22324436 NR Description: AKIN beta1-like protein [Oryza sativa (japonica
  misc_feature (1)..(202): Homolog of NCBI NO: 29725558 NR Description: SNF1 kinase complex anchoring protein
  misc_feature (1)..(244): Homolog of NCBI NO: 6686782 NR Description: AKIN gamma [Arabidopsis thaliana]
  misc_feature (1)..(244): Homolog of NCBI NO: 15242175 NR Description: AKIN beta1; protein id: At5g21170.1, supported by
  misc_feature (1)..(244): Homolog of NCBI NO: 5702015 NR Description: GAL83 protein [Solanum tuberosum]
  misc_feature (17)..(244): Homolog of NCBI NO: 11935162 NR Description: SNF1-related kinase complex anchoring protein
  misc_feature (1)..(244): Homolog of NCBI NO: 15234895 NR Description: kinase like protein; protein id: At4g16360.1
  misc_feature (1)..(244): Homolog of NCBI NO: 6686784 NR Description: AKIN beta2 [Arabidopsis thaliana]
MGQSPPHSPRATQSPLMFAPQVPVLPLQRPDEIHIPNPSWMQSPSSLYEEASNEQGIPTMITWCHGGKEIAVEGSWDNWKTRSRLQRSGKDFTIMKVLPSGVYEYRFIVDGQWRHAPELPLARDDAGNTFNILDLQDYVPEDIQSISGFEPPQSPENSYSNLLLGAEDYSKEPPVVPPHLQMTLLNLPAANPDIPSPLPRPQHVILNHLYMQKGKSGPSVVALGSTHRFLAKYVTVVLYKSLQR

SEQ ID NO: 39414 - DNA, 1758 bp, Arabidopsis thaliana; identical to SEQ ID NO: 37701
  misc_feature (1)..(1758): Ceres Seq. ID no. 13580639
  misc_feature: MA Experiment ID: 20000180 Result: Up-regulated in Transcription
  misc_feature: MA Experiment 20000180 PARAMETER Experiment Name: At_Germinating_Seeds_P Parameter: Age (hr) Value: 24 vs. 0
  misc_feature: MA Experiment 20000180 PARAMETER Experiment Name: At_Germinating_Seeds_P Parameter: Tissue Value: Germinating Seeds
  misc_feature: MA Experiment ID: 20000184 Result: Down-regulated in Transcription
  misc_feature: MA Experiment 20000184 PARAMETER Experiment Name: At_Shoots__P Parameter: Age (day) Value: 7
  misc_feature: MA Experiment 20000184 PARAMETER Experiment Name: At_Shoots__P Parameter: Tissue Value: Shoots vs. Whole Plant
  misc_feature: MA Experiment ID: 20000227 Result: Down-regulated in Transcription
  misc_feature: MA Experiment 20000227 PARAMETER Experiment Name: At_Root-Tips-vs-Tops_P Parameter: Tissue Value: Root Tips vs. Root Tops
  misc_feature: MA Experiment ID: 20000264 Result: Up-regulated in Transcription
  misc_feature: MA Experiment 20000264 PARAMETER Experiment Name: At_Open_Flower_P Parameter: Age (day) Value: 21
  misc_feature: MA Experiment 20000264 PARAMETER Experiment Name: At_Open_Flower_P Parameter: Plant Line Value: WS
  misc_feature: MA Experiment 20000264 PARAMETER Experiment Name: At_Open_Flower_P Parameter: Tissue Value: Open Flower vs. Whole Plant
  misc_feature: MA Experiment ID: 20000265 Result: Down-regulated in Transcription
  misc_feature: MA Experiment 20000265 PARAMETER Experiment Name: At_Open_Flower_P Parameter: Age (day) Value: 21
  misc_feature: MA Experiment 20000265 PARAMETER Experiment Name: At_Open_Flower_P Parameter: Plant Line Value: WS
  misc_feature: MA Experiment 20000265 PARAMETER Experiment Name: At_Open_Flower_P Parameter: Tissue Value: Closed Flower vs. Whole Plant
  misc_feature: MA Experiment ID: 20000438 Result: Down-regulated in Transcription
  misc_feature: MA Experiment 20000438 PARAMETER Experiment Name: At_Shoots__P Parameter: Age (day) Value: 14
  misc_feature: MA Experiment 20000438 PARAMETER Experiment Name: At_Shoots__P Parameter: Tissue Value: Shoots vs. Whole Plant
  misc_feature: MA Experiment ID: 20000452 Result: Up-regulated in Transcription
  misc_feature: MA Experiment 20000452 PARAMETER Experiment Name: At_CS6879_Shoots-Roots_P Parameter: Age (day) Value: 14
  misc_feature: MA Experiment 20000452 PARAMETER Experiment Name: At_CS6879_Shoots-Roots_P Parameter: Organism Value: A. thaliana
  misc_feature: MA Experiment 20000452 PARAMETER Experiment Name: At_CS6879_Shoots-Roots_P Parameter: Plant Line Value: CS6879 vs. WS
  misc_feature: MA Experiment 20000452 PARAMETER Experiment Name: At_CS6879_Shoots-Roots_P Parameter: Tissue Value: Shoots
  misc_feature: MA Experiment ID: 20000453 Result: Up-regulated in Transcription
  misc_feature: MA Experiment 20000453 PARAMETER Experiment Name: At_100uM_ABA_P Parameter: Age (day) Value: 15
  misc_feature: MA Experiment 20000453 PARAMETER Experiment Name: At_100uM_ABA_P Parameter: Organism Value: A. thaliana
  misc_feature: MA Experiment 20000453 PARAMETER Experiment Name: At_100uM_ABA_P Parameter: Plant Line Value: WS
  misc_feature: MA Experiment 20000453 PARAMETER Experiment Name: At_100uM_ABA_P Parameter: Timepoint (hr) Value: 24
  misc_feature: MA Experiment 20000453 PARAMETER Experiment Name: At_100uM_ABA_P Parameter: Tissue Value: Aerial
  misc_feature: MA Experiment 20000453 PARAMETER Experiment Name: At_100uM_ABA_P Parameter: Treatment Value: 100uM ABA vs. No Treatment
  misc_feature: MA Experiment ID: 20000495 Result: Up-regulated in Transcription
  misc_feature: MA Experiment 20000495 PARAMETER Experiment Name: At_Guard_Cells_P Parameter: Harvest Date Value: 8/2/2002
  misc_feature: MA Experiment 20000495 PARAMETER Experiment Name: At_Guard_Cells_P Parameter: Organism Value: A. thaliana
  misc_feature: MA Experiment 20000495 PARAMETER Experiment Name: At_Guard_Cells_P Parameter: Tissue Value: Guard Cells vs. Leaves
  misc_feature: MA Experiment ID: 20000709 Result: Down-regulated in Transcription
  misc_feature: MA Experiment 20000709 PARAMETER Experiment Name: At_15mM_NH4NO3_L-to-H_P Parameter: Age (hr) Value: 14
  misc_feature: MA Experiment 20000709 PARAMETER Experiment Name: At_15mM_NH4NO3_L-to-H_P Parameter: Organism Value: A. thaliana
  misc_feature: MA Experiment 20000709 PARAMETER Experiment Name: At_15mM_NH4NO3_L-to-H_P Parameter: Plant Line Value: WS
  misc_feature: MA Experiment 20000709 PARAMETER Experiment Name: At_15mM_NH4NO3_L-to-H_P Parameter: Timepoint (hr) Value: 4
  misc_feature: MA Experiment 20000709 PARAMETER Experiment Name: At_15mM_NH4NO3_L-to-H_P Parameter: Tissue Value: Aerial
  misc_feature: MA Experiment 20000709 PARAMETER Experiment Name: At_15mM_NH4NO3_L-to-H_P Parameter: Treatment Value: 15mM NH4NO3 vs. 30mM Mannitol
  misc_feature: MA Experiment ID: 20000794 Result: Up-regulated in Transcription
  misc_feature: MA Experiment 20000794 PARAMETER Experiment Name: At_Petals_P Parameter: Age (day) Value: 23-25 days
  misc_feature: MA Experiment 20000794 PARAMETER Experiment Name: At_Petals_P Parameter: Plant Line Value: WS
  misc_feature: MA Experiment 20000794 PARAMETER Experiment Name: At_Petals_P Parameter: Tissue Value: Petals vs. Whole plant
  misc_feature: MA Experiment ID: 20001458 Result: Down-regulated in Transcription
  misc_feature: MA Experiment 20001458 PARAMETER Experiment Name: At_50mM_NH4NO3_L-to-H_P Parameter: Age (day) Value: Undefined
  misc_feature: MA Experiment 20001458 PARAMETER Experiment Name: At_50mM_NH4NO3_L-to-H_P Parameter: Organism Value: Undefined
  misc_feature: MA Experiment 20001458 PARAMETER Experiment Name: At_50mM_NH4NO3_L-to-H_P Parameter: Plant Line Value: Undefined
  misc_feature: MA Experiment 20001458 PARAMETER Experiment Name: At_50mM_NH4NO3_L-to-H_P Parameter: Timepoint (hr) Value: 2
  misc_feature: MA Experiment 20001458 PARAMETER Experiment Name: At_50mM_NH4NO3_L-to-H_P Parameter: Tissue Value: Siliques
  misc_feature: MA Experiment 20001458 PARAMETER Experiment Name: At_50mM_NH4NO3_L-to-H_P Parameter: Treatment Value: 50mM NH4NO3 vs. 100mM Manitol
  misc_feature: MA Experiment ID: 20001503 Result: Up-regulated in Transcription
  misc_feature: MA Experiment 20001503 PARAMETER Experiment Name: At_Far-red-enriched_P Parameter: Age (day) Value: 7
  misc_feature: MA Experiment 20001503 PARAMETER Experiment Name: At_Far-red-enriched_P Parameter: Light Value: Far-red enriched vs. White
  misc_feature: MA Experiment 20001503 PARAMETER Experiment Name: At_Far-red-enriched_P Parameter: Organism Value: A. thaliana
  misc_feature: MA Experiment 20001503 PARAMETER Experiment Name: At_Far-red-enriched_P Parameter: Plant Line Value: Columbia
  misc_feature: MA Experiment 20001503 PARAMETER Experiment Name: At_Far-red-enriched_P Parameter: Timepoint (day) Value: 3
  misc_feature: MA Experiment 20001503 PARAMETER Experiment Name: At_Far-red-enriched_P Parameter: Tissue Value: Whole Plant
  misc_feature: MA Experiment ID: 20001556 Result: Down-regulated in Transcription
  misc_feature: MA Experiment 20001556 PARAMETER Experiment Name: At_Drought_Soil_Dry_P Parameter: Age (day) Value: 26
  misc_feature: MA Experiment 20001556 PARAMETER Experiment Name: At_Drought_Soil_Dry_P Parameter: Organism Value: A. thaliana
  misc_feature: MA Experiment 20001556 PARAMETER Experiment Name: At_Drought_Soil_Dry_P Parameter: Plant Line Value: WS
  misc_feature: MA Experiment 20001556 PARAMETER Experiment Name: At_Drought_Soil_Dry_P Parameter: Post Timepoint (hr) Value: None
  misc_feature: MA Experiment 20001556 PARAMETER Experiment Name: At_Drought_Soil_Dry_P Parameter: Post-Treatment Value: None
  misc_feature: MA Experiment 20001556 PARAMETER Experiment Name: At_Drought_Soil_Dry_P Parameter: Timepoint (day) Value: 12
  misc_feature: MA Experiment 20001556 PARAMETER Experiment Name: At_Drought_Soil_Dry_P Parameter: Treatment Value: Drought vs. No Drought
  misc_feature: MA Experiment ID: 20001557 Result: Down-regulated in Transcription
  misc_feature: MA Experiment 20001557 PARAMETER Experiment Name: At_Drought_Soil_Dry_P Parameter: Age (day) Value: 27
  misc_feature: MA Experiment 20001557 PARAMETER Experiment Name: At_Drought_Soil_Dry_P Parameter: Organism Value: A. thaliana
  misc_feature: MA Experiment 20001557 PARAMETER Experiment Name: At_Drought_Soil_Dry_P Parameter: Plant Line Value: WS
  misc_feature: MA Experiment 20001557 PARAMETER Experiment Name: At_Drought_Soil_Dry_P Parameter: Post Timepoint (hr) Value: 3
  misc_feature: MA Experiment 20001557 PARAMETER Experiment Name: At_Drought_Soil_Dry_P Parameter: Post-Treatment Value: Re-Water vs. No Drought
  misc_feature: MA Experiment 20001557 PARAMETER Experiment Name: At_Drought_Soil_Dry_P Parameter: Timepoint (day) Value: 13
  misc_feature: MA Experiment 20001557 PARAMETER Experiment Name: At_Drought_Soil_Dry_P Parameter: Treatment Value: Drought vs. No Drought
  misc_feature: MA Experiment ID: 20001558 Result: Down-regulated in Transcription
  misc_feature: MA Experiment 20001558 PARAMETER Experiment Name: At_Drought_Soil_Dry_P Parameter: Age (day) Value: 27
  misc_feature: MA Experiment 20001558 PARAMETER Experiment Name: At_Drought_Soil_Dry_P Parameter: Organism Value: A. thaliana
  misc_feature: MA Experiment 20001558 PARAMETER Experiment Name: At_Drought_Soil_Dry_P Parameter: Plant Line Value: WS
  misc_feature: MA Experiment 20001558 PARAMETER Experiment Name: At_Drought_Soil_Dry_P Parameter: Post Timepoint (hr) Value: 6
  misc_feature: MA Experiment 20001558 PARAMETER Experiment Name: At_Drought_Soil_Dry_P Parameter: Post-Treatment Value: Re-Water vs. No Drought
  misc_feature: MA Experiment 20001558 PARAMETER Experiment Name: At_Drought_Soil_Dry_P Parameter: Timepoint (day) Value: 13
  misc_feature: MA Experiment 20001558 PARAMETER Experiment Name: At_Drought_Soil_Dry_P Parameter: Treatment Value: Drought vs. No Drought
  misc_feature: MA Experiment ID: 20001757 Result: Down-regulated in Transcription
  misc_feature: MA Experiment 20001757 PARAMETER Experiment Name: At_50mM_NH4NO3_L-to-H_P Parameter: Timepoint (hr) Value: 6
  misc_feature: MA Experiment 20001757 PARAMETER Experiment Name: At_50mM_NH4NO3_L-to-H_P Parameter: Tissue Value: Leaf
  misc_feature: MA Experiment 20001757 PARAMETER Experiment Name: At_50mM_NH4NO3_L-to-H_P Parameter: Treatment Value: 50mM NH4NO3 vs 100mM Mannitol
  misc_feature: MA Experiment ID: 20001773 Result: Up-regulated in Transcription
  misc_feature: MA Experiment 20001773 PARAMETER Experiment Name: At_Far-red-enriched-adult_P Parameter: Age (day) Value: 30
  misc_feature: MA Experiment 20001773 PARAMETER Experiment Name: At_Far-red-enriched-adult_P Parameter: Light Value: Far-red enriched vs. White
  misc_feature: MA Experiment 20001773 PARAMETER Experiment Name: At_Far-red-enriched-adult_P Parameter: Organism Value: A. thaliana
  misc_feature: MA Experiment 20001773 PARAMETER Experiment Name: At_Far-red-enriched-adult_P Parameter: Plant Line Value: Columbia
  misc_feature: MA Experiment 20001773 PARAMETER Experiment Name: At_Far-red-enriched-adult_P Parameter: Timepoint (hr) Value: 48
  misc_feature: MA Experiment 20001773 PARAMETER Experiment Name: At_Far-red-enriched-adult_P Parameter: Tissue Value: Aerial
  misc_feature: MA Experiment ID: 20001911 Result: Down-regulated in Transcription
  misc_feature: MA Experiment 20001911 PARAMETER Experiment Name: At_Drought_Reproduction_P Parameter: Age (day) Value: 40
  misc_feature: MA Experiment 20001911 PARAMETER Experiment Name: At_Drought_Reproduction_P Parameter: Organism Value: A. thaliana
  misc_feature: MA Experiment 20001911 PARAMETER Experiment Name: At_Drought_Reproduction_P Parameter: Plant Line Value: WS
  misc_feature: MA Experiment 20001911 PARAMETER Experiment Name: At_Drought_Reproduction_P Parameter: Timepoint (day) Value: 10
  misc_feature: MA Experiment 20001911 PARAMETER Experiment Name: At_Drought_Reproduction_P Parameter: Tissue Value: Flowers
  misc_feature: MA Experiment 20001911 PARAMETER Experiment Name: At_Drought_Reproduction_P Parameter: Treatment Value: Drought vs. No Drought

SEQ ID NO: 39415 - protein, 474 aa, Arabidopsis thaliana; identical to SEQ ID NO: 37702
  peptide (1)..(474): Ceres Seq. ID no. 13580640
  misc_feature (87)..(471): Pfam Name: Eukaryotic aspartyl protease Pfam Description: Eukaryotic aspartyl protease
  misc_feature (87)..(471): Pfam Name: Eukaryotic aspartyl protease Pfam Description: Eukaryotic aspartyl protease
  misc_feature (60)..(473): Homolog of NCBI NO: 34912520 NR Description: chloroplast nucleoid DNA-binding protein
  misc_feature (54)..(473): Homolog of NCBI NO: 25406599 NR Description: probable aspartyl proteinase, 105611-106921
  misc_feature (1)..(473): Homolog of NCBI NO: 18412482 NR Description: aspartyl protease -related [Arabidopsis thaliana]
  misc_feature (1)..(473): Homolog of NCBI NO: 21595063 NR Description: putative aspartyl protease [Arabidopsis thaliana]
  misc_feature (30)..(474): Homolog of NCBI NO: 24430421 NR Description: 41 kD chloroplast nucleoid DNA binding protein
  misc_feature (60)..(473): Homolog of NCBI NO: 34912520 NR Description: chloroplast nucleoid DNA-binding protein
  misc_feature (1)..(473): Homolog of NCBI NO: 18412482 NR Description: aspartyl protease -related [Arabidopsis thaliana]
  misc_feature (30)..(474): Homolog of NCBI NO: 24430421 NR Description: 41 kD chloroplast nucleoid DNA binding protein
  misc_feature (1)..(474): Homolog of NCBI NO: 22326716 NR Description: nucleoid DNA-binding protein cnd41 - like protein
  misc_feature (59)..(474): Homolog of NCBI NO: 11358588 NR Description: nucleoid DNA-binding protein cnd41-like protein -
  misc_feature (1)..(473): Homolog of NCBI NO: 24417232 NR Description: unknown [Arabidopsis thaliana]
  misc_feature (1)..(473): Homolog of NCBI NO: 15238250 NR Description: nucleoid DNA-binding protein cnd41 - like protein
  misc_feature (12)..(474): Homolog of NCBI NO: 7489168 NR Description: nucleoid DNA-binding protein cnd41, chloroplast -
  misc_feature (1)..(473): Homolog of NCBI NO: 21595063 NR Description: putative aspartyl protease [Arabidopsis thaliana]
  misc_feature (54)..(473): Homolog of NCBI NO: 25406599 NR Description: probable aspartyl proteinase, 105611-106921
  misc_feature (12)..(474): Homolog of NCBI NO: 7489168 NR Description: nucleoid DNA-binding protein cnd41, chloroplast -
  misc_feature (1)..(473): Homolog of NCBI NO: 15238250 NR Description: nucleoid DNA-binding protein cnd41 - like protein
  misc_feature (1)..(473): Homolog of NCBI NO: 24417232 NR Description: unknown [Arabidopsis thaliana]
  misc_feature (59)..(474): Homolog of NCBI NO: 11358588 NR Description: nucleoid DNA-binding protein cnd41-like protein -
  misc_feature (1)..(474): Homolog of NCBI NO: 22326716 NR Description: nucleoid DNA-binding protein cnd41 - like protein

SEQ ID NO: 39416 - DNA, 1309 bp, Arabidopsis thaliana
  misc_feature (1)..(1309): Ceres Seq. ID no. 12330719
  misc_feature: MA Experiment ID: 108462 Result: Down-regulated in Transcription
  misc_feature: MA Experiment 108462 PARAMETER Experiment Name: At_Germinating_Seeds_cDNA_P Parameter: Age (day) Value: 2 vs. 0
  misc_feature: MA Experiment 108462 PARAMETER Experiment Name: At_Germinating_Seeds_cDNA_P Parameter: Tissue Value: Germinating Seeds
  misc_feature: MA Experiment ID: 108463 Result: Down-regulated in Transcription
  misc_feature: MA Experiment 108463 PARAMETER Experiment Name: At_Germinating_Seeds_cDNA_P Parameter: Age (day) Value: 3 vs. 0
  misc_feature: MA Experiment 108463 PARAMETER Experiment Name: At_Germinating_Seeds_cDNA_P Parameter: Tissue Value: Germinating Seeds
  misc_feature: MA Experiment ID: 108464 Result: Down-regulated in Transcription
  misc_feature: MA Experiment 108464 PARAMETER Experiment Name: At_Germinating_Seeds_cDNA_P Parameter: Age (day) Value: 4 vs. 0
  misc_feature: MA Experiment 108464 PARAMETER Experiment Name: At_Germinating_Seeds_cDNA_P Parameter: Tissue Value: Germinating Seeds
  misc_feature: MA Experiment ID: 20000180 Result: Down-regulated in Transcription
  misc_feature: MA Experiment 20000180 PARAMETER Experiment Name: At_Germinating_Seeds_P Parameter: Age (hr) Value: 24 vs. 0
  misc_feature: MA Experiment 20000180 PARAMETER Experiment Name: At_Germinating_Seeds_P Parameter: Tissue Value: Germinating Seeds
cacttttaattaaaacggtgccgtttctcccaggaacctctttcggtcggacgagaaagccaaaaacgtagcaaaacatcgatcctccgagtccgagattcaggaattggtaatggcggctatgtcagcggttctttctctgggtttaggaacactccgcccttcgcatcgttccttgtcctgtttcgattccctccggcaccaccagacatcttttctccgttgccaccaaagtctcatctctagaaataccacgaggtctccgctcaacaagattcttcaggcttgccttcaatccagtggattctgcaaatggtgatgctttggtgtcatcatccgatgaaagttctgagattgtatttatgggtaccggaaccagtgaagggattcctcgtgtcagctgcctcactaatcctttgaaaacatgttcggtatgcacaaaagcaacagaaccaggaaacagaaataggagacttaacaccagcattcttgttcggtacattagaccatccggaacaagtaatatcctcattgattgtggcaagttcttctaccatagtgcccttcgatggtttcccaccttcgggctaagaacacttgatgcagttgtaattactcattctcatgctgacgcaattggaggtctctgaaactgacaagtcttgatgatcttcgtgattggacaaacaatgtccaacctcacattccaatttacactgctatacgtgatctcgaggtgatgaagaagacccattattacttggttgatacaagtgtcatcatacccggagctgcagtctcagagttggagtttaaagtcatacacgaggaccagccatttgtggtaaacgatctgaagatcaccccattacctgtatggcatggaagtaactaccgttcccttggtttccgctttggtaatgtctgctacataagcgatgtcagtgacataccggaagaaacctacccgctccttaaagactgtgatctcctaattatggatgctttgaggcctgaccggtcttcagcaacacactttggcctcccaagggcgttagaggaagttcggaaaatcaaaccaaaaagaacccttttcaccggaatgatgcatttgatggaccacgagaaggtgagcgaagaactggagaaacttaggaacacagaaggcctcgatatccaactgagctacgatggtcttcgtgtaccaatctcaatttaactcggtttattccttttttccctggtataaccggtttataattatatacataaaataaatttccttttttgtaatgacctgtatatgtgc

SEQ ID NO: 39417 - protein, 159 aa, Arabidopsis thaliana
  peptide (1)..(159): Ceres Seq. ID no. 12330720
  misc_feature (1)..(122): Pfam Name: Metallo-beta-lactamase superfamily Pfam Description: Metallo-beta-lactamase superfamily
  misc_feature (1)..(159): Homolog of NCBI NO: 17987268 NR Description: PHNP PROTEIN [Brucella melitensis]
  misc_feature (1)..(155): Homolog of NCBI NO: 29346777 NR Description: hydrolase, metal-dependent
  misc_feature (1)..(157): Homolog of NCBI NO: 15594878 NR Description: phnP protein (phnP) [Borrelia burgdorferi]
  misc_feature (1)..(135): Homolog of NCBI NO: 15236346 NR Description: putative hydrolase; protein id: At4g03610.1
  misc_feature (1)..(152): Homolog of NCBI NO: 19075752 NR Description: putative hydrolase [Schizosaccharomyces pombe]
  misc_feature (1)..(159): Homolog of NCBI NO: 30691663 NR Description: expressed protein [Arabidopsis thaliana]
  misc_feature (1)..(159): Homolog of NCBI NO: 25513552 NR Description: 36.3K hypothetical protein F12P21.8 - Arabidopsis
  misc_feature (112)..(159): Homolog of NCBI NO: 15231379 NR Description: hydrolase, putative; protein id: At3g13800.1
  misc_feature (1)..(113): Homolog of NCBI NO: 15231379 NR Description: hydrolase, putative; protein id: At3g13800.1
  misc_feature (1)..(159): Homolog of NCBI NO: 9294602 NR Description: hydrolase-like protein [Arabidopsis thaliana]
MKKTHYYLVDTSVIIPGAAVSELEFKVIHEDQPFVVNDLKITPLPVWHGSNYRSLGFRFGNVCYISDVSDIPEETYPLLKDCDLLIMDALRPDRSSATHFGLPRALEEVRKIKPKRTLFTGMMHLMDHEKVSEELEKLRNTEGLDIQLSYDGLRVPISI

SEQ ID NO: 39418 - protein, 95 aa, Arabidopsis thaliana
  peptide (1)..(95): Ceres Seq. ID no. 12330721
  misc_feature (38)..(95): Pfam Name: Metallo-beta-lactamase superfamily Pfam Description: Metallo-beta-lactamase superfamily
  misc_feature (1)..(95): Homolog of NCBI NO: 19075752 NR Description: putative hydrolase [Schizosaccharomyces pombe]
  misc_feature (1)..(95): Homolog of NCBI NO: 30691663 NR Description: expressed protein [Arabidopsis thaliana]
  misc_feature (1)..(95): Homolog of NCBI NO: 25513552 NR Description: 36.3K hypothetical protein F12P21.8 - Arabidopsis
  misc_feature (1)..(95): Homolog of NCBI NO: 15231379 NR Description: hydrolase, putative; protein id: At3g13800.1
  misc_feature (1)..(95): Homolog of NCBI NO: 9294602 NR Description: hydrolase-like protein [Arabidopsis thaliana]
MGTGTSEGIPRVSCLTNPLKTCSVCTKATEPGNRNRRLNTSILVRYIRPSGTSNILIDCGKFFYHSALRWFPTFGLRTLDAVVITHSHADAIGGL

SEQ ID NO: 39419 - DNA, 1094 bp, Arabidopsis thaliana
  misc_feature (1)..(1094): Ceres Seq. ID no. 12422438
  misc_feature: MA Experiment ID: 108573 Result: Up-regulated in Transcription
  misc_feature: MA Experiment 108573 PARAMETER Experiment Name: At_Drought_cDNA_P Parameter: Timepoint (hr) Value: 6
  misc_feature: MA Experiment 108573 PARAMETER Experiment Name: At_Drought_cDNA_P Parameter: Tissue Value: Aerial
  misc_feature: MA Experiment 108573 PARAMETER Experiment Name: At_Drought_cDNA_P Parameter: Treatment Value: Drought vs. No Drought
  misc_feature: MA Experiment ID: 20000224 Result: Down-regulated in Transcription
gcaattcaccggaacttagccgacgagcactgatcaaatcaaccggagaagcgaagctatagatctactatctccttcacagttgctatcagagatgtataataatatgggaccccggcctggaatggcaatgcctcaggcaaatcctcagcctagcccatttgggaatccgttctctggacctggctctggacttatccggagtggcttgggagcttatggggagaagattttcggttctagctctgagtatgtgcagagcaacataagtcgctacttctccgatcctcaatactattttcaagtgaatgaccagtatgtgaggaacaagttgaagattgttctacttccattccttcacaggggacactggactcgaatatcagaaccagttgggggtagactttcatacaaaccaccgatatacgatataaatgcaccagacttatacattccgctcatggcctttggcacttacgttgttcttgctggtttgtcactaggactctatggaaagtttactccagaagctctgaactggctttttgtgaaaggaatggttggctggtttttgcaagtgatgctgctgaagataacattgctttcacttggaagcggagaagcccctctcttggatattgtggcatatgcaggctatactttcacaggcctttgtctagctgttcttggcaagataatctggggatactcttactatgttttgattccgtggacctgcttatgcactggggttttcttagtgaagacaatgaagcgagttctctttgcagaatctaggagttatgactcaagcaggcatcactatctcttgatctttgttgctttagcccagtttcctcttttgatctggcttggtaacattagtgtgaattggctattttgaaacgcagtacgtttatattgttgtgaaaaacacctctgaggttatgtagcagaatttggaatgtcctcctgatggatatattatatggtagttgagctttttttggtttagacttctgtatgtcaaacatcaatatggaaagaaaagtgttatctctctttcatatcttcttttatgaatctcacttttc

SEQ ID NO: 39420 - protein, 269 aa, Arabidopsis thaliana
  peptide (1)..(269): Ceres Seq. ID no. 12422439
  misc_feature (19)..(260): Homolog of NCBI NO: 12861030 NR Description: unnamed protein product [Mus musculus]
  misc_feature (10)..(260): Homolog of NCBI NO: 24308364 NR Description: similar to putative transmembrane protein
  misc_feature (10)..(260): Homolog of NCBI NO: 14043299 NR Description: Similar to RIKEN cDNA 9430029K10 gene [Homo
  misc_feature (129)..(263): Homolog of NCBI NO: 10241632 NR Description: putative protein [Oryza sativa (indica
  misc_feature (1)..(263): Homolog of NCBI NO: 38346458 NR Description: OSJNBa0019G23.6 [Oryza sativa (japonica
  misc_feature (1)..(268): Homolog of NCBI NO: 9755388 NR Description: F17F8.24 [Arabidopsis thaliana]
  misc_feature (1)..(268): Homolog of NCBI NO: 18397705 NR Description: expressed protein
  misc_feature (11)..(269): Homolog of NCBI NO: 33589682 NR Description: At3g59500 [Arabidopsis thaliana]
  misc_feature (11)..(269): Homolog of NCBI NO: 11282553 NR Description: hypothetical protein T16L24.50 - Arabidopsis
  misc_feature (1)..(269): Homolog of NCBI NO: 30695009 NR Description: expressed protein [Arabidopsis thaliana]
MYNNMGPRPGMAMPQANPQPSPFGNPFSGPGSGLIRSGLGAYGEKIFGSSSEYVQSNISRYFSDPQYYFQVNDQYVRNKLKIVLLPFLHRGHWTRISEPVGGRLSYKPPIYDINAPDLYIPLMAFGTYVVLAGLSLGLYGKFTPEALNWLFVKGMVGWFLQVMLLKITLLSLGSGEAPLLDIVAYAGYTFTGLCLAVLGKIIWGYSYYVLIPWTCLCTGVFLVKTMKRVLFAESRSYDSSRHHYLLIFVALAQFPLLIWLGNISVNWLF

SEQ ID NO: 39421 - protein, 265 aa, Arabidopsis thaliana
  peptide (1)..(265): Ceres Seq. ID no. 12422440
  misc_feature (15)..(256): Homolog of NCBI NO: 12861030 NR Description: unnamed protein product [Mus musculus]
  misc_feature (6)..(256): Homolog of NCBI NO: 24308364 NR Description: similar to putative transmembrane protein
  misc_feature (6)..(256): Homolog of NCBI NO: 14043299 NR Description: Similar to RIKEN cDNA 9430029K10 gene [Homo
  misc_feature (125)..(259): Homolog of NCBI NO: 10241632 NR Description: putative protein [Oryza sativa (indica
  misc_feature (1)..(259): Homolog of NCBI NO: 38346458 NR Description: OSJNBa0019G23.6 [Oryza sativa (japonica
  misc_feature (1)..(264): Homolog of NCBI NO: 9755388 NR Description: F17F8.24 [Arabidopsis thaliana]
  misc_feature (1)..(264): Homolog of NCBI NO: 18397705 NR Description: expressed protein
  misc_feature (7)..(265): Homolog of NCBI NO: 33589682 NR Description: At3g59500 [Arabidopsis thaliana]
  misc_feature (7)..(265): Homolog of NCBI NO: 11282553 NR Description: hypothetical protein T16L24.50 - Arabidopsis
  misc_feature (1)..(265): Homolog of NCBI NO: 30695009 NR Description: expressed protein [Arabidopsis thaliana]
MGPRPGMAMPQANPQPSPFGNPFSGPGSGLIRSGLGAYGEKIFGSSSEYVQSNISRYFSDPQYYFQVNDQYVRNKLKIVLLPFLHRGHWTRISEPVGGRLSYKPPIYDINAPDLYIPLMAFGTYVVLAGLSLGLYGKFTPEALNWLFVKGMVGWFLQVMLLKITLLSLGSGEAPLLDIVAYAGYTFTGLCLAVLGKIIWGYSYYVLIPWTCLCTGVFLVKTMKRVLFAESRSYDSSRHHYLLIFVALAQFPLLIWLGNISVNWLF

SEQ ID NO: 39422 - protein, 259 aa, Arabidopsis thaliana
  peptide (1)..(259): Ceres Seq. ID no. 12422441
  misc_feature (9)..(250): Homolog of NCBI NO: 12861030 NR Description: unnamed protein product [Mus musculus]
  misc_feature (1)..(250): Homolog of NCBI NO: 24308364 NR Description: similar to putative transmembrane protein
  misc_feature (1)..(250): Homolog of NCBI NO: 14043299 NR Description: Similar to RIKEN cDNA 9430029K10 gene [Homo
  misc_feature (119)..(253): Homolog of NCBI NO: 10241632 NR Description: putative protein [Oryza sativa (indica
  misc_feature (1)..(253): Homolog of NCBI NO: 38346458 NR Description: OSJNBa0019G23.6 [Oryza sativa (japonica
  misc_feature (1)..(258): Homolog of NCBI NO: 9755388 NR Description: F17F8.24 [Arabidopsis thaliana]
  misc_feature (1)..(258): Homolog of NCBI NO: 18397705 NR Description: expressed protein
  misc_feature (1)..(259): Homolog of NCBI NO: 33589682 NR Description: At3g59500 [Arabidopsis thaliana]
  misc_feature (1)..(259): Homolog of NCBI NO: 11282553 NR Description: hypothetical protein T16L24.50 - Arabidopsis
  misc_feature (1)..(259): Homolog of NCBI NO: 30695009 NR Description: expressed protein [Arabidopsis thaliana]
MAMPQANPQPSPFGNPFSGPGSGLIRSGLGAYGEKIFGSSSEYVQSNISRYFSDPQYYFQVNDQYVRNKLKIVLLPFLHRGHWTRISEPVGGRLSYKPPIYDINAPDLYIPLMAFGTYVVLAGLSLGLYGKFTPEALNWLFVKGMVGWFLQVMLLKITLLSLGSGEAPLLDIVAYAGYTFTGLCLAVLGKIIWGYSYYVLIPWTCLCTGVFLVKTMKRVLFAESRSYDSSRHHYLLIFVALAQFPLLIWLGNISVNWLF

SEQ ID NO: 39423 - DNA, 1341 bp, Arabidopsis thaliana
  misc_feature (1)..(1341): Ceres Seq. ID no. 12371095
  misc_feature: MA Experiment ID: 108434 Result: Down-regulated in Transcription
  misc_feature: MA Experiment 108434 PARAMETER Experiment Name: At_Root_Tips_cDNA_P Parameter: Tissue Value: Root Tips
  misc_feature: MA Experiment ID: 108435 Result: Up-regulated in Transcription
  misc_feature: MA Experiment 108435 PARAMETER Experiment Name: At_stm_Mutants_cDNA_P Parameter: Plant Line Value: wt Landsburg vs stm
  misc_feature: MA Experiment 108435 PARAMETER Experiment Name: At_stm_Mutants_cDNA_P Parameter: Tissue Value: Shoot Apical Meristem Region
  misc_feature: MA Experiment ID: 108463 Result: Up-regulated in Transcription
  misc_feature: MA Experiment 108463 PARAMETER Experiment Name: At_Germinating_Seeds_cDNA_P Parameter: Age (day) Value: 3 vs. 0
  misc_feature: MA Experiment 108463 PARAMETER Experiment Name: At_Germinating_Seeds_cDNA_P Parameter: Tissue Value: Germinating Seeds
  misc_feature: MA Experiment ID: 108464 Result: Up-regulated in Transcription
  misc_feature: MA Experiment 108464 PARAMETER Experiment Name: At_Germinating_Seeds_cDNA_P Parameter: Age (day) Value: 4 vs. 0
  misc_feature: MA Experiment 108464 PARAMETER Experiment Name: At_Germinating_Seeds_cDNA_P Parameter: Tissue Value: Germinating Seeds
  misc_feature: MA Experiment ID: 108572 Result: Up-regulated in Transcription
  misc_feature: MA Experiment 108572 PARAMETER Experiment Name: At_Drought_cDNA_P Parameter: Timepoint (hr) Value: 1
  misc_feature: MA Experiment 108572 PARAMETER Experiment Name: At_Drought_cDNA_P Parameter: Tissue Value: Aerial
  misc_feature: MA Experiment 108572 PARAMETER Experiment Name: At_Drought_cDNA_P Parameter: Treatment Value: Drought vs. No Drought
  misc_feature: MA Experiment ID: 108595 Result: Up-regulated in Transcription
  misc_feature: MA Experiment 108595 PARAMETER Experiment Name: At_Ler-pi_Ovule_cDNA_P Parameter: Plant Line Value: null
  misc_feature: MA Experiment ID: 108607 Result: Up-regulated in Transcription
  misc_feature: MA Experiment 108607 PARAMETER Experiment Name: At_100uM_ABA_cDNA_P Parameter: Timepoint (hr) Value: 4
  misc_feature: MA Experiment 108607 PARAMETER Experiment Name: At_100uM_ABA_cDNA_P Parameter: Tissue Value: Aerial
  misc_feature: MA Experiment 108607 PARAMETER Experiment Name: At_100uM_ABA_cDNA_P Parameter: Treatment Value: 100uM ABA vs. No Treatment
  misc_feature: MA Experiment ID: 20000089 Result: Down-regulated in Transcription
  misc_feature: MA Experiment ID: 20000113 Result: Down-regulated in Transcription
  misc_feature: MA Experiment 20000113 PARAMETER Experiment Name: At_42deg_Heat_cDNA_P Parameter: Temperature (deg C) Value: 42 vs. 22
  misc_feature: MA Experiment 20000113 PARAMETER Experiment Name: At_42deg_Heat_cDNA_P Parameter: Timepoint (hr) Value: 8
  misc_feature: MA Experiment 20000113 PARAMETER Experiment Name: At_42deg_Heat_cDNA_P Parameter: Tissue Value: Aerial
  misc_feature: MA Experiment ID: 20000166 Result: Up-regulated in Transcription
  misc_feature: MA Experiment 20000166 PARAMETER Experiment Name: At_100uM_ABA_P Parameter: Age (day) Value: 14
  misc_feature: MA Experiment 20000166 PARAMETER Experiment Name: At_100uM_ABA_P Parameter: Organism Value: A. thaliana
  misc_feature: MA Experiment 20000166 PARAMETER Experiment Name: At_100uM_ABA_P Parameter: Plant Line Value: WS
  misc_feature: MA Experiment 20000166 PARAMETER Experiment Name: At_100uM_ABA_P Parameter: Timepoint (hr) Value: 1
  misc_feature: MA Experiment 20000166 PARAMETER Experiment Name: At_100uM_ABA_P Parameter: Tissue Value: Aerial
  misc_feature: MA Experiment 20000166 PARAMETER Experiment Name: At_100uM_ABA_P Parameter: Treatment Value: 100uM ABA vs. No Treatment
  misc_feature: MA Experiment ID: 20000180 Result: Up-regulated in Transcription
  misc_feature: MA Experiment 20000180 PARAMETER Experiment Name: At_Germinating_Seeds_P Parameter: Age (hr) Value: 24 vs. 0
  misc_feature: MA Experiment 20000180 PARAMETER Experiment Name: At_Germinating_Seeds_P Parameter: Tissue Value: Germinating Seeds
  misc_feature: MA Experiment ID: 20000185 Result: Up-regulated in Transcription
  misc_feature: MA Experiment 20000185 PARAMETER Experiment Name: At_Roots__P Parameter: Age (day) Value: 7 vs. 21
  misc_feature: MA Experiment 20000185 PARAMETER Experiment Name: At_Roots__P Parameter: Organism Value: A. thaliana
  misc_feature: MA Experiment 20000185 PARAMETER Experiment Name: At_Roots__P Parameter: Tissue Value: Roots vs. Whole Plant
  misc_feature: MA Experiment ID: 20000234 Result: Up-regulated in Transcription
  misc_feature: MA Experiment 20000234 PARAMETER Experiment Name: At_Siliques_P Parameter: Age (day) Value: 21
  misc_feature: MA Experiment 20000234 PARAMETER Experiment Name: At_Siliques_P Parameter: Organism Value: A. thaliana
  misc_feature: MA Experiment 20000234 PARAMETER Experiment Name: At_Siliques_P Parameter: Plant Line Value: WS
  misc_feature: MA Experiment 20000234 PARAMETER Experiment Name: At_Siliques_P Parameter: Tissue Value: Less Than 5mm Siliques vs. Whole Plant
  misc_feature: MA Experiment ID: 20000235 Result: Up-regulated in Transcription
  misc_feature: MA Experiment 20000235 PARAMETER Experiment Name: At_Siliques_P Parameter: Age (day) Value: 21
  misc_feature: MA Experiment 20000235 PARAMETER Experiment Name: At_Siliques_P Parameter: Organism Value: A. thaliana
  misc_feature: MA Experiment 20000235 PARAMETER Experiment Name: At_Siliques_P Parameter: Plant Line Value: WS
  misc_feature: MA Experiment 20000235 PARAMETER Experiment Name: At_Siliques_P Parameter: Tissue Value: 5-10mm Siliques vs. Whole Plant
  misc_feature: MA Experiment ID: 20000265 Result: Up-regulated in Transcription
  misc_feature: MA Experiment 20000265 PARAMETER Experiment Name: At_Open_Flower_P Parameter: Age (day) Value: 21
  misc_feature: MA Experiment 20000265 PARAMETER Experiment Name: At_Open_Flower_P Parameter: Plant Line Value: WS
  misc_feature: MA Experiment 20000265 PARAMETER Experiment Name: At_Open_Flower_P Parameter: Tissue Value: Closed Flower vs. Whole Plant
  misc_feature: MA Experiment ID: 20000267 Result: Up-regulated in Transcription
  misc_feature: MA Experiment 20000267 PARAMETER Experiment Name: At_Drought_P Parameter: Age (day) Value: 7
  misc_feature: MA Experiment 20000267 PARAMETER Experiment Name: At_Drought_P Parameter: Organism Value: A. thaliana
  misc_feature: MA Experiment 20000267 PARAMETER Experiment Name: At_Drought_P Parameter: Plant Line Value: WS
  misc_feature: MA Experiment 20000267 PARAMETER Experiment Name: At_Drought_P Parameter: Timepoint (hr) Value: 6
  misc_feature: MA Experiment 20000267 PARAMETER Experiment Name: At_Drought_P Parameter: Tissue Value: Whole Plant
  misc_feature: MA Experiment 20000267 PARAMETER Experiment Name: At_Drought_P Parameter: Treatment Value: Drought vs. No Drought
  misc_feature: MA Experiment ID: 20000268 Result: Up-regulated in Transcription
  misc_feature: MA Experiment 20000268 PARAMETER Experiment Name: At_100mM_NaCl__P Parameter: Age (day) Value: 14
  misc_feature: MA Experiment 20000268 PARAMETER Experiment Name: At_100mM_NaCl__P Parameter: Organism Value: A. thaliana
  misc_feature: MA Experiment 20000268 PARAMETER Experiment Name: At_100mM_NaCl__P Parameter: Plant Line Value: WS
  misc_feature: MA Experiment 20000268 PARAMETER Experiment Name: At_100mM_NaCl__P Parameter: Timepoint (hr) Value: 6
  misc_feature: MA Experiment 20000268 PARAMETER Experiment Name: At_100mM_NaCl__P Parameter: Tissue Value: Whole Plant
  misc_feature: MA Experiment 20000268 PARAMETER Experiment Name: At_100mM_NaCl__P Parameter: Treatment Value: 100mM NaCl vs. No Treatment
  misc_feature: MA Experiment ID: 20000439 Result: Up-regulated in Transcription
  misc_feature: MA Experiment 20000439 PARAMETER Experiment Name: At_Roots__P Parameter: Age (day) Value: 14 vs. 21
  misc_feature: MA Experiment 20000439 PARAMETER Experiment Name: At_Roots__P Parameter: Organism Value: A. thaliana
  misc_feature: MA Experiment 20000439 PARAMETER Experiment Name: At_Roots__P Parameter: Tissue Value: Roots vs. Whole Plant
  misc_feature: MA Experiment ID: 20000495 Result: Up-regulated in Transcription
  misc_feature: MA Experiment 20000495 PARAMETER Experiment Name: At_Guard_Cells_P Parameter: Harvest Date Value: 8/2/2002
  misc_feature: MA Experiment 20000495 PARAMETER Experiment Name: At_Guard_Cells_P Parameter: Organism Value: A. thaliana
  misc_feature: MA Experiment 20000495 PARAMETER Experiment Name: At_Guard_Cells_P Parameter: Tissue Value: Guard Cells vs. Leaves
  misc_feature: MA Experiment ID: 20001248 Result: Down-regulated in Transcription
  misc_feature: MA Experiment 20001248 PARAMETER Experiment Name: At_Far-red-induction_P Parameter: Age (day) Value: 7
  misc_feature: MA Experiment 20001248 PARAMETER Experiment Name: At_Far-red-induction_P Parameter: Light Value: Far-red vs. White
  misc_feature: MA Experiment 20001248 PARAMETER Experiment Name: At_Far-red-induction_P Parameter: Organism Value: A. thaliana
  misc_feature: MA Experiment 20001248 PARAMETER Experiment Name: At_Far-red-induction_P Parameter: Plant Line Value: Columbia
  misc_feature: MA Experiment 20001248 PARAMETER Experiment Name: At_Far-red-induction_P Parameter: Timepoint (hr) Value: 4
  misc_feature: MA Experiment 20001248 PARAMETER Experiment Name: At_Far-red-induction_P Parameter: Tissue Value: Whole Plant
  misc_feature: MA Experiment ID: 20001554 Result: Up-regulated in Transcription
  misc_feature: MA Experiment 20001554 PARAMETER Experiment Name: At_Drought_Soil_Dry_P Parameter: Age (day) Value: 21
  misc_feature: MA Experiment 20001554 PARAMETER Experiment Name: At_Drought_Soil_Dry_P Parameter: Organism Value: A. thaliana
  misc_feature: MA Experiment 20001554 PARAMETER Experiment Name: At_Drought_Soil_Dry_P Parameter: Plant Line Value: WS
  misc_feature: MA Experiment 20001554 PARAMETER Experiment Name: At_Drought_Soil_Dry_P Parameter: Post Timepoint (hr) Value: None
  misc_feature: MA Experiment 20001554 PARAMETER Experiment Name: At_Drought_Soil_Dry_P Parameter: Post-Treatment Value: None
  misc_feature: MA Experiment 20001554 PARAMETER Experiment Name: At_Drought_Soil_Dry_P Parameter: Timepoint (day) Value: 7
  misc_feature: MA Experiment 20001554 PARAMETER Experiment Name: At_Drought_Soil_Dry_P Parameter: Treatment Value: Drought vs. No Drought
  misc_feature: MA Experiment ID: 20001555 Result: Up-regulated in Transcription
  misc_feature: MA Experiment 20001555 PARAMETER Experiment Name: At_Drought_Soil_Dry_P Parameter: Age (day) Value: 24
  misc_feature: MA Experiment 20001555 PARAMETER Experiment Name: At_Drought_Soil_Dry_P Parameter: Organism Value: A. thaliana
  misc_feature: MA Experiment 20001555 PARAMETER Experiment Name: At_Drought_Soil_Dry_P Parameter: Plant Line Value: WS
  misc_feature: MA Experiment 20001555 PARAMETER Experiment Name: At_Drought_Soil_Dry_P Parameter: Post Timepoint (hr) Value: None
  misc_feature: MA Experiment 20001555 PARAMETER Experiment Name: At_Drought_Soil_Dry_P Parameter: Post-Treatment Value: None
  misc_feature: MA Experiment 20001555 PARAMETER Experiment Name: At_Drought_Soil_Dry_P Parameter: Timepoint (day) Value: 10
  misc_feature: MA Experiment 20001555 PARAMETER Experiment Name: At_Drought_Soil_Dry_P Parameter: Treatment Value: Drought vs. No Drought
  misc_feature: MA Experiment ID: 20001559 Result: Up-regulated in Transcription
  misc_feature: MA Experiment 20001559 PARAMETER Experiment Name: At_Drought_Soil_Dry_P Parameter: Age (day) Value: 28
  misc_feature: MA Experiment 20001559 PARAMETER Experiment Name: At_Drought_Soil_Dry_P Parameter: Organism Value: A. thaliana
  misc_feature: MA Experiment 20001559 PARAMETER Experiment Name: At_Drought_Soil_Dry_P Parameter: Plant Line Value: WS
  misc_feature: MA Experiment 20001559 PARAMETER Experiment Name: At_Drought_Soil_Dry_P Parameter: Post Timepoint (hr) Value: 29
  misc_feature: MA Experiment 20001559 PARAMETER Experiment Name: At_Drought_Soil_Dry_P Parameter: Post-Treatment Value: Re-Water vs. No Drought
  misc_feature: MA Experiment 20001559 PARAMETER Experiment Name: At_Drought_Soil_Dry_P Parameter: Timepoint (day) Value: 14
  misc_feature: MA Experiment 20001559 PARAMETER Experiment Name: At_Drought_Soil_Dry_P Parameter: Treatment Value: Drought vs. No Drought
  misc_feature: MA Experiment ID: 20001560 Result: Up-regulated in Transcription
  misc_feature: MA Experiment 20001560 PARAMETER Experiment Name: At_Drought_Soil_Dry_P Parameter: Age (day) Value: 28
  misc_feature: MA Experiment 20001560 PARAMETER Experiment Name: At_Drought_Soil_Dry_P Parameter: Organism Value: A. thaliana
  misc_feature: MA Experiment 20001560 PARAMETER Experiment Name: At_Drought_Soil_Dry_P Parameter: Plant Line Value: WS
  misc_feature: MA Experiment 20001560 PARAMETER Experiment Name: At_Drought_Soil_Dry_P Parameter: Post Timepoint (hr) Value: None
  misc_feature: MA Experiment 20001560 PARAMETER Experiment Name: At_Drought_Soil_Dry_P Parameter: Post-Treatment Value: None
  misc_feature: MA Experiment 20001560 PARAMETER Experiment Name: At_Drought_Soil_Dry_P Parameter: Timepoint (day) Value: 14
  misc_feature: MA Experiment 20001560 PARAMETER Experiment Name: At_Drought_Soil_Dry_P Parameter: Treatment Value: Drought vs. No Drought
aaaatgacagtaacaatataagtgaaaaacataatttcattagctttaagtcacgaggcacgaccattgaacatgcgagaaacgcgtgtacccaaactcattggttagttttgagagcagcagcgtattcttacacagttctcatatgtttaactccattcactctctcaaaaggttcccatctttatcaaaagacttgctaaaatcttctctttctttctcctttcatcacactcttgagtccttgtctctgtttttagtcacctgaagaaaaaatatatggagaacggagaatctaaccaagaaaatctcaaatctctcaaccacgacgaatcgcttaagaagccatctgcttcctccgtcgttgtagataggttaaaacgtgatgaatggagcgaaggagctgtttcgactttactcgaagcttatgagtcaaaatgggttctcagaaacagagccaagcttaagggacaagactgggaagacgtggctaaacacgtgtcctcacgcgccactcacaccaagtcaccaaagactcagactcagtgcaagaacaagatcgagtccatgaagaaacggtaccgttctgagtccgctactgctgatggctcctcttggcctctttatcctcgtcttgatcatctcctacgtggaactcagcctcagcctcagcctcaagctgttctgcctctgaattgctctgttcctctgctcttacttgagccgccgttgcctgcggtggctcatccgccgcagatttcttacggatccaacggcgtcggcaagattcctaaggaagacggattcaagccggagaacaaaccggaaaaagatgcggagatggatacagacagtagtacgcctgtggttaaaacgaaggtgagagggaagaaagtgaagagaagatataaagaagagaaggaagagatcgccggaagtatacggtggttagcggaggtggtgatgagatcagagagagcaagaatggagacgatgaaagagatagagagaatgagagctgaagctgaagctaagagaggagaattggatttgaaacggacggagataatggcgaatactcagctagagattgctagaatctttgctgctgcagcttcttctggacagaacaaaggtgttgattcttcattaaggatcggaagaaattgagttctgctttttatattggagactcaagatgttgtgtgtacataccaagtgttgttttgtcaaaatttctcagagagagaccaataattgtttcctggggtagatggcgatttccacatttctaccagcaaatgtatgcttttgccatatgaatatcatcaatctttagtc

SEQ ID NO: 39424 - protein, 296 aa, Arabidopsis thaliana
  peptide (1)..(296): Ceres Seq. ID no. 12371096
  misc_feature (15)..(120): Homolog of NCBI NO: 15224948 NR Description: unknown protein; protein id: At2g44730.1
  misc_feature (23)..(123): Homolog of NCBI NO: 30680994 NR Description: expressed protein [Arabidopsis thaliana]
  misc_feature (23)..(123): Homolog of NCBI NO: 18414919 NR Description: putative protein
  misc_feature (23)..(123): Homolog of NCBI NO: 10178132 NR Description: gb|AAF01512.1~gene_id:MOP10.9~similar to unknown
  misc_feature (215)..(280): Homolog of NCBI NO: 26451533 NR Description: unknown protein [Arabidopsis thaliana]
  misc_feature (38)..(135): Homolog of NCBI NO: 26451533 NR Description: unknown protein [Arabidopsis thaliana]
  misc_feature (32)..(268): Homolog of NCBI NO: 37536908 NR Description: hypothetical protein [Oryza sativa (japonica
  misc_feature (34)..(274): Homolog of NCBI NO: 38344545 NR Description: OSJNBa0027P08.13 [Oryza sativa (japonica
  misc_feature (22)..(281): Homolog of NCBI NO: 18149189 NR Description: 6b-interacting protein 1 [Nicotiana tabacum]
  misc_feature (1)..(296): Homolog of NCBI NO: 15232501 NR Description: putative protein
MENGESNQENLKSLNHDESLKKPSASSVVVDRLKRDEWSEGAVSTLLEAYESKWVLRNRAKLKGQDWEDVAKHVSSRATHTKSPKTQTQCKNKIESMKKRYRSESATADGSSWPLYPRLDHLLRGTQPQPQPQAVLPLNCSVPLLLLEPPLPAVAHPPQISYGSNGVGKIPKEDGFKPENKPEKDAEMDTDSSTPVVKTKVRGKKVKRRYKEEKEEIAGSIRWLAEVVMRSERARMETMKEIERMRAEAEAKRGELDLKRTEIMANTQLEIARIFAAAASSGQNKGVDSSLRIGRN

SEQ ID NO: 39425 - protein, 200 aa, Arabidopsis thaliana
  peptide (1)..(200): Ceres Seq. ID no. 12371097
  misc_feature (1)..(24): Homolog of NCBI NO: 15224948 NR Description: unknown protein; protein id: At2g44730.1
  misc_feature (1)..(27): Homolog of NCBI NO: 30680994 NR Description: expressed protein [Arabidopsis thaliana]
  misc_feature (1)..(27): Homolog of NCBI NO: 18414919 NR Description: putative protein
  misc_feature (1)..(27): Homolog of NCBI NO: 10178132 NR Description: gb|AAF01512.1~gene_id:MOP10.9~similar to unknown
  misc_feature (119)..(184): Homolog of NCBI NO: 26451533 NR Description: unknown protein [Arabidopsis thaliana]
  misc_feature (1)..(39): Homolog of NCBI NO: 26451533 NR Description: unknown protein [Arabidopsis thaliana]
  misc_feature (1)..(172): Homolog of NCBI NO: 37536908 NR Description: hypothetical protein [Oryza sativa (japonica
  misc_feature (1)..(178): Homolog of NCBI NO: 38344545 NR Description: OSJNBa0027P08.13 [Oryza sativa (japonica
  misc_feature (1)..(185): Homolog of NCBI NO: 18149189 NR Description: 6b-interacting protein 1 [Nicotiana tabacum]
  misc_feature (1)..(200): Homolog of NCBI NO: 15232501 NR Description: putative protein
MKKRYRSESATADGSSWPLYPRLDHLLRGTQPQPQPQAVLPLNCSVPLLLLEPPLPAVAHPPQISYGSNGVGKIPKEDGFKPENKPEKDAEMDTDSSTPVVKTKVRGKKVKRRYKEEKEEIAGSIRWLAEVVMRSERARMETMKEIERMRAEAEAKRGELDLKRTEIMANTQLEIARIFAAAASSGQNKGVDSSLRIGRN

SEQ ID NO: 39426 - DNA, 1509 bp, Arabidopsis thaliana
  misc_feature (1)..(1509): Ceres Seq. ID no. 13491876
  misc_feature: MA Experiment ID: 108461 Result: Up-regulated in Transcription
  misc_feature: MA Experiment 108461 PARAMETER Experiment Name: At_Germinating_Seeds_cDNA_P Parameter: Age (day) Value: 1 vs. 0
  misc_feature: MA Experiment 108461 PARAMETER Experiment Name: At_Germinating_Seeds_cDNA_P Parameter: Tissue Value: Germinating Seeds
  misc_feature: MA Experiment ID: 108462 Result: Up-regulated in Transcription
  misc_feature: MA Experiment 108462 PARAMETER Experiment Name: At_Germinating_Seeds_cDNA_P Parameter: Age (day) Value: 2 vs. 0
  misc_feature: MA Experiment 108462 PARAMETER Experiment Name: At_Germinating_Seeds_cDNA_P Parameter: Tissue Value: Germinating Seeds
  misc_feature: MA Experiment ID: 108569 Result: Up-regulated in Transcription
  misc_feature: MA Experiment 108569 PARAMETER Experiment Name: At_0.001%_MeJA__cDNA_P Parameter: Timepoint (hr) Value: 6
  misc_feature: MA Experiment 108569 PARAMETER Experiment Name: At_0.001%_MeJA__cDNA_P Parameter: Tissue Value: Aerial
  misc_feature: MA Experiment 108569 PARAMETER Experiment Name: At_0.001%_MeJA__cDNA_P Parameter: Treatment Value: 0.001% MeJA vs. No Treatment
  misc_feature: MA Experiment ID: 20000069 Result: Down-regulated in Transcription
  misc_feature: MA Experiment 20000069 PARAMETER Experiment Name: At_100uM_ABA_Mutants_cDNA_P Parameter: Plant Line Value: CS23
  misc_feature: MA Experiment 20000069 PARAMETER Experiment Name: At_100uM_ABA_Mutants_cDNA_P Parameter: Timepoint (hr) Value: 6
  misc_feature: MA Experiment 20000069 PARAMETER Experiment Name: At_100uM_ABA_Mutants_cDNA_P Parameter: Tissue Value: Aerial
  misc_feature: MA Experiment 20000069 PARAMETER Experiment Name: At_100uM_ABA_Mutants_cDNA_P Parameter: Treatment Value: 100uM ABA vs. No Treatment
  misc_feature: MA Experiment ID: 20000087 Result: Down-regulated in Transcription
  misc_feature: MA Experiment 20000087 PARAMETER Experiment Name: At_100uM_ABA_Mutants_cDNA_P Parameter: Plant Line Value: WS
  misc_feature: MA Experiment 20000087 PARAMETER Experiment Name: At_100uM_ABA_Mutants_cDNA_P Parameter: Timepoint (hr) Value: 6
  misc_feature: MA Experiment 20000087 PARAMETER Experiment Name: At_100uM_ABA_Mutants_cDNA_P Parameter: Tissue Value: Aerial
  misc_feature: MA Experiment 20000087 PARAMETER Experiment Name: At_100uM_ABA_Mutants_cDNA_P Parameter: Treatment Value: 100uM ABA vs. No Treatment
  misc_feature: MA Experiment ID: 20000179 Result: Up-regulated in Transcription
  misc_feature: MA Experiment 20000179 PARAMETER Experiment Name: At_Germinating_Seeds_P Parameter: Age (hr) Value: 6 vs. 0
  misc_feature: MA Experiment 20000179 PARAMETER Experiment Name: At_Germinating_Seeds_P Parameter: Tissue Value: Germinating Seeds
  misc_feature: MA Experiment ID: 20000180 Result: Up-regulated in Transcription
  misc_feature: MA Experiment 20000180 PARAMETER Experiment Name: At_Germinating_Seeds_P Parameter: Age (hr) Value: 24 vs. 0
  misc_feature: MA Experiment 20000180 PARAMETER Experiment Name: At_Germinating_Seeds_P Parameter: Tissue Value: Germinating Seeds
  misc_feature: MA Experiment ID: 20000234 Result: Up-regulated in Transcription
  misc_feature: MA Experiment 20000234 PARAMETER Experiment Name: At_Siliques_P Parameter: Age (day) Value: 21
  misc_feature: MA Experiment 20000234 PARAMETER Experiment Name: At_Siliques_P Parameter: Organism Value: A. thaliana
  misc_feature: MA Experiment 20000234 PARAMETER Experiment Name: At_Siliques_P Parameter: Plant Line Value: WS
  misc_feature: MA Experiment 20000234 PARAMETER Experiment Name: At_Siliques_P Parameter: Tissue Value: Less Than 5mm Siliques vs. Whole Plant
  misc_feature: MA Experiment ID: 20000235 Result: Up-regulated in Transcription
  misc_feature: MA Experiment 20000235 PARAMETER Experiment Name: At_Siliques_P Parameter: Age (day) Value: 21
  misc_feature: MA Experiment 20000235 PARAMETER Experiment Name: At_Siliques_P Parameter: Organism Value: A. thaliana
  misc_feature: MA Experiment 20000235 PARAMETER Experiment Name: At_Siliques_P Parameter: Plant Line Value: WS
  misc_feature: MA Experiment 20000235 PARAMETER Experiment Name: At_Siliques_P Parameter: Tissue Value: 5-10mm Siliques vs. Whole Plant
  misc_feature: MA Experiment ID: 20000264 Result: Up-regulated in Transcription
  misc_feature: MA Experiment 20000264 PARAMETER Experiment Name: At_Open_Flower_P Parameter: Age (day) Value: 21
  misc_feature: MA Experiment 20000264 PARAMETER Experiment Name: At_Open_Flower_P Parameter: Plant Line Value: WS
  misc_feature: MA Experiment 20000264 PARAMETER Experiment Name: At_Open_Flower_P Parameter: Tissue Value: Open Flower vs. Whole Plant
  misc_feature: MA Experiment ID: 20000286 Result: Up-regulated in Transcription
  misc_feature: MA Experiment 20000286 PARAMETER Experiment Name: At_Open_Flower_P Parameter: Age (day) Value: 21
  misc_feature: MA Experiment 20000286 PARAMETER Experiment Name: At_Open_Flower_P Parameter: Plant Line Value: WS
  misc_feature: MA Experiment 20000286 PARAMETER Experiment Name: At_Open_Flower_P Parameter: Tissue Value: Half Open vs. Whole Plant
  misc_feature: MA Experiment ID: 20000439 Result: Up-regulated in Transcription
  misc_feature: MA Experiment 20000439 PARAMETER Experiment Name: At_Roots__P Parameter: Age (day) Value: 14 vs. 21
  misc_feature: MA Experiment 20000439 PARAMETER Experiment Name: At_Roots__P Parameter: Organism Value: A. thaliana
  misc_feature: MA Experiment 20000439 PARAMETER Experiment Name: At_Roots__P Parameter: Tissue Value: Roots vs. Whole Plant
  misc_feature: MA Experiment ID: 20001451 Result: Down-regulated in Transcription
  misc_feature: MA Experiment 20001451 PARAMETER Experiment Name: At_Far-red-induction_P Parameter: Age (day) Value: 7
  misc_feature: MA Experiment 20001451 PARAMETER Experiment Name: At_Far-red-induction_P Parameter: Light Value: Far-red vs. White
  misc_feature: MA Experiment 20001451 PARAMETER Experiment Name: At_Far-red-induction_P Parameter: Organism Value: A. thaliana
  misc_feature: MA Experiment 20001451 PARAMETER Experiment Name: At_Far-red-induction_P Parameter: Plant Line Value: Columbia
  misc_feature: MA Experiment 20001451 PARAMETER Experiment Name: At_Far-red-induction_P Parameter: Timepoint (hr) Value: 24
  misc_feature: MA Experiment 20001451 PARAMETER Experiment Name: At_Far-red-induction_P Parameter: Tissue Value: Whole Plant
  misc_feature: MA Experiment ID: 20001911 Result: Down-regulated in Transcription
  misc_feature: MA Experiment 20001911 PARAMETER Experiment Name: At_Drought_Reproduction_P Parameter: Age (day) Value: 40
  misc_feature: MA Experiment 20001911 PARAMETER Experiment Name: At_Drought_Reproduction_P Parameter: Organism Value: A. thaliana
  misc_feature: MA Experiment 20001911 PARAMETER Experiment Name: At_Drought_Reproduction_P Parameter: Plant Line Value: WS
  misc_feature: MA Experiment 20001911 PARAMETER Experiment Name: At_Drought_Reproduction_P Parameter: Timepoint (day) Value: 10
  misc_feature: MA Experiment 20001911 PARAMETER Experiment Name: At_Drought_Reproduction_P Parameter: Tissue Value: Flowers
  misc_feature: MA Experiment 20001911 PARAMETER Experiment Name: At_Drought_Reproduction_P Parameter: Treatment Value: Drought vs. No Drought
tctcgctatcaatcacacacatgcaacagtacaagatttgtcagagtccacagaaatcgatcttttcgagtcaagattttcagctctgttcaggactccggcggagatgaagagtgtgttgcgtattgcggcggcgatattctggctttggctgtttatcgtgttaggtgtgattgggagtgggaatgtgagagatacagacgatgagatctcgttactcgaaagtcaattggtggtgacatctccgtcgcagcttcttatggtgcctctcactttgattcaggctgctgcctccaaaggagctgtgtgcctggatggaacactacctggttatcatctacaccctggttctggatcaggagctaaccggtggctcatccaactcgagggtggaggatggtgcaacacacgtaggagctgtatcttccggaaaaccactcgccgtggttcatcaaatcatatggagaaagttttggccttcactggaatattgagcaataaatctaatgagaatcctgacttcttcaactggaacagagtcaaattgcgttactgcgatggtgcctctttcaccggcgatagtcaggatgagagctcacaactttactatagaggacaacgaatctggcattcagctatggaagaactactctctaaaggcatgcaaaaagcagaacaggctctactttctggatgttcagctgggggattagcttccatcctacactgcgatcagttcaaggaactatttccgggcactacgacagtgaaatgcttaagtgatgctggaatgtttatggatgcagtggatgtctctgggggccactcgctccggaaaatgttccaaggtgttgttacagtacagaacctccaaaaggaactgtccactgcttgtacaaagcatttggatccaacttcgtgcttctttccccagaacttggtttcaggcattaagactccaatgtttcttctcaatgcagcatatgacgcttggcaggtacaagagagtttagctccaccatcagttgacctaagcggctcttggaaggcatgcaaatctgatcactcgcattgtaattcatctcagatccagttcttccaagacttcaggactcatatggtagatgctgtaaagtctttcgcgacatcgacacataacggtgtgttcataaactcatgcttcgctcactgccaatctgaaagacaggacacttggtatgcaccagattctcctactcttcatggcaagaccgttgctgaatctgttggtgattggtactttgacagaacaacagtgaaagccattgactgtccttacccctgtgacaaaacatgtcacaatctcatcttcaagtgagatgacaaatgacatatactcttcaaactcaaacagcttacttgattcttataccatactaccattagtaacaacaattcctgaaaaaccgcatttcatcttttacataatatgtgctattttgactcaaataaagttagtttttcgtgtgt

SEQ ID NO: 39427 - protein, 451 aa, Arabidopsis thaliana
  peptide (1)..(451): Ceres Seq. ID no. 13491877
  misc_feature (72)..(435): Pfam Name: Pectinacetylesterase Pfam Description: Pectinacetylesterase
  misc_feature (154)..(451): Homolog of NCBI NO: 30690308 NR Description: pectinacetylesterase, putative [Arabidopsis
  misc_feature (50)..(451): Homolog of NCBI NO: 34913332 NR Description: putative pectin acetylesterase precursor
  misc_feature (86)..(451): Homolog of NCBI NO: 7487997 NR Description: pectin acetylesterase homolog F21E10.11 -
  misc_feature (86)..(451): Homolog of NCBI NO: 18397406 NR Description: pectinacetylesterase, putative [Arabidopsis
  misc_feature (46)..(451): Homolog of NCBI NO: 21703105 NR Description: At1g57590/T8L23_6 [Arabidopsis thaliana]
  misc_feature (46)..(451): Homolog of NCBI NO: 30696158 NR Description: pectinacetylesterase, putative [Arabidopsis
  misc_feature (46)..(451): Homolog of NCBI NO: 25347293 NR Description: probable pectinacetylesterase precursor T8L23.6
  misc_feature (59)..(451): Homolog of NCBI NO: 15228677 NR Description: pectinacetylesterase family [Arabidopsis
  misc_feature (59)..(451): Homolog of NCBI NO: 28392968 NR Description: putative pectinacetylesterase [Arabidopsis
  misc_feature (36)..(451): Homolog of NCBI NO: 15226462 NR Description: pectinacetylesterase, putative [Arabidopsis
LAINHTHATVQDLSESTEIDLFESRFSALFRTPAEMKSVLRIAAAIFWLWLFIVLGVIGSGNVRDTDDEISLLESQLVVTSPSQLLMVPLTLIQAAASKGAVCLDGTLPGYHLHPGSGSGANRWLIQLEGGGWCNTRRSCIFRKTTRRGSSNHMEKVLAFTGILSNKSNENPDFFNWNRVKLRYCDGASFTGDSQDESSQLYYRGQRIWHSAMEELLSKGMQKAEQALLSGCSAGGLASILHCDQFKELFPGTTTVKCLSDAGMFMDAVDVSGGHSLRKMFQGVVTVQNLQKELSTACTKHLDPTSCFFPQNLVSGIKTPMFLLNAAYDAWQVQESLAPPSVDLSGSWKACKSDHSHCNSSQIQFFQDFRTHMVDAVKSFATSTHNGVFINSCFAHCQSERQDTWYAPDSPTLHGKTVAESVGDWYFDRTTVKAIDCPYPCDKTCHNLIFK

SEQ ID NO: 39428 - protein, 416 aa, Arabidopsis thaliana
  peptide (1)..(416): Ceres Seq. ID no. 13491878
  misc_feature (37)..(400): Pfam Name: Pectinacetylesterase Pfam Description: Pectinacetylesterase
  misc_feature (119)..(416): Homolog of NCBI NO: 30690308 NR Description: pectinacetylesterase, putative [Arabidopsis
  misc_feature (15)..(416): Homolog of NCBI NO: 34913332 NR Description: putative pectin acetylesterase precursor
  misc_feature (51)..(416): Homolog of NCBI NO: 7487997 NR Description: pectin acetylesterase homolog F21E10.11 -
  misc_feature (51)..(416): Homolog of NCBI NO: 18397406 NR Description: pectinacetylesterase, putative [Arabidopsis
  misc_feature (11)..(416): Homolog of NCBI NO: 21703105 NR Description: At1g57590/T8L23_6 [Arabidopsis thaliana]
  misc_feature (11)..(416): Homolog of NCBI NO: 30696158 NR Description: pectinacetylesterase, putative [Arabidopsis
  misc_feature (11)..(416): Homolog of NCBI NO: 25347293 NR Description: probable pectinacetylesterase precursor T8L23.6
  misc_feature (24)..(416): Homolog of NCBI NO: 15228677 NR Description: pectinacetylesterase family [Arabidopsis
  misc_feature (24)..(416): Homolog of NCBI NO: 28392968 NR Description: putative pectinacetylesterase [Arabidopsis
  misc_feature (1)..(416): Homolog of NCBI NO: 15226462 NR Description: pectinacetylesterase, putative [Arabidopsis
MKSVLRIAAAIFWLWLFIVLGVIGSGNVRDTDDEISLLESQLVVTSPSQLLMVPLTLIQAAASKGAVCLDGTLPGYHLHPGSGSGANRWLIQLEGGGWCNTRRSCIFRKTTRRGSSNHMEKVLAFTGILSNKSNENPDFFNWNRVKLRYCDGASFTGDSQDESSQLYYRGQRIWHSAMEELLSKGMQKAEQALLSGCSAGGLASILHCDQFKELFPGTTTVKCLSDAGMFMDAVDVSGGHSLRKMFQGVVTVQNLQKELSTACTKHLDPTSCFFPQNLVSGIKTPMFLLNAAYDAWQVQESLAPPSVDLSGSWKACKSDHSHCNSSQIQFFQDFRTHMVDAVKSFATSTHNGVFINSCFAHCQSERQDTWYAPDSPTLHGKTVAESVGDWYFDRTTVKAIDCPYPCDKTCHNLIFK

SEQ ID NO: 39429 - protein, 365 aa, Arabidopsis thaliana
  peptide (1)..(365): Ceres Seq. ID no. 13491879
  misc_feature (1)..(349): Pfam Name: Pectinacetylesterase Pfam Description: Pectinacetylesterase
  misc_feature (68)..(365): Homolog of NCBI NO: 30690308 NR Description: pectinacetylesterase, putative [Arabidopsis
  misc_feature (1)..(365): Homolog of NCBI NO: 34913332 NR Description: putative pectin acetylesterase precursor
  misc_feature (1)..(365): Homolog of NCBI NO: 7487997 NR Description: pectin acetylesterase homolog F21E10.11 -
  misc_feature (1)..(365): Homolog of NCBI NO: 18397406 NR Description: pectinacetylesterase, putative [Arabidopsis
  misc_feature (1)..(365): Homolog of NCBI NO: 21703105 NR Description: At1g57590/T8L23_6 [Arabidopsis thaliana]
  misc_feature (1)..(365): Homolog of NCBI NO: 30696158 NR Description: pectinacetylesterase, putative [Arabidopsis
  misc_feature (1)..(365): Homolog of NCBI NO: 25347293 NR Description: probable pectinacetylesterase precursor T8L23.6
  misc_feature (1)..(365): Homolog of NCBI NO: 15228677 NR Description: pectinacetylesterase family [Arabidopsis
  misc_feature (1)..(365): Homolog of NCBI NO: 28392968 NR Description: putative pectinacetylesterase [Arabidopsis
  misc_feature (1)..(365): Homolog of NCBI NO: 15226462 NR Description: pectinacetylesterase, putative [Arabidopsis
MVPLTLIQAAASKGAVCLDGTLPGYHLHPGSGSGANRWLIQLEGGGWCNTRRSCIFRKTTRRGSSNHMEKVLAFTGILSNKSNENPDFFNWNRVKLRYCDGASFTGDSQDESSQLYYRGQRIWHSAMEELLSKGMQKAEQALLSGCSAGGLASILHCDQFKELFPGTTTVKCLSDAGMFMDAVDVSGGHSLRKMFQGVVTVQNLQKELSTACTKHLDPTSCFFPQNLVSGIKTPMFLLNAAYDAWQVQESLAPPSVDLSGSWKACKSDHSHCNSSQIQFFQDFRTHMVDAVKSFATSTHNGVFINSCFAHCQSERQDTWYAPDSPTLHGKTVAESVGDWYFDRTTVKAIDCPYPCDKTCHNLIFK

SEQ ID NO: 39430 - DNA, 1116 bp, Arabidopsis thaliana
  misc_feature (1)..(1116): Ceres Seq. ID no. 13487214
  misc_feature: MA Experiment ID: 20001247 Result: Down-regulated in Transcription
  misc_feature: MA Experiment 20001247 PARAMETER Experiment Name: At_Far-red-induction_P Parameter: Age (day) Value: 7
  misc_feature: MA Experiment 20001247 PARAMETER Experiment Name: At_Far-red-induction_P Parameter: Light Value: Far-red vs. White
  misc_feature: MA Experiment 20001247 PARAMETER Experiment Name: At_Far-red-induction_P Parameter: Organism Value: A. thaliana
  misc_feature: MA Experiment 20001247 PARAMETER Experiment Name: At_Far-red-induction_P Parameter: Plant Line Value: Columbia
  misc_feature: MA Experiment 20001247 PARAMETER Experiment Name: At_Far-red-induction_P Parameter: Timepoint (hr) Value: 1
  misc_feature: MA Experiment 20001247 PARAMETER Experiment Name: At_Far-red-induction_P Parameter: Tissue Value: Whole Plant
atggtgcttgacatggcttctcacttgtacacaaatccacctcaaaaccttcactttatttcttcttcttcttcccttaaacctcatttatgcctctctttcaaacgcataaaccctaaacacaaatcctcttcctcttccgtcttcgtcccttacgcatcacagagttccattgccattacctccaaggaaagatggtctctcaatggaatgtctgctcttgtcaccggcggcactcgtggaattgggcgtgcgattgtggaggaattggctggtcttggagcagaagttcacacttgcgctcggaatgagtacgagctggagaattgtttgagtgattggaaccgttctggttttcgagttgctggatccgtttgcgatgtctctgatcgatctcagagagaggctttgatggagaccgtgtcatctgtgtttgaagggaagcttcatatccttgtaaacaatgttgggacgaacattaggaaaccaatggtagagtttactgctggagaattttcgactctgatgtctacgaatttcgaatcggttttccatttatgtcaacttgcttatccattgcttagagaatctaaagctggaagtgttgtgttcatctcttctgtttctggttttgtttccctcaagaatatgtcggtccaatcttcaaccaaaggagcaattaatcaacttacgagaagtctggcttgcgagtgggccaaagacaatataaggatcaatgctgttgccccgtggtatatcaaaacatctatggtggagcaagtccttagcaacaaagagtacctagaagaagtctactcagtaactcctcttggtcgacttggcgaaccgagagaggtgtcttctgcagtggcttttttatgcctacctgcatcatcatatattacagggcagattctttgtgttgatggtggaatgtcaataaacggtttcttcccacgacatgattaggccactctattgttttactagtttccttgggatcctttttgttttatctttagcatgtctcctttctcccgtgaaagacagttcatcgatatgagatgagaattgaagttgtgctactaagtctactgttaatgaaaaggataattt

SEQ ID NO: 39431 - protein, 322 aa, Arabidopsis thaliana
  peptide (1)..(322): Ceres Seq. ID no. 13487215
  misc_feature (64)..(317): Homolog of NCBI NO: 15227069 NR Description: short-chain dehydrogenase/reductase family
  misc_feature (59)..(317): Homolog of NCBI NO: 25283134 NR Description: probable tropinone reductase [imported] -
  misc_feature (59)..(317): Homolog of NCBI NO: 21554716 NR Description: putative tropinone reductase [Arabidopsis
  misc_feature (255)..(311): Homolog of NCBI NO: 29893663 NR Description: unknown protein [Oryza sativa (japonica
  misc_feature (53)..(261): Homolog of NCBI NO: 29893663 NR Description: unknown protein [Oryza sativa (japonica
  misc_feature (59)..(317): Homolog of NCBI NO: 15227076 NR Description: short-chain dehydrogenase/reductase family
  misc_feature (64)..(317): Homolog of NCBI NO: 21536785 NR Description: short chain alcohol dehydrogenase-like
  misc_feature (64)..(317): Homolog of NCBI NO: 15239327 NR Description: short-chain dehydrogenase/reductase family
  misc_feature (11)..(322): Homolog of NCBI NO: 28393476 NR Description: putative tropinone reductase [Arabidopsis
  misc_feature (1)..(322): Homolog of NCBI NO: 15227060 NR Description: short-chain dehydrogenase/reductase family
MVLDMASHLYTNPPQNLHFISSSSSLKPHLCLSFKRINPKHKSSSSSVFVPYASQSSIAITSKERWSLNGMSALVTGGTRGIGRAIVEELAGLGAEVHTCARNEYELENCLSDWNRSGFRVAGSVCDVSDRSQREALMETVSSVFEGKLHILVNNVGTNIRKPMVEFTAGEFSTLMSTNFESVFHLCQLAYPLLRESKAGSVVFISSVSGFVSLKNMSVQSSTKGAINQLTRSLACEWAKDNIRINAVAPWYIKTSMVEQVLSNKEYLEEVYSVTPLGRLGEPREVSSAVAFLCLPASSYITGQILCVDGGMSINGFFPRHD

SEQ ID NO: 39432 - protein, 318 aa, Arabidopsis thaliana
  peptide (1)..(318): Ceres Seq. ID no. 13487216
  misc_feature (60)..(313): Homolog of NCBI NO: 15227069 NR Description: short-chain dehydrogenase/reductase family
  misc_feature (55)..(313): Homolog of NCBI NO: 25283134 NR Description: probable tropinone reductase [imported] -
  misc_feature (55)..(313): Homolog of NCBI NO: 21554716 NR Description: putative tropinone reductase [Arabidopsis
  misc_feature (251)..(307): Homolog of NCBI NO: 29893663 NR Description: unknown protein [Oryza sativa (japonica
  misc_feature (49)..(257): Homolog of NCBI NO: 29893663 NR Description: unknown protein [Oryza sativa (japonica
  misc_feature (55)..(313): Homolog of NCBI NO: 15227076 NR Description: short-chain dehydrogenase/reductase family
  misc_feature (60)..(313): Homolog of NCBI NO: 21536785 NR Description: short chain alcohol dehydrogenase-like
  misc_feature (60)..(313): Homolog of NCBI NO: 15239327 NR Description: short-chain dehydrogenase/reductase family
  misc_feature (7)..(318): Homolog of NCBI NO: 28393476 NR Description: putative tropinone reductase [Arabidopsis
  misc_feature (1)..(318): Homolog of NCBI NO: 15227060 NR Description: short-chain dehydrogenase/reductase family
MASHLYTNPPQNLHFISSSSSLKPHLCLSFKRINPKHKSSSSSVFVPYASQSSIAITSKERWSLNGMSALVTGGTRGIGRAIVEELAGLGAEVHTCARNEYELENCLSDWNRSGFRVAGSVCDVSDRSQREALMETVSSVFEGKLHILVNNVGTNIRKPMVEFTAGEFSTLMSTNFESVFHLCQLAYPLLRESKAGSVVFISSVSGFVSLKNMSVQSSTKGAINQLTRSLACEWAKDNIRINAVAPWYIKTSMVEQVLSNKEYLEEVYSVTPLGRLGEPREVSSAVAFLCLPASSYITGQILCVDGGMSINGFFPRHD

SEQ ID NO: 39433 - protein, 252 aa, Arabidopsis thaliana
  peptide (1)..(252): Ceres Seq. ID no. 13487217
  misc_feature (1)..(247): Homolog of NCBI NO: 15227069 NR Description: short-chain dehydrogenase/reductase family
  misc_feature (1)..(247): Homolog of NCBI NO: 25283134 NR Description: probable tropinone reductase [imported] -
  misc_feature (1)..(247): Homolog of NCBI NO: 21554716 NR Description: putative tropinone reductase [Arabidopsis
  misc_feature (185)..(241): Homolog of NCBI NO: 29893663 NR Description: unknown protein [Oryza sativa (japonica
  misc_feature (1)..(191): Homolog of NCBI NO: 29893663 NR Description: unknown protein [Oryza sativa (japonica
  misc_feature (1)..(247): Homolog of NCBI NO: 15227076 NR Description: short-chain dehydrogenase/reductase family
  misc_feature (1)..(247): Homolog of NCBI NO: 21536785 NR Description: short chain alcohol dehydrogenase-like
  misc_feature (1)..(247): Homolog of NCBI NO: 15239327 NR Description: short-chain dehydrogenase/reductase family
  misc_feature (1)..(252): Homolog of NCBI NO: 28393476 NR Description: putative tropinone reductase [Arabidopsis
  misc_feature (1)..(252): Homolog of NCBI NO: 15227060 NR Description: short-chain dehydrogenase/reductase family
MSALVTGGTRGIGRAIVEELAGLGAEVHTCARNEYELENCLSDWNRSGFRVAGSVCDVSDRSQREALMETVSSVFEGKLHILVNNVGTNIRKPMVEFTAGEFSTLMSTNFESVFHLCQLAYPLLRESKAGSVVFISSVSGFVSLKNMSVQSSTKGAINQLTRSLACEWAKDNIRINAVAPWYIKTSMVEQVLSNKEYLEEVYSVTPLGRLGEPREVSSAVAFLCLPASSYITGQILCVDGGMSINGFFPRHD

SEQ ID NO: 39434 - DNA, 1191 bp, Arabidopsis thaliana; identical to SEQ ID NO: 35737
  misc_feature (1)..(1191): Ceres Seq. ID no. 12328954
  misc_feature: MA Experiment ID: 20000184 Result: Down-regulated in Transcription
  misc_feature: MA Experiment 20000184 PARAMETER Experiment Name: At_Shoots__P Parameter: Age (day) Value: 7
  misc_feature: MA Experiment 20000184 PARAMETER Experiment Name: At_Shoots__P Parameter: Tissue Value: Shoots vs. Whole Plant
  misc_feature: MA Experiment ID: 20000438 Result: Down-regulated in Transcription
  misc_feature: MA Experiment 20000438 PARAMETER Experiment Name: At_Shoots__P Parameter: Age (day) Value: 14
  misc_feature: MA Experiment 20000438 PARAMETER Experiment Name: At_Shoots__P Parameter: Tissue Value: Shoots vs. Whole Plant

SEQ ID NO: 39435 - protein, 258 aa, Arabidopsis thaliana; identical to SEQ ID NO: 35738
  peptide (1)..(258): Ceres Seq. ID no. 12328955
  misc_feature (57)..(245): Pfam Name: Caldesmon Pfam Description: Caldesmon
  misc_feature (57)..(245): Pfam Name: Caldesmon Pfam Description: Caldesmon
  misc_feature (16)..(256): Homolog of NCBI NO: 27881860 NR Description: Unknown (protein for MGC:55375) [Danio rerio]
  misc_feature (16)..(256): Homolog of NCBI NO: 38541231 NR Description: Unknown (protein for MGC:77695) [Danio rerio]
  misc_feature (16)..(256): Homolog of NCBI NO: 28278343 NR Description: Unknown (protein for MGC:55548) [Danio rerio]
  misc_feature (19)..(256): Homolog of NCBI NO: 17862050 NR Description: LD06138p [Drosophila melanogaster]
  misc_feature (16)..(256): Homolog of NCBI NO: 34879649 NR Description: similar to hypothetical protein FLJ10154 [Rattus
  misc_feature (16)..(256): Homolog of NCBI NO: 27881860 NR Description: Unknown (protein for MGC:55375) [Danio rerio]
  misc_feature (16)..(256): Homolog of NCBI NO: 28278343 NR Description: Unknown (protein for MGC:55548) [Danio rerio]
  misc_feature (16)..(256): Homolog of NCBI NO: 34879649 NR Description: similar to hypothetical protein FLJ10154 [Rattus
  misc_feature (17)..(258): Homolog of NCBI NO: 15240607 NR Description: putative protein; protein id: At5g13340.1
  misc_feature (31)..(256): Homolog of NCBI NO: 15220234 NR Description: unknown protein; protein id: At1g10890.1
  misc_feature (98)..(246): Homolog of NCBI NO: 37532486 NR Description: hypothetical protein [Oryza sativa (japonica
  misc_feature (16)..(256): Homolog of NCBI NO: 39795605 NR Description: Unknown (protein for MGC:76303) [Silurana
  misc_feature (16)..(256): Homolog of NCBI NO: 8922259 NR Description: hypothetical protein FLJ10154 [Homo sapiens]
  misc_feature (19)..(256): Homolog of NCBI NO: 17862050 NR Description: LD06138p [Drosophila melanogaster]
  misc_feature (16)..(256): Homolog of NCBI NO: 38541231 NR Description: Unknown (protein for MGC:77695) [Danio rerio]
  misc_feature (16)..(256): Homolog of NCBI NO: 8922259 NR Description: hypothetical protein FLJ10154 [Homo sapiens]
  misc_feature (16)..(256): Homolog of NCBI NO: 39795605 NR Description: Unknown (protein for MGC:76303) [Silurana
  misc_feature (98)..(246): Homolog of NCBI NO: 37532486 NR Description: hypothetical protein [Oryza sativa (japonica
  misc_feature (31)..(256): Homolog of NCBI NO: 15220234 NR Description: unknown protein; protein id: At1g10890.1
  misc_feature (17)..(258): Homolog of NCBI NO: 15240607 NR Description: putative protein; protein id: At5g13340.1

SEQ ID NO: 39436 - protein, 242 aa, Arabidopsis thaliana; identical to SEQ ID NO: 35739
  peptide (1)..(242): Ceres Seq. ID no. 12328956
  misc_feature (41)..(229): Pfam Name: Caldesmon Pfam Description: Caldesmon
  misc_feature (41)..(229): Pfam Name: Caldesmon Pfam Description: Caldesmon
  misc_feature (1)..(240): Homolog of NCBI NO: 27881860 NR Description: Unknown (protein for MGC:55375) [Danio rerio]
  misc_feature (1)..(240): Homolog of NCBI NO: 38541231 NR Description: Unknown (protein for MGC:77695) [Danio rerio]
  misc_feature (1)..(240): Homolog of NCBI NO: 28278343 NR Description: Unknown (protein for MGC:55548) [Danio rerio]
  misc_feature (3)..(240): Homolog of NCBI NO: 17862050 NR Description: LD06138p [Drosophila melanogaster]
  misc_feature (1)..(240): Homolog of NCBI NO: 34879649 NR Description: similar to hypothetical protein FLJ10154 [Rattus
  misc_feature (1)..(240): Homolog of NCBI NO: 27881860 NR Description: Unknown (protein for MGC:55375) [Danio rerio]
  misc_feature (1)..(240): Homolog of NCBI NO: 28278343 NR Description: Unknown (protein for MGC:55548) [Danio rerio]
  misc_feature (1)..(240): Homolog of NCBI NO: 34879649 NR Description: similar to hypothetical protein FLJ10154 [Rattus
  misc_feature (1)..(242): Homolog of NCBI NO: 15240607 NR Description: putative protein; protein id: At5g13340.1
  misc_feature (15)..(240): Homolog of NCBI NO: 15220234 NR Description: unknown protein; protein id: At1g10890.1
  misc_feature (82)..(230): Homolog of NCBI NO: 37532486 NR Description: hypothetical protein [Oryza sativa (japonica
  misc_feature (1)..(240): Homolog of NCBI NO: 39795605 NR Description: Unknown (protein for MGC:76303) [Silurana
  misc_feature (1)..(240): Homolog of NCBI NO: 8922259 NR Description: hypothetical protein FLJ10154 [Homo sapiens]
  misc_feature (3)..(240): Homolog of NCBI NO: 17862050 NR Description: LD06138p [Drosophila melanogaster]
  misc_feature (1)..(240): Homolog of NCBI NO: 38541231 NR Description: Unknown (protein for MGC:77695) [Danio rerio]
  misc_feature (1)..(240): Homolog of NCBI NO: 8922259 NR Description: hypothetical protein FLJ10154 [Homo sapiens]
  misc_feature (1)..(240): Homolog of NCBI NO: 39795605 NR Description: Unknown (protein for MGC:76303) [Silurana
  misc_feature (82)..(230): Homolog of NCBI NO: 37532486 NR Description: hypothetical protein [Oryza sativa (japonica
  misc_feature (15)..(240): Homolog of NCBI NO: 15220234 NR Description: unknown protein; protein id: At1g10890.1
  misc_feature (1)..(242): Homolog of NCBI NO: 15240607 NR Description: putative protein; protein id: At5g13340.1

SEQ ID NO: 39437 - protein, 131 aa, Arabidopsis thaliana; identical to SEQ ID NO: 35740
  peptide (1)..(131): Ceres Seq. ID no. 12328957
  misc_feature (1)..(118): Pfam Name: Caldesmon Pfam Description: Caldesmon
  misc_feature (1)..(118): Pfam Name: Caldesmon Pfam Description: Caldesmon
  misc_feature (1)..(129): Homolog of NCBI NO: 27881860 NR Description: Unknown (protein for MGC:55375) [Danio rerio]
  misc_feature (1)..(129): Homolog of NCBI NO: 38541231 NR Description: Unknown (protein for MGC:77695) [Danio rerio]
  misc_feature (1)..(129): Homolog of NCBI NO: 28278343 NR Description: Unknown (protein for MGC:55548) [Danio rerio]
  misc_feature (1)..(129): Homolog of NCBI NO: 17862050 NR Description: LD06138p [Drosophila melanogaster]
  misc_feature (1)..(129): Homolog of NCBI NO: 34879649 NR Description: similar to hypothetical protein FLJ10154 [Rattus
  misc_feature (1)..(129): Homolog of NCBI NO: 27881860 NR Description: Unknown (protein for MGC:55375) [Danio rerio]
  misc_feature (1)..(129): Homolog of NCBI NO: 28278343 NR Description: Unknown (protein for MGC:55548) [Danio rerio]
  misc_feature (1)..(129): Homolog of NCBI NO: 34879649 NR Description: similar to hypothetical protein FLJ10154 [Rattus
  misc_feature (1)..(131): Homolog of NCBI NO: 15240607 NR Description: putative protein; protein id: At5g13340.1
  misc_feature (1)..(129): Homolog of NCBI NO: 15220234 NR Description: unknown protein; protein id: At1g10890.1
  misc_feature (1)..(119): Homolog of NCBI NO: 37532486 NR Description: hypothetical protein [Oryza sativa (japonica
  misc_feature (1)..(129): Homolog of NCBI NO: 39795605 NR Description: Unknown (protein for MGC:76303) [Silurana
  misc_feature (1)..(129): Homolog of NCBI NO: 8922259 NR Description: hypothetical protein FLJ10154 [Homo sapiens]
  misc_feature (1)..(129): Homolog of NCBI NO: 17862050 NR Description: LD06138p [Drosophila melanogaster]
  misc_feature (1)..(129): Homolog of NCBI NO: 38541231 NR Description: Unknown (protein for MGC:77695) [Danio rerio]
  misc_feature (1)..(129): Homolog of NCBI NO: 8922259 NR Description: hypothetical protein FLJ10154 [Homo sapiens]
  misc_feature (1)..(129): Homolog of NCBI NO: 39795605 NR Description: Unknown (protein for MGC:76303) [Silurana
  misc_feature (1)..(119): Homolog of NCBI NO: 37532486 NR Description: hypothetical protein [Oryza sativa (japonica
  misc_feature (1)..(129): Homolog of NCBI NO: 15220234 NR Description: unknown protein; protein id: At1g10890.1
  misc_feature (1)..(131): Homolog of NCBI NO: 15240607 NR Description: putative protein; protein id: At5g13340.1

SEQ ID NO: 39438 - DNA, 1930 bp, Arabidopsis thaliana
  misc_feature (1)..(1930): Ceres Seq. ID no. 13489532
  misc_feature: MA Experiment ID: 108573 Result: Up-regulated in Transcription
  misc_feature: MA Experiment 108573 PARAMETER Experiment Name: At_Drought_cDNA_P Parameter: Timepoint (hr) Value: 6
  misc_feature: MA Experiment 108573 PARAMETER Experiment Name: At_Drought_cDNA_P Parameter: Tissue Value: Aerial
  misc_feature: MA Experiment 108573 PARAMETER Experiment Name: At_Drought_cDNA_P Parameter: Treatment Value: Drought vs. No Drought
  misc_feature: MA Experiment ID: 108576 Result: Down-regulated in Transcription
  misc_feature: MA Experiment 108576 PARAMETER Experiment Name: At_42deg_Heat_cDNA_P Parameter: Temperature (deg C) Value: 42 vs. 22
  misc_feature: MA Experiment 108576 PARAMETER Experiment Name: At_42deg_Heat_cDNA_P Parameter: Timepoint (hr) Value: 1
  misc_feature: MA Experiment 108576 PARAMETER Experiment Name: At_42deg_Heat_cDNA_P Parameter: Tissue Value: Aerial
  misc_feature: MA Experiment ID: 108577 Result: Down-regulated in Transcription
  misc_feature: MA Experiment 108577 PARAMETER Experiment Name: At_42deg_Heat_cDNA_P Parameter: Temperature (deg C) Value: 42 vs. 22
  misc_feature: MA Experiment 108577 PARAMETER Experiment Name: At_42deg_Heat_cDNA_P Parameter: Timepoint (hr) Value: 6
  misc_feature: MA Experiment 108577 PARAMETER Experiment Name: At_42deg_Heat_cDNA_P Parameter: Tissue Value: Aerial
  misc_feature: MA Experiment ID: 108585 Result: Up-regulated in Transcription
  misc_feature: MA Experiment 108585 PARAMETER Experiment Name: At_5mM_NaNP_cDNA_P Parameter: Timepoint (hr) Value: 6
  misc_feature: MA Experiment 108585 PARAMETER Experiment Name: At_5mM_NaNP_cDNA_P Parameter: Tissue Value: Aerial
  misc_feature: MA Experiment 108585 PARAMETER Experiment Name: At_5mM_NaNP_cDNA_P Parameter: Treatment Value: null
  misc_feature: MA Experiment ID: 20000173 Result: Down-regulated in Transcription
  misc_feature: MA Experiment 20000173 PARAMETER Experiment Name: At_42deg_Heat_P Parameter: Age (day) Value: 14
  misc_feature: MA Experiment 20000173 PARAMETER Experiment Name: At_42deg_Heat_P Parameter: Organism Value: A. thaliana
  misc_feature: MA Experiment 20000173 PARAMETER Experiment Name: At_42deg_Heat_P Parameter: Plant Line Value: WS
  misc_feature: MA Experiment 20000173 PARAMETER Experiment Name: At_42deg_Heat_P Parameter: Temperature (deg C) Value: 42 vs. 22
  misc_feature: MA Experiment 20000173 PARAMETER Experiment Name: At_42deg_Heat_P Parameter: Timepoint (hr) Value: 6
  misc_feature: MA Experiment 20000173 PARAMETER Experiment Name: At_42deg_Heat_P Parameter: Tissue Value: Aerial
  misc_feature: MA Experiment ID: 20001451 Result: Up-regulated in Transcription
  misc_feature: MA Experiment 20001451 PARAMETER Experiment Name: At_Far-red-induction_P Parameter: Age (day) Value: 7
  misc_feature: MA Experiment 20001451 PARAMETER Experiment Name: At_Far-red-induction_P Parameter: Light Value: Far-red vs. White
  misc_feature: MA Experiment 20001451 PARAMETER Experiment Name: At_Far-red-induction_P Parameter: Organism Value: A. thaliana
  misc_feature: MA Experiment 20001451 PARAMETER Experiment Name: At_Far-red-induction_P Parameter: Plant Line Value: Columbia
  misc_feature: MA Experiment 20001451 PARAMETER Experiment Name: At_Far-red-induction_P Parameter: Timepoint (hr) Value: 24
  misc_feature: MA Experiment 20001451 PARAMETER Experiment Name: At_Far-red-induction_P Parameter: Tissue Value: Whole Plant
agctccgtcatcataacagcgttaacaaacggcgtcccctgtcgaaagtctctctctttctcgcttctctgaaaaaattgggatcattttgataggagcgactctgttccttcgccgccgatacgcactcttcttcatcggatttgttcctctggtgggattgtagctctccatgtgttgtactagtgcctcttaggacaatgttttggagcttatagtcaaattctgtgaaaactttgaggtgggaattgtgagatcctgtatgatgaagatatccttgaattgcatatatggctttgttgattgatgttctcatctcttgccacctaagggttttgattcggccactgtatctgctaggggttcgcttctggaagaaatatgggtgagactctcatcaccaccctgtctatggagaactatcacccgtcaacactgctatccatggattcaggtgcttttactcatgaagaatcagagagggatatgaatgggtctctcatacttactggaccgcctgatattaatctaccactctcttctgaagctaggccatctctgcttttgtggaacgaacactgtgacatcttagacgttggacttggacctcagctatatgagcctgaggctgttgttcatgtgcctaaggttgctaagaagtacaacaagcgtgttgatagtgcatggggtgcttggcttttcttcagtttctacttcaaacctgttttggatgagaagtctaaaagtaagttaacgagggacagcaatggcttgtctgggtatgataaatctgatttgcagctcgactcgttcttggttcagcatgacatggagaatatgtacatgtgggtgttcaaggaaaagcctgaaaatgcccttggcaagatgcagctgcggagctacatgaacggacactcacgcgagggtgagcgtcctttcccttttagtgtggacaaaggttttgtccgctctcataggatgcagaggaaacattaccgtggtctctctaacccacagtgcctccatggaatcgaagttgtttattcacccaacctttctgtactcagcgaggatgaaaagaagaagtggacagaactcacaggtcgagatgtgaactttgctattccagctgaagctagtgattacggttcatggaggaatctcccaaacaccgaatttgaggctgagagacctcttcctctggctaaagctaacgggcacacccacctgaaaaagctgaatggtacctgtctaaacctgtctacacattccccagaccatgcagttgatacagtggaagttcaactcgctggtagcaataaacgcaaaagggattgtcttgctctaggaaactgcgatgactcgagctcaagtgagaaatctctggacatgaaaatccatgcaacggagctgccttggtcaaatgattttagcggggtgatgaagaatgtgtacggtccagtcacagccgcaaaaacgatatatgaagacgacagagggttcttgatagttatgagcctgccatttgttgattccggaagggtgaaagtgacatggaggaatacaccagcacatggaatagtgaagatatcatgtgtaagtacagcatgtgagccattcatcaagagacatgatagaacatttaagctaacagatccaacaccagagcattgcccaccgggggaatttgtccgcgaagtctccctgccgaacaggattccagatgacgccaagcttgaagcttaccgggacgaaacaggaacaacactagaggttttagtgcctaaacaccgaatgggaccagaggagcatgaggttcgcgtctgtctccgtccgttcgtgctagagtgagattgtagcgcataacttcttaaaagaattttattgttcatgtatcattggattattcatatttaatcatatttactcc

SEQ ID NO: 39439 - protein, 489 aa, Arabidopsis thaliana
  peptide (1)..(489): Ceres Seq. ID no. 13489533
  misc_feature (45)..(485): Homolog of NCBI NO: 34908142 NR Description: putative SLT1 protein (ion homeostasis related
  misc_feature (63)..(485): Homolog of NCBI NO: 34895866 NR Description: P0009G03.13 [Oryza sativa (japonica
  misc_feature (11)..(484): Homolog of NCBI NO: 11280862 NR Description: hypothetical protein T22P11.70 - Arabidopsis
  misc_feature (1)..(484): Homolog of NCBI NO: 18413934 NR Description: expressed protein [Arabidopsis thaliana]
  misc_feature (11)..(485): Homolog of NCBI NO: 18404463 NR Description: SLT1 protein [Arabidopsis thaliana]
  misc_feature (1)..(488): Homolog of NCBI NO: 11611667 NR Description: SLT1 protein [Nicotiana tabacum]
  misc_feature (1)..(489): Homolog of NCBI NO: 18399669 NR Description: expressed protein [Arabidopsis thaliana]
MGETLITTLSMENYHPSTLLSMDSGAFTHEESERDMNGSLILTGPPDINLPLSSEARPSLLLWNEHCDILDVGLGPQLYEPEAVVHVPKVAKKYNKRVDSAWGAWLFFSFYFKPVLDEKSKSKLTRDSNGLSGYDKSDLQLDSFLVQHDMENMYMWVFKEKPENALGKMQLRSYMNGHSREGERPFPFSVDKGFVRSHRMQRKHYRGLSNPQCLHGIEVVYSPNLSVLSEDEKKKWTELTGRDVNFAIPAEASDYGSWRNLPNTEFEAERPLPLAKANGHTHLKKLNGTCLNLSTHSPDHAVDTVEVQLAGSNKRKRDCLALGNCDDSSSSEKSLDMKIHATELPWSNDFSGVMKNVYGPVTAAKTIYEDDRGFLIVMSLPFVDSGRVKVTWRNTPAHGIVKISCVSTACEPFIKRHDRTFKLTDPTPEHCPPGEFVREVSLPNRIPDDAKLEAYRDETGTTLEVLVPKHRMGPEEHEVRVCLRPFVLE

SEQ ID NO: 39440 - protein, 479 aa, Arabidopsis thaliana
  peptide (1)..(479): Ceres Seq. ID no. 13489534
  misc_feature (35)..(475): Homolog of NCBI NO: 34908142 NR Description: putative SLT1 protein (ion homeostasis related
  misc_feature (53)..(475): Homolog of NCBI NO: 34895866 NR Description: P0009G03.13 [Oryza sativa (japonica
  misc_feature (1)..(474): Homolog of NCBI NO: 11280862 NR Description: hypothetical protein T22P11.70 - Arabidopsis
  misc_feature (1)..(474): Homolog of NCBI NO: 18413934 NR Description: expressed protein [Arabidopsis thaliana]
  misc_feature (1)..(475): Homolog of NCBI NO: 18404463 NR Description: SLT1 protein [Arabidopsis thaliana]
  misc_feature (1)..(478): Homolog of NCBI NO: 11611667 NR Description: SLT1 protein [Nicotiana tabacum]
  misc_feature (1)..(479): Homolog of NCBI NO: 18399669 NR Description: expressed protein [Arabidopsis thaliana]
MENYHPSTLLSMDSGAFTHEESERDMNGSLILTGPPDINLPLSSEARPSLLLWNEHCDILDVGLGPQLYEPEAVVHVPKVAKKYNKRVDSAWGAWLFFSFYFKPVLDEKSKSKLTRDSNGLSGYDKSDLQLDSFLVQHDMENMYMWVFKEKPENALGKMQLRSYMNGHSREGERPFPFSVDKGFVRSHRMQRKHYRGLSNPQCLHGIEVVYSPNLSVLSEDEKKKWTELTGRDVNFAIPAEASDYGSWRNLPNTEFEAERPLPLAKANGHTHLKKLNGTCLNLSTHSPDHAVDTVEVQLAGSNKRKRDCLALGNCDDSSSSEKSLDMKIHATELPWSNDFSGVMKNVYGPVTAAKTIYEDDRGFLIVMSLPFVDSGRVKVTWRNTPAHGIVKISCVSTACEPFIKRHDRTFKLTDPTPEHCPPGEFVREVSLPNRIPDDAKLEAYRDETGTTLEVLVPKHRMGPEEHEVRVCLRPFVLE

SEQ ID NO: 39441 - protein, 468 aa, Arabidopsis thaliana
  peptide (1)..(468): Ceres Seq. ID no. 13489535
  misc_feature (24)..(464): Homolog of NCBI NO: 34908142 NR Description: putative SLT1 protein (ion homeostasis related
  misc_feature (42)..(464): Homolog of NCBI NO: 34895866 NR Description: P0009G03.13 [Oryza sativa (japonica
  misc_feature (1)..(463): Homolog of NCBI NO: 11280862 NR Description: hypothetical protein T22P11.70 - Arabidopsis
  misc_feature (1)..(463): Homolog of NCBI NO: 18413934 NR Description: expressed protein [Arabidopsis thaliana]
  misc_feature (1)..(464): Homolog of NCBI NO: 18404463 NR Description: SLT1 protein [Arabidopsis thaliana]
  misc_feature (1)..(467): Homolog of NCBI NO: 11611667 NR Description: SLT1 protein [Nicotiana tabacum]
  misc_feature (1)..(468): Homolog of NCBI NO: 18399669 NR Description: expressed protein [Arabidopsis thaliana]
MDSGAFTHEESERDMNGSLILTGPPDINLPLSSEARPSLLLWNEHCDILDVGLGPQLYEPEAVVHVPKVAKKYNKRVDSAWGAWLFFSFYFKPVLDEKSKSKLTRDSNGLSGYDKSDLQLDSFLVQHDMENMYMWVFKEKPENALGKMQLRSYMNGHSREGERPFPFSVDKGFVRSHRMQRKHYRGLSNPQCLHGIEVVYSPNLSVLSEDEKKKWTELTGRDVNFAIPAEASDYGSWRNLPNTEFEAERPLPLAKANGHTHLKKLNGTCLNLSTHSPDHAVDTVEVQLAGSNKRKRDCLALGNCDDSSSSEKSLDMKIHATELPWSNDFSGVMKNVYGPVTAAKTIYEDDRGFLIVMSLPFVDSGRVKVTWRNTPAHGIVKISCVSTACEPFIKRHDRTFKLTDPTPEHCPPGEFVREVSLPNRIPDDAKLEAYRDETGTTLEVLVPKHRMGPEEHEVRVCLRPFVLE

SEQ ID NO: 39442 - DNA, 1301 bp, Arabidopsis thaliana
  misc_feature (1)..(1301): Ceres Seq. ID no. 12329272
  misc_feature: MA Experiment ID: 108573 Result: Up-regulated in Transcription
  misc_feature: MA Experiment 108573 PARAMETER Experiment Name: At_Drought_cDNA_P Parameter: Timepoint (hr) Value: 6
  misc_feature: MA Experiment 108573 PARAMETER Experiment Name: At_Drought_cDNA_P Parameter: Tissue Value: Aerial
  misc_feature: MA Experiment 108573 PARAMETER Experiment Name: At_Drought_cDNA_P Parameter: Treatment Value: Drought vs. No Drought
  misc_feature: MA Experiment ID: 108595 Result: Down-regulated in Transcription
  misc_feature: MA Experiment 108595 PARAMETER Experiment Name: At_Ler-pi_Ovule_cDNA_P Parameter: Plant Line Value: null
  misc_feature: MA Experiment ID: 20000185 Result: Down-regulated in Transcription
  misc_feature: MA Experiment 20000185 PARAMETER Experiment Name: At_Roots__P Parameter: Age (day) Value: 7 vs. 21
  misc_feature: MA Experiment 20000185 PARAMETER Experiment Name: At_Roots__P Parameter: Organism Value: A. thaliana
  misc_feature: MA Experiment 20000185 PARAMETER Experiment Name: At_Roots__P Parameter: Tissue Value: Roots vs. Whole Plant
  misc_feature: MA Experiment ID: 20000439 Result: Down-regulated in Transcription
  misc_feature: MA Experiment 20000439 PARAMETER Experiment Name: At_Roots__P Parameter: Age (day) Value: 14 vs. 21
  misc_feature: MA Experiment 20000439 PARAMETER Experiment Name: At_Roots__P Parameter: Organism Value: A. thaliana
  misc_feature: MA Experiment 20000439 PARAMETER Experiment Name: At_Roots__P Parameter: Tissue Value: Roots vs. Whole Plant
  misc_feature: MA Experiment ID: 20000495 Result: Down-regulated in Transcription
  misc_feature: MA Experiment 20000495 PARAMETER Experiment Name: At_Guard_Cells_P Parameter: Harvest Date Value: 8/2/2002
  misc_feature: MA Experiment 20000495 PARAMETER Experiment Name: At_Guard_Cells_P Parameter: Organism Value: A. thaliana
  misc_feature: MA Experiment 20000495 PARAMETER Experiment Name: At_Guard_Cells_P Parameter: Tissue Value: Guard Cells vs. Leaves
  misc_feature: MA Experiment ID: 20001451 Result: Down-regulated in Transcription
  misc_feature: MA Experiment 20001451 PARAMETER Experiment Name: At_Far-red-induction_P Parameter: Age (day) Value: 7
  misc_feature: MA Experiment 20001451 PARAMETER Experiment Name: At_Far-red-induction_P Parameter: Light Value: Far-red vs. White
  misc_feature: MA Experiment 20001451 PARAMETER Experiment Name: At_Far-red-induction_P Parameter: Organism Value: A. thaliana
  misc_feature: MA Experiment 20001451 PARAMETER Experiment Name: At_Far-red-induction_P Parameter: Plant Line Value: Columbia
  misc_feature: MA Experiment 20001451 PARAMETER Experiment Name: At_Far-red-induction_P Parameter: Timepoint (hr) Value: 24
  misc_feature: MA Experiment 20001451 PARAMETER Experiment Name: At_Far-red-induction_P Parameter: Tissue Value: Whole Plant
  misc_feature: MA Experiment ID: 20001757 Result: Down-regulated in Transcription
  misc_feature: MA Experiment 20001757 PARAMETER Experiment Name: At_50mM_NH4NO3_L-to-H_P Parameter: Timepoint (hr) Value: 6
  misc_feature: MA Experiment 20001757 PARAMETER Experiment Name: At_50mM_NH4NO3_L-to-H_P Parameter: Tissue Value: Leaf
  misc_feature: MA Experiment 20001757 PARAMETER Experiment Name: At_50mM_NH4NO3_L-to-H_P Parameter: Treatment Value: 50mM NH4NO3 vs 100mM Mannitol
  misc_feature: MA Experiment ID: 20001905 Result: Up-regulated in Transcription
  misc_feature: MA Experiment 20001905 PARAMETER Experiment Name: At_Drought_Reproduction_P Parameter: Age (day) Value: 40
  misc_feature: MA Experiment 20001905 PARAMETER Experiment Name: At_Drought_Reproduction_P Parameter: Organism Value: A. thaliana
  misc_feature: MA Experiment 20001905 PARAMETER Experiment Name: At_Drought_Reproduction_P Parameter: Plant Line Value: WS
  misc_feature: MA Experiment 20001905 PARAMETER Experiment Name: At_Drought_Reproduction_P Parameter: Timepoint (day) Value: 10
  misc_feature: MA Experiment 20001905 PARAMETER Experiment Name: At_Drought_Reproduction_P Parameter: Tissue Value: Rosettes
  misc_feature: MA Experiment 20001905 PARAMETER Experiment Name: At_Drought_Reproduction_P Parameter: Treatment Value: Drought vs. No Drought
aaaacaaaatccccaaattttcaacaaggataagagccggaagctcatcgccggtgaacggaactagggtttcattcatccccaaattgataacaagaaaatggctcatgcttgcgtctctacatcggcttcttctctcagattcacagctggattcgtctccgctagtcccaatggctcctctttcgattctcccaagctttctcttcctttcgagcctctccgttcaaggaagacgaataagttagttagcgatagaaagaattggaagaattcaactccgaaagctgtatattccggcaatctctggacaccggagattccgtctcctcaaggagtttggtccattagagatgatttacaagtcccttcttcgccgtattttcctgcttatgctcaaggacaaggaccacctcctatggtgcaagaacgtttccagagtatcattagtcagctcttccaatataggattattcgctgtggtggtgctgtggatgacgatatggcaaacataattgtagctcaactcctgtatcttgatgctgttgatcctactaaggatattgtcatgtatgttaattctcctggtggatcagttacagctggcatggctatattcgatactatgaggcacatccggcctgatgtgtccactgtttgtgttggtctagctgctagtatgggagcttttctgcttagtgctggaaccaaaggaaaaagatacagtctaccaaactcaaggataatgatccatcagccgcttggtggagctcaaggtggccaaaccgacattgacattcaggcaaatgaaatgctgcatcacaaggcaaacctaaacggttacctcgcataccacactggtcaaagcctggagaagataaaccaggacacagaccgtgatttcttcatgagtgccaaagaagcaaaagagtatggacttatcgacggtgttatcatgaaccctcttaaagctctccagccacttgcagcagcttaatcgcctaaaggtagtggttcagctttagcacttgttcttttttgggcctttgatgaactgagattttccatgaaatatgtttctattctacaaggaaaatcagatttgtttgggatcaaactctgtagttgatacatacatgaagaccaaagtaaagtttcttactgtgctgtttgattgaacaacctatgatcttttaatttgttttactgaatctggtagttacacccagctttgtagcaacattcataataaggcttttgatgttgactgtctttagtggtaaggagtagaagattgatgc

SEQ ID NO: 39443 - protein, 298 aa, Arabidopsis thaliana
  peptide (1)..(298): Ceres Seq. ID no. 12329273
  misc_feature (107)..(288): Pfam Name: Clp protease Pfam Description: Clp protease
  misc_feature (110)..(290): Homolog of NCBI NO: 34558484 NR Description: ATP-DEPENDENT CLP PROTEASE PROTEOLYTIC SUBUNIT
  misc_feature (110)..(292): Homolog of NCBI NO: 25019682 NR Description: ClpP2 [Synechococcus sp. PCC 7942]
  misc_feature (110)..(292): Homolog of NCBI NO: 3023500 NR Description: ATP-dependent Clp protease proteolytic subunit 2
  misc_feature (110)..(285): Homolog of NCBI NO: 23041314 NR Description: hypothetical protein [Trichodesmium erythraeum
  misc_feature (110)..(295): Homolog of NCBI NO: 16332037 NR Description: ATP-dependent protease; ClpP [Synechocystis sp.
  misc_feature (110)..(296): Homolog of NCBI NO: 23042319 NR Description: hypothetical protein [Trichodesmium erythraeum
  misc_feature (110)..(296): Homolog of NCBI NO: 17228733 NR Description: ATP-dependent Clp protease proteolytic subunit
  misc_feature (110)..(298): Homolog of NCBI NO: 23126705 NR Description: hypothetical protein [Nostoc punctiforme]
  misc_feature (1)..(298): Homolog of NCBI NO: 15485610 NR Description: Clp protease 2 proteolytic subunit [Lycopersicon
  misc_feature (1)..(298): Homolog of NCBI NO: 18378982 NR Description: ATP-dependent Clp protease proteolytic subunit
MAHACVSTSASSLRFTAGFVSASPNGSSFDSPKLSLPFEPLRSRKTNKLVSDRKNWKNSTPKAVYSGNLWTPEIPSPQGVWSIRDDLQVPSSPYFPAYAQGQGPPPMVQERFQSIISQLFQYRIIRCGGAVDDDMANIIVAQLLYLDAVDPTKDIVMYVNSPGGSVTAGMAIFDTMRHIRPDVSTVCVGLAASMGAFLLSAGTKGKRYSLPNSRIMIHQPLGGAQGGQTDIDIQANEMLHHKANLNGYLAYHTGQSLEKINQDTDRDFFMSAKEAKEYGLIDGVIMNPLKALQPLAAA

SEQ ID NO: 39444 - protein, 192 aa, Arabidopsis thaliana
  peptide (1)..(192): Ceres Seq. ID no. 12329274
  misc_feature (1)..(182): Pfam Name: Clp protease Pfam Description: Clp protease
  misc_feature (4)..(184): Homolog of NCBI NO: 34558484 NR Description: ATP-DEPENDENT CLP PROTEASE PROTEOLYTIC SUBUNIT
  misc_feature (4)..(186): Homolog of NCBI NO: 25019682 NR Description: ClpP2 [Synechococcus sp. PCC 7942]
  misc_feature (4)..(186): Homolog of NCBI NO: 3023500 NR Description: ATP-dependent Clp protease proteolytic subunit 2
  misc_feature (4)..(179): Homolog of NCBI NO: 23041314 NR Description: hypothetical protein [Trichodesmium erythraeum
  misc_feature (4)..(189): Homolog of NCBI NO: 16332037 NR Description: ATP-dependent protease; ClpP [Synechocystis sp.
  misc_feature (4)..(190): Homolog of NCBI NO: 23042319 NR Description: hypothetical protein [Trichodesmium erythraeum
  misc_feature (4)..(190): Homolog of NCBI NO: 17228733 NR Description: ATP-dependent Clp protease proteolytic subunit
  misc_feature (4)..(192): Homolog of NCBI NO: 23126705 NR Description: hypothetical protein [Nostoc punctiforme]
  misc_feature (1)..(192): Homolog of NCBI NO: 15485610 NR Description: Clp protease 2 proteolytic subunit [Lycopersicon
  misc_feature (1)..(192): Homolog of NCBI NO: 18378982 NR Description: ATP-dependent Clp protease proteolytic subunit
MVQERFQSIISQLFQYRIIRCGGAVDDDMANIIVAQLLYLDAVDPTKDIVMYVNSPGGSVTAGMAIFDTMRHIRPDVSTVCVGLAASMGAFLLSAGTKGKRYSLPNSRIMIHQPLGGAQGGQTDIDIQANEMLHHKANLNGYLAYHTGQSLEKINQDTDRDFFMSAKEAKEYGLIDGVIMNPLKALQPLAAA

SEQ ID NO: 39445 - protein, 164 aa, Arabidopsis thaliana
  peptide (1)..(164): Ceres Seq. ID no. 12329275
  misc_feature (1)..(154): Pfam Name: Clp protease Pfam Description: Clp protease
  misc_feature (1)..(156): Homolog of NCBI NO: 34558484 NR Description: ATP-DEPENDENT CLP PROTEASE PROTEOLYTIC SUBUNIT
  misc_feature (1)..(158): Homolog of NCBI NO: 25019682 NR Description: ClpP2 [Synechococcus sp. PCC 7942]
  misc_feature (1)..(158): Homolog of NCBI NO: 3023500 NR Description: ATP-dependent Clp protease proteolytic subunit 2
  misc_feature (1)..(151): Homolog of NCBI NO: 23041314 NR Description: hypothetical protein [Trichodesmium erythraeum
  misc_feature (1)..(161): Homolog of NCBI NO: 16332037 NR Description: ATP-dependent protease; ClpP [Synechocystis sp.
  misc_feature (1)..(162): Homolog of NCBI NO: 23042319 NR Description: hypothetical protein [Trichodesmium erythraeum
  misc_feature (1)..(162): Homolog of NCBI NO: 17228733 NR Description: ATP-dependent Clp protease proteolytic subunit
  misc_feature (1)..(164): Homolog of NCBI NO: 23126705 NR Description: hypothetical protein [Nostoc punctiforme]
  misc_feature (1)..(164): Homolog of NCBI NO: 15485610 NR Description: Clp protease 2 proteolytic subunit [Lycopersicon
  misc_feature (1)..(164): Homolog of NCBI NO: 18378982 NR Description: ATP-dependent Clp protease proteolytic subunit
MANIIVAQLLYLDAVDPTKDIVMYVNSPGGSVTAGMAIFDTMRHIRPDVSTVCVGLAASMGAFLLSAGTKGKRYSLPNSRIMIHQPLGGAQGGQTDIDIQANEMLHHKANLNGYLAYHTGQSLEKINQDTDRDFFMSAKEAKEYGLIDGVIMNPLKALQPLAAA

SEQ ID NO: 39446 - DNA, 1318 bp, Arabidopsis thaliana
  misc_feature (1)..(1318): Ceres Seq. ID no. 13494113
  misc_feature: MA Experiment ID: 20000179 Result: Up-regulated in Transcription
  misc_feature: MA Experiment 20000179 PARAMETER Experiment Name: At_Germinating_Seeds_P Parameter: Age (hr) Value: 6 vs. 0
  misc_feature: MA Experiment 20000179 PARAMETER Experiment Name: At_Germinating_Seeds_P Parameter: Tissue Value: Germinating Seeds
  misc_feature: MA Experiment ID: 20000180 Result: Up-regulated in Transcription
  misc_feature: MA Experiment 20000180 PARAMETER Experiment Name: At_Germinating_Seeds_P Parameter: Age (hr) Value: 24 vs. 0
  misc_feature: MA Experiment 20000180 PARAMETER Experiment Name: At_Germinating_Seeds_P Parameter: Tissue Value: Germinating Seeds
  misc_feature: MA Experiment ID: 20000184 Result: Up-regulated in Transcription
  misc_feature: MA Experiment 20000184 PARAMETER Experiment Name: At_Shoots__P Parameter: Age (day) Value: 7
  misc_feature: MA Experiment 20000184 PARAMETER Experiment Name: At_Shoots__P Parameter: Tissue Value: Shoots vs. Whole Plant
  misc_feature: MA Experiment ID: 20000264 Result: Down-regulated in Transcription
  misc_feature: MA Experiment 20000264 PARAMETER Experiment Name: At_Open_Flower_P Parameter: Age (day) Value: 21
  misc_feature: MA Experiment 20000264 PARAMETER Experiment Name: At_Open_Flower_P Parameter: Plant Line Value: WS
  misc_feature: MA Experiment 20000264 PARAMETER Experiment Name: At_Open_Flower_P Parameter: Tissue Value: Open Flower vs. Whole Plant
  misc_feature: MA Experiment ID: 20000265 Result: Down-regulated in Transcription
  misc_feature: MA Experiment 20000265 PARAMETER Experiment Name: At_Open_Flower_P Parameter: Age (day) Value: 21
  misc_feature: MA Experiment 20000265 PARAMETER Experiment Name: At_Open_Flower_P Parameter: Plant Line Value: WS
  misc_feature: MA Experiment 20000265 PARAMETER Experiment Name: At_Open_Flower_P Parameter: Tissue Value: Closed Flower vs. Whole Plant
  misc_feature: MA Experiment ID: 20000286 Result: Down-regulated in Transcription
  misc_feature: MA Experiment 20000286 PARAMETER Experiment Name: At_Open_Flower_P Parameter: Age (day) Value: 21
  misc_feature: MA Experiment 20000286 PARAMETER Experiment Name: At_Open_Flower_P Parameter: Plant Line Value: WS
  misc_feature: MA Experiment 20000286 PARAMETER Experiment Name: At_Open_Flower_P Parameter: Tissue Value: Half Open vs. Whole Plant
  misc_feature: MA Experiment ID: 20000437 Result: Down-regulated in Transcription
  misc_feature: MA Experiment 20000437 PARAMETER Experiment Name: At_Drought_P Parameter: Age (day) Value: 8
  misc_feature: MA Experiment 20000437 PARAMETER Experiment Name: At_Drought_P Parameter: Organism Value: A. thaliana
  misc_feature: MA Experiment 20000437 PARAMETER Experiment Name: At_Drought_P Parameter: Plant Line Value: WS
  misc_feature: MA Experiment 20000437 PARAMETER Experiment Name: At_Drought_P Parameter: Timepoint (hr) Value: 24
  misc_feature: MA Experiment 20000437 PARAMETER Experiment Name: At_Drought_P Parameter: Tissue Value: Whole Plant
  misc_feature: MA Experiment 20000437 PARAMETER Experiment Name: At_Drought_P Parameter: Treatment Value: Drought vs. No Drought
  misc_feature: MA Experiment ID: 20000794 Result: Down-regulated in Transcription
  misc_feature: MA Experiment 20000794 PARAMETER Experiment Name: At_Petals_P Parameter: Age (day) Value: 23-25 days
  misc_feature: MA Experiment 20000794 PARAMETER Experiment Name: At_Petals_P Parameter: Plant Line Value: WS
  misc_feature: MA Experiment 20000794 PARAMETER Experiment Name: At_Petals_P Parameter: Tissue Value: Petals vs. Whole plant
  misc_feature: MA Experiment ID: 20001555 Result: Down-regulated in Transcription
  misc_feature: MA Experiment 20001555 PARAMETER Experiment Name: At_Drought_Soil_Dry_P Parameter: Age (day) Value: 24
  misc_feature: MA Experiment 20001555 PARAMETER Experiment Name: At_Drought_Soil_Dry_P Parameter: Organism Value: A. thaliana
  misc_feature: MA Experiment 20001555 PARAMETER Experiment Name: At_Drought_Soil_Dry_P Parameter: Plant Line Value: WS
  misc_feature: MA Experiment 20001555 PARAMETER Experiment Name: At_Drought_Soil_Dry_P Parameter: Post Timepoint (hr) Value: None
  misc_feature: MA Experiment 20001555 PARAMETER Experiment Name: At_Drought_Soil_Dry_P Parameter: Post-Treatment Value: None
  misc_feature: MA Experiment 20001555 PARAMETER Experiment Name: At_Drought_Soil_Dry_P Parameter: Timepoint (day) Value: 10
  misc_feature: MA Experiment 20001555 PARAMETER Experiment Name: At_Drought_Soil_Dry_P Parameter: Treatment Value: Drought vs. No Drought
  misc_feature: MA Experiment ID: 20001556 Result: Down-regulated in Transcription
  misc_feature: MA Experiment 20001556 PARAMETER Experiment Name: At_Drought_Soil_Dry_P Parameter: Age (day) Value: 26
  misc_feature: MA Experiment 20001556 PARAMETER Experiment Name: At_Drought_Soil_Dry_P Parameter: Organism Value: A. thaliana
  misc_feature: MA Experiment 20001556 PARAMETER Experiment Name: At_Drought_Soil_Dry_P Parameter: Plant Line Value: WS
  misc_feature: MA Experiment 20001556 PARAMETER Experiment Name: At_Drought_Soil_Dry_P Parameter: Post Timepoint (hr) Value: None
  misc_feature: MA Experiment 20001556 PARAMETER Experiment Name: At_Drought_Soil_Dry_P Parameter: Post-Treatment Value: None
  misc_feature: MA Experiment 20001556 PARAMETER Experiment Name: At_Drought_Soil_Dry_P Parameter: Timepoint (day) Value: 12
  misc_feature: MA Experiment 20001556 PARAMETER Experiment Name: At_Drought_Soil_Dry_P Parameter: Treatment Value: Drought vs. No Drought
  misc_feature: MA Experiment ID: 20001559 Result: Down-regulated in Transcription
  misc_feature: MA Experiment 20001559 PARAMETER Experiment Name: At_Drought_Soil_Dry_P Parameter: Age (day) Value: 28
  misc_feature: MA Experiment 20001559 PARAMETER Experiment Name: At_Drought_Soil_Dry_P Parameter: Organism Value: A. thaliana
  misc_feature: MA Experiment 20001559 PARAMETER Experiment Name: At_Drought_Soil_Dry_P Parameter: Plant Line Value: WS
  misc_feature: MA Experiment 20001559 PARAMETER Experiment Name: At_Drought_Soil_Dry_P Parameter: Post Timepoint (hr) Value: 29
  misc_feature: MA Experiment 20001559 PARAMETER Experiment Name: At_Drought_Soil_Dry_P Parameter: Post-Treatment Value: Re-Water vs. No Drought
  misc_feature: MA Experiment 20001559 PARAMETER Experiment Name: At_Drought_Soil_Dry_P Parameter: Timepoint (day) Value: 14
  misc_feature: MA Experiment 20001559 PARAMETER Experiment Name: At_Drought_Soil_Dry_P Parameter: Treatment Value: Drought vs. No Drought
  misc_feature: MA Experiment ID: 20001904 Result: Down-regulated in Transcription
  misc_feature: MA Experiment 20001904 PARAMETER Experiment Name: At_Drought_Reproduction_P Parameter: Age (day) Value: 37
  misc_feature: MA Experiment 20001904 PARAMETER Experiment Name: At_Drought_Reproduction_P Parameter: Organism Value: A. thaliana
  misc_feature: MA Experiment 20001904 PARAMETER Experiment Name: At_Drought_Reproduction_P Parameter: Plant Line Value: WS
  misc_feature: MA Experiment 20001904 PARAMETER Experiment Name: At_Drought_Reproduction_P Parameter: Timepoint (day) Value: 7
  misc_feature: MA Experiment 20001904 PARAMETER Experiment Name: At_Drought_Reproduction_P Parameter: Tissue Value: Rosettes
  misc_feature: MA Experiment 20001904 PARAMETER Experiment Name: At_Drought_Reproduction_P Parameter: Treatment Value: Drought vs. No Drought
  misc_feature: MA Experiment ID: 20001905 Result: Down-regulated in Transcription
  misc_feature: MA Experiment 20001905 PARAMETER Experiment Name: At_Drought_Reproduction_P Parameter: Age (day) Value: 40
  misc_feature: MA Experiment 20001905 PARAMETER Experiment Name: At_Drought_Reproduction_P Parameter: Organism Value: A. thaliana
  misc_feature: MA Experiment 20001905 PARAMETER Experiment Name: At_Drought_Reproduction_P Parameter: Plant Line Value: WS
  misc_feature: MA Experiment 20001905 PARAMETER Experiment Name: At_Drought_Reproduction_P Parameter: Timepoint (day) Value: 10
  misc_feature: MA Experiment 20001905 PARAMETER Experiment Name: At_Drought_Reproduction_P Parameter: Tissue Value: Rosettes
  misc_feature: MA Experiment 20001905 PARAMETER Experiment Name: At_Drought_Reproduction_P Parameter: Treatment Value: Drought vs. No Drought
  misc_feature: MA Experiment ID: 20001911 Result: Down-regulated in Transcription
  misc_feature: MA Experiment 20001911 PARAMETER Experiment Name: At_Drought_Reproduction_P Parameter: Age (day) Value: 40
  misc_feature: MA Experiment 20001911 PARAMETER Experiment Name: At_Drought_Reproduction_P Parameter: Organism Value: A. thaliana
  misc_feature: MA Experiment 20001911 PARAMETER Experiment Name: At_Drought_Reproduction_P Parameter: Plant Line Value: WS
  misc_feature: MA Experiment 20001911 PARAMETER Experiment Name: At_Drought_Reproduction_P Parameter: Timepoint (day) Value: 10
  misc_feature: MA Experiment 20001911 PARAMETER Experiment Name: At_Drought_Reproduction_P Parameter: Tissue Value: Flowers
  misc_feature: MA Experiment 20001911 PARAMETER Experiment Name: At_Drought_Reproduction_P Parameter: Treatment Value: Drought vs. No Drought
agacaaaacaaacaaacaaaacttcagtctctctgcaaagctccatcctttgtggttgtgtcgtagatagcccattcgagtggttaaaagttgaaacttttatgtccacttgaatcctttttttttggattttatctgatcactcgttttgtgtctctgaatctctatcccgtggattcgcatctggatttgttcttttttcatttttattcgagcggcttatctttctcggatccatctgatatcgatttgattctctttggtcaatcgttgaaatggcggatgcgtggaaggatttagcttcagggacagttggaggagcggctcagctagttgttggtcatccatttgacacaatcaaagtcaaacttcagagccaaccgactccagcaccaggccaacttccaaggtacaccggtgcaatcgatgcggttaaacagaccgttgcttctgaaggaactaaaggtttgtacaaaggtatgggagctccactggcaaccgttgctgccttcaatgcggttttgttcactgtgagaggtcaaatggaagggctgcttaggtctgaagctggaattcctttgaccattagtcaacagtttgtggccggtgcaggcgctggtttcgctgtttcgttccttgcttgtcctactgagttgatcaaatgcaggttgcaagcacaaggtgcattagctggtgcctctactacaagctcagtggttgcagccgtgaaatacggtggaccaatggatgtagcccgtcatgtcctacgatcagaaggcggagcacgaggtctattcaaaggtttattcccgacattcgcccgtgaagtcccgggaaatgcaacaatgtttgcagcctacgaagctttcaagcggtttttagccggtggttcagacacttcaagcttaggacaagggtcattgatcatggcgggtggagtcgctggtgcgtcgttttggggaattgtatatccgacagatgttgtgaagagtgttcttcaagtcgacgattacaaaaacccgaaatacacggggtcgatggatgctttccggaagattctgaaatctgaaggagttaaaggtttgtataaaggatttggtccagctatggctaggagtgttcctgctaatgctgcttgcttcttggcttatgagatgacaaggtcaagcttgggataaaccggttcgttttgggtttaactgttggtcctatttctggatgttccattgtcattaacctctctgtttttagatttgattcttttgaaatttctgcaaaaattatgtatctcttacacagtttatttcaactatctctt

SEQ ID NO: 39447 - protein, 300 aa, Arabidopsis thaliana
  peptide (1)..(300): Ceres Seq. ID no. 15222914
  misc_feature (1)..(295): Homolog of NCBI NO: 7511491 NR Description: mitochondrial carrier protein DIF-1 homolog -
  misc_feature (6)..(299): Homolog of NCBI NO: 38566282 NR Description: Carnitine/acylcarnitine translocase [Silurana
  misc_feature (6)..(299): Homolog of NCBI NO: 27694786 NR Description: Similar to solute carrier family 25
  misc_feature (6)..(299): Homolog of NCBI NO: 38541954 NR Description: Unknown (protein for MGC:77760) [Danio rerio]
  misc_feature (1)..(295): Homolog of NCBI NO: 39593620 NR Description: Hypothetical protein CBG05908 [Caenorhabditis
  misc_feature (1)..(295): Homolog of NCBI NO: 17539560 NR Description: Embryonic tissue differentiation factor DIF-1,
  misc_feature (1)..(300): Homolog of NCBI NO: 37537072 NR Description: putative carnitine/acylcarnitine translocase
  misc_feature (1)..(300): Homolog of NCBI NO: 37537070 NR Description: putative carnitine/acylcarnitine translocase
  misc_feature (1)..(300): Homolog of NCBI NO: 9758516 NR Description: carnitine/acylcarnitine translocase-like protein
  misc_feature (1)..(300): Homolog of NCBI NO: 18422718 NR Description: mitochondrial carrier protein family [Arabidopsis
MADAWKDLASGTVGGAAQLVVGHPFDTIKVKLQSQPTPAPGQLPRYTGAIDAVKQTVASEGTKGLYKGMGAPLATVAAFNAVLFTVRGQMEGLLRSEAGIPLTISQQFVAGAGAGFAVSFLACPTELIKCRLQAQGALAGASTTSSVVAAVKYGGPMDVARHVLRSEGGARGLFKGLFPTFAREVPGNATMFAAYEAFKRFLAGGSDTSSLGQGSLIMAGGVAGASFWGIVYPTDVVKSVLQVDDYKNPKYTGSMDAFRKILKSEGVKGLYKGFGPAMARSVPANAACFLAYEMTRSSLG

SEQ ID NO: 39448 - protein, 232 aa, Arabidopsis thaliana
  peptide (1)..(232): Ceres Seq. ID no. 15222915
  misc_feature (1)..(227): Homolog of NCBI NO: 7511491 NR Description: mitochondrial carrier protein DIF-1 homolog -
  misc_feature (1)..(231): Homolog of NCBI NO: 38566282 NR Description: Carnitine/acylcarnitine translocase [Silurana
  misc_feature (1)..(231): Homolog of NCBI NO: 27694786 NR Description: Similar to solute carrier family 25
  misc_feature (1)..(231): Homolog of NCBI NO: 38541954 NR Description: Unknown (protein for MGC:77760) [Danio rerio]
  misc_feature (1)..(227): Homolog of NCBI NO: 39593620 NR Description: Hypothetical protein CBG05908 [Caenorhabditis
  misc_feature (1)..(227): Homolog of NCBI NO: 17539560 NR Description: Embryonic tissue differentiation factor DIF-1,
  misc_feature (1)..(232): Homolog of NCBI NO: 37537072 NR Description: putative carnitine/acylcarnitine translocase
  misc_feature (1)..(232): Homolog of NCBI NO: 37537070 NR Description: putative carnitine/acylcarnitine translocase
  misc_feature (1)..(232): Homolog of NCBI NO: 9758516 NR Description: carnitine/acylcarnitine translocase-like protein
  misc_feature (1)..(232): Homolog of NCBI NO: 18422718 NR Description: mitochondrial carrier protein family [Arabidopsis
MGAPLATVAAFNAVLFTVRGQMEGLLRSEAGIPLTISQQFVAGAGAGFAVSFLACPTELIKCRLQAQGALAGASTTSSVVAAVKYGGPMDVARHVLRSEGGARGLFKGLFPTFAREVPGNATMFAAYEAFKRFLAGGSDTSSLGQGSLIMAGGVAGASFWGIVYPTDVVKSVLQVDDYKNPKYTGSMDAFRKILKSEGVKGLYKGFGPAMARSVPANAACFLAYEMTRSSLG

SEQ ID NO: 39449 - protein, 211 aa, Arabidopsis thaliana
  peptide (1)..(211): Ceres Seq. ID no. 15222916
  misc_feature (1)..(206): Homolog of NCBI NO: 7511491 NR Description: mitochondrial carrier protein DIF-1 homolog -
  misc_feature (1)..(210): Homolog of NCBI NO: 38566282 NR Description: Carnitine/acylcarnitine translocase [Silurana
  misc_feature (1)..(210): Homolog of NCBI NO: 27694786 NR Description: Similar to solute carrier family 25
  misc_feature (1)..(210): Homolog of NCBI NO: 38541954 NR Description: Unknown (protein for MGC:77760) [Danio rerio]
  misc_feature (1)..(206): Homolog of NCBI NO: 39593620 NR Description: Hypothetical protein CBG05908 [Caenorhabditis
  misc_feature (1)..(206): Homolog of NCBI NO: 17539560 NR Description: Embryonic tissue differentiation factor DIF-1,
  misc_feature (1)..(211): Homolog of NCBI NO: 37537072 NR Description: putative carnitine/acylcarnitine translocase
  misc_feature (1)..(211): Homolog of NCBI NO: 37537070 NR Description: putative carnitine/acylcarnitine translocase
  misc_feature (1)..(211): Homolog of NCBI NO: 9758516 NR Description: carnitine/acylcarnitine translocase-like protein
  misc_feature (1)..(211): Homolog of NCBI NO: 18422718 NR Description: mitochondrial carrier protein family [Arabidopsis
MEGLLRSEAGIPLTISQQFVAGAGAGFAVSFLACPTELIKCRLQAQGALAGASTTSSVVAAVKYGGPMDVARHVLRSEGGARGLFKGLFPTFAREVPGNATMFAAYEAFKRFLAGGSDTSSLGQGSLIMAGGVAGASFWGIVYPTDVVKSVLQVDDYKNPKYTGSMDAFRKILKSEGVKGLYKGFGPAMARSVPANAACFLAYEMTRSSLG

SEQ ID NO: 39450 - DNA, 1294 bp, Arabidopsis thaliana
  misc_feature (1)..(1294): Ceres Seq. ID no. 12328856
  misc_feature: MA Experiment ID: 108463 Result: Down-regulated in Transcription
  misc_feature: MA Experiment 108463 PARAMETER Experiment Name: At_Germinating_Seeds_cDNA_P Parameter: Age (day) Value: 3 vs. 0
  misc_feature: MA Experiment 108463 PARAMETER Experiment Name: At_Germinating_Seeds_cDNA_P Parameter: Tissue Value: Germinating Seeds
  misc_feature: MA Experiment ID: 108569 Result: Down-regulated in Transcription
  misc_feature: MA Experiment 108569 PARAMETER Experiment Name: At_0.001%_MeJA__cDNA_P Parameter: Timepoint (hr) Value: 6
  misc_feature: MA Experiment 108569 PARAMETER Experiment Name: At_0.001%_MeJA__cDNA_P Parameter: Tissue Value: Aerial
  misc_feature: MA Experiment 108569 PARAMETER Experiment Name: At_0.001%_MeJA__cDNA_P Parameter: Treatment Value: 0.001% MeJA vs. No Treatment
  misc_feature: MA Experiment ID: 108573 Result: Down-regulated in Transcription
  misc_feature: MA Experiment 108573 PARAMETER Experiment Name: At_Drought_cDNA_P Parameter: Timepoint (hr) Value: 6
  misc_feature: MA Experiment 108573 PARAMETER Experiment Name: At_Drought_cDNA_P Parameter: Tissue Value: Aerial
  misc_feature: MA Experiment 108573 PARAMETER Experiment Name: At_Drought_cDNA_P Parameter: Treatment Value: Drought vs. No Drought
  misc_feature: MA Experiment ID: 108585 Result: Down-regulated in Transcription
  misc_feature: MA Experiment 108585 PARAMETER Experiment Name: At_5mM_NaNP_cDNA_P Parameter: Timepoint (hr) Value: 6
  misc_feature: MA Experiment 108585 PARAMETER Experiment Name: At_5mM_NaNP_cDNA_P Parameter: Tissue Value: Aerial
  misc_feature: MA Experiment 108585 PARAMETER Experiment Name: At_5mM_NaNP_cDNA_P Parameter: Treatment Value: null
  misc_feature: MA Experiment ID: 108595 Result: Down-regulated in Transcription
  misc_feature: MA Experiment 108595 PARAMETER Experiment Name: At_Ler-pi_Ovule_cDNA_P Parameter: Plant Line Value: null
  misc_feature: MA Experiment ID: 108668 Result: Down-regulated in Transcription
  misc_feature: MA Experiment 108668 PARAMETER Experiment Name: At_2mM_SA_cDNA_P Parameter: Plant Line Value: WS
  misc_feature: MA Experiment 108668 PARAMETER Experiment Name: At_2mM_SA_cDNA_P Parameter: Timepoint (hr) Value: 6
  misc_feature: MA Experiment 108668 PARAMETER Experiment Name: At_2mM_SA_cDNA_P Parameter: Treatment Value: 2mM SA vs. No Treatment
  misc_feature: MA Experiment ID: 20000113 Result: Up-regulated in Transcription
  misc_feature: MA Experiment 20000113 PARAMETER Experiment Name: At_42deg_Heat_cDNA_P Parameter: Temperature (deg C) Value: 42 vs. 22
  misc_feature: MA Experiment 20000113 PARAMETER Experiment Name: At_42deg_Heat_cDNA_P Parameter: Timepoint (hr) Value: 8
  misc_feature: MA Experiment 20000113 PARAMETER Experiment Name: At_42deg_Heat_cDNA_P Parameter: Tissue Value: Aerial
  misc_feature: MA Experiment ID: 20000182 Result: Down-regulated in Transcription
  misc_feature: MA Experiment 20000182 PARAMETER Experiment Name: At_2mM_SA_P Parameter: Age (day) Value: 14
  misc_feature: MA Experiment 20000182 PARAMETER Experiment Name: At_2mM_SA_P Parameter: Organism Value: A. thaliana
  misc_feature: MA Experiment 20000182 PARAMETER Experiment Name: At_2mM_SA_P Parameter: Plant Line Value: WS
  misc_feature: MA Experiment 20000182 PARAMETER Experiment Name: At_2mM_SA_P Parameter: Timepoint (hr) Value: 6
  misc_feature: MA Experiment 20000182 PARAMETER Experiment Name: At_2mM_SA_P Parameter: Tissue Value: Aerial
  misc_feature: MA Experiment 20000182 PARAMETER Experiment Name: At_2mM_SA_P Parameter: Treatment Value: 2mM SA vs. No Treatment
  misc_feature: MA Experiment ID: 20000185 Result: Down-regulated in Transcription
  misc_feature: MA Experiment 20000185 PARAMETER Experiment Name: At_Roots__P Parameter: Age (day) Value: 7 vs. 21
  misc_feature: MA Experiment 20000185 PARAMETER Experiment Name: At_Roots__P Parameter: Organism Value: A. thaliana
  misc_feature: MA Experiment 20000185 PARAMETER Experiment Name: At_Roots__P Parameter: Tissue Value: Roots vs. Whole Plant
  misc_feature: MA Experiment ID: 20000224 Result: Up-regulated in Transcription
  misc_feature: MA Experiment ID: 20000439 Result: Down-regulated in Transcription
  misc_feature: MA Experiment 20000439 PARAMETER Experiment Name: At_Roots__P Parameter: Age (day) Value: 14 vs. 21
  misc_feature: MA Experiment 20000439 PARAMETER Experiment Name: At_Roots__P Parameter: Organism Value: A. thaliana
  misc_feature: MA Experiment 20000439 PARAMETER Experiment Name: At_Roots__P Parameter: Tissue Value: Roots vs. Whole Plant
  misc_feature: MA Experiment ID: 20001558 Result: Up-regulated in Transcription
  misc_feature: MA Experiment 20001558 PARAMETER Experiment Name: At_Drought_Soil_Dry_P Parameter: Age (day) Value: 27
  misc_feature: MA Experiment 20001558 PARAMETER Experiment Name: At_Drought_Soil_Dry_P Parameter: Organism Value: A. thaliana
  misc_feature: MA Experiment 20001558 PARAMETER Experiment Name: At_Drought_Soil_Dry_P Parameter: Plant Line Value: WS
  misc_feature: MA Experiment 20001558 PARAMETER Experiment Name: At_Drought_Soil_Dry_P Parameter: Post Timepoint (hr) Value: 6
  misc_feature: MA Experiment 20001558 PARAMETER Experiment Name: At_Drought_Soil_Dry_P Parameter: Post-Treatment Value: Re-Water vs. No Drought
  misc_feature: MA Experiment 20001558 PARAMETER Experiment Name: At_Drought_Soil_Dry_P Parameter: Timepoint (day) Value: 13
  misc_feature: MA Experiment 20001558 PARAMETER Experiment Name: At_Drought_Soil_Dry_P Parameter: Treatment Value: Drought vs. No Drought
atcagacatcagagggaacttggaggacacagagaagcgcaaattatcagacagagtgagaacgaagaagaagaaagcacaggatgctaagcttgagatattcattaccttatcttcttcttcaaacaagggaatcatcaactaagctcttcaccaaaaagcctaacaatgttgtggtttgtgcggcgagaggtccaagacctcggtctcctcgtgtatggaaaacaaggaagaggattggaactatctctaaagctgccaaaatgattgcttgtataaaaggattgtcgaatgttaaagaagaagtttatggagcgcttgattccttcattgcttgggaattagagttccctcttgttatagttaagaaggcattagttatacttgaagatgaaaaagaatggaagaagattattcaggtgacaaaatggatgctgagtaaaggccaaggaagaacaatgggaacttacttctcattactaaatgctttagcagaagataatcgccttgacgaagctgaggaattgtggaacaaattgttcatggaacatttagaaggaactcctagaaagttcttcaacaaaatgatctctatatattacaagagagatatgcaccaaaagctcttcgaggtctttgctgacatggaggagcttggagtgaaaccgaacgttgcgattgtgtctatggttggaaaagtgtttgtgaaactagagatgaaggataagtacgagaaactgatgaagaaatatcctccaccacagtgggagtttagatacatcaaaggaagacgtgttaaggtcaaggcaaagcagctgaatgagctaagcgaaggtgaaggtggtttaagcagcgacgaagataagattgacaatgagattgagagtgaagaagaagatggtgaggatctcagtgaagaggaagaagatgaaaaagaacttttgggtggaagtcaaggacagattacttctagagaacccagtcttgatcatttggactcttcatgagcttttgagatcgtatctaccgttgaatcatctataaggaaaatagatagacggccaaggttcttcaaagaagctttctggggctgagcttgggtttctgacgaaaacatgaccagaaaagttttgaactatctgagcttaagagtcaaaacaaggtatagatttgaagagtcaactaaaaagagtattaaactcagcaaaaagattaaatactgtaaaatcttttagtacgactgtgtaagctctgaaaacaaaaattattgtataatttcagacaataatttcag

SEQ ID NO: 39451 - protein, 307 aa, Arabidopsis thaliana
  peptide (1)..(307): Ceres Seq. ID no. 12328857
  misc_feature (127)..(161): Pfam Name: PPR repeat Pfam Description: PPR repeat
  misc_feature (72)..(290): Homolog of NCBI NO: 25406795 NR Description: hypothetical protein [imported] - Arabidopsis
  misc_feature (7)..(290): Homolog of NCBI NO: 30678929 NR Description: expressed protein [Arabidopsis thaliana]
  misc_feature (7)..(290): Homolog of NCBI NO: 18390413 NR Description: expressed protein
  misc_feature (26)..(241): Homolog of NCBI NO: 34393638 NR Description: pentatricopeptide (PPR) repeat-containing
  misc_feature (45)..(233): Homolog of NCBI NO: 7485419 NR Description: hypothetical protein F13C5.140 - Arabidopsis
  misc_feature (45)..(241): Homolog of NCBI NO: 18415213 NR Description: putative protein; protein id: At4g18975.1
  misc_feature (1)..(272): Homolog of NCBI NO: 34909686 NR Description: B1131G08.1 [Oryza sativa (japonica
  misc_feature (14)..(307): Homolog of NCBI NO: 7486589 NR Description: hypothetical protein F7J7.130 - Arabidopsis
  misc_feature (1)..(307): Homolog of NCBI NO: 18415645 NR Description: putative protein
MLSLRYSLPYLLLQTRESSTKLFTKKPNNVVVCAARGPRPRSPRVWKTRKRIGTISKAAKMIACIKGLSNVKEEVYGALDSFIAWELEFPLVIVKKALVILEDEKEWKKIIQVTKWMLSKGQGRTMGTYFSLLNALAEDNRLDEAEELWNKLFMEHLEGTPRKFFNKMISIYYKRDMHQKLFEVFADMEELGVKPNVAIVSMVGKVFVKLEMKDKYEKLMKKYPPPQWEFRYIKGRRVKVKAKQLNELSEGEGGLSSDEDKIDNEIESEEEDGEDLSEEEEDEKELLGGSQGQITSREPSLDHLDSS

SEQ ID NO: 39452 - protein, 247 aa, Arabidopsis thaliana
  peptide (1)..(247): Ceres Seq. ID no. 12328858
  misc_feature (67)..(101): Pfam Name: PPR repeat Pfam Description: PPR repeat
  misc_feature (12)..(230): Homolog of NCBI NO: 25406795 NR Description: hypothetical protein [imported] - Arabidopsis
  misc_feature (1)..(230): Homolog of NCBI NO: 30678929 NR Description: expressed protein [Arabidopsis thaliana]
  misc_feature (1)..(230): Homolog of NCBI NO: 18390413 NR Description: expressed protein
  misc_feature (1)..(181): Homolog of NCBI NO: 34393638 NR Description: pentatricopeptide (PPR) repeat-containing
  misc_feature (1)..(173): Homolog of NCBI NO: 7485419 NR Description: hypothetical protein F13C5.140 - Arabidopsis
  misc_feature (1)..(181): Homolog of NCBI NO: 18415213 NR Description: putative protein; protein id: At4g18975.1
  misc_feature (1)..(212): Homolog of NCBI NO: 34909686 NR Description: B1131G08.1 [Oryza sativa (japonica
  misc_feature (1)..(247): Homolog of NCBI NO: 7486589 NR Description: hypothetical protein F7J7.130 - Arabidopsis
  misc_feature (1)..(247): Homolog of NCBI NO: 18415645 NR Description: putative protein
MIACIKGLSNVKEEVYGALDSFIAWELEFPLVIVKKALVILEDEKEWKKIIQVTKWMLSKGQGRTMGTYFSLLNALAEDNRLDEAEELWNKLFMEHLEGTPRKFFNKMISIYYKRDMHQKLFEVFADMEELGVKPNVAIVSMVGKVFVKLEMKDKYEKLMKKYPPPQWEFRYIKGRRVKVKAKQLNELSEGEGGLSSDEDKIDNEIESEEEDGEDLSEEEEDEKELLGGSQGQITSREPSLDHLDSS

SEQ ID NO: 39453 - protein, 191 aa, Arabidopsis thaliana
  peptide (1)..(191): Ceres Seq. ID no. 12328859
  misc_feature (11)..(45): Pfam Name: PPR repeat Pfam Description: PPR repeat
  misc_feature (1)..(174): Homolog of NCBI NO: 25406795 NR Description: hypothetical protein [imported] - Arabidopsis
  misc_feature (1)..(174): Homolog of NCBI NO: 30678929 NR Description: expressed protein [Arabidopsis thaliana]
  misc_feature (1)..(174): Homolog of NCBI NO: 18390413 NR Description: expressed protein
  misc_feature (1)..(125): Homolog of NCBI NO: 34393638 NR Description: pentatricopeptide (PPR) repeat-containing
  misc_feature (1)..(117): Homolog of NCBI NO: 7485419 NR Description: hypothetical protein F13C5.140 - Arabidopsis
  misc_feature (1)..(125): Homolog of NCBI NO: 18415213 NR Description: putative protein; protein id: At4g18975.1
  misc_feature (1)..(156): Homolog of NCBI NO: 34909686 NR Description: B1131G08.1 [Oryza sativa (japonica
  misc_feature (1)..(191): Homolog of NCBI NO: 7486589 NR Description: hypothetical protein F7J7.130 - Arabidopsis
  misc_feature (1)..(191): Homolog of NCBI NO: 18415645 NR Description: putative protein
MLSKGQGRTMGTYFSLLNALAEDNRLDEAEELWNKLFMEHLEGTPRKFFNKMISIYYKRDMHQKLFEVFADMEELGVKPNVAIVSMVGKVFVKLEMKDKYEKLMKKYPPPQWEFRYIKGRRVKVKAKQLNELSEGEGGLSSDEDKIDNEIESEEEDGEDLSEEEEDEKELLGGSQGQITSREPSLDHLDSS

SEQ ID NO: 39454 - DNA, 1248 bp, Arabidopsis thaliana
  misc_feature (1)..(1248): Ceres Seq. ID no. 13499909
  misc_feature: MA Experiment ID: 108434 Result: Down-regulated in Transcription
  misc_feature: MA Experiment 108434 PARAMETER Experiment Name: At_Root_Tips_cDNA_P Parameter: Tissue Value: Root Tips
  misc_feature: MA Experiment ID: 108462 Result: Up-regulated in Transcription
  misc_feature: MA Experiment 108462 PARAMETER Experiment Name: At_Germinating_Seeds_cDNA_P Parameter: Age (day) Value: 2 vs. 0
  misc_feature: MA Experiment 108462 PARAMETER Experiment Name: At_Germinating_Seeds_cDNA_P Parameter: Tissue Value: Germinating Seeds
  misc_feature: MA Experiment ID: 108463 Result: Up-regulated in Transcription
  misc_feature: MA Experiment 108463 PARAMETER Experiment Name: At_Germinating_Seeds_cDNA_P Parameter: Age (day) Value: 3 vs. 0
  misc_feature: MA Experiment 108463 PARAMETER Experiment Name: At_Germinating_Seeds_cDNA_P Parameter: Tissue Value: Germinating Seeds
  misc_feature: MA Experiment ID: 108474 Result: Down-regulated in Transcription
  misc_feature: MA Experiment 108474 PARAMETER Experiment Name: At_Drought_Flowers_cDNA_P Parameter: Timepoint (hr) Value: null
  misc_feature: MA Experiment 108474 PARAMETER Experiment Name: At_Drought_Flowers_cDNA_P Parameter: Treatment Value: Drought vs. No Drought
  misc_feature: MA Experiment ID: 108594 Result: Down-regulated in Transcription
  misc_feature: MA Experiment 108594 PARAMETER Experiment Name: At_Ler-rhl_Root_cDNA_P Parameter: Plant Line Value: null
  misc_feature: MA Experiment ID: 20000224 Result: Down-regulated in Transcription
  misc_feature: MA Experiment ID: 20000438 Result: Down-regulated in Transcription
  misc_feature: MA Experiment 20000438 PARAMETER Experiment Name: At_Shoots__P Parameter: Age (day) Value: 14
  misc_feature: MA Experiment 20000438 PARAMETER Experiment Name: At_Shoots__P Parameter: Tissue Value: Shoots vs. Whole Plant
  misc_feature: MA Experiment ID: 20000794 Result: Up-regulated in Transcription
  misc_feature: MA Experiment 20000794 PARAMETER Experiment Name: At_Petals_P Parameter: Age (day) Value: 23-25 days
  misc_feature: MA Experiment 20000794 PARAMETER Experiment Name: At_Petals_P Parameter: Plant Line Value: WS
  misc_feature: MA Experiment 20000794 PARAMETER Experiment Name: At_Petals_P Parameter: Tissue Value: Petals vs. Whole plant
  misc_feature: MA Experiment ID: 20001773 Result: Up-regulated in Transcription
  misc_feature: MA Experiment 20001773 PARAMETER Experiment Name: At_Far-red-enriched-adult_P Parameter: Age (day) Value: 30
  misc_feature: MA Experiment 20001773 PARAMETER Experiment Name: At_Far-red-enriched-adult_P Parameter: Light Value: Far-red enriched vs. White
  misc_feature: MA Experiment 20001773 PARAMETER Experiment Name: At_Far-red-enriched-adult_P Parameter: Organism Value: A. thaliana
  misc_feature: MA Experiment 20001773 PARAMETER Experiment Name: At_Far-red-enriched-adult_P Parameter: Plant Line Value: Columbia
  misc_feature: MA Experiment 20001773 PARAMETER Experiment Name: At_Far-red-enriched-adult_P Parameter: Timepoint (hr) Value: 48
  misc_feature: MA Experiment 20001773 PARAMETER Experiment Name: At_Far-red-enriched-adult_P Parameter: Tissue Value: Aerial
  misc_feature: MA Experiment ID: 20001911 Result: Down-regulated in Transcription
  misc_feature: MA Experiment 20001911 PARAMETER Experiment Name: At_Drought_Reproduction_P Parameter: Age (day) Value: 40
  misc_feature: MA Experiment 20001911 PARAMETER Experiment Name: At_Drought_Reproduction_P Parameter: Organism Value: A. thaliana
  misc_feature: MA Experiment 20001911 PARAMETER Experiment Name: At_Drought_Reproduction_P Parameter: Plant Line Value: WS
  misc_feature: MA Experiment 20001911 PARAMETER Experiment Name: At_Drought_Reproduction_P Parameter: Timepoint (day) Value: 10
  misc_feature: MA Experiment 20001911 PARAMETER Experiment Name: At_Drought_Reproduction_P Parameter: Tissue Value: Flowers
  misc_feature: MA Experiment 20001911 PARAMETER Experiment Name: At_Drought_Reproduction_P Parameter: Treatment Value: Drought vs. No Drought
ctctctctctctttttttctaatcatacgaacacaatctgcttcaagaattagggttttgatcagacacaaaaaagtatctctctccgtagttttgtgtcaaggttttgcaagaagcggcactaggtatgatgggagccaccgtaggcggagacggagacaccgcggtcgtggcggagcagaatagacagttgaaaggtgagatagcgacacatccgatgtatgagcaattattagccgcacacgtggcgtgtttaagagtagctactccaatagatcaacttccgatcattgaagctcagctttctcaatctcatcatcttctccgttcttacgcttccacggccgttggataccatcatgatcgtcacgagctcgataatttcttggcacaatatgtaatggtgttgtgtagcttcaaagaacagctgcaacagcacgtgagggttcatgccgtcgaagctgttatggcttgccgtgaaattgagaacaaccttcattctcttacaggagcaactttaggagaagggtcgggtgcgactatgtcggaggatgaggatgatcttccgatggatttctcgtcagataattccggcgttgattttagcggcggccacgatatgacgggatttggtccgttgctaccgactgaatcggaaagatcccttatggaaagagtcagacaagaactcaaactagaactcaaacagggttttaaatcgagaatcgaagatgtaagagaagagataatgaggaagagaagggctgggaaattgccaggagacacaactactgtcttgaagaattggtggcaacaacattgcaaatggccttaccctacggaagatgacaaggcaaaattggtggaggagacaggattgcagttgaagcaaatcaacaattggttcattaaccaacgcaagaggaattggcacaacaactctcactccctcacttccttgaagtccaagcgcaaacactaatctcttcttactatattagttactacctctacatatattcatactaattacactgctaagacatgcatgatacatacgtaattcatgttactgataataacgaggtgtgatcattcattaatatcatgtacttacttagcttattagatccaccgactactatatgatttgtgcgttgcgtgattactggttgttactagattgtaattcattttgtttgtattgtgcattcaaatttatctttttggtaagaacactgattttgt

SEQ ID NO: 39455 - protein, 284 aa, Arabidopsis thaliana
  peptide (1)..(284): Ceres Seq. ID no. 13499910
  misc_feature (73)..(128): Pfam Name: KNOX2 domain Pfam Description: KNOX2 domain
  misc_feature (8)..(283): Homolog of NCBI NO: 21554222 NR Description: KNAT3 homeodomain protein [Arabidopsis thaliana]
  misc_feature (8)..(283): Homolog of NCBI NO: 15238743 NR Description: KNAT3 homeodomain protein [Arabidopsis thaliana]
  misc_feature (7)..(283): Homolog of NCBI NO: 3023961 NR Description: Homeobox protein knotted-1 like 3 (KNAP3)
  misc_feature (13)..(283): Homolog of NCBI NO: 14149141 NR Description: KNOX family class 2 homeodomain protein
  misc_feature (21)..(283): Homolog of NCBI NO: 4098246 NR Description: homeobox 2 protein [Lycopersicon esculentum]
  misc_feature (1)..(284): Homolog of NCBI NO: 1170191 NR Description: Homeobox protein HD1
  misc_feature (2)..(284): Homolog of NCBI NO: 21618231 NR Description: homeodomain-containing protein HD1, putative
  misc_feature (2)..(284): Homolog of NCBI NO: 25386223 NR Description: hypothetical protein F16P17.16 [imported] -
  misc_feature (1)..(284): Homolog of NCBI NO: 26451690 NR Description: putative homeodomain transcription factor KNAT6
  misc_feature (1)..(284): Homolog of NCBI NO: 18407708 NR Description: homeodomain-containing protein HD1 -related
MMGATVGGDGDTAVVAEQNRQLKGEIATHPMYEQLLAAHVACLRVATPIDQLPIIEAQLSQSHHLLRSYASTAVGYHHDRHELDNFLAQYVMVLCSFKEQLQQHVRVHAVEAVMACREIENNLHSLTGATLGEGSGATMSEDEDDLPMDFSSDNSGVDFSGGHDMTGFGPLLPTESERSLMERVRQELKLELKQGFKSRIEDVREEIMRKRRAGKLPGDTTTVLKNWWQQHCKWPYPTEDDKAKLVEETGLQLKQINNWFINQRKRNWHNNSHSLTSLKSKRKH

SEQ ID NO: 39456 - protein, 283 aa, Arabidopsis thaliana
  peptide (1)..(283): Ceres Seq. ID no. 13499911
  misc_feature (72)..(127): Pfam Name: KNOX2 domain Pfam Description: KNOX2 domain
  misc_feature (7)..(282): Homolog of NCBI NO: 21554222 NR Description: KNAT3 homeodomain protein [Arabidopsis thaliana]
  misc_feature (7)..(282): Homolog of NCBI NO: 15238743 NR Description: KNAT3 homeodomain protein [Arabidopsis thaliana]
  misc_feature (6)..(282): Homolog of NCBI NO: 3023961 NR Description: Homeobox protein knotted-1 like 3 (KNAP3)
  misc_feature (12)..(282): Homolog of NCBI NO: 14149141 NR Description: KNOX family class 2 homeodomain protein
  misc_feature (20)..(282): Homolog of NCBI NO: 4098246 NR Description: homeobox 2 protein [Lycopersicon esculentum]
  misc_feature (1)..(283): Homolog of NCBI NO: 1170191 NR Description: Homeobox protein HD1
  misc_feature (1)..(283): Homolog of NCBI NO: 21618231 NR Description: homeodomain-containing protein HD1, putative
  misc_feature (1)..(283): Homolog of NCBI NO: 25386223 NR Description: hypothetical protein F16P17.16 [imported] -
  misc_feature (1)..(283): Homolog of NCBI NO: 26451690 NR Description: putative homeodomain transcription factor KNAT6
  misc_feature (1)..(283): Homolog of NCBI NO: 18407708 NR Description: homeodomain-containing protein HD1 -related
MGATVGGDGDTAVVAEQNRQLKGEIATHPMYEQLLAAHVACLRVATPIDQLPIIEAQLSQSHHLLRSYASTAVGYHHDRHELDNFLAQYVMVLCSFKEQLQQHVRVHAVEAVMACREIENNLHSLTGATLGEGSGATMSEDEDDLPMDFSSDNSGVDFSGGHDMTGFGPLLPTESERSLMERVRQELKLELKQGFKSRIEDVREEIMRKRRAGKLPGDTTTVLKNWWQQHCKWPYPTEDDKAKLVEETGLQLKQINNWFINQRKRNWHNNSHSLTSLKSKRKH

SEQ ID NO: 39457 - protein, 254 aa, Arabidopsis thaliana
  peptide (1)..(254): Ceres Seq. ID no. 13499912
  misc_feature (43)..(98): Pfam Name: KNOX2 domain Pfam Description: KNOX2 domain
  misc_feature (1)..(253): Homolog of NCBI NO: 21554222 NR Description: KNAT3 homeodomain protein [Arabidopsis thaliana]
  misc_feature (1)..(253): Homolog of NCBI NO: 15238743 NR Description: KNAT3 homeodomain protein [Arabidopsis thaliana]
  misc_feature (1)..(253): Homolog of NCBI NO: 3023961 NR Description: Homeobox protein knotted-1 like 3 (KNAP3)
  misc_feature (1)..(253): Homolog of NCBI NO: 14149141 NR Description: KNOX family class 2 homeodomain protein
  misc_feature (1)..(253): Homolog of NCBI NO: 4098246 NR Description: homeobox 2 protein [Lycopersicon esculentum]
  misc_feature (1)..(254): Homolog of NCBI NO: 1170191 NR Description: Homeobox protein HD1
  misc_feature (1)..(254): Homolog of NCBI NO: 21618231 NR Description: homeodomain-containing protein HD1, putative
  misc_feature (1)..(254): Homolog of NCBI NO: 25386223 NR Description: hypothetical protein F16P17.16 [imported] -
  misc_feature (1)..(254): Homolog of NCBI NO: 26451690 NR Description: putative homeodomain transcription factor KNAT6
  misc_feature (1)..(254): Homolog of NCBI NO: 18407708 NR Description: homeodomain-containing protein HD1 -related
MYEQLLAAHVACLRVATPIDQLPIIEAQLSQSHHLLRSYASTAVGYHHDRHELDNFLAQYVMVLCSFKEQLQQHVRVHAVEAVMACREIENNLHSLTGATLGEGSGATMSEDEDDLPMDFSSDNSGVDFSGGHDMTGFGPLLPTESERSLMERVRQELKLELKQGFKSRIEDVREEIMRKRRAGKLPGDTTTVLKNWWQQHCKWPYPTEDDKAKLVEETGLQLKQINNWFINQRKRNWHNNSHSLTSLKSKRKH

SEQ ID NO: 39458 - DNA, 1146 bp, Arabidopsis thaliana
  misc_feature (1)..(1146): Ceres Seq. ID no. 12489106
  misc_feature: MA Experiment ID: 108461 Result: Down-regulated in Transcription
  misc_feature: MA Experiment 108461 PARAMETER Experiment Name: At_Germinating_Seeds_cDNA_P Parameter: Age (day) Value: 1 vs. 0
  misc_feature: MA Experiment 108461 PARAMETER Experiment Name: At_Germinating_Seeds_cDNA_P Parameter: Tissue Value: Germinating Seeds
  misc_feature: MA Experiment ID: 108462 Result: Down-regulated in Transcription
  misc_feature: MA Experiment 108462 PARAMETER Experiment Name: At_Germinating_Seeds_cDNA_P Parameter: Age (day) Value: 2 vs. 0
  misc_feature: MA Experiment 108462 PARAMETER Experiment Name: At_Germinating_Seeds_cDNA_P Parameter: Tissue Value: Germinating Seeds
  misc_feature: MA Experiment ID: 108464 Result: Down-regulated in Transcription
  misc_feature: MA Experiment 108464 PARAMETER Experiment Name: At_Germinating_Seeds_cDNA_P Parameter: Age (day) Value: 4 vs. 0
  misc_feature: MA Experiment 108464 PARAMETER Experiment Name: At_Germinating_Seeds_cDNA_P Parameter: Tissue Value: Germinating Seeds
  misc_feature: MA Experiment ID: 20000180 Result: Down-regulated in Transcription
  misc_feature: MA Experiment 20000180 PARAMETER Experiment Name: At_Germinating_Seeds_P Parameter: Age (hr) Value: 24 vs. 0
  misc_feature: MA Experiment 20000180 PARAMETER Experiment Name: At_Germinating_Seeds_P Parameter: Tissue Value: Germinating Seeds
ttttctctcaatcctccaattcccaaatttcaacaacaagacgaagcaaacgatgtggattgaaatcatctgcggtctcgtcatttacaaactcgtccgccgtttcttctacgacgatgaattgtccgacgtcgaaacttccgattccactgctctcttctccgtagctcacagacttgagaaactttatggtggaaaagcttatgtaggacttcgaattccagatgccgacactgcttctagacaggacattgatgttgtccttgttactaaaggagatgttgtagtgatttctgtgaagaatctatcggggattgttacggtaactagtgatggtagctgggtttgtgaaggtggcaagcatcatactactgagactttccctgatcctctggcggaggtcaagaaacaagcttcagttcttgaatcatatcttgaacagaggggagttactttacttgaaggaaatgtgtcttgcaaagttgtcattcccaatccaagttttcgtacaattcatgcattcccgagtgaggtaattacctatgaagattggcaacagctaaaaccagtatcgaaaagtaaactttctggttgggttaaaggcgcattcagcaccggaaaagagatgcaggaatcttcgcatcaaaaacttaatttcatccttggcacagcaccaacgtgggatagagtggagcttaaaagtagcaaaattgtgttaggggaattcctagagtttaaaggaaagcaggaagataccctggctttaagaaatatcaaaaggtcaaaagtcgaccgtgtctctattcagaaaacaagcatgtttggattagctccttcgaggttgcaggttctgtattcgtatagggactacagaagtgaaggcagttcagggtcagagtcgaaagaagtgactgtccggtcaagcacagaggttctgtttcaaccacgagactccacaaagatgaagaaattcaagctatcgtcgcttgtctccatttcactaagtgcctaactatgaagtgagcttattagcatgcagcagaggaagttgtcaatgtttattgtaacaattacattgtccatgactgaagtaagcttatgttattctcaagagtattgacctctttatggaaatgttttcttcgt

SEQ ID NO: 39459 - protein, 336 aa, Arabidopsis thaliana
  peptide (1)..(336): Ceres Seq. ID no. 12489107
  misc_feature (18)..(336): Homolog of NCBI NO: 37537134 NR Description: unknown protein [Oryza sativa (japonica
  misc_feature (18)..(276): Homolog of NCBI NO: 25373168 NR Description: hypothetical protein F16G16.1 [imported] -
  misc_feature (18)..(336): Homolog of NCBI NO: 15220924 NR Description: hypothetical protein; protein id: At1g65020.1
  misc_feature (18)..(336): Homolog of NCBI NO: 37537134 NR Description: unknown protein [Oryza sativa (japonica
  misc_feature (18)..(276): Homolog of NCBI NO: 25373168 NR Description: hypothetical protein F16G16.1 [imported] -
  misc_feature (18)..(336): Homolog of NCBI NO: 15220924 NR Description: hypothetical protein; protein id: At1g65020.1
  misc_feature (18)..(336): Homolog of NCBI NO: 37537134 NR Description: unknown protein [Oryza sativa (japonica
  misc_feature (18)..(276): Homolog of NCBI NO: 25373168 NR Description: hypothetical protein F16G16.1 [imported] -
  misc_feature (18)..(336): Homolog of NCBI NO: 15220924 NR Description: hypothetical protein; protein id: At1g65020.1
FLSILQFPNFNNKTKQTMWIEIICGLVIYKLVRRFFYDDELSDVETSDSTALFSVAHRLEKLYGGKAYVGLRIPDADTASRQDIDVVLVTKGDVVVISVKNLSGIVTVTSDGSWVCEGGKHHTTETFPDPLAEVKKQASVLESYLEQRGVTLLEGNVSCKVVIPNPSFRTIHAFPSEVITYEDWQQLKPVSKSKLSGWVKGAFSTGKEMQESSHQKLNFILGTAPTWDRVELKSSKIVLGEFLEFKGKQEDTLALRNIKRSKVDRVSIQKTSMFGLAPSRLQVLYSYRDYRSEGSSGSESKEVTVRSSTEVLFQPRDSTKMKKFKLSSLVSISLSA

SEQ ID NO: 39460 - protein, 319 aa, Arabidopsis thaliana
  peptide (1)..(319): Ceres Seq. ID no. 12489108
  misc_feature (1)..(319): Homolog of NCBI NO: 37537134 NR Description: unknown protein [Oryza sativa (japonica
  misc_feature (1)..(259): Homolog of NCBI NO: 25373168 NR Description: hypothetical protein F16G16.1 [imported] -
  misc_feature (1)..(319): Homolog of NCBI NO: 15220924 NR Description: hypothetical protein; protein id: At1g65020.1
  misc_feature (1)..(319): Homolog of NCBI NO: 37537134 NR Description: unknown protein [Oryza sativa (japonica
  misc_feature (1)..(259): Homolog of NCBI NO: 25373168 NR Description: hypothetical protein F16G16.1 [imported] -
  misc_feature (1)..(319): Homolog of NCBI NO: 15220924 NR Description: hypothetical protein; protein id: At1g65020.1
  misc_feature (1)..(319): Homolog of NCBI NO: 37537134 NR Description: unknown protein [Oryza sativa (japonica
  misc_feature (1)..(259): Homolog of NCBI NO: 25373168 NR Description: hypothetical protein F16G16.1 [imported] -
  misc_feature (1)..(319): Homolog of NCBI NO: 15220924 NR Description: hypothetical protein; protein id: At1g65020.1
MWIEIICGLVIYKLVRRFFYDDELSDVETSDSTALFSVAHRLEKLYGGKAYVGLRIPDADTASRQDIDVVLVTKGDVVVISVKNLSGIVTVTSDGSWVCEGGKHHTTETFPDPLAEVKKQASVLESYLEQRGVTLLEGNVSCKVVIPNPSFRTIHAFPSEVITYEDWQQLKPVSKSKLSGWVKGAFSTGKEMQESSHQKLNFILGTAPTWDRVELKSSKIVLGEFLEFKGKQEDTLALRNIKRSKVDRVSIQKTSMFGLAPSRLQVLYSYRDYRSEGSSGSESKEVTVRSSTEVLFQPRDSTKMKKFKLSSLVSISLSA

SEQ ID NO: 39461 - DNA, 1544 bp, Arabidopsis thaliana
  misc_feature (1)..(1544): Ceres Seq. ID no. 13491268
  misc_feature: MA Experiment ID: 20000171 Result: Up-regulated in Transcription
  misc_feature: MA Experiment 20000171 PARAMETER Experiment Name: At_42deg_Heat_P Parameter: Age (day) Value: 14
  misc_feature: MA Experiment 20000171 PARAMETER Experiment Name: At_42deg_Heat_P Parameter: Organism Value: A. thaliana
  misc_feature: MA Experiment 20000171 PARAMETER Experiment Name: At_42deg_Heat_P Parameter: Plant Line Value: WS
  misc_feature: MA Experiment 20000171 PARAMETER Experiment Name: At_42deg_Heat_P Parameter: Temperature (deg C) Value: 42 vs. 22
  misc_feature: MA Experiment 20000171 PARAMETER Experiment Name: At_42deg_Heat_P Parameter: Timepoint (hr) Value: 1
  misc_feature: MA Experiment 20000171 PARAMETER Experiment Name: At_42deg_Heat_P Parameter: Tissue Value: Aerial
  misc_feature: MA Experiment ID: 20000234 Result: Down-regulated in Transcription
  misc_feature: MA Experiment 20000234 PARAMETER Experiment Name: At_Siliques_P Parameter: Age (day) Value: 21
  misc_feature: MA Experiment 20000234 PARAMETER Experiment Name: At_Siliques_P Parameter: Organism Value: A. thaliana
  misc_feature: MA Experiment 20000234 PARAMETER Experiment Name: At_Siliques_P Parameter: Plant Line Value: WS
  misc_feature: MA Experiment 20000234 PARAMETER Experiment Name: At_Siliques_P Parameter: Tissue Value: Less Than 5mm Siliques vs. Whole Plant
  misc_feature: MA Experiment ID: 20000436 Result: Up-regulated in Transcription
  misc_feature: MA Experiment 20000436 PARAMETER Experiment Name: At_Drought_P Parameter: Age (day) Value: 7
  misc_feature: MA Experiment 20000436 PARAMETER Experiment Name: At_Drought_P Parameter: Organism Value: A. thaliana
  misc_feature: MA Experiment 20000436 PARAMETER Experiment Name: At_Drought_P Parameter: Plant Line Value: WS
  misc_feature: MA Experiment 20000436 PARAMETER Experiment Name: At_Drought_P Parameter: Timepoint (hr) Value: 12
  misc_feature: MA Experiment 20000436 PARAMETER Experiment Name: At_Drought_P Parameter: Tissue Value: Whole Plant
  misc_feature: MA Experiment 20000436 PARAMETER Experiment Name: At_Drought_P Parameter: Treatment Value: Drought vs. No Drought
  misc_feature: MA Experiment ID: 20000495 Result: Down-regulated in Transcription
  misc_feature: MA Experiment 20000495 PARAMETER Experiment Name: At_Guard_Cells_P Parameter: Harvest Date Value: 8/2/2002
  misc_feature: MA Experiment 20000495 PARAMETER Experiment Name: At_Guard_Cells_P Parameter: Organism Value: A. thaliana
  misc_feature: MA Experiment 20000495 PARAMETER Experiment Name: At_Guard_Cells_P Parameter: Tissue Value: Guard Cells vs. Leaves
  misc_feature: MA Experiment ID: 20001247 Result: Up-regulated in Transcription
  misc_feature: MA Experiment 20001247 PARAMETER Experiment Name: At_Far-red-induction_P Parameter: Age (day) Value: 7
  misc_feature: MA Experiment 20001247 PARAMETER Experiment Name: At_Far-red-induction_P Parameter: Light Value: Far-red vs. White
  misc_feature: MA Experiment 20001247 PARAMETER Experiment Name: At_Far-red-induction_P Parameter: Organism Value: A. thaliana
  misc_feature: MA Experiment 20001247 PARAMETER Experiment Name: At_Far-red-induction_P Parameter: Plant Line Value: Columbia
  misc_feature: MA Experiment 20001247 PARAMETER Experiment Name: At_Far-red-induction_P Parameter: Timepoint (hr) Value: 1
  misc_feature: MA Experiment 20001247 PARAMETER Experiment Name: At_Far-red-induction_P Parameter: Tissue Value: Whole Plant
  misc_feature: MA Experiment ID: 20001248 Result: Down-regulated in Transcription
  misc_feature: MA Experiment 20001248 PARAMETER Experiment Name: At_Far-red-induction_P Parameter: Age (day) Value: 7
  misc_feature: MA Experiment 20001248 PARAMETER Experiment Name: At_Far-red-induction_P Parameter: Light Value: Far-red vs. White
  misc_feature: MA Experiment 20001248 PARAMETER Experiment Name: At_Far-red-induction_P Parameter: Organism Value: A. thaliana
  misc_feature: MA Experiment 20001248 PARAMETER Experiment Name: At_Far-red-induction_P Parameter: Plant Line Value: Columbia
  misc_feature: MA Experiment 20001248 PARAMETER Experiment Name: At_Far-red-induction_P Parameter: Timepoint (hr) Value: 4
  misc_feature: MA Experiment 20001248 PARAMETER Experiment Name: At_Far-red-induction_P Parameter: Tissue Value: Whole Plant
  misc_feature: MA Experiment ID: 20001450 Result: Up-regulated in Transcription
  misc_feature: MA Experiment 20001450 PARAMETER Experiment Name: At_Far-red-induction_P Parameter: Age (day) Value: 7
  misc_feature: MA Experiment 20001450 PARAMETER Experiment Name: At_Far-red-induction_P Parameter: Light Value: Far-red vs. White
  misc_feature: MA Experiment 20001450 PARAMETER Experiment Name: At_Far-red-induction_P Parameter: Organism Value: A. thaliana
  misc_feature: MA Experiment 20001450 PARAMETER Experiment Name: At_Far-red-induction_P Parameter: Plant Line Value: Columbia
  misc_feature: MA Experiment 20001450 PARAMETER Experiment Name: At_Far-red-induction_P Parameter: Timepoint (hr) Value: 8
  misc_feature: MA Experiment 20001450 PARAMETER Experiment Name: At_Far-red-induction_P Parameter: Tissue Value: Whole Plant
  misc_feature: MA Experiment ID: 20001558 Result: Down-regulated in Transcription
  misc_feature: MA Experiment 20001558 PARAMETER Experiment Name: At_Drought_Soil_Dry_P Parameter: Age (day) Value: 27
  misc_feature: MA Experiment 20001558 PARAMETER Experiment Name: At_Drought_Soil_Dry_P Parameter: Organism Value: A. thaliana
  misc_feature: MA Experiment 20001558 PARAMETER Experiment Name: At_Drought_Soil_Dry_P Parameter: Plant Line Value: WS
  misc_feature: MA Experiment 20001558 PARAMETER Experiment Name: At_Drought_Soil_Dry_P Parameter: Post Timepoint (hr) Value: 6
  misc_feature: MA Experiment 20001558 PARAMETER Experiment Name: At_Drought_Soil_Dry_P Parameter: Post-Treatment Value: Re-Water vs. No Drought
  misc_feature: MA Experiment 20001558 PARAMETER Experiment Name: At_Drought_Soil_Dry_P Parameter: Timepoint (day) Value: 13
  misc_feature: MA Experiment 20001558 PARAMETER Experiment Name: At_Drought_Soil_Dry_P Parameter: Treatment Value: Drought vs. No Drought
  misc_feature: MA Experiment ID: 20001560 Result: Down-regulated in Transcription
  misc_feature: MA Experiment 20001560 PARAMETER Experiment Name: At_Drought_Soil_Dry_P Parameter: Age (day) Value: 28
  misc_feature: MA Experiment 20001560 PARAMETER Experiment Name: At_Drought_Soil_Dry_P Parameter: Organism Value: A. thaliana
  misc_feature: MA Experiment 20001560 PARAMETER Experiment Name: At_Drought_Soil_Dry_P Parameter: Plant Line Value: WS
  misc_feature: MA Experiment 20001560 PARAMETER Experiment Name: At_Drought_Soil_Dry_P Parameter: Post Timepoint (hr) Value: None
  misc_feature: MA Experiment 20001560 PARAMETER Experiment Name: At_Drought_Soil_Dry_P Parameter: Post-Treatment Value: None
  misc_feature: MA Experiment 20001560 PARAMETER Experiment Name: At_Drought_Soil_Dry_P Parameter: Timepoint (day) Value: 14
  misc_feature: MA Experiment 20001560 PARAMETER Experiment Name: At_Drought_Soil_Dry_P Parameter: Treatment Value: Drought vs. No Drought
  misc_feature: MA Experiment ID: 20001757 Result: Down-regulated in Transcription
  misc_feature: MA Experiment 20001757 PARAMETER Experiment Name: At_50mM_NH4NO3_L-to-H_P Parameter: Timepoint (hr) Value: 6
  misc_feature: MA Experiment 20001757 PARAMETER Experiment Name: At_50mM_NH4NO3_L-to-H_P Parameter: Tissue Value: Leaf
  misc_feature: MA Experiment 20001757 PARAMETER Experiment Name: At_50mM_NH4NO3_L-to-H_P Parameter: Treatment Value: 50mM NH4NO3 vs 100mM Mannitol
aggaaaactaaaccaaagtctgtttaccagtaatatcaatcgatcgccattctcgacatttctctctctcaagctagtctaaagtttcttcttatctccttcctccgaccaaaacttcgacttctctcttattttcaccctcagagagtaaccatggatgccttgacctcgagtttggttcgatctcccatcgtaccatcgagaacttccgacaacggttctggatctatgttccttaccgccagtggccctggattcacgcgttctggttcttcaagacttcaacttcgtttaaggcaaaacgcgtctgctagatcctcaagatcattacagagcttaacaacgactgctaaaactcggagaagttttgtggttagagcttcttcagcgtctaatgatgcttcatctggttcttcccccaaaccgatcgctccgctccagctgcaatcgcctgctggtcagtttctgtctcagattttggtgagccatcctcatcttgtgcctgcagctgttgaacagcagcttgagcagcttcaaactgatcgggactctcagggacagaacaaagattcagcgtctgtacctggaaccgacatcgttctctacaggagaattgcggagttgaaggaaaacgagagaagaagaacattggaagagattttgtatgcattggtggttcaaaagttcatggaagctaacgtatcacttgtaccttcagtaagcccatcttcagatccgtctggtcgggttgatacttggccgaccaaagtggagaaactcgagcggcttcactcgcccgagatgtacgagatgattcacaaccatcttgccttgattcttggaagcagaatgggtgatctgaactctgttgcacagataagcaagctcagagttggccaagtttacgctgcttctgtgatgtatggatatttcttgaagagggtggaccaaaggtttcagcttgagaagacgatgaagattcttccgggtgggtcggatgaaagtaaaacaagcgttgagcaagccgaggggacggcaacatatcaggcggctgtatcgtctcacccagaggttggtgcatttgcgggcggagttagtgctaagggcttcggcagcgagattaaaccatcccgattaaggtcatatgtgatgtcatttgatgcggagacgctgcagagatacgccactataagatcaagagaagcagttggaatcatcgagaagcacacagaggcattgtttggtaagcctgagattgtaataacaccggagggcacagtcgattcatcgaaggacgaacagataaagatcagcttcggtggaatgaagaggctcgtcttggaggcagttactttcgggtcgttcctttgggatgttgagagccatgtagatgcgaggtaccactttgtattgaactaaaaacatggtctgtaatgcagttgactaacttatgtagcattaagaagatacccattaagggtatcattacacttgtatcaaaaatttgaggaaaagatcgtacattatatatgttattgtgatgc

SEQ ID NO: 39462 - protein, 421 aa, Arabidopsis thaliana
  peptide (1)..(421): Ceres Seq. ID no. 13491269
  misc_feature (11)..(421): Pfam Name: Protein of unknown function (DUF760) Pfam Description: Protein of unknown function (DUF760)
  misc_feature (71)..(352): Homolog of NCBI NO: 18397912 NR Description: expressed protein [Arabidopsis thaliana]
  misc_feature (327)..(416): Homolog of NCBI NO: 15239021 NR Description: expressed protein [Arabidopsis thaliana]
  misc_feature (68)..(271): Homolog of NCBI NO: 15239021 NR Description: expressed protein [Arabidopsis thaliana]
  misc_feature (30)..(419): Homolog of NCBI NO: 32489097 NR Description: OSJNBa0093F12.3 [Oryza sativa (japonica
  misc_feature (59)..(419): Homolog of NCBI NO: 18398302 NR Description: expressed protein [Arabidopsis thaliana]
  misc_feature (39)..(421): Homolog of NCBI NO: 28301943 NR Description: unknown protein [Oryza sativa (japonica
  misc_feature (165)..(421): Homolog of NCBI NO: 13561930 NR Description: unknown [Brassica napus]
  misc_feature (1)..(421): Homolog of NCBI NO: 15221185 NR Description: expressed protein [Arabidopsis thaliana]
  misc_feature (1)..(421): Homolog of NCBI NO: 17064820 NR Description: Unknown protein [Arabidopsis thaliana]
  misc_feature (1)..(421): Homolog of NCBI NO: 18401645 NR Description: expressed protein [Arabidopsis thaliana]
MDALTSSLVRSPIVPSRTSDNGSGSMFLTASGPGFTRSGSSRLQLRLRQNASARSSRSLQSLTTTAKTRRSFVVRASSASNDASSGSSPKPIAPLQLQSPAGQFLSQILVSHPHLVPAAVEQQLEQLQTDRDSQGQNKDSASVPGTDIVLYRRIAELKENERRRTLEEILYALVVQKFMEANVSLVPSVSPSSDPSGRVDTWPTKVEKLERLHSPEMYEMIHNHLALILGSRMGDLNSVAQISKLRVGQVYAASVMYGYFLKRVDQRFQLEKTMKILPGGSDESKTSVEQAEGTATYQAAVSSHPEVGAFAGGVSAKGFGSEIKPSRLRSYVMSFDAETLQRYATIRSREAVGIIEKHTEALFGKPEIVITPEGTVDSSKDEQIKISFGGMKRLVLEAVTFGSFLWDVESHVDARYHFVLN

SEQ ID NO: 39463 - protein, 396 aa, Arabidopsis thaliana
  peptide (1)..(396): Ceres Seq. ID no. 13491270
  misc_feature (1)..(396): Pfam Name: Protein of unknown function (DUF760) Pfam Description: Protein of unknown function (DUF760)
  misc_feature (46)..(327): Homolog of NCBI NO: 18397912 NR Description: expressed protein [Arabidopsis thaliana]
  misc_feature (302)..(391): Homolog of NCBI NO: 15239021 NR Description: expressed protein [Arabidopsis thaliana]
  misc_feature (43)..(246): Homolog of NCBI NO: 15239021 NR Description: expressed protein [Arabidopsis thaliana]
  misc_feature (5)..(394): Homolog of NCBI NO: 32489097 NR Description: OSJNBa0093F12.3 [Oryza sativa (japonica
  misc_feature (34)..(394): Homolog of NCBI NO: 18398302 NR Description: expressed protein [Arabidopsis thaliana]
  misc_feature (14)..(396): Homolog of NCBI NO: 28301943 NR Description: unknown protein [Oryza sativa (japonica
  misc_feature (140)..(396): Homolog of NCBI NO: 13561930 NR Description: unknown [Brassica napus]
  misc_feature (1)..(396): Homolog of NCBI NO: 15221185 NR Description: expressed protein [Arabidopsis thaliana]
  misc_feature (1)..(396): Homolog of NCBI NO: 17064820 NR Description: Unknown protein [Arabidopsis thaliana]
  misc_feature (1)..(396): Homolog of NCBI NO: 18401645 NR Description: expressed protein [Arabidopsis thaliana]
MFLTASGPGFTRSGSSRLQLRLRQNASARSSRSLQSLTTTAKTRRSFVVRASSASNDASSGSSPKPIAPLQLQSPAGQFLSQILVSHPHLVPAAVEQQLEQLQTDRDSQGQNKDSASVPGTDIVLYRRIAELKENERRRTLEEILYALVVQKFMEANVSLVPSVSPSSDPSGRVDTWPTKVEKLERLHSPEMYEMIHNHLALILGSRMGDLNSVAQISKLRVGQVYAASVMYGYFLKRVDQRFQLEKTMKILPGGSDESKTSVEQAEGTATYQAAVSSHPEVGAFAGGVSAKGFGSEIKPSRLRSYVMSFDAETLQRYATIRSREAVGIIEKHTEALFGKPEIVITPEGTVDSSKDEQIKISFGGMKRLVLEAVTFGSFLWDVESHVDARYHFVLN

SEQ ID NO: 39464 - protein, 243 aa, Arabidopsis thaliana
  peptide (1)..(243): Ceres Seq. ID no. 13491271
  misc_feature (1)..(243): Pfam Name: Protein of unknown function (DUF760) Pfam Description: Protein of unknown function (DUF760)
  misc_feature (1)..(174): Homolog of NCBI NO: 18397912 NR Description: expressed protein [Arabidopsis thaliana]
  misc_feature (149)..(238): Homolog of NCBI NO: 15239021 NR Description: expressed protein [Arabidopsis thaliana]
  misc_feature (1)..(93): Homolog of NCBI NO: 15239021 NR Description: expressed protein [Arabidopsis thaliana]
  misc_feature (1)..(241): Homolog of NCBI NO: 32489097 NR Description: OSJNBa0093F12.3 [Oryza sativa (japonica
  misc_feature (1)..(241): Homolog of NCBI NO: 18398302 NR Description: expressed protein [Arabidopsis thaliana]
  misc_feature (1)..(243): Homolog of NCBI NO: 28301943 NR Description: unknown protein [Oryza sativa (japonica
  misc_feature (1)..(243): Homolog of NCBI NO: 13561930 NR Description: unknown [Brassica napus]
  misc_feature (1)..(243): Homolog of NCBI NO: 15221185 NR Description: expressed protein [Arabidopsis thaliana]
  misc_feature (1)..(243): Homolog of NCBI NO: 17064820 NR Description: Unknown protein [Arabidopsis thaliana]
  misc_feature (1)..(243): Homolog of NCBI NO: 18401645 NR Description: expressed protein [Arabidopsis thaliana]
MEANVSLVPSVSPSSDPSGRVDTWPTKVEKLERLHSPEMYEMIHNHLALILGSRMGDLNSVAQISKLRVGQVYAASVMYGYFLKRVDQRFQLEKTMKILPGGSDESKTSVEQAEGTATYQAAVSSHPEVGAFAGGVSAKGFGSEIKPSRLRSYVMSFDAETLQRYATIRSREAVGIIEKHTEALFGKPEIVITPEGTVDSSKDEQIKISFGGMKRLVLEAVTFGSFLWDVESHVDARYHFVLN

SEQ ID NO: 39465 - DNA, 769 bp, Arabidopsis thaliana
  misc_feature (1)..(769): Ceres Seq. ID no. 13646063
  misc_feature: MA Experiment ID: 20000173 Result: Up-regulated in Transcription
  misc_feature: MA Experiment 20000173 PARAMETER Experiment Name: At_42deg_Heat_P Parameter: Age (day) Value: 14
  misc_feature: MA Experiment 20000173 PARAMETER Experiment Name: At_42deg_Heat_P Parameter: Organism Value: A. thaliana
  misc_feature: MA Experiment 20000173 PARAMETER Experiment Name: At_42deg_Heat_P Parameter: Plant Line Value: WS
  misc_feature: MA Experiment 20000173 PARAMETER Experiment Name: At_42deg_Heat_P Parameter: Temperature (deg C) Value: 42 vs. 22
  misc_feature: MA Experiment 20000173 PARAMETER Experiment Name: At_42deg_Heat_P Parameter: Timepoint (hr) Value: 6
  misc_feature: MA Experiment 20000173 PARAMETER Experiment Name: At_42deg_Heat_P Parameter: Tissue Value: Aerial
  misc_feature: MA Experiment ID: 20000179 Result: Up-regulated in Transcription
  misc_feature: MA Experiment 20000179 PARAMETER Experiment Name: At_Germinating_Seeds_P Parameter: Age (hr) Value: 6 vs. 0
  misc_feature: MA Experiment 20000179 PARAMETER Experiment Name: At_Germinating_Seeds_P Parameter: Tissue Value: Germinating Seeds
  misc_feature: MA Experiment ID: 20000180 Result: Up-regulated in Transcription
  misc_feature: MA Experiment 20000180 PARAMETER Experiment Name: At_Germinating_Seeds_P Parameter: Age (hr) Value: 24 vs. 0
  misc_feature: MA Experiment 20000180 PARAMETER Experiment Name: At_Germinating_Seeds_P Parameter: Tissue Value: Germinating Seeds
  misc_feature: MA Experiment ID: 20000184 Result: Up-regulated in Transcription
  misc_feature: MA Experiment 20000184 PARAMETER Experiment Name: At_Shoots__P Parameter: Age (day) Value: 7
  misc_feature: MA Experiment 20000184 PARAMETER Experiment Name: At_Shoots__P Parameter: Tissue Value: Shoots vs. Whole Plant
  misc_feature: MA Experiment ID: 20000185 Result: Down-regulated in Transcription
  misc_feature: MA Experiment 20000185 PARAMETER Experiment Name: At_Roots__P Parameter: Age (day) Value: 7 vs. 21
  misc_feature: MA Experiment 20000185 PARAMETER Experiment Name: At_Roots__P Parameter: Organism Value: A. thaliana
  misc_feature: MA Experiment 20000185 PARAMETER Experiment Name: At_Roots__P Parameter: Tissue Value: Roots vs. Whole Plant
  misc_feature: MA Experiment ID: 20000214 Result: Up-regulated in Transcription
  misc_feature: MA Experiment 20000214 PARAMETER Experiment Name: At_4deg_Cold_P Parameter: Timepoint (hr) Value: 6
  misc_feature: MA Experiment ID: 20000437 Result: Down-regulated in Transcription
  misc_feature: MA Experiment 20000437 PARAMETER Experiment Name: At_Drought_P Parameter: Age (day) Value: 8
  misc_feature: MA Experiment 20000437 PARAMETER Experiment Name: At_Drought_P Parameter: Organism Value: A. thaliana
  misc_feature: MA Experiment 20000437 PARAMETER Experiment Name: At_Drought_P Parameter: Plant Line Value: WS
  misc_feature: MA Experiment 20000437 PARAMETER Experiment Name: At_Drought_P Parameter: Timepoint (hr) Value: 24
  misc_feature: MA Experiment 20000437 PARAMETER Experiment Name: At_Drought_P Parameter: Tissue Value: Whole Plant
  misc_feature: MA Experiment 20000437 PARAMETER Experiment Name: At_Drought_P Parameter: Treatment Value: Drought vs. No Drought
  misc_feature: MA Experiment ID: 20000438 Result: Up-regulated in Transcription
  misc_feature: MA Experiment 20000438 PARAMETER Experiment Name: At_Shoots__P Parameter: Age (day) Value: 14
  misc_feature: MA Experiment 20000438 PARAMETER Experiment Name: At_Shoots__P Parameter: Tissue Value: Shoots vs. Whole Plant
  misc_feature: MA Experiment ID: 20000439 Result: Down-regulated in Transcription
  misc_feature: MA Experiment 20000439 PARAMETER Experiment Name: At_Roots__P Parameter: Age (day) Value: 14 vs. 21
  misc_feature: MA Experiment 20000439 PARAMETER Experiment Name: At_Roots__P Parameter: Organism Value: A. thaliana
  misc_feature: MA Experiment 20000439 PARAMETER Experiment Name: At_Roots__P Parameter: Tissue Value: Roots vs. Whole Plant
  misc_feature: MA Experiment ID: 20000794 Result: Down-regulated in Transcription
  misc_feature: MA Experiment 20000794 PARAMETER Experiment Name: At_Petals_P Parameter: Age (day) Value: 23-25 days
  misc_feature: MA Experiment 20000794 PARAMETER Experiment Name: At_Petals_P Parameter: Plant Line Value: WS
  misc_feature: MA Experiment 20000794 PARAMETER Experiment Name: At_Petals_P Parameter: Tissue Value: Petals vs. Whole plant
  misc_feature: MA Experiment ID: 20001247 Result: Up-regulated in Transcription
  misc_feature: MA Experiment 20001247 PARAMETER Experiment Name: At_Far-red-induction_P Parameter: Age (day) Value: 7
  misc_feature: MA Experiment 20001247 PARAMETER Experiment Name: At_Far-red-induction_P Parameter: Light Value: Far-red vs. White
  misc_feature: MA Experiment 20001247 PARAMETER Experiment Name: At_Far-red-induction_P Parameter: Organism Value: A. thaliana
  misc_feature: MA Experiment 20001247 PARAMETER Experiment Name: At_Far-red-induction_P Parameter: Plant Line Value: Columbia
  misc_feature: MA Experiment 20001247 PARAMETER Experiment Name: At_Far-red-induction_P Parameter: Timepoint (hr) Value: 1
  misc_feature: MA Experiment 20001247 PARAMETER Experiment Name: At_Far-red-induction_P Parameter: Tissue Value: Whole Plant
  misc_feature: MA Experiment ID: 20001248 Result: Down-regulated in Transcription
  misc_feature: MA Experiment 20001248 PARAMETER Experiment Name: At_Far-red-induction_P Parameter: Age (day) Value: 7
  misc_feature: MA Experiment 20001248 PARAMETER Experiment Name: At_Far-red-induction_P Parameter: Light Value: Far-red vs. White
  misc_feature: MA Experiment 20001248 PARAMETER Experiment Name: At_Far-red-induction_P Parameter: Organism Value: A. thaliana
  misc_feature: MA Experiment 20001248 PARAMETER Experiment Name: At_Far-red-induction_P Parameter: Plant Line Value: Columbia
  misc_feature: MA Experiment 20001248 PARAMETER Experiment Name: At_Far-red-induction_P Parameter: Timepoint (hr) Value: 4
  misc_feature: MA Experiment 20001248 PARAMETER Experiment Name: At_Far-red-induction_P Parameter: Tissue Value: Whole Plant
  misc_feature: MA Experiment ID: 20001450 Result: Down-regulated in Transcription
  misc_feature: MA Experiment 20001450 PARAMETER Experiment Name: At_Far-red-induction_P Parameter: Age (day) Value: 7
  misc_feature: MA Experiment 20001450 PARAMETER Experiment Name: At_Far-red-induction_P Parameter: Light Value: Far-red vs. White
  misc_feature: MA Experiment 20001450 PARAMETER Experiment Name: At_Far-red-induction_P Parameter: Organism Value: A. thaliana
  misc_feature: MA Experiment 20001450 PARAMETER Experiment Name: At_Far-red-induction_P Parameter: Plant Line Value: Columbia
  misc_feature: MA Experiment 20001450 PARAMETER Experiment Name: At_Far-red-induction_P Parameter: Timepoint (hr) Value: 8
  misc_feature: MA Experiment 20001450 PARAMETER Experiment Name: At_Far-red-induction_P Parameter: Tissue Value: Whole Plant
  misc_feature: MA Experiment ID: 20001555 Result: Down-regulated in Transcription
  misc_feature: MA Experiment 20001555 PARAMETER Experiment Name: At_Drought_Soil_Dry_P Parameter: Age (day) Value: 24
  misc_feature: MA Experiment 20001555 PARAMETER Experiment Name: At_Drought_Soil_Dry_P Parameter: Organism Value: A. thaliana
  misc_feature: MA Experiment 20001555 PARAMETER Experiment Name: At_Drought_Soil_Dry_P Parameter: Plant Line Value: WS
  misc_feature: MA Experiment 20001555 PARAMETER Experiment Name: At_Drought_Soil_Dry_P Parameter: Post Timepoint (hr) Value: None
  misc_feature: MA Experiment 20001555 PARAMETER Experiment Name: At_Drought_Soil_Dry_P Parameter: Post-Treatment Value: None
  misc_feature: MA Experiment 20001555 PARAMETER Experiment Name: At_Drought_Soil_Dry_P Parameter: Timepoint (day) Value: 10
  misc_feature: MA Experiment 20001555 PARAMETER Experiment Name: At_Drought_Soil_Dry_P Parameter: Treatment Value: Drought vs. No Drought
  misc_feature: MA Experiment ID: 20001559 Result: Down-regulated in Transcription
  misc_feature: MA Experiment 20001559 PARAMETER Experiment Name: At_Drought_Soil_Dry_P Parameter: Age (day) Value: 28
  misc_feature: MA Experiment 20001559 PARAMETER Experiment Name: At_Drought_Soil_Dry_P Parameter: Organism Value: A. thaliana
  misc_feature: MA Experiment 20001559 PARAMETER Experiment Name: At_Drought_Soil_Dry_P Parameter: Plant Line Value: WS
  misc_feature: MA Experiment 20001559 PARAMETER Experiment Name: At_Drought_Soil_Dry_P Parameter: Post Timepoint (hr) Value: 29
  misc_feature: MA Experiment 20001559 PARAMETER Experiment Name: At_Drought_Soil_Dry_P Parameter: Post-Treatment Value: Re-Water vs. No Drought
  misc_feature: MA Experiment 20001559 PARAMETER Experiment Name: At_Drought_Soil_Dry_P Parameter: Timepoint (day) Value: 14
  misc_feature: MA Experiment 20001559 PARAMETER Experiment Name: At_Drought_Soil_Dry_P Parameter: Treatment Value: Drought vs. No Drought
  misc_feature: MA Experiment ID: 20001757 Result: Up-regulated in Transcription
  misc_feature: MA Experiment 20001757 PARAMETER Experiment Name: At_50mM_NH4NO3_L-to-H_P Parameter: Timepoint (hr) Value: 6
  misc_feature: MA Experiment 20001757 PARAMETER Experiment Name: At_50mM_NH4NO3_L-to-H_P Parameter: Tissue Value: Leaf
  misc_feature: MA Experiment 20001757 PARAMETER Experiment Name: At_50mM_NH4NO3_L-to-H_P Parameter: Treatment Value: 50mM NH4NO3 vs 100mM Mannitol
  misc_feature: MA Experiment ID: 20001904 Result: Down-regulated in Transcription
  misc_feature: MA Experiment 20001904 PARAMETER Experiment Name: At_Drought_Reproduction_P Parameter: Age (day) Value: 37
  misc_feature: MA Experiment 20001904 PARAMETER Experiment Name: At_Drought_Reproduction_P Parameter: Organism Value: A. thaliana
  misc_feature: MA Experiment 20001904 PARAMETER Experiment Name: At_Drought_Reproduction_P Parameter: Plant Line Value: WS
  misc_feature: MA Experiment 20001904 PARAMETER Experiment Name: At_Drought_Reproduction_P Parameter: Timepoint (day) Value: 7
  misc_feature: MA Experiment 20001904 PARAMETER Experiment Name: At_Drought_Reproduction_P Parameter: Tissue Value: Rosettes
  misc_feature: MA Experiment 20001904 PARAMETER Experiment Name: At_Drought_Reproduction_P Parameter: Treatment Value: Drought vs. No Drought
  misc_feature: MA Experiment ID: 20001906 Result: Down-regulated in Transcription
  misc_feature: MA Experiment 20001906 PARAMETER Experiment Name: At_Drought_Reproduction_P Parameter: Age (day) Value: 35
  misc_feature: MA Experiment 20001906 PARAMETER Experiment Name: At_Drought_Reproduction_P Parameter: Organism Value: A. thaliana
  misc_feature: MA Experiment 20001906 PARAMETER Experiment Name: At_Drought_Reproduction_P Parameter: Plant Line Value: WS
  misc_feature: MA Experiment 20001906 PARAMETER Experiment Name: At_Drought_Reproduction_P Parameter: Timepoint (day) Value: 5
  misc_feature: MA Experiment 20001906 PARAMETER Experiment Name: At_Drought_Reproduction_P Parameter: Tissue Value: Siliques
  misc_feature: MA Experiment 20001906 PARAMETER Experiment Name: At_Drought_Reproduction_P Parameter: Treatment Value: Drought vs. No Drought
  misc_feature: MA Experiment ID: 20001911 Result: Down-regulated in Transcription
  misc_feature: MA Experiment 20001911 PARAMETER Experiment Name: At_Drought_Reproduction_P Parameter: Age (day) Value: 40
  misc_feature: MA Experiment 20001911 PARAMETER Experiment Name: At_Drought_Reproduction_P Parameter: Organism Value: A. thaliana
  misc_feature: MA Experiment 20001911 PARAMETER Experiment Name: At_Drought_Reproduction_P Parameter: Plant Line Value: WS
  misc_feature: MA Experiment 20001911 PARAMETER Experiment Name: At_Drought_Reproduction_P Parameter: Timepoint (day) Value: 10
  misc_feature: MA Experiment 20001911 PARAMETER Experiment Name: At_Drought_Reproduction_P Parameter: Tissue Value: Flowers
  misc_feature: MA Experiment 20001911 PARAMETER Experiment Name: At_Drought_Reproduction_P Parameter: Treatment Value: Drought vs. No Drought
aacgaacaaagaaacatacatcaaagctacatatactaaaagatatataatttctcgattgtcctgagccctcagaccaaaatctgaccatggacaaggttatgagaatgtcatcggagaaaggagtcgtgatcttcaccaaaagttcatgttgtctctgctacgccgtgcaaatccttttccgtgatcttagggttcaaccaacaatccacgagatcgacaactcggtcacgttaaggacttggcaacagcctttctcaacgtgcttggtaacgagaaagccagcagagagatattcaacatctcgggggagaaatatgttacctttgatgggttagcaaaagcttgcgcaaagcccggtgggtttccggagccagagattgttcattacaacccgaaagagttcgactttgggaagaagaaggcattccctttccgtgatcagcatttctttgcatcggtggagaaagcaaagcatgtcctcggatggaaaccggagttcgacttagtggagggtctcactgactcatacaaccttgatttcggtcgcggaacattccggaaagaagcggatttcaccactgacgacatgattctgagcaagaaacttgttcttcaataatcgaaatcctaagagttgctcattcttggcttgtatgattctgatcacccggttctcttaaagttctgaactttattgtcatctcacgtatgttatggtccggattttgttcgacttttctctaaagaagtcaagctagggacgatg

SEQ ID NO: 39466 - protein, 82 aa, Arabidopsis thaliana
  peptide (1)..(82): Ceres Seq. ID no. 13646064
  misc_feature (1)..(44): Homolog of NCBI NO: 15241297 NR Description: glutaredoxin protein family [Arabidopsis
  misc_feature (1)..(50): Homolog of NCBI NO: 15227151 NR Description: glutaredoxin protein family [Arabidopsis
MDKVMRMSSEKGVVIFTKSSCCLCYAVQILFRDLRVQPTIHEIDNSVTLRTWQQPFSTCLVTRKPAERYSTSRGRNMLPLMG

SEQ ID NO: 39467 - protein, 78 aa, Arabidopsis thaliana
  peptide (1)..(78): Ceres Seq. ID no. 13646065
  misc_feature (1)..(40): Homolog of NCBI NO: 15241297 NR Description: glutaredoxin protein family [Arabidopsis
  misc_feature (1)..(46): Homolog of NCBI NO: 15227151 NR Description: glutaredoxin protein family [Arabidopsis
MRMSSEKGVVIFTKSSCCLCYAVQILFRDLRVQPTIHEIDNSVTLRTWQQPFSTCLVTRKPAERYSTSRGRNMLPLMG

SEQ ID NO: 39468 - protein, 76 aa, Arabidopsis thaliana
  peptide (1)..(76): Ceres Seq. ID no. 13646066
  misc_feature (1)..(38): Homolog of NCBI NO: 15241297 NR Description: glutaredoxin protein family [Arabidopsis
  misc_feature (1)..(44): Homolog of NCBI NO: 15227151 NR Description: glutaredoxin protein family [Arabidopsis
MSSEKGVVIFTKSSCCLCYAVQILFRDLRVQPTIHEIDNSVTLRTWQQPFSTCLVTRKPAERYSTSRGRNMLPLMG

SEQ ID NO: 39469 - DNA, 2532 bp, Arabidopsis thaliana
  misc_feature (1)..(2532): Ceres Seq. ID no. 13504839
  misc_feature: MA Experiment ID: 108434 Result: Down-regulated in Transcription
  misc_feature: MA Experiment 108434 PARAMETER Experiment Name: At_Root_Tips_cDNA_P Parameter: Tissue Value: Root Tips
  misc_feature: MA Experiment ID: 108461 Result: Down-regulated in Transcription
  misc_feature: MA Experiment 108461 PARAMETER Experiment Name: At_Germinating_Seeds_cDNA_P Parameter: Age (day) Value: 1 vs. 0
  misc_feature: MA Experiment 108461 PARAMETER Experiment Name: At_Germinating_Seeds_cDNA_P Parameter: Tissue Value: Germinating Seeds
  misc_feature: MA Experiment ID: 108462 Result: Down-regulated in Transcription
  misc_feature: MA Experiment 108462 PARAMETER Experiment Name: At_Germinating_Seeds_cDNA_P Parameter: Age (day) Value: 2 vs. 0
  misc_feature: MA Experiment 108462 PARAMETER Experiment Name: At_Germinating_Seeds_cDNA_P Parameter: Tissue Value: Germinating Seeds
  misc_feature: MA Experiment ID: 108463 Result: Down-regulated in Transcription
  misc_feature: MA Experiment 108463 PARAMETER Experiment Name: At_Germinating_Seeds_cDNA_P Parameter: Age (day) Value: 3 vs. 0
  misc_feature: MA Experiment 108463 PARAMETER Experiment Name: At_Germinating_Seeds_cDNA_P Parameter: Tissue Value: Germinating Seeds
  misc_feature: MA Experiment ID: 108464 Result: Down-regulated in Transcription
  misc_feature: MA Experiment 108464 PARAMETER Experiment Name: At_Germinating_Seeds_cDNA_P Parameter: Age (day) Value: 4 vs. 0
  misc_feature: MA Experiment 108464 PARAMETER Experiment Name: At_Germinating_Seeds_cDNA_P Parameter: Tissue Value: Germinating Seeds
  misc_feature: MA Experiment ID: 108594 Result: Up-regulated in Transcription
  misc_feature: MA Experiment 108594 PARAMETER Experiment Name: At_Ler-rhl_Root_cDNA_P Parameter: Plant Line Value: null
  misc_feature: MA Experiment ID: 108605 Result: Down-regulated in Transcription
  misc_feature: MA Experiment 108605 PARAMETER Experiment Name: At_100uM_ABA_cDNA_P Parameter: Timepoint (hr) Value: 6
  misc_feature: MA Experiment 108605 PARAMETER Experiment Name: At_100uM_ABA_cDNA_P Parameter: Tissue Value: Aerial
  misc_feature: MA Experiment 108605 PARAMETER Experiment Name: At_100uM_ABA_cDNA_P Parameter: Treatment Value: 100uM ABA vs. No Treatment
  misc_feature: MA Experiment ID: 108608 Result: Down-regulated in Transcription
  misc_feature: MA Experiment 108608 PARAMETER Experiment Name: At_100uM_ABA_cDNA_P Parameter: Timepoint (hr) Value: 1
  misc_feature: MA Experiment 108608 PARAMETER Experiment Name: At_100uM_ABA_cDNA_P Parameter: Tissue Value: Aerial
  misc_feature: MA Experiment 108608 PARAMETER Experiment Name: At_100uM_ABA_cDNA_P Parameter: Treatment Value: 100uM ABA vs. No Treatment
  misc_feature: MA Experiment ID: 20000166 Result: Down-regulated in Transcription
  misc_feature: MA Experiment 20000166 PARAMETER Experiment Name: At_100uM_ABA_P Parameter: Age (day) Value: 14
  misc_feature: MA Experiment 20000166 PARAMETER Experiment Name: At_100uM_ABA_P Parameter: Organism Value: A. thaliana
  misc_feature: MA Experiment 20000166 PARAMETER Experiment Name: At_100uM_ABA_P Parameter: Plant Line Value: WS
  misc_feature: MA Experiment 20000166 PARAMETER Experiment Name: At_100uM_ABA_P Parameter: Timepoint (hr) Value: 1
  misc_feature: MA Experiment 20000166 PARAMETER Experiment Name: At_100uM_ABA_P Parameter: Tissue Value: Aerial
  misc_feature: MA Experiment 20000166 PARAMETER Experiment Name: At_100uM_ABA_P Parameter: Treatment Value: 100uM ABA vs. No Treatment
  misc_feature: MA Experiment ID: 20000180 Result: Down-regulated in Transcription
  misc_feature: MA Experiment 20000180 PARAMETER Experiment Name: At_Germinating_Seeds_P Parameter: Age (hr) Value: 24 vs. 0
  misc_feature: MA Experiment 20000180 PARAMETER Experiment Name: At_Germinating_Seeds_P Parameter: Tissue Value: Germinating Seeds
  misc_feature: MA Experiment ID: 20000265 Result: Up-regulated in Transcription
  misc_feature: MA Experiment 20000265 PARAMETER Experiment Name: At_Open_Flower_P Parameter: Age (day) Value: 21
  misc_feature: MA Experiment 20000265 PARAMETER Experiment Name: At_Open_Flower_P Parameter: Plant Line Value: WS
  misc_feature: MA Experiment 20000265 PARAMETER Experiment Name: At_Open_Flower_P Parameter: Tissue Value: Closed Flower vs. Whole Plant
  misc_feature: MA Experiment ID: 20000286 Result: Up-regulated in Transcription
  misc_feature: MA Experiment 20000286 PARAMETER Experiment Name: At_Open_Flower_P Parameter: Age (day) Value: 21
  misc_feature: MA Experiment 20000286 PARAMETER Experiment Name: At_Open_Flower_P Parameter: Plant Line Value: WS
  misc_feature: MA Experiment 20000286 PARAMETER Experiment Name: At_Open_Flower_P Parameter: Tissue Value: Half Open vs. Whole Plant
  misc_feature: MA Experiment ID: 20000441 Result: Up-regulated in Transcription
  misc_feature: MA Experiment 20000441 PARAMETER Experiment Name: At_1uM_BR-BRZ__P Parameter: Tissue Value: Shoot Apices
  misc_feature: MA Experiment 20000441 PARAMETER Experiment Name: At_1uM_BR-BRZ__P Parameter: Treatment Value: 1uM BR vs. No Treatment
  misc_feature: MA Experiment ID: 20000443 Result: Up-regulated in Transcription
  misc_feature: MA Experiment 20000443 PARAMETER Experiment Name: At_1uM_BR-BRZ__P Parameter: Tissue Value: Shoot Apices
  misc_feature: MA Experiment 20000443 PARAMETER Experiment Name: At_1uM_BR-BRZ__P Parameter: Treatment Value: 1uM BRZ vs. No Treatment
  misc_feature: MA Experiment ID: 20000444 Result: Down-regulated in Transcription
  misc_feature: MA Experiment 20000444 PARAMETER Experiment Name: At_100uM_NAA__P Parameter: Age (day) Value: 14
  misc_feature: MA Experiment 20000444 PARAMETER Experiment Name: At_100uM_NAA__P Parameter: Organism Value: A. thaliana
  misc_feature: MA Experiment 20000444 PARAMETER Experiment Name: At_100uM_NAA__P Parameter: Plant Line Value: WS
  misc_feature: MA Experiment 20000444 PARAMETER Experiment Name: At_100uM_NAA__P Parameter: Timepoint (hr) Value: 1
  misc_feature: MA Experiment 20000444 PARAMETER Experiment Name: At_100uM_NAA__P Parameter: Tissue Value: Aerial
  misc_feature: MA Experiment 20000444 PARAMETER Experiment Name: At_100uM_NAA__P Parameter: Treatment Value: 100uM NAA vs. No Treatment
  misc_feature: MA Experiment ID: 20000495 Result: Up-regulated in Transcription
  misc_feature: MA Experiment 20000495 PARAMETER Experiment Name: At_Guard_Cells_P Parameter: Harvest Date Value: 8/2/2002
  misc_feature: MA Experiment 20000495 PARAMETER Experiment Name: At_Guard_Cells_P Parameter: Organism Value: A. thaliana
  misc_feature: MA Experiment 20000495 PARAMETER Experiment Name: At_Guard_Cells_P Parameter: Tissue Value: Guard Cells vs. Leaves
  misc_feature: MA Experiment ID: 20000496 Result: Up-regulated in Transcription
  misc_feature: MA Experiment 20000496 PARAMETER Experiment Name: At_Guard_Cells_P Parameter: Harvest Date Value: 7/19/2002
  misc_feature: MA Experiment 20000496 PARAMETER Experiment Name: At_Guard_Cells_P Parameter: Organism Value: Canola
  misc_feature: MA Experiment 20000496 PARAMETER Experiment Name: At_Guard_Cells_P Parameter: Tissue Value: Guard Cells vs. Leaves
  misc_feature: MA Experiment ID: 20000527 Result: Down-regulated in Transcription
  misc_feature: MA Experiment 20000527 PARAMETER Experiment Name: At_10percent_PEG_P Parameter: Age (day) Value: 20
  misc_feature: MA Experiment 20000527 PARAMETER Experiment Name: At_10percent_PEG_P Parameter: Organism Value: A. thaliana
  misc_feature: MA Experiment 20000527 PARAMETER Experiment Name: At_10percent_PEG_P Parameter: Plant Line Value: WS
  misc_feature: MA Experiment 20000527 PARAMETER Experiment Name: At_10percent_PEG_P Parameter: Timepoint (day) Value: 20
  misc_feature: MA Experiment 20000527 PARAMETER Experiment Name: At_10percent_PEG_P Parameter: Tissue Value: Whole Plant
  misc_feature: MA Experiment 20000527 PARAMETER Experiment Name: At_10percent_PEG_P Parameter: Treatment Value: 10percent PEG vs. No Treatment
  misc_feature: MA Experiment ID: 20000573 Result: Up-regulated in Transcription
  misc_feature: MA Experiment 20000573 PARAMETER Experiment Name: At_100uM_ABA_Mutants__P Parameter: Organism Value: A. thaliana
  misc_feature: MA Experiment 20000573 PARAMETER Experiment Name: At_100uM_ABA_Mutants__P Parameter: Plant Line Value: CS22 vs. Ler wt
  misc_feature: MA Experiment 20000573 PARAMETER Experiment Name: At_100uM_ABA_Mutants__P Parameter: Timepoint (hr) Value: N/A
  misc_feature: MA Experiment 20000573 PARAMETER Experiment Name: At_100uM_ABA_Mutants__P Parameter: Tissue Value: Whole Plant
  misc_feature: MA Experiment 20000573 PARAMETER Experiment Name: At_100uM_ABA_Mutants__P Parameter: Treatment Value: None
  misc_feature: MA Experiment ID: 20000709 Result: Down-regulated in Transcription
  misc_feature: MA Experiment 20000709 PARAMETER Experiment Name: At_15mM_NH4NO3_L-to-H_P Parameter: Age (hr) Value: 14
  misc_feature: MA Experiment 20000709 PARAMETER Experiment Name: At_15mM_NH4NO3_L-to-H_P Parameter: Organism Value: A. thaliana
  misc_feature: MA Experiment 20000709 PARAMETER Experiment Name: At_15mM_NH4NO3_L-to-H_P Parameter: Plant Line Value: WS
  misc_feature: MA Experiment 20000709 PARAMETER Experiment Name: At_15mM_NH4NO3_L-to-H_P Parameter: Timepoint (hr) Value: 4
  misc_feature: MA Experiment 20000709 PARAMETER Experiment Name: At_15mM_NH4NO3_L-to-H_P Parameter: Tissue Value: Aerial
  misc_feature: MA Experiment 20000709 PARAMETER Experiment Name: At_15mM_NH4NO3_L-to-H_P Parameter: Treatment Value: 15mM NH4NO3 vs. 30mM Mannitol
  misc_feature: MA Experiment ID: 20000794 Result: Up-regulated in Transcription
  misc_feature: MA Experiment 20000794 PARAMETER Experiment Name: At_Petals_P Parameter: Age (day) Value: 23-25 days
  misc_feature: MA Experiment 20000794 PARAMETER Experiment Name: At_Petals_P Parameter: Plant Line Value: WS
  misc_feature: MA Experiment 20000794 PARAMETER Experiment Name: At_Petals_P Parameter: Tissue Value: Petals vs. Whole plant
  misc_feature: MA Experiment ID: 20001247 Result: Up-regulated in Transcription
  misc_feature: MA Experiment 20001247 PARAMETER Experiment Name: At_Far-red-induction_P Parameter: Age (day) Value: 7
  misc_feature: MA Experiment 20001247 PARAMETER Experiment Name: At_Far-red-induction_P Parameter: Light Value: Far-red vs. White
  misc_feature: MA Experiment 20001247 PARAMETER Experiment Name: At_Far-red-induction_P Parameter: Organism Value: A. thaliana
  misc_feature: MA Experiment 20001247 PARAMETER Experiment Name: At_Far-red-induction_P Parameter: Plant Line Value: Columbia
  misc_feature: MA Experiment 20001247 PARAMETER Experiment Name: At_Far-red-induction_P Parameter: Timepoint (hr) Value: 1
  misc_feature: MA Experiment 20001247 PARAMETER Experiment Name: At_Far-red-induction_P Parameter: Tissue Value: Whole Plant
  misc_feature: MA Experiment ID: 20001556 Result: Down-regulated in Transcription
  misc_feature: MA Experiment 20001556 PARAMETER Experiment Name: At_Drought_Soil_Dry_P Parameter: Age (day) Value: 26
  misc_feature: MA Experiment 20001556 PARAMETER Experiment Name: At_Drought_Soil_Dry_P Parameter: Organism Value: A. thaliana
  misc_feature: MA Experiment 20001556 PARAMETER Experiment Name: At_Drought_Soil_Dry_P Parameter: Plant Line Value: WS
  misc_feature: MA Experiment 20001556 PARAMETER Experiment Name: At_Drought_Soil_Dry_P Parameter: Post Timepoint (hr) Value: None
  misc_feature: MA Experiment 20001556 PARAMETER Experiment Name: At_Drought_Soil_Dry_P Parameter: Post-Treatment Value: None
  misc_feature: MA Experiment 20001556 PARAMETER Experiment Name: At_Drought_Soil_Dry_P Parameter: Timepoint (day) Value: 12
  misc_feature: MA Experiment 20001556 PARAMETER Experiment Name: At_Drought_Soil_Dry_P Parameter: Treatment Value: Drought vs. No Drought
  misc_feature: MA Experiment ID: 20001557 Result: Up-regulated in Transcription
  misc_feature: MA Experiment 20001557 PARAMETER Experiment Name: At_Drought_Soil_Dry_P Parameter: Age (day) Value: 27
  misc_feature: MA Experiment 20001557 PARAMETER Experiment Name: At_Drought_Soil_Dry_P Parameter: Organism Value: A. thaliana
  misc_feature: MA Experiment 20001557 PARAMETER Experiment Name: At_Drought_Soil_Dry_P Parameter: Plant Line Value: WS
  misc_feature: MA Experiment 20001557 PARAMETER Experiment Name: At_Drought_Soil_Dry_P Parameter: Post Timepoint (hr) Value: 3
  misc_feature: MA Experiment 20001557 PARAMETER Experiment Name: At_Drought_Soil_Dry_P Parameter: Post-Treatment Value: Re-Water vs. No Drought
  misc_feature: MA Experiment 20001557 PARAMETER Experiment Name: At_Drought_Soil_Dry_P Parameter: Timepoint (day) Value: 13
  misc_feature: MA Experiment 20001557 PARAMETER Experiment Name: At_Drought_Soil_Dry_P Parameter: Treatment Value: Drought vs. No Drought
  misc_feature: MA Experiment ID: 20001558 Result: Up-regulated in Transcription
  misc_feature: MA Experiment 20001558 PARAMETER Experiment Name: At_Drought_Soil_Dry_P Parameter: Age (day) Value: 27
  misc_feature: MA Experiment 20001558 PARAMETER Experiment Name: At_Drought_Soil_Dry_P Parameter: Organism Value: A. thaliana
  misc_feature: MA Experiment 20001558 PARAMETER Experiment Name: At_Drought_Soil_Dry_P Parameter: Plant Line Value: WS
  misc_feature: MA Experiment 20001558 PARAMETER Experiment Name: At_Drought_Soil_Dry_P Parameter: Post Timepoint (hr) Value: 6
  misc_feature: MA Experiment 20001558 PARAMETER Experiment Name: At_Drought_Soil_Dry_P Parameter: Post-Treatment Value: Re-Water vs. No Drought
  misc_feature: MA Experiment 20001558 PARAMETER Experiment Name: At_Drought_Soil_Dry_P Parameter: Timepoint (day) Value: 13
  misc_feature: MA Experiment 20001558 PARAMETER Experiment Name: At_Drought_Soil_Dry_P Parameter: Treatment Value: Drought vs. No Drought
gaatggatataaacatcaaaattcaataattgcgatagagtatcaatcaagatcttacatataaaaaaagattcatcccccaaagaacggaacactcactcttctaaaacgatgggagagatagcaacagagttcacgccggttatggatgatgatgatgaccggtgcgttgtaccggaggtagagctcactgtacccaagaccgacgattcaactttaccggttttaacatttcggatgtgagttcttggtataggcgcgtgcattgtactctcctttatcaaccagtttttctggtacagaacgatgccgttgagtatcaccggaatctccgctcagatcgccgtcgtgccgcttggtcatctcatggcgagagtgcttccgacaaaaagattcttggaaggtacgaggtttcagtttaccttaaacccgggtgccttcaacgtcaaggaacatgttctgataactatctttgcaaattccggcgccggctctgtttacgctactcacatacttagtgctattaagctttactacaaacgttctcttcctttcctccctgcatttctcgtcatgatcaccactcagattcttggatttggttgggctggtctcttcaggaaacaccttgttgagcctggtgaaatgtggtggccaagcaatcttgttcaagtctctctctttggtgcgttacacgagaaagaaaagaaatcaagaggaggcatgagtagaactcaattcttcttaatcgtcctcgtagctagctttgcttactacatctttcctggttatcttttcaccatgttaacatcaatctcatgggtctgttggctcaatcccaaatcaattctggtaaaccaactcggttcaggtgaacatggtcttggcattggttccattggttttgattgggtcactattagtgcttatcttggaagccctttagctagtcctttgttcgcttccgtcaatgtagccattggtttcgtgctggttatgtatatcgtcacgcctgtttgttactggcttaacatttatgatgccaagaccttccctatcttctctagtcagctcttcatggggaatggctcacgttatgatgttttgagcattattgatagcaaattccatcttgaccgtgtggtttactctaggaccgggtccatcaatatgagcaccttctttgctgttacttatggtctcgggtttgctacattgtctgccaccattgtccatgttttagtcttcaacggaagtgacttgtggaagcagacaagaggggcgtttcagaagaataagaaaatggatatacacacgagaatcatgaagaaaaactacagggaagttccattgtggtggtttttggtaatccttttactgaatatcgcgcttatcatgttcatctccgtgcactacaacgctactgtgcagcttccttggtggggagtgttacttgcttgtgccattgccatcagtttcactcctttgatcggtgtcatagctgccaccactaatcaggcaccgggattgaatatcataacagagtatgttatcgggtatatctacccggaacgtcctgttgcaaacatgtgtttcaaggtctatggatacattagtatgactcaagcgctaactttcatttccgacttcaagcttggtcattacatgaagatcccgcctagatccatgttcatggctcaggtggctgggacacttgtggcggtggttgtgtacacaggaacagcctggtggttaatggaagagattcctcatctttgtgatacatccttgcttccttcagacagccaatggacttgtcccatggaccgcgttttctttgacgcctctgtgatttggggactagtgggaccacgcagggtgtttggagaccttggagaatactcaaatgtcaactggttcttcctcgttggagccatagctccactcttagtttggctagccacaaagatgtttccggctcagacatggatcgccaagattcatatccctgtccttgtgggagccaccgcaatgatgccaccagcaacagcagttaacttcactagttggctcatcgtcgcattcatctttggccacttcatcttcaagtacagaagagtgtggtggaccaagtataactatgtgttgtctggtggtttagatgctggctctgcttttatgaccatacttctgtttctagcactcggacgaaaaggaattgaagtgcagtggtggggaaattccggcgaccgagatacatgtcccttagcttcttgtccaactgctaaaggtgttgtcgtcaaaggctgtcccgtcttctagctcatgagtcatgagacaaaagcatataccaagtgctttgtacagaacacacagcaaactgataattgtaattctcggaaatgtctttactctccaagaactatatcttttgtgatagctttaaaactaggtactatcctgttctttgactgaacacaaatgctagtgattctatatgtggttccttaaaatgattttaatgcatgcttc

SEQ ID NO: 39470 - protein, 671 aa, Arabidopsis thaliana
  peptide (1)..(671): Ceres Seq. ID no. 13504840
  misc_feature (1)..(658): Homolog of NCBI NO: 19115899 NR Description: putative pheromone response and mating-type
  misc_feature (1)..(651): Homolog of NCBI NO: 19112445 NR Description: sexual differentiation process protein isp4
  misc_feature (11)..(547): Homolog of NCBI NO: 18414644 NR Description: isp4 like protein [Arabidopsis thaliana]
  misc_feature (11)..(547): Homolog of NCBI NO: 7485100 NR Description: hypothetical protein - Arabidopsis thaliana
  misc_feature (11)..(671): Homolog of NCBI NO: 30722286 NR Description: glutathione transporter GT1 [Brassica juncea]
  misc_feature (1)..(671): Homolog of NCBI NO: 15218331 NR Description: hypothetical protein [Arabidopsis thaliana]
  misc_feature (1)..(670): Homolog of NCBI NO: 25553564 NR Description: putative isp4 protein [Oryza sativa (japonica
  misc_feature (1)..(671): Homolog of NCBI NO: 15236912 NR Description: oligopeptide transporter -related [Arabidopsis
  misc_feature (1)..(671): Homolog of NCBI NO: 34898010 NR Description: EST D25093(R3139) corresponds to a region of the
  misc_feature (1)..(671): Homolog of NCBI NO: 15238763 NR Description: isp4 protein [Arabidopsis thaliana]
  misc_feature (1)..(658): Homolog of NCBI NO: 19115899 NR Description: putative pheromone response and mating-type
  misc_feature (1)..(651): Homolog of NCBI NO: 19112445 NR Description: sexual differentiation process protein isp4
  misc_feature (11)..(547): Homolog of NCBI NO: 18414644 NR Description: isp4 like protein [Arabidopsis thaliana]
  misc_feature (11)..(547): Homolog of NCBI NO: 7485100 NR Description: hypothetical protein - Arabidopsis thaliana
  misc_feature (11)..(671): Homolog of NCBI NO: 30722286 NR Description: glutathione transporter GT1 [Brassica juncea]
  misc_feature (1)..(671): Homolog of NCBI NO: 15218331 NR Description: hypothetical protein [Arabidopsis thaliana]
  misc_feature (1)..(670): Homolog of NCBI NO: 25553564 NR Description: putative isp4 protein [Oryza sativa (japonica
  misc_feature (1)..(671): Homolog of NCBI NO: 15236912 NR Description: oligopeptide transporter -related [Arabidopsis
  misc_feature (1)..(671): Homolog of NCBI NO: 34898010 NR Description: EST D25093(R3139) corresponds to a region of the
  misc_feature (1)..(671): Homolog of NCBI NO: 15238763 NR Description: isp4 protein [Arabidopsis thaliana]
MPLSITGISAQIAVVPLGHLMARVLPTKRFLEGTRFQFTLNPGAFNVKEHVLITIFANSGAGSVYATHILSAIKLYYKRSLPFLPAFLVMITTQILGFGWAGLFRKHLVEPGEMWWPSNLVQVSLFGALHEKEKKSRGGMSRTQFFLIVLVASFAYYIFPGYLFTMLTSISWVCWLNPKSILVNQLGSGEHGLGIGSIGFDWVTISAYLGSPLASPLFASVNVAIGFVLVMYIVTPVCYWLNIYDAKTFPIFSSQLFMGNGSRYDVLSIIDSKFHLDRVVYSRTGSINMSTFFAVTYGLGFATLSATIVHVLVFNGSDLWKQTRGAFQKNKKMDIHTRIMKKNYREVPLWWFLVILLLNIALIMFISVHYNATVQLPWWGVLLACAIAISFTPLIGVIAATTNQAPGLNIITEYVIGYIYPERPVANMCFKVYGYISMTQALTFISDFKLGHYMKIPPRSMFMAQVAGTLVAVVVYTGTAWWLMEEIPHLCDTSLLPSDSQWTCPMDRVFFDASVIWGLVGPRRVFGDLGEYSNVNWFFLVGAIAPLLVWLATKMFPAQTWIAKIHIPVLVGATAMMPPATAVNFTSWLIVAFIFGHFIFKYRRVWWTKYNYVLSGGLDAGSAFMTILLFLALGRKGIEVQWWGNSGDRDTCPLASCPTAKGVVVKGCPVF

SEQ ID NO: 39471 - protein, 651 aa, Arabidopsis thaliana
  peptide (1)..(651): Ceres Seq. ID no. 13504841
  misc_feature (1)..(638): Homolog of NCBI NO: 19115899 NR Description: putative pheromone response and mating-type
  misc_feature (1)..(631): Homolog of NCBI NO: 19112445 NR Description: sexual differentiation process protein isp4
  misc_feature (1)..(527): Homolog of NCBI NO: 18414644 NR Description: isp4 like protein [Arabidopsis thaliana]
  misc_feature (1)..(527): Homolog of NCBI NO: 7485100 NR Description: hypothetical protein - Arabidopsis thaliana
  misc_feature (1)..(651): Homolog of NCBI NO: 30722286 NR Description: glutathione transporter GT1 [Brassica juncea]
  misc_feature (1)..(651): Homolog of NCBI NO: 15218331 NR Description: hypothetical protein [Arabidopsis thaliana]
  misc_feature (1)..(650): Homolog of NCBI NO: 25553564 NR Description: putative isp4 protein [Oryza sativa (japonica
  misc_feature (1)..(651): Homolog of NCBI NO: 15236912 NR Description: oligopeptide transporter -related [Arabidopsis
  misc_feature (1)..(651): Homolog of NCBI NO: 34898010 NR Description: EST D25093(R3139) corresponds to a region of the
  misc_feature (1)..(651): Homolog of NCBI NO: 15238763 NR Description: isp4 protein [Arabidopsis thaliana]
  misc_feature (1)..(638): Homolog of NCBI NO: 19115899 NR Description: putative pheromone response and mating-type
  misc_feature (1)..(631): Homolog of NCBI NO: 19112445 NR Description: sexual differentiation process protein isp4
  misc_feature (1)..(527): Homolog of NCBI NO: 18414644 NR Description: isp4 like protein [Arabidopsis thaliana]
  misc_feature (1)..(527): Homolog of NCBI NO: 7485100 NR Description: hypothetical protein - Arabidopsis thaliana
  misc_feature (1)..(651): Homolog of NCBI NO: 30722286 NR Description: glutathione transporter GT1 [Brassica juncea]
  misc_feature (1)..(651): Homolog of NCBI NO: 15218331 NR Description: hypothetical protein [Arabidopsis thaliana]
  misc_feature (1)..(650): Homolog of NCBI NO: 25553564 NR Description: putative isp4 protein [Oryza sativa (japonica
  misc_feature (1)..(651): Homolog of NCBI NO: 15236912 NR Description: oligopeptide transporter -related [Arabidopsis
  misc_feature (1)..(651): Homolog of NCBI NO: 34898010 NR Description: EST D25093(R3139) corresponds to a region of the
  misc_feature (1)..(651): Homolog of NCBI NO: 15238763 NR Description: isp4 protein [Arabidopsis thaliana]
MARVLPTKRFLEGTRFQFTLNPGAFNVKEHVLITIFANSGAGSVYATHILSAIKLYYKRSLPFLPAFLVMITTQILGFGWAGLFRKHLVEPGEMWWPSNLVQVSLFGALHEKEKKSRGGMSRTQFFLIVLVASFAYYIFPGYLFTMLTSISWVCWLNPKSILVNQLGSGEHGLGIGSIGFDWVTISAYLGSPLASPLFASVNVAIGFVLVMYIVTPVCYWLNIYDAKTFPIFSSQLFMGNGSRYDVLSIIDSKFHLDRVVYSRTGSINMSTFFAVTYGLGFATLSATIVHVLVFNGSDLWKQTRGAFQKNKKMDIHTRIMKKNYREVPLWWFLVILLLNIALIMFISVHYNATVQLPWWGVLLACAIAISFTPLIGVIAATTNQAPGLNIITEYVIGYIYPERPVANMCFKVYGYISMTQALTFISDFKLGHYMKIPPRSMFMAQVAGTLVAVVVYTGTAWWLMEEIPHLCDTSLLPSDSQWTCPMDRVFFDASVIWGLVGPRRVFGDLGEYSNVNWFFLVGAIAPLLVWLATKMFPAQTWIAKIHIPVLVGATAMMPPATAVNFTSWLIVAFIFGHFIFKYRRVWWTKYNYVLSGGLDAGSAFMTILLFLALGRKGIEVQWWGNSGDRDTCPLASCPTAKGVVVKGCPVF

SEQ ID NO: 39472 - protein, 582 aa, Arabidopsis thaliana
  peptide (1)..(582): Ceres Seq. ID no. 13504842
  misc_feature (1)..(569): Homolog of NCBI NO: 19115899 NR Description: putative pheromone response and mating-type
  misc_feature (1)..(562): Homolog of NCBI NO: 19112445 NR Description: sexual differentiation process protein isp4
  misc_feature (1)..(458): Homolog of NCBI NO: 18414644 NR Description: isp4 like protein [Arabidopsis thaliana]
  misc_feature (1)..(458): Homolog of NCBI NO: 7485100 NR Description: hypothetical protein - Arabidopsis thaliana
  misc_feature (1)..(582): Homolog of NCBI NO: 30722286 NR Description: glutathione transporter GT1 [Brassica juncea]
  misc_feature (1)..(582): Homolog of NCBI NO: 15218331 NR Description: hypothetical protein [Arabidopsis thaliana]
  misc_feature (1)..(581): Homolog of NCBI NO: 25553564 NR Description: putative isp4 protein [Oryza sativa (japonica
  misc_feature (1)..(582): Homolog of NCBI NO: 15236912 NR Description: oligopeptide transporter -related [Arabidopsis
  misc_feature (1)..(582): Homolog of NCBI NO: 34898010 NR Description: EST D25093(R3139) corresponds to a region of the
  misc_feature (1)..(582): Homolog of NCBI NO: 15238763 NR Description: isp4 protein [Arabidopsis thaliana]
  misc_feature (1)..(569): Homolog of NCBI NO: 19115899 NR Description: putative pheromone response and mating-type
  misc_feature (1)..(562): Homolog of NCBI NO: 19112445 NR Description: sexual differentiation process protein isp4
  misc_feature (1)..(458): Homolog of NCBI NO: 18414644 NR Description: isp4 like protein [Arabidopsis thaliana]
  misc_feature (1)..(458): Homolog of NCBI NO: 7485100 NR Description: hypothetical protein - Arabidopsis thaliana
  misc_feature (1)..(582): Homolog of NCBI NO: 30722286 NR Description: glutathione transporter GT1 [Brassica juncea]
  misc_feature (1)..(582): Homolog of NCBI NO: 15218331 NR Description: hypothetical protein [Arabidopsis thaliana]
  misc_feature (1)..(581): Homolog of NCBI NO: 25553564 NR Description: putative isp4 protein [Oryza sativa (japonica
  misc_feature (1)..(582): Homolog of NCBI NO: 15236912 NR Description: oligopeptide transporter -related [Arabidopsis
  misc_feature (1)..(582): Homolog of NCBI NO: 34898010 NR Description: EST D25093(R3139) corresponds to a region of the
  misc_feature (1)..(582): Homolog of NCBI NO: 15238763 NR Description: isp4 protein [Arabidopsis thaliana]
MITTQILGFGWAGLFRKHLVEPGEMWWPSNLVQVSLFGALHEKEKKSRGGMSRTQFFLIVLVASFAYYIFPGYLFTMLTSISWVCWLNPKSILVNQLGSGEHGLGIGSIGFDWVTISAYLGSPLASPLFASVNVAIGFVLVMYIVTPVCYWLNIYDAKTFPIFSSQLFMGNGSRYDVLSIIDSKFHLDRVVYSRTGSINMSTFFAVTYGLGFATLSATIVHVLVFNGSDLWKQTRGAFQKNKKMDIHTRIMKKNYREVPLWWFLVILLLNIALIMFISVHYNATVQLPWWGVLLACAIAISFTPLIGVIAATTNQAPGLNIITEYVIGYIYPERPVANMCFKVYGYISMTQALTFISDFKLGHYMKIPPRSMFMAQVAGTLVAVVVYTGTAWWLMEEIPHLCDTSLLPSDSQWTCPMDRVFFDASVIWGLVGPRRVFGDLGEYSNVNWFFLVGAIAPLLVWLATKMFPAQTWIAKIHIPVLVGATAMMPPATAVNFTSWLIVAFIFGHFIFKYRRVWWTKYNYVLSGGLDAGSAFMTILLFLALGRKGIEVQWWGNSGDRDTCPLASCPTAKGVVVKGCPVF

SEQ ID NO: 39473 - DNA, 1435 bp, Arabidopsis thaliana
  misc_feature (1)..(1435): Ceres Seq. ID no. 12562265
  misc_feature: MA Experiment ID: 108489 Result: Down-regulated in Transcription
  misc_feature: MA Experiment ID: 108573 Result: Down-regulated in Transcription
  misc_feature: MA Experiment 108573 PARAMETER Experiment Name: At_Drought_cDNA_P Parameter: Timepoint (hr) Value: 6
  misc_feature: MA Experiment 108573 PARAMETER Experiment Name: At_Drought_cDNA_P Parameter: Tissue Value: Aerial
  misc_feature: MA Experiment 108573 PARAMETER Experiment Name: At_Drought_cDNA_P Parameter: Treatment Value: Drought vs. No Drought
  misc_feature: MA Experiment ID: 108595 Result: Down-regulated in Transcription
  misc_feature: MA Experiment 108595 PARAMETER Experiment Name: At_Ler-pi_Ovule_cDNA_P Parameter: Plant Line Value: null
  misc_feature: MA Experiment ID: 108668 Result: Up-regulated in Transcription
  misc_feature: MA Experiment 108668 PARAMETER Experiment Name: At_2mM_SA_cDNA_P Parameter: Plant Line Value: WS
  misc_feature: MA Experiment 108668 PARAMETER Experiment Name: At_2mM_SA_cDNA_P Parameter: Timepoint (hr) Value: 6
  misc_feature: MA Experiment 108668 PARAMETER Experiment Name: At_2mM_SA_cDNA_P Parameter: Treatment Value: 2mM SA vs. No Treatment
  misc_feature: MA Experiment ID: 20000090 Result: Up-regulated in Transcription
  misc_feature: MA Experiment ID: 20000111 Result: Down-regulated in Transcription
  misc_feature: MA Experiment 20000111 PARAMETER Experiment Name: At_42deg_Heat_cDNA_P Parameter: Temperature (deg C) Value: 42 vs. 22
  misc_feature: MA Experiment 20000111 PARAMETER Experiment Name: At_42deg_Heat_cDNA_P Parameter: Timepoint (hr) Value: 6
  misc_feature: MA Experiment 20000111 PARAMETER Experiment Name: At_42deg_Heat_cDNA_P Parameter: Tissue Value: Aerial
  misc_feature: MA Experiment ID: 20000113 Result: Down-regulated in Transcription
  misc_feature: MA Experiment 20000113 PARAMETER Experiment Name: At_42deg_Heat_cDNA_P Parameter: Temperature (deg C) Value: 42 vs. 22
  misc_feature: MA Experiment 20000113 PARAMETER Experiment Name: At_42deg_Heat_cDNA_P Parameter: Timepoint (hr) Value: 8
  misc_feature: MA Experiment 20000113 PARAMETER Experiment Name: At_42deg_Heat_cDNA_P Parameter: Tissue Value: Aerial
  misc_feature: MA Experiment ID: 20000173 Result: Down-regulated in Transcription
  misc_feature: MA Experiment 20000173 PARAMETER Experiment Name: At_42deg_Heat_P Parameter: Age (day) Value: 14
  misc_feature: MA Experiment 20000173 PARAMETER Experiment Name: At_42deg_Heat_P Parameter: Organism Value: A. thaliana
  misc_feature: MA Experiment 20000173 PARAMETER Experiment Name: At_42deg_Heat_P Parameter: Plant Line Value: WS
  misc_feature: MA Experiment 20000173 PARAMETER Experiment Name: At_42deg_Heat_P Parameter: Temperature (deg C) Value: 42 vs. 22
  misc_feature: MA Experiment 20000173 PARAMETER Experiment Name: At_42deg_Heat_P Parameter: Timepoint (hr) Value: 6
  misc_feature: MA Experiment 20000173 PARAMETER Experiment Name: At_42deg_Heat_P Parameter: Tissue Value: Aerial
  misc_feature: MA Experiment ID: 20000182 Result: Up-regulated in Transcription
  misc_feature: MA Experiment 20000182 PARAMETER Experiment Name: At_2mM_SA_P Parameter: Age (day) Value: 14
  misc_feature: MA Experiment 20000182 PARAMETER Experiment Name: At_2mM_SA_P Parameter: Organism Value: A. thaliana
  misc_feature: MA Experiment 20000182 PARAMETER Experiment Name: At_2mM_SA_P Parameter: Plant Line Value: WS
  misc_feature: MA Experiment 20000182 PARAMETER Experiment Name: At_2mM_SA_P Parameter: Timepoint (hr) Value: 6
  misc_feature: MA Experiment 20000182 PARAMETER Experiment Name: At_2mM_SA_P Parameter: Tissue Value: Aerial
  misc_feature: MA Experiment 20000182 PARAMETER Experiment Name: At_2mM_SA_P Parameter: Treatment Value: 2mM SA vs. No Treatment
  misc_feature: MA Experiment ID: 20000184 Result: Down-regulated in Transcription
  misc_feature: MA Experiment 20000184 PARAMETER Experiment Name: At_Shoots__P Parameter: Age (day) Value: 7
  misc_feature: MA Experiment 20000184 PARAMETER Experiment Name: At_Shoots__P Parameter: Tissue Value: Shoots vs. Whole Plant
  misc_feature: MA Experiment ID: 20000185 Result: Down-regulated in Transcription
  misc_feature: MA Experiment 20000185 PARAMETER Experiment Name: At_Roots__P Parameter: Age (day) Value: 7 vs. 21
  misc_feature: MA Experiment 20000185 PARAMETER Experiment Name: At_Roots__P Parameter: Organism Value: A. thaliana
  misc_feature: MA Experiment 20000185 PARAMETER Experiment Name: At_Roots__P Parameter: Tissue Value: Roots vs. Whole Plant
  misc_feature: MA Experiment ID: 20000227 Result: Up-regulated in Transcription
  misc_feature: MA Experiment 20000227 PARAMETER Experiment Name: At_Root-Tips-vs-Tops_P Parameter: Tissue Value: Root Tips vs. Root Tops
  misc_feature: MA Experiment ID: 20000234 Result: Down-regulated in Transcription
  misc_feature: MA Experiment 20000234 PARAMETER Experiment Name: At_Siliques_P Parameter: Age (day) Value: 21
  misc_feature: MA Experiment 20000234 PARAMETER Experiment Name: At_Siliques_P Parameter: Organism Value: A. thaliana
  misc_feature: MA Experiment 20000234 PARAMETER Experiment Name: At_Siliques_P Parameter: Plant Line Value: WS
  misc_feature: MA Experiment 20000234 PARAMETER Experiment Name: At_Siliques_P Parameter: Tissue Value: Less Than 5mm Siliques vs. Whole Plant
  misc_feature: MA Experiment ID: 20000264 Result: Down-regulated in Transcription
  misc_feature: MA Experiment 20000264 PARAMETER Experiment Name: At_Open_Flower_P Parameter: Age (day) Value: 21
  misc_feature: MA Experiment 20000264 PARAMETER Experiment Name: At_Open_Flower_P Parameter: Plant Line Value: WS
  misc_feature: MA Experiment 20000264 PARAMETER Experiment Name: At_Open_Flower_P Parameter: Tissue Value: Open Flower vs. Whole Plant
  misc_feature: MA Experiment ID: 20000265 Result: Down-regulated in Transcription
  misc_feature: MA Experiment 20000265 PARAMETER Experiment Name: At_Open_Flower_P Parameter: Age (day) Value: 21
  misc_feature: MA Experiment 20000265 PARAMETER Experiment Name: At_Open_Flower_P Parameter: Plant Line Value: WS
  misc_feature: MA Experiment 20000265 PARAMETER Experiment Name: At_Open_Flower_P Parameter: Tissue Value: Closed Flower vs. Whole Plant
  misc_feature: MA Experiment ID: 20000286 Result: Down-regulated in Transcription
  misc_feature: MA Experiment 20000286 PARAMETER Experiment Name: At_Open_Flower_P Parameter: Age (day) Value: 21
  misc_feature: MA Experiment 20000286 PARAMETER Experiment Name: At_Open_Flower_P Parameter: Plant Line Value: WS
  misc_feature: MA Experiment 20000286 PARAMETER Experiment Name: At_Open_Flower_P Parameter: Tissue Value: Half Open vs. Whole Plant
  misc_feature: MA Experiment ID: 20000438 Result: Down-regulated in Transcription
  misc_feature: MA Experiment 20000438 PARAMETER Experiment Name: At_Shoots__P Parameter: Age (day) Value: 14
  misc_feature: MA Experiment 20000438 PARAMETER Experiment Name: At_Shoots__P Parameter: Tissue Value: Shoots vs. Whole Plant
  misc_feature: MA Experiment ID: 20000439 Result: Down-regulated in Transcription
  misc_feature: MA Experiment 20000439 PARAMETER Experiment Name: At_Roots__P Parameter: Age (day) Value: 14 vs. 21
  misc_feature: MA Experiment 20000439 PARAMETER Experiment Name: At_Roots__P Parameter: Organism Value: A. thaliana
  misc_feature: MA Experiment 20000439 PARAMETER Experiment Name: At_Roots__P Parameter: Tissue Value: Roots vs. Whole Plant
  misc_feature: MA Experiment ID: 20000527 Result: Down-regulated in Transcription
  misc_feature: MA Experiment 20000527 PARAMETER Experiment Name: At_10percent_PEG_P Parameter: Age (day) Value: 20
  misc_feature: MA Experiment 20000527 PARAMETER Experiment Name: At_10percent_PEG_P Parameter: Organism Value: A. thaliana
  misc_feature: MA Experiment 20000527 PARAMETER Experiment Name: At_10percent_PEG_P Parameter: Plant Line Value: WS
  misc_feature: MA Experiment 20000527 PARAMETER Experiment Name: At_10percent_PEG_P Parameter: Timepoint (day) Value: 20
  misc_feature: MA Experiment 20000527 PARAMETER Experiment Name: At_10percent_PEG_P Parameter: Tissue Value: Whole Plant
  misc_feature: MA Experiment 20000527 PARAMETER Experiment Name: At_10percent_PEG_P Parameter: Treatment Value: 10percent PEG vs. No Treatment
  misc_feature: MA Experiment ID: 20001555 Result: Down-regulated in Transcription
  misc_feature: MA Experiment 20001555 PARAMETER Experiment Name: At_Drought_Soil_Dry_P Parameter: Age (day) Value: 24
  misc_feature: MA Experiment 20001555 PARAMETER Experiment Name: At_Drought_Soil_Dry_P Parameter: Organism Value: A. thaliana
  misc_feature: MA Experiment 20001555 PARAMETER Experiment Name: At_Drought_Soil_Dry_P Parameter: Plant Line Value: WS
  misc_feature: MA Experiment 20001555 PARAMETER Experiment Name: At_Drought_Soil_Dry_P Parameter: Post Timepoint (hr) Value: None
  misc_feature: MA Experiment 20001555 PARAMETER Experiment Name: At_Drought_Soil_Dry_P Parameter: Post-Treatment Value: None
  misc_feature: MA Experiment 20001555 PARAMETER Experiment Name: At_Drought_Soil_Dry_P Parameter: Timepoint (day) Value: 10
  misc_feature: MA Experiment 20001555 PARAMETER Experiment Name: At_Drought_Soil_Dry_P Parameter: Treatment Value: Drought vs. No Drought
  misc_feature: MA Experiment ID: 20001556 Result: Down-regulated in Transcription
  misc_feature: MA Experiment 20001556 PARAMETER Experiment Name: At_Drought_Soil_Dry_P Parameter: Age (day) Value: 26
  misc_feature: MA Experiment 20001556 PARAMETER Experiment Name: At_Drought_Soil_Dry_P Parameter: Organism Value: A. thaliana
  misc_feature: MA Experiment 20001556 PARAMETER Experiment Name: At_Drought_Soil_Dry_P Parameter: Plant Line Value: WS
  misc_feature: MA Experiment 20001556 PARAMETER Experiment Name: At_Drought_Soil_Dry_P Parameter: Post Timepoint (hr) Value: None
  misc_feature: MA Experiment 20001556 PARAMETER Experiment Name: At_Drought_Soil_Dry_P Parameter: Post-Treatment Value: None
  misc_feature: MA Experiment 20001556 PARAMETER Experiment Name: At_Drought_Soil_Dry_P Parameter: Timepoint (day) Value: 12
  misc_feature: MA Experiment 20001556 PARAMETER Experiment Name: At_Drought_Soil_Dry_P Parameter: Treatment Value: Drought vs. No Drought
  misc_feature: MA Experiment ID: 20001557 Result: Down-regulated in Transcription
  misc_feature: MA Experiment 20001557 PARAMETER Experiment Name: At_Drought_Soil_Dry_P Parameter: Age (day) Value: 27
  misc_feature: MA Experiment 20001557 PARAMETER Experiment Name: At_Drought_Soil_Dry_P Parameter: Organism Value: A. thaliana
  misc_feature: MA Experiment 20001557 PARAMETER Experiment Name: At_Drought_Soil_Dry_P Parameter: Plant Line Value: WS
  misc_feature: MA Experiment 20001557 PARAMETER Experiment Name: At_Drought_Soil_Dry_P Parameter: Post Timepoint (hr) Value: 3
  misc_feature: MA Experiment 20001557 PARAMETER Experiment Name: At_Drought_Soil_Dry_P Parameter: Post-Treatment Value: Re-Water vs. No Drought
  misc_feature: MA Experiment 20001557 PARAMETER Experiment Name: At_Drought_Soil_Dry_P Parameter: Timepoint (day) Value: 13
  misc_feature: MA Experiment 20001557 PARAMETER Experiment Name: At_Drought_Soil_Dry_P Parameter: Treatment Value: Drought vs. No Drought
  misc_feature: MA Experiment ID: 20001558 Result: Down-regulated in Transcription
  misc_feature: MA Experiment 20001558 PARAMETER Experiment Name: At_Drought_Soil_Dry_P Parameter: Age (day) Value: 27
  misc_feature: MA Experiment 20001558 PARAMETER Experiment Name: At_Drought_Soil_Dry_P Parameter: Organism Value: A. thaliana
  misc_feature: MA Experiment 20001558 PARAMETER Experiment Name: At_Drought_Soil_Dry_P Parameter: Plant Line Value: WS
  misc_feature: MA Experiment 20001558 PARAMETER Experiment Name: At_Drought_Soil_Dry_P Parameter: Post Timepoint (hr) Value: 6
  misc_feature: MA Experiment 20001558 PARAMETER Experiment Name: At_Drought_Soil_Dry_P Parameter: Post-Treatment Value: Re-Water vs. No Drought
  misc_feature: MA Experiment 20001558 PARAMETER Experiment Name: At_Drought_Soil_Dry_P Parameter: Timepoint (day) Value: 13
  misc_feature: MA Experiment 20001558 PARAMETER Experiment Name: At_Drought_Soil_Dry_P Parameter: Treatment Value: Drought vs. No Drought
atgatgaagtgagaaattctgaaaaatgggattacctcaaaataagctcagttttttctgcttcttcttcctcgtctctgtactaactcttgccccattggctttctccgagatcttcttagaggagcatttcgaaggtggatggaaaagtaggtgggtcttgtctgattggaaaagaaacgaaggcaaagctggaacctttaagcacactgccggtaaatggcccggcgatcctgacaataaaggtattcagacttataatgatgccaagcattatgcgatttctgcaaagattcctgagtttagcaacaaaaaccggactcttgttgtccagtactcagtcaagattgaacaagacattgaatgtggtggtgcttacattaagctcctgtctggctatgttaaccagaagcagtttggtggtgatactccatacagtctaatgtttggaccagatatatgcggaacacagacgaagaagcttcatgttatagtttcatatcagggacagaattatccaatcaaaaaggatttgcaatgtgaaacagacaaattaaatcatttctacacatttattctgcgtcctgacgcttcttacagcgttctggtggataataaagagagagaatttggcagtatgtacacagactgggacatccttcctccaaggaagatcaaggtcaagaatgcaaagaagccagaggactgggatgatagagagtacatcgatgaccccaacgatgtcaaacccgagggttttgattctattccacgtgaaattccagatcgtaaagctaaagagcccgaggactgggacgaggaagaaaatggtctctgggaacctccaaagatcccaaattctgcgtacaaaggtccttggaaagcaaagagaatcaagaacccgaactacaagggaaaatggaagaacccatggatagataatccagaatttgaagatgatccagatctttacgttctgaagtctatcaaatatgcaggcattgaagtatggcaggtgaaggctggctcaatctttgacaatatattgatctgcgatgacccggcatatgcaagaagcatcgtggatgactattttgcccaacacagggagtctgagaaggagttatttgcggaagcagagaaagaaagaaaagctagagaagatgaggaagctcggatagcacgggaagaaggtgaacgcaggcggaaagaaagggaccaccggtatggagacaggaggaggcgttacaaacggccgaatccacgtgattatatggatgattaccatgacgagctatgaggcgcagagtggtgggcatttggcaaagcattgggggaaattatctatattttgctttgaatgtgtgtttgtaatttcataatttgtaaccttttgtattcatattcttataatgtattttggcatgaaaacttg

SEQ ID NO: 39474 - protein, 424 aa, Arabidopsis thaliana
  peptide (1)..(424): Ceres Seq. ID no. 12562266
  misc_feature (30)..(342): Pfam Name: Calreticulin family Pfam Description: Calreticulin family
  misc_feature (30)..(342): Pfam Name: Calreticulin family Pfam Description: Calreticulin family
  misc_feature (19)..(424): Homolog of NCBI NO: 11131745 NR Description: Calreticulin precursor
  misc_feature (13)..(424): Homolog of NCBI NO: 11131631 NR Description: Calreticulin precursor
  misc_feature (15)..(423): Homolog of NCBI NO: 9858814 NR Description: calreticulin [Pinus taeda]
  misc_feature (356)..(381): Homolog of NCBI NO: 6664320 NR Description: T27G7.13 [Arabidopsis thaliana]
  misc_feature (381)..(421): Homolog of NCBI NO: 6664320 NR Description: T27G7.13 [Arabidopsis thaliana]
  misc_feature (19)..(424): Homolog of NCBI NO: 11131745 NR Description: Calreticulin precursor
  misc_feature (15)..(423): Homolog of NCBI NO: 9858814 NR Description: calreticulin [Pinus taeda]
  misc_feature (381)..(421): Homolog of NCBI NO: 6664320 NR Description: T27G7.13 [Arabidopsis thaliana]
  misc_feature (1)..(424): Homolog of NCBI NO: 18390896 NR Description: calreticulin, putative
  misc_feature (1)..(424): Homolog of NCBI NO: 27311777 NR Description: calreticulin, putative [Arabidopsis thaliana]
  misc_feature (1)..(424): Homolog of NCBI NO: 12643531 NR Description: Calreticulin 3 precursor
  misc_feature (74)..(288): Homolog of NCBI NO: 6664320 NR Description: T27G7.13 [Arabidopsis thaliana]
  misc_feature (1)..(74): Homolog of NCBI NO: 6664320 NR Description: T27G7.13 [Arabidopsis thaliana]
  misc_feature (356)..(381): Homolog of NCBI NO: 6664320 NR Description: T27G7.13 [Arabidopsis thaliana]
  misc_feature (13)..(424): Homolog of NCBI NO: 11131631 NR Description: Calreticulin precursor
  misc_feature (1)..(74): Homolog of NCBI NO: 6664320 NR Description: T27G7.13 [Arabidopsis thaliana]
  misc_feature (74)..(288): Homolog of NCBI NO: 6664320 NR Description: T27G7.13 [Arabidopsis thaliana]
  misc_feature (1)..(424): Homolog of NCBI NO: 12643531 NR Description: Calreticulin 3 precursor
  misc_feature (1)..(424): Homolog of NCBI NO: 27311777 NR Description: calreticulin, putative [Arabidopsis thaliana]
  misc_feature (1)..(424): Homolog of NCBI NO: 18390896 NR Description: calreticulin, putative
MGLPQNKLSFFCFFFLVSVLTLAPLAFSEIFLEEHFEGGWKSRWVLSDWKRNEGKAGTFKHTAGKWPGDPDNKGIQTYNDAKHYAISAKIPEFSNKNRTLVVQYSVKIEQDIECGGAYIKLLSGYVNQKQFGGDTPYSLMFGPDICGTQTKKLHVIVSYQGQNYPIKKDLQCETDKLNHFYTFILRPDASYSVLVDNKEREFGSMYTDWDILPPRKIKVKNAKKPEDWDDREYIDDPNDVKPEGFDSIPREIPDRKAKEPEDWDEEENGLWEPPKIPNSAYKGPWKAKRIKNPNYKGKWKNPWIDNPEFEDDPDLYVLKSIKYAGIEVWQVKAGSIFDNILICDDPAYARSIVDDYFAQHRESEKELFAEAEKERKAREDEEARIAREEGERRRKERDHRYGDRRRRYKRPNPRDYMDDYHDEL

SEQ ID NO: 39475 - protein, 285 aa, Arabidopsis thaliana
  peptide (1)..(285): Ceres Seq. ID no. 12562267
  misc_feature (1)..(203): Pfam Name: Calreticulin family Pfam Description: Calreticulin family
  misc_feature (1)..(203): Pfam Name: Calreticulin family Pfam Description: Calreticulin family
  misc_feature (1)..(285): Homolog of NCBI NO: 11131769 NR Description: Calreticulin precursor
  misc_feature (1)..(285): Homolog of NCBI NO: 11131745 NR Description: Calreticulin precursor
  misc_feature (1)..(285): Homolog of NCBI NO: 11131631 NR Description: Calreticulin precursor
  misc_feature (1)..(284): Homolog of NCBI NO: 9858814 NR Description: calreticulin [Pinus taeda]
  misc_feature (217)..(242): Homolog of NCBI NO: 6664320 NR Description: T27G7.13 [Arabidopsis thaliana]
  misc_feature (1)..(285): Homolog of NCBI NO: 11131769 NR Description: Calreticulin precursor
  misc_feature (1)..(285): Homolog of NCBI NO: 11131631 NR Description: Calreticulin precursor
  misc_feature (217)..(242): Homolog of NCBI NO: 6664320 NR Description: T27G7.13 [Arabidopsis thaliana]
  misc_feature (1)..(285): Homolog of NCBI NO: 18390896 NR Description: calreticulin, putative
  misc_feature (1)..(285): Homolog of NCBI NO: 27311777 NR Description: calreticulin, putative [Arabidopsis thaliana]
  misc_feature (1)..(285): Homolog of NCBI NO: 12643531 NR Description: Calreticulin 3 precursor
  misc_feature (1)..(149): Homolog of NCBI NO: 6664320 NR Description: T27G7.13 [Arabidopsis thaliana]
  misc_feature (242)..(282): Homolog of NCBI NO: 6664320 NR Description: T27G7.13 [Arabidopsis thaliana]
  misc_feature (1)..(284): Homolog of NCBI NO: 9858814 NR Description: calreticulin [Pinus taeda]
  misc_feature (1)..(285): Homolog of NCBI NO: 11131745 NR Description: Calreticulin precursor
  misc_feature (242)..(282): Homolog of NCBI NO: 6664320 NR Description: T27G7.13 [Arabidopsis thaliana]
  misc_feature (1)..(149): Homolog of NCBI NO: 6664320 NR Description: T27G7.13 [Arabidopsis thaliana]
  misc_feature (1)..(285): Homolog of NCBI NO: 12643531 NR Description: Calreticulin 3 precursor
  misc_feature (1)..(285): Homolog of NCBI NO: 27311777 NR Description: calreticulin, putative [Arabidopsis thaliana]
  misc_feature (1)..(285): Homolog of NCBI NO: 18390896 NR Description: calreticulin, putative
MFGPDICGTQTKKLHVIVSYQGQNYPIKKDLQCETDKLNHFYTFILRPDASYSVLVDNKEREFGSMYTDWDILPPRKIKVKNAKKPEDWDDREYIDDPNDVKPEGFDSIPREIPDRKAKEPEDWDEEENGLWEPPKIPNSAYKGPWKAKRIKNPNYKGKWKNPWIDNPEFEDDPDLYVLKSIKYAGIEVWQVKAGSIFDNILICDDPAYARSIVDDYFAQHRESEKELFAEAEKERKAREDEEARIAREEGERRRKERDHRYGDRRRRYKRPNPRDYMDDYHDEL

SEQ ID NO: 39476 - protein, 220 aa, Arabidopsis thaliana
  peptide (1)..(220): Ceres Seq. ID no. 12562268
  misc_feature (1)..(138): Pfam Name: Calreticulin family Pfam Description: Calreticulin family
  misc_feature (1)..(138): Pfam Name: Calreticulin family Pfam Description: Calreticulin family
  misc_feature (1)..(220): Homolog of NCBI NO: 11131769 NR Description: Calreticulin precursor
  misc_feature (1)..(220): Homolog of NCBI NO: 11131745 NR Description: Calreticulin precursor
  misc_feature (1)..(220): Homolog of NCBI NO: 11131631 NR Description: Calreticulin precursor
  misc_feature (1)..(219): Homolog of NCBI NO: 9858814 NR Description: calreticulin [Pinus taeda]
  misc_feature (152)..(177): Homolog of NCBI NO: 6664320 NR Description: T27G7.13 [Arabidopsis thaliana]
  misc_feature (1)..(220): Homolog of NCBI NO: 11131769 NR Description: Calreticulin precursor
  misc_feature (1)..(220): Homolog of NCBI NO: 11131631 NR Description: Calreticulin precursor
  misc_feature (152)..(177): Homolog of NCBI NO: 6664320 NR Description: T27G7.13 [Arabidopsis thaliana]
  misc_feature (1)..(220): Homolog of NCBI NO: 18390896 NR Description: calreticulin, putative
  misc_feature (1)..(220): Homolog of NCBI NO: 27311777 NR Description: calreticulin, putative [Arabidopsis thaliana]
  misc_feature (1)..(220): Homolog of NCBI NO: 12643531 NR Description: Calreticulin 3 precursor
  misc_feature (1)..(84): Homolog of NCBI NO: 6664320 NR Description: T27G7.13 [Arabidopsis thaliana]
  misc_feature (177)..(217): Homolog of NCBI NO: 6664320 NR Description: T27G7.13 [Arabidopsis thaliana]
  misc_feature (1)..(219): Homolog of NCBI NO: 9858814 NR Description: calreticulin [Pinus taeda]
  misc_feature (1)..(220): Homolog of NCBI NO: 11131745 NR Description: Calreticulin precursor
  misc_feature (177)..(217): Homolog of NCBI NO: 6664320 NR Description: T27G7.13 [Arabidopsis thaliana]
  misc_feature (1)..(84): Homolog of NCBI NO: 6664320 NR Description: T27G7.13 [Arabidopsis thaliana]
  misc_feature (1)..(220): Homolog of NCBI NO: 12643531 NR Description: Calreticulin 3 precursor
  misc_feature (1)..(220): Homolog of NCBI NO: 27311777 NR Description: calreticulin, putative [Arabidopsis thaliana]
  misc_feature (1)..(220): Homolog of NCBI NO: 18390896 NR Description: calreticulin, putative
MYTDWDILPPRKIKVKNAKKPEDWDDREYIDDPNDVKPEGFDSIPREIPDRKAKEPEDWDEEENGLWEPPKIPNSAYKGPWKAKRIKNPNYKGKWKNPWIDNPEFEDDPDLYVLKSIKYAGIEVWQVKAGSIFDNILICDDPAYARSIVDDYFAQHRESEKELFAEAEKERKAREDEEARIAREEGERRRKERDHRYGDRRRRYKRPNPRDYMDDYHDEL

SEQ ID NO: 39477 - DNA, 1282 bp, Arabidopsis thaliana
  misc_feature (1)..(1282): Ceres Seq. ID no. 12488272
  misc_feature: MA Experiment ID: 108433 Result: Down-regulated in Transcription
  misc_feature: MA Experiment 108433 PARAMETER Experiment Name: At_rhl_Mutant2_cDNA_P Parameter: Age (day) Value: 7
  misc_feature: MA Experiment 108433 PARAMETER Experiment Name: At_rhl_Mutant2_cDNA_P Parameter: Organism Value: A. thaliana
  misc_feature: MA Experiment 108433 PARAMETER Experiment Name: At_rhl_Mutant2_cDNA_P Parameter: Plant Line Value: rhl Mutant vs. wt landsburg
  misc_feature: MA Experiment 108433 PARAMETER Experiment Name: At_rhl_Mutant2_cDNA_P Parameter: Tissue Value: Roots
  misc_feature: MA Experiment ID: 108461 Result: Down-regulated in Transcription
  misc_feature: MA Experiment 108461 PARAMETER Experiment Name: At_Germinating_Seeds_cDNA_P Parameter: Age (day) Value: 1 vs. 0
  misc_feature: MA Experiment 108461 PARAMETER Experiment Name: At_Germinating_Seeds_cDNA_P Parameter: Tissue Value: Germinating Seeds
  misc_feature: MA Experiment ID: 108462 Result: Down-regulated in Transcription
  misc_feature: MA Experiment 108462 PARAMETER Experiment Name: At_Germinating_Seeds_cDNA_P Parameter: Age (day) Value: 2 vs. 0
  misc_feature: MA Experiment 108462 PARAMETER Experiment Name: At_Germinating_Seeds_cDNA_P Parameter: Tissue Value: Germinating Seeds
  misc_feature: MA Experiment ID: 108463 Result: Down-regulated in Transcription
  misc_feature: MA Experiment 108463 PARAMETER Experiment Name: At_Germinating_Seeds_cDNA_P Parameter: Age (day) Value: 3 vs. 0
  misc_feature: MA Experiment 108463 PARAMETER Experiment Name: At_Germinating_Seeds_cDNA_P Parameter: Tissue Value: Germinating Seeds
  misc_feature: MA Experiment ID: 108464 Result: Down-regulated in Transcription
  misc_feature: MA Experiment 108464 PARAMETER Experiment Name: At_Germinating_Seeds_cDNA_P Parameter: Age (day) Value: 4 vs. 0
  misc_feature: MA Experiment 108464 PARAMETER Experiment Name: At_Germinating_Seeds_cDNA_P Parameter: Tissue Value: Germinating Seeds
  misc_feature: MA Experiment ID: 108488 Result: Down-regulated in Transcription
  misc_feature: MA Experiment ID: 108573 Result: Up-regulated in Transcription
  misc_feature: MA Experiment 108573 PARAMETER Experiment Name: At_Drought_cDNA_P Parameter: Timepoint (hr) Value: 6
  misc_feature: MA Experiment 108573 PARAMETER Experiment Name: At_Drought_cDNA_P Parameter: Tissue Value: Aerial
  misc_feature: MA Experiment 108573 PARAMETER Experiment Name: At_Drought_cDNA_P Parameter: Treatment Value: Drought vs. No Drought
  misc_feature: MA Experiment ID: 108574 Result: Up-regulated in Transcription
  misc_feature: MA Experiment 108574 PARAMETER Experiment Name: At_Wounding__cDNA_P Parameter: Timepoint (hr) Value: 1
  misc_feature: MA Experiment 108574 PARAMETER Experiment Name: At_Wounding__cDNA_P Parameter: Tissue Value: Aerial
  misc_feature: MA Experiment 108574 PARAMETER Experiment Name: At_Wounding__cDNA_P Parameter: Treatment Value: Wounding vs. No Wounding
  misc_feature: MA Experiment ID: 108577 Result: Up-regulated in Transcription
  misc_feature: MA Experiment 108577 PARAMETER Experiment Name: At_42deg_Heat_cDNA_P Parameter: Temperature (deg C) Value: 42 vs. 22
  misc_feature: MA Experiment 108577 PARAMETER Experiment Name: At_42deg_Heat_cDNA_P Parameter: Timepoint (hr) Value: 6
  misc_feature: MA Experiment 108577 PARAMETER Experiment Name: At_42deg_Heat_cDNA_P Parameter: Tissue Value: Aerial
  misc_feature: MA Experiment ID: 108579 Result: Up-regulated in Transcription
  misc_feature: MA Experiment 108579 PARAMETER Experiment Name: At_4deg_Cold_cDNA_P Parameter: Temperature (deg C) Value: 4 vs. 22
  misc_feature: MA Experiment 108579 PARAMETER Experiment Name: At_4deg_Cold_cDNA_P Parameter: Timepoint (hr) Value: 6
  misc_feature: MA Experiment 108579 PARAMETER Experiment Name: At_4deg_Cold_cDNA_P Parameter: Tissue Value: Aerial
  misc_feature: MA Experiment ID: 108585 Result: Up-regulated in Transcription
  misc_feature: MA Experiment 108585 PARAMETER Experiment Name: At_5mM_NaNP_cDNA_P Parameter: Timepoint (hr) Value: 6
  misc_feature: MA Experiment 108585 PARAMETER Experiment Name: At_5mM_NaNP_cDNA_P Parameter: Tissue Value: Aerial
  misc_feature: MA Experiment 108585 PARAMETER Experiment Name: At_5mM_NaNP_cDNA_P Parameter: Treatment Value: null
  misc_feature: MA Experiment ID: 108595 Result: Up-regulated in Transcription
  misc_feature: MA Experiment 108595 PARAMETER Experiment Name: At_Ler-pi_Ovule_cDNA_P Parameter: Plant Line Value: null
  misc_feature: MA Experiment ID: 108668 Result: Up-regulated in Transcription
  misc_feature: MA Experiment 108668 PARAMETER Experiment Name: At_2mM_SA_cDNA_P Parameter: Plant Line Value: WS
  misc_feature: MA Experiment 108668 PARAMETER Experiment Name: At_2mM_SA_cDNA_P Parameter: Timepoint (hr) Value: 6
  misc_feature: MA Experiment 108668 PARAMETER Experiment Name: At_2mM_SA_cDNA_P Parameter: Treatment Value: 2mM SA vs. No Treatment
  misc_feature: MA Experiment ID: 20000111 Result: Up-regulated in Transcription
  misc_feature: MA Experiment 20000111 PARAMETER Experiment Name: At_42deg_Heat_cDNA_P Parameter: Temperature (deg C) Value: 42 vs. 22
  misc_feature: MA Experiment 20000111 PARAMETER Experiment Name: At_42deg_Heat_cDNA_P Parameter: Timepoint (hr) Value: 6
  misc_feature: MA Experiment 20000111 PARAMETER Experiment Name: At_42deg_Heat_cDNA_P Parameter: Tissue Value: Aerial
  misc_feature: MA Experiment ID: 20000112 Result: Up-regulated in Transcription
  misc_feature: MA Experiment 20000112 PARAMETER Experiment Name: At_42deg_Heat_cDNA_P Parameter: Temperature (deg C) Value: 42 vs. 22
  misc_feature: MA Experiment 20000112 PARAMETER Experiment Name: At_42deg_Heat_cDNA_P Parameter: Timepoint (hr) Value: 2
  misc_feature: MA Experiment 20000112 PARAMETER Experiment Name: At_42deg_Heat_cDNA_P Parameter: Tissue Value: Aerial
  misc_feature: MA Experiment ID: 20000113 Result: Up-regulated in Transcription
  misc_feature: MA Experiment 20000113 PARAMETER Experiment Name: At_42deg_Heat_cDNA_P Parameter: Temperature (deg C) Value: 42 vs. 22
  misc_feature: MA Experiment 20000113 PARAMETER Experiment Name: At_42deg_Heat_cDNA_P Parameter: Timepoint (hr) Value: 8
  misc_feature: MA Experiment 20000113 PARAMETER Experiment Name: At_42deg_Heat_cDNA_P Parameter: Tissue Value: Aerial
  misc_feature: MA Experiment ID: 20000173 Result: Up-regulated in Transcription
  misc_feature: MA Experiment 20000173 PARAMETER Experiment Name: At_42deg_Heat_P Parameter: Age (day) Value: 14
  misc_feature: MA Experiment 20000173 PARAMETER Experiment Name: At_42deg_Heat_P Parameter: Organism Value: A. thaliana
  misc_feature: MA Experiment 20000173 PARAMETER Experiment Name: At_42deg_Heat_P Parameter: Plant Line Value: WS
  misc_feature: MA Experiment 20000173 PARAMETER Experiment Name: At_42deg_Heat_P Parameter: Temperature (deg C) Value: 42 vs. 22
  misc_feature: MA Experiment 20000173 PARAMETER Experiment Name: At_42deg_Heat_P Parameter: Timepoint (hr) Value: 6
  misc_feature: MA Experiment 20000173 PARAMETER Experiment Name: At_42deg_Heat_P Parameter: Tissue Value: Aerial
  misc_feature: MA Experiment ID: 20000180 Result: Down-regulated in Transcription
  misc_feature: MA Experiment 20000180 PARAMETER Experiment Name: At_Germinating_Seeds_P Parameter: Age (hr) Value: 24 vs. 0
  misc_feature: MA Experiment 20000180 PARAMETER Experiment Name: At_Germinating_Seeds_P Parameter: Tissue Value: Germinating Seeds
  misc_feature: MA Experiment ID: 20000182 Result: Up-regulated in Transcription
  misc_feature: MA Experiment 20000182 PARAMETER Experiment Name: At_2mM_SA_P Parameter: Age (day) Value: 14
  misc_feature: MA Experiment 20000182 PARAMETER Experiment Name: At_2mM_SA_P Parameter: Organism Value: A. thaliana
  misc_feature: MA Experiment 20000182 PARAMETER Experiment Name: At_2mM_SA_P Parameter: Plant Line Value: WS
  misc_feature: MA Experiment 20000182 PARAMETER Experiment Name: At_2mM_SA_P Parameter: Timepoint (hr) Value: 6
  misc_feature: MA Experiment 20000182 PARAMETER Experiment Name: At_2mM_SA_P Parameter: Tissue Value: Aerial
  misc_feature: MA Experiment 20000182 PARAMETER Experiment Name: At_2mM_SA_P Parameter: Treatment Value: 2mM SA vs. No Treatment
  misc_feature: MA Experiment ID: 20000495 Result: Down-regulated in Transcription
  misc_feature: MA Experiment 20000495 PARAMETER Experiment Name: At_Guard_Cells_P Parameter: Harvest Date Value: 8/2/2002
  misc_feature: MA Experiment 20000495 PARAMETER Experiment Name: At_Guard_Cells_P Parameter: Organism Value: A. thaliana
  misc_feature: MA Experiment 20000495 PARAMETER Experiment Name: At_Guard_Cells_P Parameter: Tissue Value: Guard Cells vs. Leaves
  misc_feature: MA Experiment ID: 20001906 Result: Up-regulated in Transcription
  misc_feature: MA Experiment 20001906 PARAMETER Experiment Name: At_Drought_Reproduction_P Parameter: Age (day) Value: 35
  misc_feature: MA Experiment 20001906 PARAMETER Experiment Name: At_Drought_Reproduction_P Parameter: Organism Value: A. thaliana
  misc_feature: MA Experiment 20001906 PARAMETER Experiment Name: At_Drought_Reproduction_P Parameter: Plant Line Value: WS
  misc_feature: MA Experiment 20001906 PARAMETER Experiment Name: At_Drought_Reproduction_P Parameter: Timepoint (day) Value: 5
  misc_feature: MA Experiment 20001906 PARAMETER Experiment Name: At_Drought_Reproduction_P Parameter: Tissue Value: Siliques
  misc_feature: MA Experiment 20001906 PARAMETER Experiment Name: At_Drought_Reproduction_P Parameter: Treatment Value: Drought vs. No Drought
  misc_feature: MA Experiment ID: 20001908 Result: Up-regulated in Transcription
  misc_feature: MA Experiment 20001908 PARAMETER Experiment Name: At_Drought_Reproduction_P Parameter: Age (day) Value: 40
  misc_feature: MA Experiment 20001908 PARAMETER Experiment Name: At_Drought_Reproduction_P Parameter: Organism Value: A. thaliana
  misc_feature: MA Experiment 20001908 PARAMETER Experiment Name: At_Drought_Reproduction_P Parameter: Plant Line Value: WS
  misc_feature: MA Experiment 20001908 PARAMETER Experiment Name: At_Drought_Reproduction_P Parameter: Timepoint (day) Value: 10
  misc_feature: MA Experiment 20001908 PARAMETER Experiment Name: At_Drought_Reproduction_P Parameter: Tissue Value: Siliques
  misc_feature: MA Experiment 20001908 PARAMETER Experiment Name: At_Drought_Reproduction_P Parameter: Treatment Value: Drought vs. No Drought
  misc_feature: MA Experiment ID: 20001911 Result: Up-regulated in Transcription
  misc_feature: MA Experiment 20001911 PARAMETER Experiment Name: At_Drought_Reproduction_P Parameter: Age (day) Value: 40
  misc_feature: MA Experiment 20001911 PARAMETER Experiment Name: At_Drought_Reproduction_P Parameter: Organism Value: A. thaliana
  misc_feature: MA Experiment 20001911 PARAMETER Experiment Name: At_Drought_Reproduction_P Parameter: Plant Line Value: WS
  misc_feature: MA Experiment 20001911 PARAMETER Experiment Name: At_Drought_Reproduction_P Parameter: Timepoint (day) Value: 10
  misc_feature: MA Experiment 20001911 PARAMETER Experiment Name: At_Drought_Reproduction_P Parameter: Tissue Value: Flowers
  misc_feature: MA Experiment 20001911 PARAMETER Experiment Name: At_Drought_Reproduction_P Parameter: Treatment Value: Drought vs. No Drought
atcaccattgctttgttttgttcgtcaaatataatcaattttaaatttcttctcttctcttcaaacgaatcgcctttttcgataatctctttgcatcgatttcatcatggctactcaaacggatctcgctcagcccaagcttgatatgaccaaggaggagaaagagaggttgaagtatttgcaattcgtgcaagctgctgctgtggaagctctgcttcgctttgctcttatttacgctaaggcaaaggacaagtctggtcctttgaaacctggtgttgaatctgttgaaggagctgtcaagactgtcgttggtcctgtctacgagaaataccacgacgtccctgttgaggtccttaaatacatggaccagaaggtacaattttgactctttccctatctttggatcttgctgaaagtgcctttgttgatgaacaatgaatgaatctgtgttgttgattgtatatccacttcatcgaacatatgtgattaaaaaagtacagttaaagttgtgatgatttcatatcatctctttggtagaaggttcaggttaacgggtcaatgtcattatgttctgtagagtccctctttttgaagctgacaagtttgttttgcgttgttgcaggttgatatgtctgtgactgagcttgaccgtcgtgtcccaccagtcgtcaagcaagtgtctgcccaagccatctccgctgctcagatagcacccattgtggcacgtgcgttggcctctgaggttcgacgtgctggtgttgttgaaaccgcttctggaatggctaaatccgtctactccaagtacgagcctgctgctaaggagttgtatgcaaactatgagccaaaagcaaagcagtgtgccgtttcagcttggaagaagcttaaccagcttcctctattcccaaggctgggctcaagttgctgtaccaacagctgctttctgctctgagaagtacaatgatactgtggttaaggctgcagagaaagggtacagagtcacatcgtacatgccattggttccaacagagaggatctcaaaaatcttcgctgaggagaaagctgagaccgagcctttggagttccatccacttgattgatatgggtgttttgttagtgtgattttttgttttgttgggattaaggtgaaccggatcttggttagcgattgatctctggttctcgttcttttttttctttgtcatgaacttttgttgtttcgtttaataatcaaaagttgtataatctaagtttgggattaccaccctattgagtattgagtgat

SEQ ID NO: 39478 - protein, 106 aa, Arabidopsis thaliana
  peptide (1)..(106): Ceres Seq. ID no. 12488273
  misc_feature (1)..(104): Pfam Name: Rubber elongation factor protein (REF) Pfam Description: Rubber elongation factor protein (REF)
  misc_feature (1)..(104): Pfam Name: Rubber elongation factor protein (REF) Pfam Description: Rubber elongation factor protein (REF)
  misc_feature (32)..(104): Homolog of NCBI NO: 15214302 NR Description: Stress-related protein (PvSRP)
  misc_feature (1)..(106): Homolog of NCBI NO: 33332330 NR Description: rubber synthesis protein [Parthenium argentatum]
  misc_feature (6)..(94): Homolog of NCBI NO: 15227131 NR Description: unknown protein; protein id: At2g47780.1
  misc_feature (1)..(96): Homolog of NCBI NO: 14423933 NR Description: Small rubber particle protein (SRPP) (22 kDa particle protein) (22 kDa RPP) (Latex allergen Hev b 3) (27 kDa
  misc_feature (1)..(92): Homolog of NCBI NO: 15214353 NR Description: Hypothetical protein from PAC P0001A07
  misc_feature (32)..(104): Homolog of NCBI NO: 15214302 NR Description: Stress-related protein (PvSRP)
  misc_feature (6)..(94): Homolog of NCBI NO: 15227131 NR Description: unknown protein; protein id: At2g47780.1
  misc_feature (1)..(92): Homolog of NCBI NO: 15214353 NR Description: Hypothetical protein from PAC P0001A07
  misc_feature (1)..(104): Homolog of NCBI NO: 15230002 NR Description: stress related protein, putative
  misc_feature (1)..(94): Homolog of NCBI NO: 15214303 NR Description: Stress-related protein
  misc_feature (1)..(94): Homolog of NCBI NO: 22831130 NR Description: putative stress-related protein
  misc_feature (1)..(94): Homolog of NCBI NO: 29367349 NR Description: stress-related protein-like protein
  misc_feature (1)..(94): Homolog of NCBI NO: 37622210 NR Description: small rubber particle protein [Hevea brasiliensis]
  misc_feature (1)..(96): Homolog of NCBI NO: 14423933 NR Description: Small rubber particle protein (SRPP) (22 kDa particle protein) (22 kDa RPP) (Latex allergen Hev b 3) (27 kDa
  misc_feature (1)..(106): Homolog of NCBI NO: 33332330 NR Description: rubber synthesis protein [Parthenium argentatum]
  misc_feature (1)..(94): Homolog of NCBI NO: 37622210 NR Description: small rubber particle protein [Hevea brasiliensis]
  misc_feature (1)..(94): Homolog of NCBI NO: 29367349 NR Description: stress-related protein-like protein
  misc_feature (1)..(94): Homolog of NCBI NO: 22831130 NR Description: putative stress-related protein
  misc_feature (1)..(94): Homolog of NCBI NO: 15214303 NR Description: Stress-related protein
  misc_feature (1)..(104): Homolog of NCBI NO: 15230002 NR Description: stress related protein, putative
MSVTELDRRVPPVVKQVSAQAISAAQIAPIVARALASEVRRAGVVETASGMAKSVYSKYEPAAKELYANYEPKAKQCAVSAWKKLNQLPLFPRLGSSCCTNSCFLL

SEQ ID NO: 39479 - protein, 92 aa, Arabidopsis thaliana
  peptide (1)..(92): Ceres Seq. ID no. 12488274
  misc_feature (13)..(90): Pfam Name: Rubber elongation factor protein (REF) Pfam Description: Rubber elongation factor protein (REF)
  misc_feature (13)..(90): Pfam Name: Rubber elongation factor protein (REF) Pfam Description: Rubber elongation factor protein (REF)
  misc_feature (17)..(90): Homolog of NCBI NO: 38122474 NR Description: rubber elongation factor [Hevea brasiliensis]
  misc_feature (37)..(90): Homolog of NCBI NO: 15214302 NR Description: Stress-related protein (PvSRP)
  misc_feature (8)..(90): Homolog of NCBI NO: 33332330 NR Description: rubber synthesis protein [Parthenium argentatum]
  misc_feature (8)..(90): Homolog of NCBI NO: 15227131 NR Description: unknown protein; protein id: At2g47780.1
  misc_feature (14)..(90): Homolog of NCBI NO: 14423933 NR Description: Small rubber particle protein (SRPP) (22 kDa particle protein) (22 kDa RPP) (Latex allergen Hev b 3) (27 kDa
  misc_feature (17)..(90): Homolog of NCBI NO: 38122474 NR Description: rubber elongation factor [Hevea brasiliensis]
  misc_feature (8)..(90): Homolog of NCBI NO: 33332330 NR Description: rubber synthesis protein [Parthenium argentatum]
  misc_feature (14)..(90): Homolog of NCBI NO: 14423933 NR Description: Small rubber particle protein (SRPP) (22 kDa particle protein) (22 kDa RPP) (Latex allergen Hev b 3) (27 kDa
  misc_feature (1)..(90): Homolog of NCBI NO: 15230002 NR Description: stress related protein, putative
  misc_feature (1)..(91): Homolog of NCBI NO: 15214303 NR Description: Stress-related protein
  misc_feature (1)..(90): Homolog of NCBI NO: 22831130 NR Description: putative stress-related protein
  misc_feature (1)..(90): Homolog of NCBI NO: 29367349 NR Description: stress-related protein-like protein
  misc_feature (18)..(90): Homolog of NCBI NO: 15214353 NR Description: Hypothetical protein from PAC P0001A07
  misc_feature (8)..(90): Homolog of NCBI NO: 15227131 NR Description: unknown protein; protein id: At2g47780.1
  misc_feature (37)..(90): Homolog of NCBI NO: 15214302 NR Description: Stress-related protein (PvSRP)
  misc_feature (18)..(90): Homolog of NCBI NO: 15214353 NR Description: Hypothetical protein from PAC P0001A07
  misc_feature (1)..(90): Homolog of NCBI NO: 29367349 NR Description: stress-related protein-like protein
  misc_feature (1)..(90): Homolog of NCBI NO: 22831130 NR Description: putative stress-related protein
  misc_feature (1)..(91): Homolog of NCBI NO: 15214303 NR Description: Stress-related protein
  misc_feature (1)..(90): Homolog of NCBI NO: 15230002 NR Description: stress related protein, putative
MATQTDLAQPKLDMTKEEKERLKYLQFVQAAAVEALLRFALIYAKAKDKSGPLKPGVESVEGAVKTVVGPVYEKYHDVPVEVLKYMDQKVQF

SEQ ID NO: 39480 - protein, 89 aa, Arabidopsis thaliana
  peptide (1)..(89): Ceres Seq. ID no. 12488275
  misc_feature (29)..(74): Homolog of NCBI NO: 15214302 NR Description: Stress-related protein (PvSRP)
  misc_feature (17)..(80): Homolog of NCBI NO: 33332330 NR Description: rubber synthesis protein [Parthenium argentatum]
  misc_feature (29)..(81): Homolog of NCBI NO: 15227131 NR Description: unknown protein; protein id: At2g47780.1
  misc_feature (29)..(76): Homolog of NCBI NO: 14423933 NR Description: Small rubber particle protein (SRPP) (22 kDa particle protein) (22 kDa RPP) (Latex allergen Hev b 3) (27 kDa
  misc_feature (30)..(88): Homolog of NCBI NO: 15214353 NR Description: Hypothetical protein from PAC P0001A07
  misc_feature (29)..(83): Homolog of NCBI NO: 37622210 NR Description: small rubber particle protein [Hevea brasiliensis]
  misc_feature (17)..(82): Homolog of NCBI NO: 29367349 NR Description: stress-related protein-like protein
  misc_feature (17)..(82): Homolog of NCBI NO: 22831130 NR Description: putative stress-related protein
  misc_feature (17)..(78): Homolog of NCBI NO: 15214303 NR Description: Stress-related protein
  misc_feature (29)..(89): Homolog of NCBI NO: 15230002 NR Description: stress related protein, putative
  misc_feature (29)..(74): Homolog of NCBI NO: 15214302 NR Description: Stress-related protein (PvSRP)
  misc_feature (17)..(80): Homolog of NCBI NO: 33332330 NR Description: rubber synthesis protein [Parthenium argentatum]
  misc_feature (29)..(81): Homolog of NCBI NO: 15227131 NR Description: unknown protein; protein id: At2g47780.1
  misc_feature (29)..(76): Homolog of NCBI NO: 14423933 NR Description: Small rubber particle protein (SRPP) (22 kDa particle protein) (22 kDa RPP) (Latex allergen Hev b 3) (27 kDa
  misc_feature (30)..(88): Homolog of NCBI NO: 15214353 NR Description: Hypothetical protein from PAC P0001A07
  misc_feature (29)..(83): Homolog of NCBI NO: 37622210 NR Description: small rubber particle protein [Hevea brasiliensis]
  misc_feature (17)..(82): Homolog of NCBI NO: 29367349 NR Description: stress-related protein-like protein
  misc_feature (17)..(82): Homolog of NCBI NO: 22831130 NR Description: putative stress-related protein
  misc_feature (17)..(78): Homolog of NCBI NO: 15214303 NR Description: Stress-related protein
  misc_feature (29)..(89): Homolog of NCBI NO: 15230002 NR Description: stress related protein, putative
MQTMSQKQSSVPFQLGRSLTSFLYSQGWAQVAVPTAAFCSEKYNDTVVKAAEKGYRVTSYMPLVPTERISKIFAEEKAETEPLEFHPLD

SEQ ID NO: 39481 - DNA, 745 bp, Arabidopsis thaliana
  misc_feature (1)..(745): Ceres Seq. ID no. 12337880
  misc_feature: MA Experiment ID: 108461 Result: Up-regulated in Transcription
  misc_feature: MA Experiment 108461 PARAMETER Experiment Name: At_Germinating_Seeds_cDNA_P Parameter: Age (day) Value: 1 vs. 0
  misc_feature: MA Experiment 108461 PARAMETER Experiment Name: At_Germinating_Seeds_cDNA_P Parameter: Tissue Value: Germinating Seeds
  misc_feature: MA Experiment ID: 108462 Result: Up-regulated in Transcription
  misc_feature: MA Experiment 108462 PARAMETER Experiment Name: At_Germinating_Seeds_cDNA_P Parameter: Age (day) Value: 2 vs. 0
  misc_feature: MA Experiment 108462 PARAMETER Experiment Name: At_Germinating_Seeds_cDNA_P Parameter: Tissue Value: Germinating Seeds
  misc_feature: MA Experiment ID: 108463 Result: Up-regulated in Transcription
  misc_feature: MA Experiment 108463 PARAMETER Experiment Name: At_Germinating_Seeds_cDNA_P Parameter: Age (day) Value: 3 vs. 0
  misc_feature: MA Experiment 108463 PARAMETER Experiment Name: At_Germinating_Seeds_cDNA_P Parameter: Tissue Value: Germinating Seeds
  misc_feature: MA Experiment ID: 108464 Result: Up-regulated in Transcription
  misc_feature: MA Experiment 108464 PARAMETER Experiment Name: At_Germinating_Seeds_cDNA_P Parameter: Age (day) Value: 4 vs. 0
  misc_feature: MA Experiment 108464 PARAMETER Experiment Name: At_Germinating_Seeds_cDNA_P Parameter: Tissue Value: Germinating Seeds
  misc_feature: MA Experiment ID: 108488 Result: Up-regulated in Transcription
  misc_feature: MA Experiment ID: 20000180 Result: Up-regulated in Transcription
  misc_feature: MA Experiment 20000180 PARAMETER Experiment Name: At_Germinating_Seeds_P Parameter: Age (hr) Value: 24 vs. 0
  misc_feature: MA Experiment 20000180 PARAMETER Experiment Name: At_Germinating_Seeds_P Parameter: Tissue Value: Germinating Seeds
  misc_feature: MA Experiment ID: 20000185 Result: Down-regulated in Transcription
  misc_feature: MA Experiment 20000185 PARAMETER Experiment Name: At_Roots__P Parameter: Age (day) Value: 7 vs. 21
  misc_feature: MA Experiment 20000185 PARAMETER Experiment Name: At_Roots__P Parameter: Organism Value: A. thaliana
  misc_feature: MA Experiment 20000185 PARAMETER Experiment Name: At_Roots__P Parameter: Tissue Value: Roots vs. Whole Plant
  misc_feature: MA Experiment ID: 20000439 Result: Down-regulated in Transcription
  misc_feature: MA Experiment 20000439 PARAMETER Experiment Name: At_Roots__P Parameter: Age (day) Value: 14 vs. 21
  misc_feature: MA Experiment 20000439 PARAMETER Experiment Name: At_Roots__P Parameter: Organism Value: A. thaliana
  misc_feature: MA Experiment 20000439 PARAMETER Experiment Name: At_Roots__P Parameter: Tissue Value: Roots vs. Whole Plant
  misc_feature: MA Experiment ID: 20000451 Result: Down-regulated in Transcription
  misc_feature: MA Experiment 20000451 PARAMETER Experiment Name: At_CS6879_Shoots-Roots_P Parameter: Age (day) Value: 14
  misc_feature: MA Experiment 20000451 PARAMETER Experiment Name: At_CS6879_Shoots-Roots_P Parameter: Organism Value: A. thaliana
  misc_feature: MA Experiment 20000451 PARAMETER Experiment Name: At_CS6879_Shoots-Roots_P Parameter: Plant Line Value: CS6879 vs. WS
  misc_feature: MA Experiment 20000451 PARAMETER Experiment Name: At_CS6879_Shoots-Roots_P Parameter: Tissue Value: Roots
  misc_feature: MA Experiment ID: 20000794 Result: Down-regulated in Transcription
  misc_feature: MA Experiment 20000794 PARAMETER Experiment Name: At_Petals_P Parameter: Age (day) Value: 23-25 days
  misc_feature: MA Experiment 20000794 PARAMETER Experiment Name: At_Petals_P Parameter: Plant Line Value: WS
  misc_feature: MA Experiment 20000794 PARAMETER Experiment Name: At_Petals_P Parameter: Tissue Value: Petals vs. Whole plant
  misc_feature: MA Experiment ID: 20001248 Result: Down-regulated in Transcription
  misc_feature: MA Experiment 20001248 PARAMETER Experiment Name: At_Far-red-induction_P Parameter: Age (day) Value: 7
  misc_feature: MA Experiment 20001248 PARAMETER Experiment Name: At_Far-red-induction_P Parameter: Light Value: Far-red vs. White
  misc_feature: MA Experiment 20001248 PARAMETER Experiment Name: At_Far-red-induction_P Parameter: Organism Value: A. thaliana
  misc_feature: MA Experiment 20001248 PARAMETER Experiment Name: At_Far-red-induction_P Parameter: Plant Line Value: Columbia
  misc_feature: MA Experiment 20001248 PARAMETER Experiment Name: At_Far-red-induction_P Parameter: Timepoint (hr) Value: 4
  misc_feature: MA Experiment 20001248 PARAMETER Experiment Name: At_Far-red-induction_P Parameter: Tissue Value: Whole Plant
  misc_feature: MA Experiment ID: 20001450 Result: Down-regulated in Transcription
  misc_feature: MA Experiment 20001450 PARAMETER Experiment Name: At_Far-red-induction_P Parameter: Age (day) Value: 7
  misc_feature: MA Experiment 20001450 PARAMETER Experiment Name: At_Far-red-induction_P Parameter: Light Value: Far-red vs. White
  misc_feature: MA Experiment 20001450 PARAMETER Experiment Name: At_Far-red-induction_P Parameter: Organism Value: A. thaliana
  misc_feature: MA Experiment 20001450 PARAMETER Experiment Name: At_Far-red-induction_P Parameter: Plant Line Value: Columbia
  misc_feature: MA Experiment 20001450 PARAMETER Experiment Name: At_Far-red-induction_P Parameter: Timepoint (hr) Value: 8
  misc_feature: MA Experiment 20001450 PARAMETER Experiment Name: At_Far-red-induction_P Parameter: Tissue Value: Whole Plant
  misc_feature: MA Experiment ID: 20001557 Result: Down-regulated in Transcription
  misc_feature: MA Experiment 20001557 PARAMETER Experiment Name: At_Drought_Soil_Dry_P Parameter: Age (day) Value: 27
  misc_feature: MA Experiment 20001557 PARAMETER Experiment Name: At_Drought_Soil_Dry_P Parameter: Organism Value: A. thaliana
  misc_feature: MA Experiment 20001557 PARAMETER Experiment Name: At_Drought_Soil_Dry_P Parameter: Plant Line Value: WS
  misc_feature: MA Experiment 20001557 PARAMETER Experiment Name: At_Drought_Soil_Dry_P Parameter: Post Timepoint (hr) Value: 3
  misc_feature: MA Experiment 20001557 PARAMETER Experiment Name: At_Drought_Soil_Dry_P Parameter: Post-Treatment Value: Re-Water vs. No Drought
  misc_feature: MA Experiment 20001557 PARAMETER Experiment Name: At_Drought_Soil_Dry_P Parameter: Timepoint (day) Value: 13
  misc_feature: MA Experiment 20001557 PARAMETER Experiment Name: At_Drought_Soil_Dry_P Parameter: Treatment Value: Drought vs. No Drought
  misc_feature: MA Experiment ID: 20001558 Result: Down-regulated in Transcription
  misc_feature: MA Experiment 20001558 PARAMETER Experiment Name: At_Drought_Soil_Dry_P Parameter: Age (day) Value: 27
  misc_feature: MA Experiment 20001558 PARAMETER Experiment Name: At_Drought_Soil_Dry_P Parameter: Organism Value: A. thaliana
  misc_feature: MA Experiment 20001558 PARAMETER Experiment Name: At_Drought_Soil_Dry_P Parameter: Plant Line Value: WS
  misc_feature: MA Experiment 20001558 PARAMETER Experiment Name: At_Drought_Soil_Dry_P Parameter: Post Timepoint (hr) Value: 6
  misc_feature: MA Experiment 20001558 PARAMETER Experiment Name: At_Drought_Soil_Dry_P Parameter: Post-Treatment Value: Re-Water vs. No Drought
  misc_feature: MA Experiment 20001558 PARAMETER Experiment Name: At_Drought_Soil_Dry_P Parameter: Timepoint (day) Value: 13
  misc_feature: MA Experiment 20001558 PARAMETER Experiment Name: At_Drought_Soil_Dry_P Parameter: Treatment Value: Drought vs. No Drought
  misc_feature: MA Experiment ID: 20001559 Result: Down-regulated in Transcription
  misc_feature: MA Experiment 20001559 PARAMETER Experiment Name: At_Drought_Soil_Dry_P Parameter: Age (day) Value: 28
  misc_feature: MA Experiment 20001559 PARAMETER Experiment Name: At_Drought_Soil_Dry_P Parameter: Organism Value: A. thaliana
  misc_feature: MA Experiment 20001559 PARAMETER Experiment Name: At_Drought_Soil_Dry_P Parameter: Plant Line Value: WS
  misc_feature: MA Experiment 20001559 PARAMETER Experiment Name: At_Drought_Soil_Dry_P Parameter: Post Timepoint (hr) Value: 29
  misc_feature: MA Experiment 20001559 PARAMETER Experiment Name: At_Drought_Soil_Dry_P Parameter: Post-Treatment Value: Re-Water vs. No Drought
  misc_feature: MA Experiment 20001559 PARAMETER Experiment Name: At_Drought_Soil_Dry_P Parameter: Timepoint (day) Value: 14
  misc_feature: MA Experiment 20001559 PARAMETER Experiment Name: At_Drought_Soil_Dry_P Parameter: Treatment Value: Drought vs. No Drought
  misc_feature: MA Experiment ID: 20001757 Result: Up-regulated in Transcription
  misc_feature: MA Experiment 20001757 PARAMETER Experiment Name: At_50mM_NH4NO3_L-to-H_P Parameter: Timepoint (hr) Value: 6
  misc_feature: MA Experiment 20001757 PARAMETER Experiment Name: At_50mM_NH4NO3_L-to-H_P Parameter: Tissue Value: Leaf
  misc_feature: MA Experiment 20001757 PARAMETER Experiment Name: At_50mM_NH4NO3_L-to-H_P Parameter: Treatment Value: 50mM NH4NO3 vs 100mM Mannitol
  misc_feature: MA Experiment ID: 20001904 Result: Down-regulated in Transcription
  misc_feature: MA Experiment 20001904 PARAMETER Experiment Name: At_Drought_Reproduction_P Parameter: Age (day) Value: 37
  misc_feature: MA Experiment 20001904 PARAMETER Experiment Name: At_Drought_Reproduction_P Parameter: Organism Value: A. thaliana
  misc_feature: MA Experiment 20001904 PARAMETER Experiment Name: At_Drought_Reproduction_P Parameter: Plant Line Value: WS
  misc_feature: MA Experiment 20001904 PARAMETER Experiment Name: At_Drought_Reproduction_P Parameter: Timepoint (day) Value: 7
  misc_feature: MA Experiment 20001904 PARAMETER Experiment Name: At_Drought_Reproduction_P Parameter: Tissue Value: Rosettes
  misc_feature: MA Experiment 20001904 PARAMETER Experiment Name: At_Drought_Reproduction_P Parameter: Treatment Value: Drought vs. No Drought
  misc_feature: MA Experiment ID: 20001906 Result: Down-regulated in Transcription
  misc_feature: MA Experiment 20001906 PARAMETER Experiment Name: At_Drought_Reproduction_P Parameter: Age (day) Value: 35
  misc_feature: MA Experiment 20001906 PARAMETER Experiment Name: At_Drought_Reproduction_P Parameter: Organism Value: A. thaliana
  misc_feature: MA Experiment 20001906 PARAMETER Experiment Name: At_Drought_Reproduction_P Parameter: Plant Line Value: WS
  misc_feature: MA Experiment 20001906 PARAMETER Experiment Name: At_Drought_Reproduction_P Parameter: Timepoint (day) Value: 5
  misc_feature: MA Experiment 20001906 PARAMETER Experiment Name: At_Drought_Reproduction_P Parameter: Tissue Value: Siliques
  misc_feature: MA Experiment 20001906 PARAMETER Experiment Name: At_Drought_Reproduction_P Parameter: Treatment Value: Drought vs. No Drought
atttcttcgtctctgtctccaaaatcgaatcaaaatctctaaagtttcaatttttttgttctgttctttttatttttttaaagaatggcttcaatttctgcaactttgccttcgccattgttactcacacagagaaaatccaatctcacatcgattcaaaaactcccattttctctaactcgaggtacgaatgatctttctccattatctcttactcgaaaccctagcagcatcagtctgatggtgaaagctagtggagaaagctcagattcatcgactgatctcgacgttgttagtacgattcagaatgtttgggataagtctgaagataggttaggtcttattggtttgggttttgctggtattgtagctctttgggcatcattgaatctcatcacggcaatcgacaaattgcccgttatctcgagcggattcgaactagttggtatcttgttctccacgtggttcacatatcgatatctcttgttcaaaccggacagacaggagctttcgaaaattgtcaagaaatcagtagcggatatacttggccagtgaaccttgtgtgtgtgataatacttcatctttggaagatgatttgtttgcaagtttgtaaaattacatgacagggtggttgttgtttctagtccaataatgtcatgcatttgaaacctgtaaatactttattgttggtttttggttgtgagcaaaatcaatcttttctaatttcaaagattctcttttatgt

SEQ ID NO: 39482 - protein, 156 aa, Arabidopsis thaliana; identical to SEQ ID NO: 34973
  peptide (1)..(156): Ceres Seq. ID no. 12337881
  misc_feature (68)..(154): Homolog of NCBI NO: 37536446 NR Description: hypothetical protein [Oryza sativa (japonica
  misc_feature (3)..(151): Homolog of NCBI NO: 18411555 NR Description: expressed protein
  misc_feature (3)..(151): Homolog of NCBI NO: 687677 NR Description: unknown
  misc_feature (46)..(143): Homolog of NCBI NO: 38175474 NR Description: unknown protein [Oryza sativa (japonica
  misc_feature (48)..(155): Homolog of NCBI NO: 34393236 NR Description: unknown protein [Oryza sativa (japonica
  misc_feature (1)..(155): Homolog of NCBI NO: 21555057 NR Description: unknown [Arabidopsis thaliana]
  misc_feature (1)..(155): Homolog of NCBI NO: 18407178 NR Description: expressed protein
  misc_feature (1)..(156): Homolog of NCBI NO: 34909746 NR Description: contains ESTs
  misc_feature (1)..(156): Homolog of NCBI NO: 21554231 NR Description: unknown [Arabidopsis thaliana]
  misc_feature (1)..(156): Homolog of NCBI NO: 18403896 NR Description: expressed protein

SEQ ID NO: 39483 - protein, 104 aa, Arabidopsis thaliana; identical to SEQ ID NO: 34974
  peptide (1)..(104): Ceres Seq. ID no. 12337882
  misc_feature (16)..(102): Homolog of NCBI NO: 37536446 NR Description: hypothetical protein [Oryza sativa (japonica
  misc_feature (1)..(99): Homolog of NCBI NO: 18411555 NR Description: expressed protein
  misc_feature (1)..(99): Homolog of NCBI NO: 687677 NR Description: unknown
  misc_feature (1)..(91): Homolog of NCBI NO: 38175474 NR Description: unknown protein [Oryza sativa (japonica
  misc_feature (1)..(103): Homolog of NCBI NO: 34393236 NR Description: unknown protein [Oryza sativa (japonica
  misc_feature (1)..(103): Homolog of NCBI NO: 21555057 NR Description: unknown [Arabidopsis thaliana]
  misc_feature (1)..(103): Homolog of NCBI NO: 18407178 NR Description: expressed protein
  misc_feature (1)..(104): Homolog of NCBI NO: 34909746 NR Description: contains ESTs
  misc_feature (1)..(104): Homolog of NCBI NO: 21554231 NR Description: unknown [Arabidopsis thaliana]
  misc_feature (1)..(104): Homolog of NCBI NO: 18403896 NR Description: expressed protein

SEQ ID NO: 39484 - DNA, 909 bp, Arabidopsis thaliana
  misc_feature (1)..(909): Ceres Seq. ID no. 13489337
  misc_feature: MA Experiment ID: 108433 Result: Up-regulated in Transcription
  misc_feature: MA Experiment 108433 PARAMETER Experiment Name: At_rhl_Mutant2_cDNA_P Parameter: Age (day) Value: 7
  misc_feature: MA Experiment 108433 PARAMETER Experiment Name: At_rhl_Mutant2_cDNA_P Parameter: Organism Value: A. thaliana
  misc_feature: MA Experiment 108433 PARAMETER Experiment Name: At_rhl_Mutant2_cDNA_P Parameter: Plant Line Value: rhl Mutant vs. wt landsburg
  misc_feature: MA Experiment 108433 PARAMETER Experiment Name: At_rhl_Mutant2_cDNA_P Parameter: Tissue Value: Roots
  misc_feature: MA Experiment ID: 108573 Result: Up-regulated in Transcription
  misc_feature: MA Experiment 108573 PARAMETER Experiment Name: At_Drought_cDNA_P Parameter: Timepoint (hr) Value: 6
  misc_feature: MA Experiment 108573 PARAMETER Experiment Name: At_Drought_cDNA_P Parameter: Tissue Value: Aerial
  misc_feature: MA Experiment 108573 PARAMETER Experiment Name: At_Drought_cDNA_P Parameter: Treatment Value: Drought vs. No Drought
  misc_feature: MA Experiment ID: 108607 Result: Up-regulated in Transcription
  misc_feature: MA Experiment 108607 PARAMETER Experiment Name: At_100uM_ABA_cDNA_P Parameter: Timepoint (hr) Value: 4
  misc_feature: MA Experiment 108607 PARAMETER Experiment Name: At_100uM_ABA_cDNA_P Parameter: Tissue Value: Aerial
  misc_feature: MA Experiment 108607 PARAMETER Experiment Name: At_100uM_ABA_cDNA_P Parameter: Treatment Value: 100uM ABA vs. No Treatment
  misc_feature: MA Experiment ID: 108668 Result: Up-regulated in Transcription
  misc_feature: MA Experiment 108668 PARAMETER Experiment Name: At_2mM_SA_cDNA_P Parameter: Plant Line Value: WS
  misc_feature: MA Experiment 108668 PARAMETER Experiment Name: At_2mM_SA_cDNA_P Parameter: Timepoint (hr) Value: 6
  misc_feature: MA Experiment 108668 PARAMETER Experiment Name: At_2mM_SA_cDNA_P Parameter: Treatment Value: 2mM SA vs. No Treatment
  misc_feature: MA Experiment ID: 20000087 Result: Up-regulated in Transcription
  misc_feature: MA Experiment 20000087 PARAMETER Experiment Name: At_100uM_ABA_Mutants_cDNA_P Parameter: Plant Line Value: WS
  misc_feature: MA Experiment 20000087 PARAMETER Experiment Name: At_100uM_ABA_Mutants_cDNA_P Parameter: Timepoint (hr) Value: 6
  misc_feature: MA Experiment 20000087 PARAMETER Experiment Name: At_100uM_ABA_Mutants_cDNA_P Parameter: Tissue Value: Aerial
  misc_feature: MA Experiment 20000087 PARAMETER Experiment Name: At_100uM_ABA_Mutants_cDNA_P Parameter: Treatment Value: 100uM ABA vs. No Treatment
  misc_feature: MA Experiment ID: 20000117 Result: Up-regulated in Transcription
  misc_feature: MA Experiment 20000117 PARAMETER Experiment Name: At_100uM_ABA_Mutants_cDNA_P Parameter: Plant Line Value: Columbia
  misc_feature: MA Experiment 20000117 PARAMETER Experiment Name: At_100uM_ABA_Mutants_cDNA_P Parameter: Timepoint (hr) Value: 6
  misc_feature: MA Experiment 20000117 PARAMETER Experiment Name: At_100uM_ABA_Mutants_cDNA_P Parameter: Tissue Value: Aerial
  misc_feature: MA Experiment 20000117 PARAMETER Experiment Name: At_100uM_ABA_Mutants_cDNA_P Parameter: Treatment Value: 100uM ABA vs. No Treatment
  misc_feature: MA Experiment ID: 20000182 Result: Up-regulated in Transcription
  misc_feature: MA Experiment 20000182 PARAMETER Experiment Name: At_2mM_SA_P Parameter: Age (day) Value: 14
  misc_feature: MA Experiment 20000182 PARAMETER Experiment Name: At_2mM_SA_P Parameter: Organism Value: A. thaliana
  misc_feature: MA Experiment 20000182 PARAMETER Experiment Name: At_2mM_SA_P Parameter: Plant Line Value: WS
  misc_feature: MA Experiment 20000182 PARAMETER Experiment Name: At_2mM_SA_P Parameter: Timepoint (hr) Value: 6
  misc_feature: MA Experiment 20000182 PARAMETER Experiment Name: At_2mM_SA_P Parameter: Tissue Value: Aerial
  misc_feature: MA Experiment 20000182 PARAMETER Experiment Name: At_2mM_SA_P Parameter: Treatment Value: 2mM SA vs. No Treatment
  misc_feature: MA Experiment ID: 20000185 Result: Up-regulated in Transcription
  misc_feature: MA Experiment 20000185 PARAMETER Experiment Name: At_Roots__P Parameter: Age (day) Value: 7 vs. 21
  misc_feature: MA Experiment 20000185 PARAMETER Experiment Name: At_Roots__P Parameter: Organism Value: A. thaliana
  misc_feature: MA Experiment 20000185 PARAMETER Experiment Name: At_Roots__P Parameter: Tissue Value: Roots vs. Whole Plant
  misc_feature: MA Experiment ID: 20000451 Result: Down-regulated in Transcription
  misc_feature: MA Experiment 20000451 PARAMETER Experiment Name: At_CS6879_Shoots-Roots_P Parameter: Age (day) Value: 14
  misc_feature: MA Experiment 20000451 PARAMETER Experiment Name: At_CS6879_Shoots-Roots_P Parameter: Organism Value: A. thaliana
  misc_feature: MA Experiment 20000451 PARAMETER Experiment Name: At_CS6879_Shoots-Roots_P Parameter: Plant Line Value: CS6879 vs. WS
  misc_feature: MA Experiment 20000451 PARAMETER Experiment Name: At_CS6879_Shoots-Roots_P Parameter: Tissue Value: Roots
gtaatttttgggtttttttttttcgatttgatcaggcgaattccggcgaagagaagttgaagctctactcttactggagaagctcgtgtgctcatcgtgtccgtatcgccctcgctttgaaagggcttgattatgagtatataccagtgaatttgctcaagggtgatcaattcgattcagtttatcgttttgatcttcaagatttcaagaagatcaatccaatgggaactgtaccagctctggtggatggagatgttgtgattaatgattcttttgcgataataatgtatctggatgagaagtaccctgagccacctttgttacctcgtgacctccataaacgagctgtgaattaccaggcaatgagtattgtcttgtctggcatacagcctcatcaaaatctggctgttattaggtatatcgaggaaaagataaatgtggaggagaagactgcttgggttaataatgctatcacaaaaggatttacagctctcgagaaactgttggtgaattgcgctgggaaacttgcgactggtgatgaaatttacctggctgatctctttctagcaccacagatccacggagcaatcaacagattccagattaacatggaaccatacccaaatcttgcaaaatgttacgaatcatacaaggaactgcctgtgtttcaaaatgcactaccggaaaagcagccagatgctccttcttccaccaactgattccgtgaacccgtaagctacgctcagcttaataaaacctcagacaacaacaacaatgatgagagtaataccttgtactcgtacatgtatcatataaaccagttacatcttagttcctctacttttatcatataaaccagttacatcttactcacagagtttaaaatttgcaaagatatatcatacgttc

SEQ ID NO: 39485 - protein, 238 aa, Arabidopsis thaliana
  peptide (1)..(238): Ceres Seq. ID no. 13489338
  misc_feature (12)..(235): Homolog of NCBI NO: 24061762 NR Description: glutathione S-transferase [Capsicum annuum]
  misc_feature (16)..(236): Homolog of NCBI NO: 29420155 NR Description: glutathione S-transferase Z1 [Malva pusilla]
  misc_feature (10)..(237): Homolog of NCBI NO: 11132235 NR Description: Glutathione S-transferase zeta class
  misc_feature (16)..(236): Homolog of NCBI NO: 15226949 NR Description: glutathione transferase, putative [Arabidopsis
  misc_feature (12)..(238): Homolog of NCBI NO: 28932694 NR Description: glutathione S-transferase zeta [Brassica napus]
  misc_feature (12)..(238): Homolog of NCBI NO: 28932698 NR Description: glutathione S-transferase zeta [Brassica napus]
  misc_feature (12)..(237): Homolog of NCBI NO: 15226952 NR Description: glutathione transferase, putative [Arabidopsis
  misc_feature (12)..(237): Homolog of NCBI NO: 30677995 NR Description: glutathione transferase, putative [Arabidopsis
NFWVFFFRFDQANSGEEKLKLYSYWRSSCAHRVRIALALKGLDYEYIPVNLLKGDQFDSVYRFDLQDFKKINPMGTVPALVDGDVVINDSFAIIMYLDEKYPEPPLLPRDLHKRAVNYQAMSIVLSGIQPHQNLAVIRYIEEKINVEEKTAWVNNAITKGFTALEKLLVNCAGKLATGDEIYLADLFLAPQIHGAINRFQINMEPYPNLAKCYESYKELPVFQNALPEKQPDAPSSTN

SEQ ID NO: 39486 - protein, 165 aa, Arabidopsis thaliana; identical to SEQ ID NO: 30557
  peptide (1)..(165): Ceres Seq. ID no. 13489339
  misc_feature (1)..(162): Homolog of NCBI NO: 24061762 NR Description: glutathione S-transferase [Capsicum annuum]
  misc_feature (1)..(163): Homolog of NCBI NO: 29420155 NR Description: glutathione S-transferase Z1 [Malva pusilla]
  misc_feature (1)..(164): Homolog of NCBI NO: 11132235 NR Description: Glutathione S-transferase zeta class
  misc_feature (1)..(163): Homolog of NCBI NO: 15226949 NR Description: glutathione transferase, putative [Arabidopsis
  misc_feature (1)..(165): Homolog of NCBI NO: 28932694 NR Description: glutathione S-transferase zeta [Brassica napus]
  misc_feature (1)..(165): Homolog of NCBI NO: 28932698 NR Description: glutathione S-transferase zeta [Brassica napus]
  misc_feature (1)..(164): Homolog of NCBI NO: 15226952 NR Description: glutathione transferase, putative [Arabidopsis
  misc_feature (1)..(164): Homolog of NCBI NO: 30677995 NR Description: glutathione transferase, putative [Arabidopsis

SEQ ID NO: 39487 - protein, 144 aa, Arabidopsis thaliana
  peptide (1)..(144): Ceres Seq. ID no. 13489340
  misc_feature (1)..(141): Homolog of NCBI NO: 24061762 NR Description: glutathione S-transferase [Capsicum annuum]
  misc_feature (1)..(142): Homolog of NCBI NO: 29420155 NR Description: glutathione S-transferase Z1 [Malva pusilla]
  misc_feature (1)..(143): Homolog of NCBI NO: 11132235 NR Description: Glutathione S-transferase zeta class
  misc_feature (1)..(142): Homolog of NCBI NO: 15226949 NR Description: glutathione transferase, putative [Arabidopsis
  misc_feature (1)..(144): Homolog of NCBI NO: 28932694 NR Description: glutathione S-transferase zeta [Brassica napus]
  misc_feature (1)..(144): Homolog of NCBI NO: 28932698 NR Description: glutathione S-transferase zeta [Brassica napus]
  misc_feature (1)..(143): Homolog of NCBI NO: 15226952 NR Description: glutathione transferase, putative [Arabidopsis
  misc_feature (1)..(143): Homolog of NCBI NO: 30677995 NR Description: glutathione transferase, putative [Arabidopsis
MYLDEKYPEPPLLPRDLHKRAVNYQAMSIVLSGIQPHQNLAVIRYIEEKINVEEKTAWVNNAITKGFTALEKLLVNCAGKLATGDEIYLADLFLAPQIHGAINRFQINMEPYPNLAKCYESYKELPVFQNALPEKQPDAPSSTN

SEQ ID NO: 39488 - DNA, 1644 bp, Arabidopsis thaliana
  misc_feature (1)..(1644): Ceres Seq. ID no. 13508986
  misc_feature: MA Experiment ID: 20000328 Result: Up-regulated in Transcription
  misc_feature: MA Experiment 20000328 PARAMETER Experiment Name: At_42deg_Heat_Sub_P Parameter: Age (day) Value: 14
  misc_feature: MA Experiment 20000328 PARAMETER Experiment Name: At_42deg_Heat_Sub_P Parameter: Organism Value: A. thaliana
  misc_feature: MA Experiment 20000328 PARAMETER Experiment Name: At_42deg_Heat_Sub_P Parameter: Plant Line Value: WS
  misc_feature: MA Experiment 20000328 PARAMETER Experiment Name: At_42deg_Heat_Sub_P Parameter: Temperature (deg C) Value: 42 vs. 22
  misc_feature: MA Experiment 20000328 PARAMETER Experiment Name: At_42deg_Heat_Sub_P Parameter: Timepoint (hr) Value: 6
  misc_feature: MA Experiment 20000328 PARAMETER Experiment Name: At_42deg_Heat_Sub_P Parameter: Tissue Value: Aerial
  misc_feature: MA Experiment ID: 20000347 Result: Down-regulated in Transcription
  misc_feature: MA Experiment 20000347 PARAMETER Experiment Name: At_2mM_SA_Sub_P Parameter: Age (day) Value: 14
  misc_feature: MA Experiment 20000347 PARAMETER Experiment Name: At_2mM_SA_Sub_P Parameter: Organism Value: A. thaliana
  misc_feature: MA Experiment 20000347 PARAMETER Experiment Name: At_2mM_SA_Sub_P Parameter: Plant Line Value: WS
  misc_feature: MA Experiment 20000347 PARAMETER Experiment Name: At_2mM_SA_Sub_P Parameter: Timepoint (hr) Value: 6
  misc_feature: MA Experiment 20000347 PARAMETER Experiment Name: At_2mM_SA_Sub_P Parameter: Tissue Value: Aerial
  misc_feature: MA Experiment 20000347 PARAMETER Experiment Name: At_2mM_SA_Sub_P Parameter: Treatment Value: 2mM SA vs. No Treatment
  misc_feature: MA Experiment ID: 20000355 Result: Up-regulated in Transcription
  misc_feature: MA Experiment 20000355 PARAMETER Experiment Name: At_Siliques_Sub_P Parameter: Age (day) Value: 21
  misc_feature: MA Experiment 20000355 PARAMETER Experiment Name: At_Siliques_Sub_P Parameter: Organism Value: A. thaliana
  misc_feature: MA Experiment 20000355 PARAMETER Experiment Name: At_Siliques_Sub_P Parameter: Plant Line Value: WS
  misc_feature: MA Experiment 20000355 PARAMETER Experiment Name: At_Siliques_Sub_P Parameter: Tissue Value: Less Than 5mm Siliques vs. Whole Plant
  misc_feature: MA Experiment ID: 20001807 Result: Up-regulated in Transcription
  misc_feature: MA Experiment 20001807 PARAMETER Experiment Name: At_50mM_NH4NO3_L-to-H_Sub_P Parameter: Timepoint (hr) Value: 6
  misc_feature: MA Experiment 20001807 PARAMETER Experiment Name: At_50mM_NH4NO3_L-to-H_Sub_P Parameter: Tissue Value: Leaf
  misc_feature: MA Experiment 20001807 PARAMETER Experiment Name: At_50mM_NH4NO3_L-to-H_Sub_P Parameter: Treatment Value: 50mM NH4NO3 vs 100mM Mannitol
atgtcaggattcgaagatggattttcagctgaaaagctattctcacaaggatactcatacacctacgacgatgtgatatttctaccacacttcatcgacttttccactgacgccgtctcgctatccacgcgtctcagcaagcgcgtcccactctcgatcccatgcgtcgcttcgccgatggacactgtctcggaatcccacatggctgctgcaatggctgctcttggaggaatcggaatcgtgcactataactgcgacatcgatactcaagcttccgttatccgtcacgctaaatcgcttcaagttccgattgcgtctgatgctgtttttaaatgcccagagcaccagattggttctgttgatgattttggtccttcttccttcgtttttgtctcgcagacgggaacattgacaccgaaattgttgggttatgtttcaaaatcggagtggtcgagtatgaaagatgaccaaaaggaggtgaagatatatgattacatgaagagttgtgagaacaaagattactatgtgccatgggatattgatcttgacaagattgaggcggttttggaagataagcagaaagggtttgttgttctggagaaggaaggtgagactgtgaacgtagtaacaaaagacgatgtggagagggttaaaggatatcccaagttagggtcaggaactgttggtgcagacaagaaatggatggttggtgctgctatagggacaagggaatcagacaaggagaggctagagcacttagtgaaagctggagctaatgttgtggtgttggatagttcgcaagggaactcgatttaccagcttgagatgatcaagtatgtgaagaatacgtatccggagttggatgtggtcggtgggaatgtggtgactatgtaccaggctgagaacttgatcaaagcaggagttgatgggttaagagttggtatgggatctggatctatatgcacaacacaagaggtttgtgccgttggacgaggacaggctactgccgtgtacaaagtctcgacactagctgctcagcacggtgtacctgttatcgcagatggtggcatctcaaactcaggtcacattgtgaaggctctagttctgggagcatcaacggtgatgatgggaagcttcttggctggaagcaccgaggctcctggagcctatgaatatcgaaacggtaggagagtgaagaaatacagaggtatgggttcattagaagcaatgaccaaaggaagcgaccagagatacttgggagataccgcgaaactcaagattgcacaaggagtggttggagcggttgcagataaaggctcagtgttgaagtttataccatacacaatgcatgccgtgaagcaaggttttcaagatctcggtgcttcttctttgcagtctgctcacgagctattgagagataatacccttagactcgaggctcgtaccggtgcagcacagatagaaggtggaatccatggactggtgtcttacgaaaagaaatcgttttagctttccccagtttactttcttatgttacaatgcactacagcacttgtagtgtcaacaataaggtcttgtctcacatgtaatcctgtaatagttgaatcgtgtttcttaatgctatttcactgccccatttcaatc

SEQ ID NO: 39489 - protein, 502 aa, Arabidopsis thaliana
  peptide (1)..(502): Ceres Seq. ID no. 13508987
  misc_feature (18)..(100): Pfam Name: IMP dehydrogenase / GMP reductase domain Pfam Description: IMP dehydrogenase / GMP reductase domain
  misc_feature (5)..(502): Homolog of NCBI NO: 28413147 NR Description: inosine monophosphate dehydrogenase [Vigna
  misc_feature (1)..(502): Homolog of NCBI NO: 15219385 NR Description: inosine-5'-monophosphate dehydrogenase
  misc_feature (1)..(502): Homolog of NCBI NO: 21618070 NR Description: inosine-5'-monophosphate dehydrogenase, putative
  misc_feature (1)..(502): Homolog of NCBI NO: 15219217 NR Description: inosine-5'-monophosphate dehydrogenase, putative
MSGFEDGFSAEKLFSQGYSYTYDDVIFLPHFIDFSTDAVSLSTRLSKRVPLSIPCVASPMDTVSESHMAAAMAALGGIGIVHYNCDIDTQASVIRHAKSLQVPIASDAVFKCPEHQIGSVDDFGPSSFVFVSQTGTLTPKLLGYVSKSEWSSMKDDQKEVKIYDYMKSCENKDYYVPWDIDLDKIEAVLEDKQKGFVVLEKEGETVNVVTKDDVERVKGYPKLGSGTVGADKKWMVGAAIGTRESDKERLEHLVKAGANVVVLDSSQGNSIYQLEMIKYVKNTYPELDVVGGNVVTMYQAENLIKAGVDGLRVGMGSGSICTTQEVCAVGRGQATAVYKVSTLAAQHGVPVIADGGISNSGHIVKALVLGASTVMMGSFLAGSTEAPGAYEYRNGRRVKKYRGMGSLEAMTKGSDQRYLGDTAKLKIAQGVVGAVADKGSVLKFIPYTMHAVKQGFQDLGASSLQSAHELLRDNTLRLEARTGAAQIEGGIHGLVSYEKKSF

SEQ ID NO: 39490 - protein, 443 aa, Arabidopsis thaliana
  peptide (1)..(443): Ceres Seq. ID no. 13508988
  misc_feature (161)..(433): Pfam Name: IMP dehydrogenase / GMP reductase domain Pfam Description: IMP dehydrogenase / GMP reductase domain
  misc_feature (1)..(443): Homolog of NCBI NO: 28413147 NR Description: inosine monophosphate dehydrogenase [Vigna
  misc_feature (1)..(443): Homolog of NCBI NO: 15219385 NR Description: inosine-5'-monophosphate dehydrogenase
  misc_feature (1)..(443): Homolog of NCBI NO: 21618070 NR Description: inosine-5'-monophosphate dehydrogenase, putative
  misc_feature (1)..(443): Homolog of NCBI NO: 15219217 NR Description: inosine-5'-monophosphate dehydrogenase, putative
MDTVSESHMAAAMAALGGIGIVHYNCDIDTQASVIRHAKSLQVPIASDAVFKCPEHQIGSVDDFGPSSFVFVSQTGTLTPKLLGYVSKSEWSSMKDDQKEVKIYDYMKSCENKDYYVPWDIDLDKIEAVLEDKQKGFVVLEKEGETVNVVTKDDVERVKGYPKLGSGTVGADKKWMVGAAIGTRESDKERLEHLVKAGANVVVLDSSQGNSIYQLEMIKYVKNTYPELDVVGGNVVTMYQAENLIKAGVDGLRVGMGSGSICTTQEVCAVGRGQATAVYKVSTLAAQHGVPVIADGGISNSGHIVKALVLGASTVMMGSFLAGSTEAPGAYEYRNGRRVKKYRGMGSLEAMTKGSDQRYLGDTAKLKIAQGVVGAVADKGSVLKFIPYTMHAVKQGFQDLGASSLQSAHELLRDNTLRLEARTGAAQIEGGIHGLVSYEKKSF

SEQ ID NO: 39491 - protein, 435 aa, Arabidopsis thaliana
  peptide (1)..(435): Ceres Seq. ID no. 13508989
  misc_feature (153)..(425): Pfam Name: IMP dehydrogenase / GMP reductase domain Pfam Description: IMP dehydrogenase / GMP reductase domain
  misc_feature (1)..(435): Homolog of NCBI NO: 28413147 NR Description: inosine monophosphate dehydrogenase [Vigna
  misc_feature (1)..(435): Homolog of NCBI NO: 15219385 NR Description: inosine-5'-monophosphate dehydrogenase
  misc_feature (1)..(435): Homolog of NCBI NO: 21618070 NR Description: inosine-5'-monophosphate dehydrogenase, putative
  misc_feature (1)..(435): Homolog of NCBI NO: 15219217 NR Description: inosine-5'-monophosphate dehydrogenase, putative
MAAAMAALGGIGIVHYNCDIDTQASVIRHAKSLQVPIASDAVFKCPEHQIGSVDDFGPSSFVFVSQTGTLTPKLLGYVSKSEWSSMKDDQKEVKIYDYMKSCENKDYYVPWDIDLDKIEAVLEDKQKGFVVLEKEGETVNVVTKDDVERVKGYPKLGSGTVGADKKWMVGAAIGTRESDKERLEHLVKAGANVVVLDSSQGNSIYQLEMIKYVKNTYPELDVVGGNVVTMYQAENLIKAGVDGLRVGMGSGSICTTQEVCAVGRGQATAVYKVSTLAAQHGVPVIADGGISNSGHIVKALVLGASTVMMGSFLAGSTEAPGAYEYRNGRRVKKYRGMGSLEAMTKGSDQRYLGDTAKLKIAQGVVGAVADKGSVLKFIPYTMHAVKQGFQDLGASSLQSAHELLRDNTLRLEARTGAAQIEGGIHGLVSYEKKSF

SEQ ID NO: 39492 - DNA, 841 bp, Arabidopsis thaliana
  misc_feature (1)..(841): Ceres Seq. ID no. 13575786
  misc_feature: MA Experiment ID: 108461 Result: Down-regulated in Transcription
  misc_feature: MA Experiment 108461 PARAMETER Experiment Name: At_Germinating_Seeds_cDNA_P Parameter: Age (day) Value: 1 vs. 0
  misc_feature: MA Experiment 108461 PARAMETER Experiment Name: At_Germinating_Seeds_cDNA_P Parameter: Tissue Value: Germinating Seeds
  misc_feature: MA Experiment ID: 20000179 Result: Down-regulated in Transcription
  misc_feature: MA Experiment 20000179 PARAMETER Experiment Name: At_Germinating_Seeds_P Parameter: Age (hr) Value: 6 vs. 0
  misc_feature: MA Experiment 20000179 PARAMETER Experiment Name: At_Germinating_Seeds_P Parameter: Tissue Value: Germinating Seeds
  misc_feature: MA Experiment ID: 20000184 Result: Down-regulated in Transcription
  misc_feature: MA Experiment 20000184 PARAMETER Experiment Name: At_Shoots__P Parameter: Age (day) Value: 7
  misc_feature: MA Experiment 20000184 PARAMETER Experiment Name: At_Shoots__P Parameter: Tissue Value: Shoots vs. Whole Plant
  misc_feature: MA Experiment ID: 20000234 Result: Down-regulated in Transcription
  misc_feature: MA Experiment 20000234 PARAMETER Experiment Name: At_Siliques_P Parameter: Age (day) Value: 21
  misc_feature: MA Experiment 20000234 PARAMETER Experiment Name: At_Siliques_P Parameter: Organism Value: A. thaliana
  misc_feature: MA Experiment 20000234 PARAMETER Experiment Name: At_Siliques_P Parameter: Plant Line Value: WS
  misc_feature: MA Experiment 20000234 PARAMETER Experiment Name: At_Siliques_P Parameter: Tissue Value: Less Than 5mm Siliques vs. Whole Plant
  misc_feature: MA Experiment ID: 20000235 Result: Down-regulated in Transcription
  misc_feature: MA Experiment 20000235 PARAMETER Experiment Name: At_Siliques_P Parameter: Age (day) Value: 21
  misc_feature: MA Experiment 20000235 PARAMETER Experiment Name: At_Siliques_P Parameter: Organism Value: A. thaliana
  misc_feature: MA Experiment 20000235 PARAMETER Experiment Name: At_Siliques_P Parameter: Plant Line Value: WS
  misc_feature: MA Experiment 20000235 PARAMETER Experiment Name: At_Siliques_P Parameter: Tissue Value: 5-10mm Siliques vs. Whole Plant
  misc_feature: MA Experiment ID: 20000438 Result: Down-regulated in Transcription
  misc_feature: MA Experiment 20000438 PARAMETER Experiment Name: At_Shoots__P Parameter: Age (day) Value: 14
  misc_feature: MA Experiment 20000438 PARAMETER Experiment Name: At_Shoots__P Parameter: Tissue Value: Shoots vs. Whole Plant
  misc_feature: MA Experiment ID: 20001451 Result: Up-regulated in Transcription
  misc_feature: MA Experiment 20001451 PARAMETER Experiment Name: At_Far-red-induction_P Parameter: Age (day) Value: 7
  misc_feature: MA Experiment 20001451 PARAMETER Experiment Name: At_Far-red-induction_P Parameter: Light Value: Far-red vs. White
  misc_feature: MA Experiment 20001451 PARAMETER Experiment Name: At_Far-red-induction_P Parameter: Organism Value: A. thaliana
  misc_feature: MA Experiment 20001451 PARAMETER Experiment Name: At_Far-red-induction_P Parameter: Plant Line Value: Columbia
  misc_feature: MA Experiment 20001451 PARAMETER Experiment Name: At_Far-red-induction_P Parameter: Timepoint (hr) Value: 24
  misc_feature: MA Experiment 20001451 PARAMETER Experiment Name: At_Far-red-induction_P Parameter: Tissue Value: Whole Plant
ttttttccgctaggtttctgagatcttccattcgtctcgaattaagttgctacgatgaaaacagcaaaggggaaagataaagttaagaccacaaaggaagccttgaagccagttgatgacagaaaggtgggaaagaggaaggcaccggctgagaagcctactaaacgagagactcgtaaagagaagaaggctaaaaaggacccaaacaaaccaaaaagagctcctagtgccttctttgtctttctagaagattttagggtcacgttcaagaaagaaaatccaaatgtgaaggccgtctctgctgttgggaaagctggagggcagaaatggaagtcaatgtctcaagctgaaaaagctccatatgaagagaaagctgcaaaaaggaaagctgaatatgagaagcaaatggatgcatacaacaaaaacttggaggaagggagtgatgaatctgaaaagtctagatctgagataaatgatgaagatgaagccagtggggaggaagaactattagagaaggaagcggcaggtgatgatgaagaagaagaagaggaagaagatgacgatgatgatgacgacgaggaagaagactaaatcagggatagaaatcagattttgtatctcaagcttaactgcagatccttaagcagaagtaagtattttgtaatttgtgtgtcgacgagaactatagatctaaaatcgtgtgtttttttgtttttcttttcctaagaaagcgaaacagttgttagcatctctcaggatgtctgtttcagctttttgccacaacaaacaatgtaccaatgtctgcgttagtgatcatccaaaccaaaacataaactaatgt

SEQ ID NO: 39493 - protein, 178 aa, Arabidopsis thaliana
  peptide (1)..(178): Ceres Seq. ID no. 13575787
  misc_feature (53)..(122): Pfam Name: HMG (high mobility group) box Pfam Description: HMG (high mobility group) box
  misc_feature (33)..(150): Homolog of NCBI NO: 18394898 NR Description: expressed protein [Arabidopsis thaliana]
  misc_feature (33)..(164): Homolog of NCBI NO: 25402921 NR Description: protein F2D10.18 [imported] - Arabidopsis
  misc_feature (22)..(169): Homolog of NCBI NO: 7446212 NR Description: high mobility group protein - potato
  misc_feature (24)..(166): Homolog of NCBI NO: 729736 NR Description: HMG1/2-LIKE PROTEIN
  misc_feature (36)..(150): Homolog of NCBI NO: 25402921 NR Description: protein F2D10.18 [imported] - Arabidopsis
  misc_feature (11)..(171): Homolog of NCBI NO: 541968 NR Description: high mobility group protein HMG-1 - garden pea
  misc_feature (36)..(150): Homolog of NCBI NO: 18394900 NR Description: expressed protein [Arabidopsis thaliana]
  misc_feature (22)..(170): Homolog of NCBI NO: 7446213 NR Description: high mobility group protein HMG-1 - common
  misc_feature (24)..(175): Homolog of NCBI NO: 1052956 NR Description: high mobility group protein 2 HMG2 [Ipomoea nil]
  misc_feature (1)..(178): Homolog of NCBI NO: 15231065 NR Description: high mobility group protein 2-related
MKTAKGKDKVKTTKEALKPVDDRKVGKRKAPAEKPTKRETRKEKKAKKDPNKPKRAPSAFFVFLEDFRVTFKKENPNVKAVSAVGKAGGQKWKSMSQAEKAPYEEKAAKRKAEYEKQMDAYNKNLEEGSDESEKSRSEINDEDEASGEEELLEKEAAGDDEEEEEEEDDDDDDDEEED

SEQ ID NO: 39494 - DNA, 634 bp, Arabidopsis thaliana
  misc_feature (1)..(634): Ceres Seq. ID no. 12355519
  misc_feature: MA Experiment ID: 108462 Result: Down-regulated in Transcription
  misc_feature: MA Experiment 108462 PARAMETER Experiment Name: At_Germinating_Seeds_cDNA_P Parameter: Age (day) Value: 2 vs. 0
  misc_feature: MA Experiment 108462 PARAMETER Experiment Name: At_Germinating_Seeds_cDNA_P Parameter: Tissue Value: Germinating Seeds
  misc_feature: MA Experiment ID: 108463 Result: Down-regulated in Transcription
  misc_feature: MA Experiment 108463 PARAMETER Experiment Name: At_Germinating_Seeds_cDNA_P Parameter: Age (day) Value: 3 vs. 0
  misc_feature: MA Experiment 108463 PARAMETER Experiment Name: At_Germinating_Seeds_cDNA_P Parameter: Tissue Value: Germinating Seeds
  misc_feature: MA Experiment ID: 108464 Result: Down-regulated in Transcription
  misc_feature: MA Experiment 108464 PARAMETER Experiment Name: At_Germinating_Seeds_cDNA_P Parameter: Age (day) Value: 4 vs. 0
  misc_feature: MA Experiment 108464 PARAMETER Experiment Name: At_Germinating_Seeds_cDNA_P Parameter: Tissue Value: Germinating Seeds
  misc_feature: MA Experiment ID: 108488 Result: Down-regulated in Transcription
  misc_feature: MA Experiment ID: 108569 Result: Down-regulated in Transcription
  misc_feature: MA Experiment 108569 PARAMETER Experiment Name: At_0.001%_MeJA__cDNA_P Parameter: Timepoint (hr) Value: 6
  misc_feature: MA Experiment 108569 PARAMETER Experiment Name: At_0.001%_MeJA__cDNA_P Parameter: Tissue Value: Aerial
  misc_feature: MA Experiment 108569 PARAMETER Experiment Name: At_0.001%_MeJA__cDNA_P Parameter: Treatment Value: 0.001% MeJA vs. No Treatment
  misc_feature: MA Experiment ID: 20000111 Result: Down-regulated in Transcription
  misc_feature: MA Experiment 20000111 PARAMETER Experiment Name: At_42deg_Heat_cDNA_P Parameter: Temperature (deg C) Value: 42 vs. 22
  misc_feature: MA Experiment 20000111 PARAMETER Experiment Name: At_42deg_Heat_cDNA_P Parameter: Timepoint (hr) Value: 6
  misc_feature: MA Experiment 20000111 PARAMETER Experiment Name: At_42deg_Heat_cDNA_P Parameter: Tissue Value: Aerial
  misc_feature: MA Experiment ID: 20000173 Result: Down-regulated in Transcription
  misc_feature: MA Experiment 20000173 PARAMETER Experiment Name: At_42deg_Heat_P Parameter: Age (day) Value: 14
  misc_feature: MA Experiment 20000173 PARAMETER Experiment Name: At_42deg_Heat_P Parameter: Organism Value: A. thaliana
  misc_feature: MA Experiment 20000173 PARAMETER Experiment Name: At_42deg_Heat_P Parameter: Plant Line Value: WS
  misc_feature: MA Experiment 20000173 PARAMETER Experiment Name: At_42deg_Heat_P Parameter: Temperature (deg C) Value: 42 vs. 22
  misc_feature: MA Experiment 20000173 PARAMETER Experiment Name: At_42deg_Heat_P Parameter: Timepoint (hr) Value: 6
  misc_feature: MA Experiment 20000173 PARAMETER Experiment Name: At_42deg_Heat_P Parameter: Tissue Value: Aerial
  misc_feature: MA Experiment ID: 20000180 Result: Down-regulated in Transcription
  misc_feature: MA Experiment 20000180 PARAMETER Experiment Name: At_Germinating_Seeds_P Parameter: Age (hr) Value: 24 vs. 0
  misc_feature: MA Experiment 20000180 PARAMETER Experiment Name: At_Germinating_Seeds_P Parameter: Tissue Value: Germinating Seeds
  misc_feature: MA Experiment ID: 20000184 Result: Down-regulated in Transcription
  misc_feature: MA Experiment 20000184 PARAMETER Experiment Name: At_Shoots__P Parameter: Age (day) Value: 7
  misc_feature: MA Experiment 20000184 PARAMETER Experiment Name: At_Shoots__P Parameter: Tissue Value: Shoots vs. Whole Plant
  misc_feature: MA Experiment ID: 20001560 Result: Up-regulated in Transcription
  misc_feature: MA Experiment 20001560 PARAMETER Experiment Name: At_Drought_Soil_Dry_P Parameter: Age (day) Value: 28
  misc_feature: MA Experiment 20001560 PARAMETER Experiment Name: At_Drought_Soil_Dry_P Parameter: Organism Value: A. thaliana
  misc_feature: MA Experiment 20001560 PARAMETER Experiment Name: At_Drought_Soil_Dry_P Parameter: Plant Line Value: WS
  misc_feature: MA Experiment 20001560 PARAMETER Experiment Name: At_Drought_Soil_Dry_P Parameter: Post Timepoint (hr) Value: None
  misc_feature: MA Experiment 20001560 PARAMETER Experiment Name: At_Drought_Soil_Dry_P Parameter: Post-Treatment Value: None
  misc_feature: MA Experiment 20001560 PARAMETER Experiment Name: At_Drought_Soil_Dry_P Parameter: Timepoint (day) Value: 14
  misc_feature: MA Experiment 20001560 PARAMETER Experiment Name: At_Drought_Soil_Dry_P Parameter: Treatment Value: Drought vs. No Drought
atctgtcttgtttaatttcgttactcgtcgtcgtcccttaactcgagaaaaattagggttacggattccgattagcaagcatggaagagatcaccgatggagtgaacaacatgaacttagccaccgattcgcagaagaaaaaccggattcaggtttccaacactaagaaaccattgttcttctatgtcaatctcgccaagaggtatatgcagcagtacaatgatgttgaattgtctgcccttggcatggccattgcaactgttgttactgttactgaaatactgaagaacaatggttttgctgttgagaagaagatcatgacttcaactgttgatattaaggatgatgcaagaggacgtcctgtgcagaaagctaagattgagattacgcttgtgaagtcagagaagtttgatgaactaatggctgcagccaatgaagaaaaagaagatgcagaagctcaggtgcagaactgaaaatagcttttaactattttgggtttcttgatgcttattctataaagggctttatttgtttaatttcattaatttttggcttgttatcacaatggatggtttgttgtatctgttaacttttgataggaagaatgatagctaaacaataaaacatctcggcc

SEQ ID NO: 39495 - protein, 130 aa, Arabidopsis thaliana
  peptide (1)..(130): Ceres Seq. ID no. 12355520
  misc_feature (23)..(129): Homolog of NCBI NO: 8745040 NR Description: conserved hypothetical protein L6293.01
  misc_feature (23)..(129): Homolog of NCBI NO: 15029401 NR Description: unknown [Leishmania infantum]
  misc_feature (16)..(129): Homolog of NCBI NO: 15229322 NR Description: unknown protein; protein id: At3g04620.1
  misc_feature (21)..(129): Homolog of NCBI NO: 34910240 NR Description: OSJNBa0089K24.4 [Oryza sativa (japonica
  misc_feature (1)..(130): Homolog of NCBI NO: 18397011 NR Description: expressed protein
  misc_feature (1)..(130): Homolog of NCBI NO: 18403464 NR Description: expressed protein
MEEITDGVNNMNLATDSQKKNRIQVSNTKKPLFFYVNLAKRYMQQYNDVELSALGMAIATVVTVTEILKNNGFAVEKKIMTSTVDIKDDARGRPVQKAKIEITLVKSEKFDELMAAANEEKEDAEAQVQN

SEQ ID NO: 39496 - protein, 120 aa, Arabidopsis thaliana
  peptide (1)..(120): Ceres Seq. ID no. 12355521
  misc_feature (13)..(119): Homolog of NCBI NO: 8745040 NR Description: conserved hypothetical protein L6293.01
  misc_feature (13)..(119): Homolog of NCBI NO: 15029401 NR Description: unknown [Leishmania infantum]
  misc_feature (6)..(119): Homolog of NCBI NO: 15229322 NR Description: unknown protein; protein id: At3g04620.1
  misc_feature (11)..(119): Homolog of NCBI NO: 34910240 NR Description: OSJNBa0089K24.4 [Oryza sativa (japonica
  misc_feature (1)..(120): Homolog of NCBI NO: 18397011 NR Description: expressed protein
  misc_feature (1)..(120): Homolog of NCBI NO: 18403464 NR Description: expressed protein
MNLATDSQKKNRIQVSNTKKPLFFYVNLAKRYMQQYNDVELSALGMAIATVVTVTEILKNNGFAVEKKIMTSTVDIKDDARGRPVQKAKIEITLVKSEKFDELMAAANEEKEDAEAQVQN

SEQ ID NO: 39497 - protein, 88 aa, Arabidopsis thaliana
  peptide (1)..(88): Ceres Seq. ID no. 12355522
  misc_feature (1)..(87): Homolog of NCBI NO: 8745040 NR Description: conserved hypothetical protein L6293.01
  misc_feature (1)..(87): Homolog of NCBI NO: 15029401 NR Description: unknown [Leishmania infantum]
  misc_feature (1)..(87): Homolog of NCBI NO: 15229322 NR Description: unknown protein; protein id: At3g04620.1
  misc_feature (1)..(87): Homolog of NCBI NO: 34910240 NR Description: OSJNBa0089K24.4 [Oryza sativa (japonica
  misc_feature (1)..(88): Homolog of NCBI NO: 18397011 NR Description: expressed protein
  misc_feature (1)..(88): Homolog of NCBI NO: 18403464 NR Description: expressed protein
MQQYNDVELSALGMAIATVVTVTEILKNNGFAVEKKIMTSTVDIKDDARGRPVQKAKIEITLVKSEKFDELMAAANEEKEDAEAQVQN

SEQ ID NO: 39498 - DNA, 1311 bp, Arabidopsis thaliana
  misc_feature (1)..(1311): Ceres Seq. ID no. 13491424
  misc_feature: MA Experiment ID: 20000169 Result: Up-regulated in Transcription
  misc_feature: MA Experiment 20000169 PARAMETER Experiment Name: At_100uM_ABA_P Parameter: Age (day) Value: 14
  misc_feature: MA Experiment 20000169 PARAMETER Experiment Name: At_100uM_ABA_P Parameter: Organism Value: A. thaliana
  misc_feature: MA Experiment 20000169 PARAMETER Experiment Name: At_100uM_ABA_P Parameter: Plant Line Value: WS
  misc_feature: MA Experiment 20000169 PARAMETER Experiment Name: At_100uM_ABA_P Parameter: Timepoint (hr) Value: 6
  misc_feature: MA Experiment 20000169 PARAMETER Experiment Name: At_100uM_ABA_P Parameter: Tissue Value: Aerial
  misc_feature: MA Experiment 20000169 PARAMETER Experiment Name: At_100uM_ABA_P Parameter: Treatment Value: 100uM ABA vs. No Treatment
  misc_feature: MA Experiment ID: 20000171 Result: Down-regulated in Transcription
  misc_feature: MA Experiment 20000171 PARAMETER Experiment Name: At_42deg_Heat_P Parameter: Age (day) Value: 14
  misc_feature: MA Experiment 20000171 PARAMETER Experiment Name: At_42deg_Heat_P Parameter: Organism Value: A. thaliana
  misc_feature: MA Experiment 20000171 PARAMETER Experiment Name: At_42deg_Heat_P Parameter: Plant Line Value: WS
  misc_feature: MA Experiment 20000171 PARAMETER Experiment Name: At_42deg_Heat_P Parameter: Temperature (deg C) Value: 42 vs. 22
  misc_feature: MA Experiment 20000171 PARAMETER Experiment Name: At_42deg_Heat_P Parameter: Timepoint (hr) Value: 1
  misc_feature: MA Experiment 20000171 PARAMETER Experiment Name: At_42deg_Heat_P Parameter: Tissue Value: Aerial
  misc_feature: MA Experiment ID: 20000173 Result: Down-regulated in Transcription
  misc_feature: MA Experiment 20000173 PARAMETER Experiment Name: At_42deg_Heat_P Parameter: Age (day) Value: 14
  misc_feature: MA Experiment 20000173 PARAMETER Experiment Name: At_42deg_Heat_P Parameter: Organism Value: A. thaliana
  misc_feature: MA Experiment 20000173 PARAMETER Experiment Name: At_42deg_Heat_P Parameter: Plant Line Value: WS
  misc_feature: MA Experiment 20000173 PARAMETER Experiment Name: At_42deg_Heat_P Parameter: Temperature (deg C) Value: 42 vs. 22
  misc_feature: MA Experiment 20000173 PARAMETER Experiment Name: At_42deg_Heat_P Parameter: Timepoint (hr) Value: 6
  misc_feature: MA Experiment 20000173 PARAMETER Experiment Name: At_42deg_Heat_P Parameter: Tissue Value: Aerial
  misc_feature: MA Experiment ID: 20000182 Result: Down-regulated in Transcription
  misc_feature: MA Experiment 20000182 PARAMETER Experiment Name: At_2mM_SA_P Parameter: Age (day) Value: 14
  misc_feature: MA Experiment 20000182 PARAMETER Experiment Name: At_2mM_SA_P Parameter: Organism Value: A. thaliana
  misc_feature: MA Experiment 20000182 PARAMETER Experiment Name: At_2mM_SA_P Parameter: Plant Line Value: WS
  misc_feature: MA Experiment 20000182 PARAMETER Experiment Name: At_2mM_SA_P Parameter: Timepoint (hr) Value: 6
  misc_feature: MA Experiment 20000182 PARAMETER Experiment Name: At_2mM_SA_P Parameter: Tissue Value: Aerial
  misc_feature: MA Experiment 20000182 PARAMETER Experiment Name: At_2mM_SA_P Parameter: Treatment Value: 2mM SA vs. No Treatment
  misc_feature: MA Experiment ID: 20000184 Result: Down-regulated in Transcription
  misc_feature: MA Experiment 20000184 PARAMETER Experiment Name: At_Shoots__P Parameter: Age (day) Value: 7
  misc_feature: MA Experiment 20000184 PARAMETER Experiment Name: At_Shoots__P Parameter: Tissue Value: Shoots vs. Whole Plant
  misc_feature: MA Experiment ID: 20000185 Result: Down-regulated in Transcription
  misc_feature: MA Experiment 20000185 PARAMETER Experiment Name: At_Roots__P Parameter: Age (day) Value: 7 vs. 21
  misc_feature: MA Experiment 20000185 PARAMETER Experiment Name: At_Roots__P Parameter: Organism Value: A. thaliana
  misc_feature: MA Experiment 20000185 PARAMETER Experiment Name: At_Roots__P Parameter: Tissue Value: Roots vs. Whole Plant
  misc_feature: MA Experiment ID: 20000211 Result: Up-regulated in Transcription
  misc_feature: MA Experiment 20000211 PARAMETER Experiment Name: At_0.001percent_MeJA__P Parameter: Age (day) Value: 14
  misc_feature: MA Experiment 20000211 PARAMETER Experiment Name: At_0.001percent_MeJA__P Parameter: Organism Value: A. thaliana
  misc_feature: MA Experiment 20000211 PARAMETER Experiment Name: At_0.001percent_MeJA__P Parameter: Plant Line Value: WS
  misc_feature: MA Experiment 20000211 PARAMETER Experiment Name: At_0.001percent_MeJA__P Parameter: Timepoint (hr) Value: 1
  misc_feature: MA Experiment 20000211 PARAMETER Experiment Name: At_0.001percent_MeJA__P Parameter: Tissue Value: Aerial
  misc_feature: MA Experiment 20000211 PARAMETER Experiment Name: At_0.001percent_MeJA__P Parameter: Treatment Value: 0.001percent MeJA vs. No Treatment
  misc_feature: MA Experiment ID: 20000227 Result: Up-regulated in Transcription
  misc_feature: MA Experiment 20000227 PARAMETER Experiment Name: At_Root-Tips-vs-Tops_P Parameter: Tissue Value: Root Tips vs. Root Tops
  misc_feature: MA Experiment ID: 20000234 Result: Down-regulated in Transcription
  misc_feature: MA Experiment 20000234 PARAMETER Experiment Name: At_Siliques_P Parameter: Age (day) Value: 21
  misc_feature: MA Experiment 20000234 PARAMETER Experiment Name: At_Siliques_P Parameter: Organism Value: A. thaliana
  misc_feature: MA Experiment 20000234 PARAMETER Experiment Name: At_Siliques_P Parameter: Plant Line Value: WS
  misc_feature: MA Experiment 20000234 PARAMETER Experiment Name: At_Siliques_P Parameter: Tissue Value: Less Than 5mm Siliques vs. Whole Plant
  misc_feature: MA Experiment ID: 20000235 Result: Down-regulated in Transcription
  misc_feature: MA Experiment 20000235 PARAMETER Experiment Name: At_Siliques_P Parameter: Age (day) Value: 21
  misc_feature: MA Experiment 20000235 PARAMETER Experiment Name: At_Siliques_P Parameter: Organism Value: A. thaliana
  misc_feature: MA Experiment 20000235 PARAMETER Experiment Name: At_Siliques_P Parameter: Plant Line Value: WS
  misc_feature: MA Experiment 20000235 PARAMETER Experiment Name: At_Siliques_P Parameter: Tissue Value: 5-10mm Siliques vs. Whole Plant
  misc_feature: MA Experiment ID: 20000438 Result: Down-regulated in Transcription
  misc_feature: MA Experiment 20000438 PARAMETER Experiment Name: At_Shoots__P Parameter: Age (day) Value: 14
  misc_feature: MA Experiment 20000438 PARAMETER Experiment Name: At_Shoots__P Parameter: Tissue Value: Shoots vs. Whole Plant
  misc_feature: MA Experiment ID: 20000439 Result: Down-regulated in Transcription
  misc_feature: MA Experiment 20000439 PARAMETER Experiment Name: At_Roots__P Parameter: Age (day) Value: 14 vs. 21
  misc_feature: MA Experiment 20000439 PARAMETER Experiment Name: At_Roots__P Parameter: Organism Value: A. thaliana
  misc_feature: MA Experiment 20000439 PARAMETER Experiment Name: At_Roots__P Parameter: Tissue Value: Roots vs. Whole Plant
  misc_feature: MA Experiment ID: 20000455 Result: Up-regulated in Transcription
  misc_feature: MA Experiment 20000455 PARAMETER Experiment Name: At_100uM_ABA_P Parameter: Age (day) Value: 16
  misc_feature: MA Experiment 20000455 PARAMETER Experiment Name: At_100uM_ABA_P Parameter: Organism Value: A. thaliana
  misc_feature: MA Experiment 20000455 PARAMETER Experiment Name: At_100uM_ABA_P Parameter: Plant Line Value: WS
  misc_feature: MA Experiment 20000455 PARAMETER Experiment Name: At_100uM_ABA_P Parameter: Timepoint (hr) Value: 48
  misc_feature: MA Experiment 20000455 PARAMETER Experiment Name: At_100uM_ABA_P Parameter: Tissue Value: Aerial
  misc_feature: MA Experiment 20000455 PARAMETER Experiment Name: At_100uM_ABA_P Parameter: Treatment Value: 100uM ABA vs. No Treatment
  misc_feature: MA Experiment ID: 20000495 Result: Up-regulated in Transcription
  misc_feature: MA Experiment 20000495 PARAMETER Experiment Name: At_Guard_Cells_P Parameter: Harvest Date Value: 8/2/2002
  misc_feature: MA Experiment 20000495 PARAMETER Experiment Name: At_Guard_Cells_P Parameter: Organism Value: A. thaliana
  misc_feature: MA Experiment 20000495 PARAMETER Experiment Name: At_Guard_Cells_P Parameter: Tissue Value: Guard Cells vs. Leaves
  misc_feature: MA Experiment ID: 20000527 Result: Up-regulated in Transcription
  misc_feature: MA Experiment 20000527 PARAMETER Experiment Name: At_10percent_PEG_P Parameter: Age (day) Value: 20
  misc_feature: MA Experiment 20000527 PARAMETER Experiment Name: At_10percent_PEG_P Parameter: Organism Value: A. thaliana
  misc_feature: MA Experiment 20000527 PARAMETER Experiment Name: At_10percent_PEG_P Parameter: Plant Line Value: WS
  misc_feature: MA Experiment 20000527 PARAMETER Experiment Name: At_10percent_PEG_P Parameter: Timepoint (day) Value: 20
  misc_feature: MA Experiment 20000527 PARAMETER Experiment Name: At_10percent_PEG_P Parameter: Tissue Value: Whole Plant
  misc_feature: MA Experiment 20000527 PARAMETER Experiment Name: At_10percent_PEG_P Parameter: Treatment Value: 10percent PEG vs. No Treatment
  misc_feature: MA Experiment ID: 20001247 Result: Down-regulated in Transcription
  misc_feature: MA Experiment 20001247 PARAMETER Experiment Name: At_Far-red-induction_P Parameter: Age (day) Value: 7
  misc_feature: MA Experiment 20001247 PARAMETER Experiment Name: At_Far-red-induction_P Parameter: Light Value: Far-red vs. White
  misc_feature: MA Experiment 20001247 PARAMETER Experiment Name: At_Far-red-induction_P Parameter: Organism Value: A. thaliana
  misc_feature: MA Experiment 20001247 PARAMETER Experiment Name: At_Far-red-induction_P Parameter: Plant Line Value: Columbia
  misc_feature: MA Experiment 20001247 PARAMETER Experiment Name: At_Far-red-induction_P Parameter: Timepoint (hr) Value: 1
  misc_feature: MA Experiment 20001247 PARAMETER Experiment Name: At_Far-red-induction_P Parameter: Tissue Value: Whole Plant
  misc_feature: MA Experiment ID: 20001248 Result: Down-regulated in Transcription
  misc_feature: MA Experiment 20001248 PARAMETER Experiment Name: At_Far-red-induction_P Parameter: Age (day) Value: 7
  misc_feature: MA Experiment 20001248 PARAMETER Experiment Name: At_Far-red-induction_P Parameter: Light Value: Far-red vs. White
  misc_feature: MA Experiment 20001248 PARAMETER Experiment Name: At_Far-red-induction_P Parameter: Organism Value: A. thaliana
  misc_feature: MA Experiment 20001248 PARAMETER Experiment Name: At_Far-red-induction_P Parameter: Plant Line Value: Columbia
  misc_feature: MA Experiment 20001248 PARAMETER Experiment Name: At_Far-red-induction_P Parameter: Timepoint (hr) Value: 4
  misc_feature: MA Experiment 20001248 PARAMETER Experiment Name: At_Far-red-induction_P Parameter: Tissue Value: Whole Plant
  misc_feature: MA Experiment ID: 20001450 Result: Down-regulated in Transcription
  misc_feature: MA Experiment 20001450 PARAMETER Experiment Name: At_Far-red-induction_P Parameter: Age (day) Value: 7
  misc_feature: MA Experiment 20001450 PARAMETER Experiment Name: At_Far-red-induction_P Parameter: Light Value: Far-red vs. White
  misc_feature: MA Experiment 20001450 PARAMETER Experiment Name: At_Far-red-induction_P Parameter: Organism Value: A. thaliana
  misc_feature: MA Experiment 20001450 PARAMETER Experiment Name: At_Far-red-induction_P Parameter: Plant Line Value: Columbia
  misc_feature: MA Experiment 20001450 PARAMETER Experiment Name: At_Far-red-induction_P Parameter: Timepoint (hr) Value: 8
  misc_feature: MA Experiment 20001450 PARAMETER Experiment Name: At_Far-red-induction_P Parameter: Tissue Value: Whole Plant
  misc_feature: MA Experiment ID: 20001451 Result: Down-regulated in Transcription
  misc_feature: MA Experiment 20001451 PARAMETER Experiment Name: At_Far-red-induction_P Parameter: Age (day) Value: 7
  misc_feature: MA Experiment 20001451 PARAMETER Experiment Name: At_Far-red-induction_P Parameter: Light Value: Far-red vs. White
  misc_feature: MA Experiment 20001451 PARAMETER Experiment Name: At_Far-red-induction_P Parameter: Organism Value: A. thaliana
  misc_feature: MA Experiment 20001451 PARAMETER Experiment Name: At_Far-red-induction_P Parameter: Plant Line Value: Columbia
  misc_feature: MA Experiment 20001451 PARAMETER Experiment Name: At_Far-red-induction_P Parameter: Timepoint (hr) Value: 24
  misc_feature: MA Experiment 20001451 PARAMETER Experiment Name: At_Far-red-induction_P Parameter: Tissue Value: Whole Plant
  misc_feature: MA Experiment ID: 20001457 Result: Down-regulated in Transcription
  misc_feature: MA Experiment 20001457 PARAMETER Experiment Name: At_50mM_NH4NO3_L-to-H_P Parameter: Age (day) Value: Undefined
  misc_feature: MA Experiment 20001457 PARAMETER Experiment Name: At_50mM_NH4NO3_L-to-H_P Parameter: Organism Value: Undefined
  misc_feature: MA Experiment 20001457 PARAMETER Experiment Name: At_50mM_NH4NO3_L-to-H_P Parameter: Plant Line Value: Undefined
  misc_feature: MA Experiment 20001457 PARAMETER Experiment Name: At_50mM_NH4NO3_L-to-H_P Parameter: Timepoint (hr) Value: 0.5
  misc_feature: MA Experiment 20001457 PARAMETER Experiment Name: At_50mM_NH4NO3_L-to-H_P Parameter: Tissue Value: Siliques
  misc_feature: MA Experiment 20001457 PARAMETER Experiment Name: At_50mM_NH4NO3_L-to-H_P Parameter: Treatment Value: 50mM NH4NO3 vs. 100mM Manitol
  misc_feature: MA Experiment ID: 20001555 Result: Up-regulated in Transcription
  misc_feature: MA Experiment 20001555 PARAMETER Experiment Name: At_Drought_Soil_Dry_P Parameter: Age (day) Value: 24
  misc_feature: MA Experiment 20001555 PARAMETER Experiment Name: At_Drought_Soil_Dry_P Parameter: Organism Value: A. thaliana
  misc_feature: MA Experiment 20001555 PARAMETER Experiment Name: At_Drought_Soil_Dry_P Parameter: Plant Line Value: WS
  misc_feature: MA Experiment 20001555 PARAMETER Experiment Name: At_Drought_Soil_Dry_P Parameter: Post Timepoint (hr) Value: None
  misc_feature: MA Experiment 20001555 PARAMETER Experiment Name: At_Drought_Soil_Dry_P Parameter: Post-Treatment Value: None
  misc_feature: MA Experiment 20001555 PARAMETER Experiment Name: At_Drought_Soil_Dry_P Parameter: Timepoint (day) Value: 10
  misc_feature: MA Experiment 20001555 PARAMETER Experiment Name: At_Drought_Soil_Dry_P Parameter: Treatment Value: Drought vs. No Drought
  misc_feature: MA Experiment ID: 20001557 Result: Down-regulated in Transcription
  misc_feature: MA Experiment 20001557 PARAMETER Experiment Name: At_Drought_Soil_Dry_P Parameter: Age (day) Value: 27
  misc_feature: MA Experiment 20001557 PARAMETER Experiment Name: At_Drought_Soil_Dry_P Parameter: Organism Value: A. thaliana
  misc_feature: MA Experiment 20001557 PARAMETER Experiment Name: At_Drought_Soil_Dry_P Parameter: Plant Line Value: WS
  misc_feature: MA Experiment 20001557 PARAMETER Experiment Name: At_Drought_Soil_Dry_P Parameter: Post Timepoint (hr) Value: 3
  misc_feature: MA Experiment 20001557 PARAMETER Experiment Name: At_Drought_Soil_Dry_P Parameter: Post-Treatment Value: Re-Water vs. No Drought
  misc_feature: MA Experiment 20001557 PARAMETER Experiment Name: At_Drought_Soil_Dry_P Parameter: Timepoint (day) Value: 13
  misc_feature: MA Experiment 20001557 PARAMETER Experiment Name: At_Drought_Soil_Dry_P Parameter: Treatment Value: Drought vs. No Drought
  misc_feature: MA Experiment ID: 20001558 Result: Down-regulated in Transcription
  misc_feature: MA Experiment 20001558 PARAMETER Experiment Name: At_Drought_Soil_Dry_P Parameter: Age (day) Value: 27
  misc_feature: MA Experiment 20001558 PARAMETER Experiment Name: At_Drought_Soil_Dry_P Parameter: Organism Value: A. thaliana
  misc_feature: MA Experiment 20001558 PARAMETER Experiment Name: At_Drought_Soil_Dry_P Parameter: Plant Line Value: WS
  misc_feature: MA Experiment 20001558 PARAMETER Experiment Name: At_Drought_Soil_Dry_P Parameter: Post Timepoint (hr) Value: 6
  misc_feature: MA Experiment 20001558 PARAMETER Experiment Name: At_Drought_Soil_Dry_P Parameter: Post-Treatment Value: Re-Water vs. No Drought
  misc_feature: MA Experiment 20001558 PARAMETER Experiment Name: At_Drought_Soil_Dry_P Parameter: Timepoint (day) Value: 13
  misc_feature: MA Experiment 20001558 PARAMETER Experiment Name: At_Drought_Soil_Dry_P Parameter: Treatment Value: Drought vs. No Drought
  misc_feature: MA Experiment ID: 20001560 Result: Up-regulated in Transcription
  misc_feature: MA Experiment 20001560 PARAMETER Experiment Name: At_Drought_Soil_Dry_P Parameter: Age (day) Value: 28
  misc_feature: MA Experiment 20001560 PARAMETER Experiment Name: At_Drought_Soil_Dry_P Parameter: Organism Value: A. thaliana
  misc_feature: MA Experiment 20001560 PARAMETER Experiment Name: At_Drought_Soil_Dry_P Parameter: Plant Line Value: WS
  misc_feature: MA Experiment 20001560 PARAMETER Experiment Name: At_Drought_Soil_Dry_P Parameter: Post Timepoint (hr) Value: None
  misc_feature: MA Experiment 20001560 PARAMETER Experiment Name: At_Drought_Soil_Dry_P Parameter: Post-Treatment Value: None
  misc_feature: MA Experiment 20001560 PARAMETER Experiment Name: At_Drought_Soil_Dry_P Parameter: Timepoint (day) Value: 14
  misc_feature: MA Experiment 20001560 PARAMETER Experiment Name: At_Drought_Soil_Dry_P Parameter: Treatment Value: Drought vs. No Drought
  misc_feature: MA Experiment ID: 20001772 Result: Down-regulated in Transcription
  misc_feature: MA Experiment 20001772 PARAMETER Experiment Name: At_Far-red-enriched-adult_P Parameter: Age (day) Value: 29
  misc_feature: MA Experiment 20001772 PARAMETER Experiment Name: At_Far-red-enriched-adult_P Parameter: Light Value: Far-red enriched vs. White
  misc_feature: MA Experiment 20001772 PARAMETER Experiment Name: At_Far-red-enriched-adult_P Parameter: Organism Value: A. thaliana
  misc_feature: MA Experiment 20001772 PARAMETER Experiment Name: At_Far-red-enriched-adult_P Parameter: Plant Line Value: Columbia
  misc_feature: MA Experiment 20001772 PARAMETER Experiment Name: At_Far-red-enriched-adult_P Parameter: Timepoint (hr) Value: 24
  misc_feature: MA Experiment 20001772 PARAMETER Experiment Name: At_Far-red-enriched-adult_P Parameter: Tissue Value: Aerial
  misc_feature: MA Experiment ID: 20001773 Result: Up-regulated in Transcription
  misc_feature: MA Experiment 20001773 PARAMETER Experiment Name: At_Far-red-enriched-adult_P Parameter: Age (day) Value: 30
  misc_feature: MA Experiment 20001773 PARAMETER Experiment Name: At_Far-red-enriched-adult_P Parameter: Light Value: Far-red enriched vs. White
  misc_feature: MA Experiment 20001773 PARAMETER Experiment Name: At_Far-red-enriched-adult_P Parameter: Organism Value: A. thaliana
  misc_feature: MA Experiment 20001773 PARAMETER Experiment Name: At_Far-red-enriched-adult_P Parameter: Plant Line Value: Columbia
  misc_feature: MA Experiment 20001773 PARAMETER Experiment Name: At_Far-red-enriched-adult_P Parameter: Timepoint (hr) Value: 48
  misc_feature: MA Experiment 20001773 PARAMETER Experiment Name: At_Far-red-enriched-adult_P Parameter: Tissue Value: Aerial
  misc_feature: MA Experiment ID: 20001904 Result: Up-regulated in Transcription
  misc_feature: MA Experiment 20001904 PARAMETER Experiment Name: At_Drought_Reproduction_P Parameter: Age (day) Value: 37
  misc_feature: MA Experiment 20001904 PARAMETER Experiment Name: At_Drought_Reproduction_P Parameter: Organism Value: A. thaliana
  misc_feature: MA Experiment 20001904 PARAMETER Experiment Name: At_Drought_Reproduction_P Parameter: Plant Line Value: WS
  misc_feature: MA Experiment 20001904 PARAMETER Experiment Name: At_Drought_Reproduction_P Parameter: Timepoint (day) Value: 7
  misc_feature: MA Experiment 20001904 PARAMETER Experiment Name: At_Drought_Reproduction_P Parameter: Tissue Value: Rosettes
  misc_feature: MA Experiment 20001904 PARAMETER Experiment Name: At_Drought_Reproduction_P Parameter: Treatment Value: Drought vs. No Drought
  misc_feature: MA Experiment ID: 20001906 Result: Up-regulated in Transcription
  misc_feature: MA Experiment 20001906 PARAMETER Experiment Name: At_Drought_Reproduction_P Parameter: Age (day) Value: 35
  misc_feature: MA Experiment 20001906 PARAMETER Experiment Name: At_Drought_Reproduction_P Parameter: Organism Value: A. thaliana
  misc_feature: MA Experiment 20001906 PARAMETER Experiment Name: At_Drought_Reproduction_P Parameter: Plant Line Value: WS
  misc_feature: MA Experiment 20001906 PARAMETER Experiment Name: At_Drought_Reproduction_P Parameter: Timepoint (day) Value: 5
  misc_feature: MA Experiment 20001906 PARAMETER Experiment Name: At_Drought_Reproduction_P Parameter: Tissue Value: Siliques
  misc_feature: MA Experiment 20001906 PARAMETER Experiment Name: At_Drought_Reproduction_P Parameter: Treatment Value: Drought vs. No Drought
aaccatatgaatctcacgatcaaagataatatctcatcatctatatagtatttgtctcgatattagagacgtacacactttgtttatactcaaatcaatatgggatctttcgtgaaagaagaaacgtcgtcgttgatgacagattttttggagaagtgcggtggttatgcggtggtggatggagggtttgcgacggagctacagcgccacggagctgatatcaatgatccactttggagtgctaagtgccttattacttctcctcaccttgttacaaaggtgcacttggattaccttgaatctggagcaaatatcatcataacagcatcttaccaggcgacgatacaaggttttgtggcaaaaggtctatcggtgggagaagcagaaaatttacttagaaggagcgttgaaatcacgtacgaggcacgtgagattttctacaacagatgcaccaagggttcatgggatttcgcctacgctggaaaagcttcccggagaccaattcttgtcgcagcttccgttggtagctatggagcttatctcgctgacggctccgaatacagtgggatatatggagattctgtgagtaaggagacattaaaggatttccatagaagaagagttcaaatcttagcaaaatctggagccgacctaatagcattcgagactattccaaataagctcgaagcagaggcttatgcggatcttcttgaggaggaagatatcgatattccggcatggttctcgttcacttccaaggacggagtcagtgtgccacgaggagattcagttgtagaatgtgcgaaagtggcagattcatgcaagaacgtggtggccattggaatcaattgtactgcaccaagatacattcatgctttaattatctccttgcgccagatgacacgcaaaccaatcgttgtatacccaaacagcggggaagtctacgacggtctgaacaagaaatggattaagtcagagggagagtcagaggaggattttgtgtcgtacgtgagtaaatggagagatgcaggagcttctctgtttggaggatgttgtcggactactccaaacaccatcagagccattgctaaagttctctccgacgaaccttctgcagcatcaaaacccaaattcgggcaatagacttgtcaacggtgaatttctatgcttgtgatgtcaggaaggagtttaaaatgtacaataacgcaagcgtagttctgtaatctactaatatgttgaaactataaataatggtaaactatgttagagacaactgtgtaattagcgtatgataataatggagtttaaacg

SEQ ID NO: 39499 - protein, 347 aa, Arabidopsis thaliana
  peptide (1)..(347): Ceres Seq. ID no. 13491425
  misc_feature (23)..(335): Pfam Name: Homocysteine S-methyltransferase Pfam Description: Homocysteine S-methyltransferase
  misc_feature (5)..(333): Homolog of NCBI NO: 15230929 NR Description: homocysteine S-methyltransferase AtHMT-1
  misc_feature (8)..(335): Homolog of NCBI NO: 10732791 NR Description: homocysteine S-methyltransferase-4 [Zea mays]
  misc_feature (16)..(334): Homolog of NCBI NO: 10732789 NR Description: homocysteine S-methyltransferase-3 [Zea mays]
  misc_feature (16)..(343): Homolog of NCBI NO: 10732787 NR Description: homocysteine S-methyltransferase-2 [Zea mays]
  misc_feature (7)..(333): Homolog of NCBI NO: 37534456 NR Description: putative homocysteine S-methyltransferase-2
  misc_feature (9)..(342): Homolog of NCBI NO: 6094303 NR Description: Selenocysteine methyltransferase
  misc_feature (13)..(338): Homolog of NCBI NO: 25453566 NR Description: homocysteine S-methyltransferase (EC 2.1.1.10)
  misc_feature (13)..(338): Homolog of NCBI NO: 15229396 NR Description: homocysteine S-methyltransferase AtHMT-2
  misc_feature (1)..(347): Homolog of NCBI NO: 21593147 NR Description: putative selenocysteine methyltransferase
  misc_feature (1)..(347): Homolog of NCBI NO: 18403505 NR Description: selenocysteine methyltransferase -related
MGSFVKEETSSLMTDFLEKCGGYAVVDGGFATELQRHGADINDPLWSAKCLITSPHLVTKVHLDYLESGANIIITASYQATIQGFVAKGLSVGEAENLLRRSVEITYEAREIFYNRCTKGSWDFAYAGKASRRPILVAASVGSYGAYLADGSEYSGIYGDSVSKETLKDFHRRRVQILAKSGADLIAFETIPNKLEAEAYADLLEEEDIDIPAWFSFTSKDGVSVPRGDSVVECAKVADSCKNVVAIGINCTAPRYIHALIISLRQMTRKPIVVYPNSGEVYDGLNKKWIKSEGESEEDFVSYVSKWRDAGASLFGGCCRTTPNTIRAIAKVLSDEPSAASKPKFGQ

SEQ ID NO: 39500 - protein, 335 aa, Arabidopsis thaliana
  peptide (1)..(335): Ceres Seq. ID no. 13491426
  misc_feature (11)..(323): Pfam Name: Homocysteine S-methyltransferase Pfam Description: Homocysteine S-methyltransferase
  misc_feature (1)..(321): Homolog of NCBI NO: 15230929 NR Description: homocysteine S-methyltransferase AtHMT-1
  misc_feature (1)..(323): Homolog of NCBI NO: 10732791 NR Description: homocysteine S-methyltransferase-4 [Zea mays]
  misc_feature (4)..(322): Homolog of NCBI NO: 10732789 NR Description: homocysteine S-methyltransferase-3 [Zea mays]
  misc_feature (4)..(331): Homolog of NCBI NO: 10732787 NR Description: homocysteine S-methyltransferase-2 [Zea mays]
  misc_feature (1)..(321): Homolog of NCBI NO: 37534456 NR Description: putative homocysteine S-methyltransferase-2
  misc_feature (1)..(330): Homolog of NCBI NO: 6094303 NR Description: Selenocysteine methyltransferase
  misc_feature (1)..(326): Homolog of NCBI NO: 25453566 NR Description: homocysteine S-methyltransferase (EC 2.1.1.10)
  misc_feature (1)..(326): Homolog of NCBI NO: 15229396 NR Description: homocysteine S-methyltransferase AtHMT-2
  misc_feature (1)..(335): Homolog of NCBI NO: 21593147 NR Description: putative selenocysteine methyltransferase
  misc_feature (1)..(335): Homolog of NCBI NO: 18403505 NR Description: selenocysteine methyltransferase -related
MTDFLEKCGGYAVVDGGFATELQRHGADINDPLWSAKCLITSPHLVTKVHLDYLESGANIIITASYQATIQGFVAKGLSVGEAENLLRRSVEITYEAREIFYNRCTKGSWDFAYAGKASRRPILVAASVGSYGAYLADGSEYSGIYGDSVSKETLKDFHRRRVQILAKSGADLIAFETIPNKLEAEAYADLLEEEDIDIPAWFSFTSKDGVSVPRGDSVVECAKVADSCKNVVAIGINCTAPRYIHALIISLRQMTRKPIVVYPNSGEVYDGLNKKWIKSEGESEEDFVSYVSKWRDAGASLFGGCCRTTPNTIRAIAKVLSDEPSAASKPKFGQ

SEQ ID NO: 39501 - DNA, 1141 bp, Arabidopsis thaliana
  misc_feature (1)..(1141): Ceres Seq. ID no. 13593329
  misc_feature: MA Experiment ID: 20000171 Result: Down-regulated in Transcription
  misc_feature: MA Experiment 20000171 PARAMETER Experiment Name: At_42deg_Heat_P Parameter: Age (day) Value: 14
  misc_feature: MA Experiment 20000171 PARAMETER Experiment Name: At_42deg_Heat_P Parameter: Organism Value: A. thaliana
  misc_feature: MA Experiment 20000171 PARAMETER Experiment Name: At_42deg_Heat_P Parameter: Plant Line Value: WS
  misc_feature: MA Experiment 20000171 PARAMETER Experiment Name: At_42deg_Heat_P Parameter: Temperature (deg C) Value: 42 vs. 22
  misc_feature: MA Experiment 20000171 PARAMETER Experiment Name: At_42deg_Heat_P Parameter: Timepoint (hr) Value: 1
  misc_feature: MA Experiment 20000171 PARAMETER Experiment Name: At_42deg_Heat_P Parameter: Tissue Value: Aerial
  misc_feature: MA Experiment ID: 20000213 Result: Up-regulated in Transcription
  misc_feature: MA Experiment 20000213 PARAMETER Experiment Name: At_4deg_Cold_P Parameter: Timepoint (hr) Value: 2
  misc_feature: MA Experiment ID: 20000265 Result: Down-regulated in Transcription
  misc_feature: MA Experiment 20000265 PARAMETER Experiment Name: At_Open_Flower_P Parameter: Age (day) Value: 21
  misc_feature: MA Experiment 20000265 PARAMETER Experiment Name: At_Open_Flower_P Parameter: Plant Line Value: WS
  misc_feature: MA Experiment 20000265 PARAMETER Experiment Name: At_Open_Flower_P Parameter: Tissue Value: Closed Flower vs. Whole Plant
  misc_feature: MA Experiment ID: 20000286 Result: Down-regulated in Transcription
  misc_feature: MA Experiment 20000286 PARAMETER Experiment Name: At_Open_Flower_P Parameter: Age (day) Value: 21
  misc_feature: MA Experiment 20000286 PARAMETER Experiment Name: At_Open_Flower_P Parameter: Plant Line Value: WS
  misc_feature: MA Experiment 20000286 PARAMETER Experiment Name: At_Open_Flower_P Parameter: Tissue Value: Half Open vs. Whole Plant
  misc_feature: MA Experiment ID: 20000438 Result: Down-regulated in Transcription
  misc_feature: MA Experiment 20000438 PARAMETER Experiment Name: At_Shoots__P Parameter: Age (day) Value: 14
  misc_feature: MA Experiment 20000438 PARAMETER Experiment Name: At_Shoots__P Parameter: Tissue Value: Shoots vs. Whole Plant
  misc_feature: MA Experiment ID: 20000495 Result: Down-regulated in Transcription
  misc_feature: MA Experiment 20000495 PARAMETER Experiment Name: At_Guard_Cells_P Parameter: Harvest Date Value: 8/2/2002
  misc_feature: MA Experiment 20000495 PARAMETER Experiment Name: At_Guard_Cells_P Parameter: Organism Value: A. thaliana
  misc_feature: MA Experiment 20000495 PARAMETER Experiment Name: At_Guard_Cells_P Parameter: Tissue Value: Guard Cells vs. Leaves
  misc_feature: MA Experiment ID: 20000606 Result: Up-regulated in Transcription
  misc_feature: MA Experiment 20000606 PARAMETER Experiment Name: At_CS8548_Mutant_P Parameter: Age (day) Value: 14
  misc_feature: MA Experiment 20000606 PARAMETER Experiment Name: At_CS8548_Mutant_P Parameter: Plant Line Value: CS8548 vs. wt
  misc_feature: MA Experiment 20000606 PARAMETER Experiment Name: At_CS8548_Mutant_P Parameter: Tissue Value: Whole Plant
  misc_feature: MA Experiment ID: 20001247 Result: Up-regulated in Transcription
  misc_feature: MA Experiment 20001247 PARAMETER Experiment Name: At_Far-red-induction_P Parameter: Age (day) Value: 7
  misc_feature: MA Experiment 20001247 PARAMETER Experiment Name: At_Far-red-induction_P Parameter: Light Value: Far-red vs. White
  misc_feature: MA Experiment 20001247 PARAMETER Experiment Name: At_Far-red-induction_P Parameter: Organism Value: A. thaliana
  misc_feature: MA Experiment 20001247 PARAMETER Experiment Name: At_Far-red-induction_P Parameter: Plant Line Value: Columbia
  misc_feature: MA Experiment 20001247 PARAMETER Experiment Name: At_Far-red-induction_P Parameter: Timepoint (hr) Value: 1
  misc_feature: MA Experiment 20001247 PARAMETER Experiment Name: At_Far-red-induction_P Parameter: Tissue Value: Whole Plant
atcttacactaattattaaactaatcacccattaactctaaatctcaacaaatcataatctattataaagaagacacacatctcctaaatcgaawwacccttattattattcattctctctaatcaaatcctcttctctctcaaatctcaatctccgattatgacagactacagagtttaccctgcatcaaaacctcccgccatcgtcggtggcggtgccccaaccaccaatccaactttcccggcgaacaaagctcagctctacaacgcaaatcgtcccgcttaccgtccaccagctggtcgtcgtcgtactagccatacccgtggatgttgctgccgttgctgttgctggacgatattcgtaatcatcctcttactcctcatcgtcgccgccgcatcagccgtcgtatacctaatctaccgtcctcaacgacctagcttcactgtctctgaactcaaaatctccactctcaacttcacatccgccgctcgtctcaccaccgccatttccctctccgtcatcgccagaaaccctaacaaaaacgtcggattcatctacgacgtcaccgacatcacactctataaagtatccaccggcggagatgatgatgtagtcattggtaaaggaacgatcgcggcgttttctcacgggaaagaacacgactacgcttagaagtacgatcggaagtcctccggaagaactcgatgagatctcggcgggtaagctgaaaggagatctgaaggcgaagaaagcagtggcgattaagattgttttgaactcgaaggtgaaagtgaagatgggagctctgaaaactcctaaatcgggaattagggttacttgtgaagggattaaattggtggctccgacgggaaagaaggcgacgacggctacgacttccgccgctaagtgtaaggttgatccaagatttaagatctggaaaattactttctaaatatagtaaacaaataatggaatcacattcttagttttttcttcattttctttttattactccattgtttcaattttcatttctttttaaatttgatttcatatacagttctttgattcctgtaagactttatttttttggtttatgtaaatgaagatataaatatttgtgttcaaawrawraamraa

SEQ ID NO: 39502 - protein, 170 aa, Arabidopsis thaliana
  peptide (1)..(170): Ceres Seq. ID no. 15221211
  misc_feature (5)..(167): Homolog of NCBI NO: 18408342 NR Description: expressed protein [Arabidopsis thaliana]
  misc_feature (1)..(167): Homolog of NCBI NO: 15239459 NR Description: hypothetical protein [Arabidopsis thaliana]
  misc_feature (5)..(167): Homolog of NCBI NO: 6686408 NR Description: F1E22.7 [Arabidopsis thaliana]
  misc_feature (1)..(167): Homolog of NCBI NO: 10178216 NR Description: gb|AAF23842.1~gene_id:MLF18.15~similar to unknown
  misc_feature (7)..(163): Homolog of NCBI NO: 34903552 NR Description: P0001B06.28 [Oryza sativa (japonica
  misc_feature (17)..(170): Homolog of NCBI NO: 34914304 NR Description: B1151A10.19 [Oryza sativa (japonica
  misc_feature (8)..(161): Homolog of NCBI NO: 21536796 NR Description: unknown [Arabidopsis thaliana]
  misc_feature (8)..(161): Homolog of NCBI NO: 15239804 NR Description: expressed protein [Arabidopsis thaliana]
  misc_feature (1)..(167): Homolog of NCBI NO: 11762174 NR Description: At1g17620 [Arabidopsis thaliana]
  misc_feature (1)..(167): Homolog of NCBI NO: 18394509 NR Description: expressed protein [Arabidopsis thaliana]
  misc_feature (5)..(167): Homolog of NCBI NO: 18408342 NR Description: expressed protein [Arabidopsis thaliana]
  misc_feature (1)..(167): Homolog of NCBI NO: 15239459 NR Description: hypothetical protein [Arabidopsis thaliana]
  misc_feature (5)..(167): Homolog of NCBI NO: 6686408 NR Description: F1E22.7 [Arabidopsis thaliana]
  misc_feature (1)..(167): Homolog of NCBI NO: 10178216 NR Description: gb|AAF23842.1~gene_id:MLF18.15~similar to unknown
  misc_feature (7)..(163): Homolog of NCBI NO: 34903552 NR Description: P0001B06.28 [Oryza sativa (japonica
  misc_feature (17)..(170): Homolog of NCBI NO: 34914304 NR Description: B1151A10.19 [Oryza sativa (japonica
  misc_feature (8)..(161): Homolog of NCBI NO: 21536796 NR Description: unknown [Arabidopsis thaliana]
  misc_feature (8)..(161): Homolog of NCBI NO: 15239804 NR Description: expressed protein [Arabidopsis thaliana]
  misc_feature (1)..(167): Homolog of NCBI NO: 11762174 NR Description: At1g17620 [Arabidopsis thaliana]
  misc_feature (1)..(167): Homolog of NCBI NO: 18394509 NR Description: expressed protein [Arabidopsis thaliana]
MTDYRVYPASKPPAIVGGGAPTTNPTFPANKAQLYNANRPAYRPPAGRRRTSHTRGCCCRCCCWTIFVIILLLLIVAAASAVVYLIYRPQRPSFTVSELKISTLNFTSAARLTTAISLSVIARNPNKNVGFIYDVTDITLYKVSTGGDDDVVIGKGTIAAFSHGKEHDYA

SEQ ID NO: 39503 - DNA, 1404 bp, Arabidopsis thaliana
  misc_feature (1)..(1404): Ceres Seq. ID no. 12379516
  misc_feature: MA Experiment ID: 108434 Result: Up-regulated in Transcription
  misc_feature: MA Experiment 108434 PARAMETER Experiment Name: At_Root_Tips_cDNA_P Parameter: Tissue Value: Root Tips
  misc_feature: MA Experiment ID: 108461 Result: Down-regulated in Transcription
  misc_feature: MA Experiment 108461 PARAMETER Experiment Name: At_Germinating_Seeds_cDNA_P Parameter: Age (day) Value: 1 vs. 0
  misc_feature: MA Experiment 108461 PARAMETER Experiment Name: At_Germinating_Seeds_cDNA_P Parameter: Tissue Value: Germinating Seeds
  misc_feature: MA Experiment ID: 108462 Result: Down-regulated in Transcription
  misc_feature: MA Experiment 108462 PARAMETER Experiment Name: At_Germinating_Seeds_cDNA_P Parameter: Age (day) Value: 2 vs. 0
  misc_feature: MA Experiment 108462 PARAMETER Experiment Name: At_Germinating_Seeds_cDNA_P Parameter: Tissue Value: Germinating Seeds
  misc_feature: MA Experiment ID: 108463 Result: Down-regulated in Transcription
  misc_feature: MA Experiment 108463 PARAMETER Experiment Name: At_Germinating_Seeds_cDNA_P Parameter: Age (day) Value: 3 vs. 0
  misc_feature: MA Experiment 108463 PARAMETER Experiment Name: At_Germinating_Seeds_cDNA_P Parameter: Tissue Value: Germinating Seeds
  misc_feature: MA Experiment ID: 108464 Result: Down-regulated in Transcription
  misc_feature: MA Experiment 108464 PARAMETER Experiment Name: At_Germinating_Seeds_cDNA_P Parameter: Age (day) Value: 4 vs. 0
  misc_feature: MA Experiment 108464 PARAMETER Experiment Name: At_Germinating_Seeds_cDNA_P Parameter: Tissue Value: Germinating Seeds
  misc_feature: MA Experiment ID: 108595 Result: Down-regulated in Transcription
  misc_feature: MA Experiment 108595 PARAMETER Experiment Name: At_Ler-pi_Ovule_cDNA_P Parameter: Plant Line Value: null
  misc_feature: MA Experiment ID: 20001451 Result: Down-regulated in Transcription
  misc_feature: MA Experiment 20001451 PARAMETER Experiment Name: At_Far-red-induction_P Parameter: Age (day) Value: 7
  misc_feature: MA Experiment 20001451 PARAMETER Experiment Name: At_Far-red-induction_P Parameter: Light Value: Far-red vs. White
  misc_feature: MA Experiment 20001451 PARAMETER Experiment Name: At_Far-red-induction_P Parameter: Organism Value: A. thaliana
  misc_feature: MA Experiment 20001451 PARAMETER Experiment Name: At_Far-red-induction_P Parameter: Plant Line Value: Columbia
  misc_feature: MA Experiment 20001451 PARAMETER Experiment Name: At_Far-red-induction_P Parameter: Timepoint (hr) Value: 24
  misc_feature: MA Experiment 20001451 PARAMETER Experiment Name: At_Far-red-induction_P Parameter: Tissue Value: Whole Plant
  misc_feature: MA Experiment ID: 20001558 Result: Up-regulated in Transcription
  misc_feature: MA Experiment 20001558 PARAMETER Experiment Name: At_Drought_Soil_Dry_P Parameter: Age (day) Value: 27
  misc_feature: MA Experiment 20001558 PARAMETER Experiment Name: At_Drought_Soil_Dry_P Parameter: Organism Value: A. thaliana
  misc_feature: MA Experiment 20001558 PARAMETER Experiment Name: At_Drought_Soil_Dry_P Parameter: Plant Line Value: WS
  misc_feature: MA Experiment 20001558 PARAMETER Experiment Name: At_Drought_Soil_Dry_P Parameter: Post Timepoint (hr) Value: 6
  misc_feature: MA Experiment 20001558 PARAMETER Experiment Name: At_Drought_Soil_Dry_P Parameter: Post-Treatment Value: Re-Water vs. No Drought
  misc_feature: MA Experiment 20001558 PARAMETER Experiment Name: At_Drought_Soil_Dry_P Parameter: Timepoint (day) Value: 13
  misc_feature: MA Experiment 20001558 PARAMETER Experiment Name: At_Drought_Soil_Dry_P Parameter: Treatment Value: Drought vs. No Drought
aaaaagtttaggttttggtttttttgtccgtcgtagtgatgcagcaaccaccgtcaaacgccgccggagctggacagataccatcaggacaacagcatttgtggatgatgatgcaacagcagcagcagcagcagcagatgcagttgtctgcggcgccactaggtcaacatcagtacggtattggatctcagaatccaggatccgctagcgatgttaagtcgttgtggatcggagacttgcagcaatggatggacgagaactacatcatgagcgtctttgctcagtctggcgaggctacatcagctaaagtcattcgtaataagctgacgggacaatctgaaggttatggattcattgagttcgtcagccactctgtagcagagcgggttttgcagacttacaatggtgctcccatgccgagcactgaacagacgtttaggctcaactgggctcaggctggggctggagagaaaagattccagactgaagggcctgaccataccattttcgtaggtgacttggcacctgaggtgactgactatatgctctcggacacattcaagaatgtgtatgggtctgtcaaaggggctaaagttgtgcttgacaggaccactggaaggtccaaggggtatgggtttgttaggtttgcggatgaaaatgagcagatgcgtgccatgactgaaatgaatggtcaatactgctcgacaaggcctatgcgtattggtccggctgccaataagaatgctcttccgatgcaaccagctatgtatcaaaacactcaaggagcaaatgctggagataatgatcctaataacacaacaatttttgttggaggtctggatgctaatgttacagacgatgaattaaagtcaatttttggtcaatttggtgaacttcttcatgtgaaaatacctccaggaaaacgttgtggattcgttcaatatgccaacaaggcgtctgcagagcatgcactttcggtgctgaatggaacacaattaggtggacaaagcatccgtctttcgtggggacgtagtccaaacaagcagtctgatcaagcgcaatggaacggtggtggatactatggataccctccacagccacagggcggctatggttatgcagctcaaccaccaactcaagaccctaatgcgtactatggtggttacactggctatggcaactatcagcagcaacgtcagtgaaacatcaacatcagctatttctaccaatgtcttggaacaaaagatgagcgattgtgtcttattaggacttctagattaaaagtgctctctttttgtttgagttttattttgcaaatgagtcgatcttgaatttgctatgaacaaagtgtttactgaatgttgaaactttattctgttgttttttaaaataaatatttatcct

SEQ ID NO: 39504 - protein, 387 aa, Arabidopsis thaliana
  peptide (1)..(387): Ceres Seq. ID no. 12379517
  misc_feature (156)..(228): Pfam Name: RNA recognition motif. (a.k.a. RRM, RBD, or RNP domain) Pfam Description: RNA recognition motif. (a.k.a. RRM, RBD, or RNP
  misc_feature (2)..(387): Homolog of NCBI NO: 34395214 NR Description: putative RNA Binding Protein
  misc_feature (12)..(384): Homolog of NCBI NO: 40253807 NR Description: putative RNA Binding Protein 45
  misc_feature (1)..(387): Homolog of NCBI NO: 21592583 NR Description: putative DNA binding protein [Arabidopsis
  misc_feature (1)..(387): Homolog of NCBI NO: 15221071 NR Description: RNA binding protein 45 (RBP45), putative
  misc_feature (54)..(384): Homolog of NCBI NO: 34896988 NR Description: putative RNA binding protein [Oryza sativa]
  misc_feature (15)..(387): Homolog of NCBI NO: 9663767 NR Description: RNA Binding Protein 45 [Nicotiana plumbaginifolia]
  misc_feature (4)..(384): Homolog of NCBI NO: 18416906 NR Description: RNA binding protein 45 (RBP45), putative
  misc_feature (4)..(387): Homolog of NCBI NO: 7485342 NR Description: hypothetical protein F10M23.340 - Arabidopsis
  misc_feature (1)..(387): Homolog of NCBI NO: 18423684 NR Description: RNA binding protein 45 (RBP45), putative
  misc_feature (1)..(387): Homolog of NCBI NO: 9758270 NR Description: contains similarity to polyadenylate-binding
MQQPPSNAAGAGQIPSGQQHLWMMMQQQQQQQQMQLSAAPLGQHQYGIGSQNPGSASDVKSLWIGDLQQWMDENYIMSVFAQSGEATSAKVIRNKLTGQSEGYGFIEFVSHSVAERVLQTYNGAPMPSTEQTFRLNWAQAGAGEKRFQTEGPDHTIFVGDLAPEVTDYMLSDTFKNVYGSVKGAKVVLDRTTGRSKGYGFVRFADENEQMRAMTEMNGQYCSTRPMRIGPAANKNALPMQPAMYQNTQGANAGDNDPNNTTIFVGGLDANVTDDELKSIFGQFGELLHVKIPPGKRCGFVQYANKASAEHALSVLNGTQLGGQSIRLSWGRSPNKQSDQAQWNGGGYYGYPPQPQGGYGYAAQPPTQDPNAYYGGYTGYGNYQQQRQ

SEQ ID NO: 39505 - protein, 365 aa, Arabidopsis thaliana
  peptide (1)..(365): Ceres Seq. ID no. 12379518
  misc_feature (134)..(206): Pfam Name: RNA recognition motif. (a.k.a. RRM, RBD, or RNP domain) Pfam Description: RNA recognition motif. (a.k.a. RRM, RBD, or RNP
  misc_feature (1)..(365): Homolog of NCBI NO: 34395214 NR Description: putative RNA Binding Protein
  misc_feature (1)..(362): Homolog of NCBI NO: 40253807 NR Description: putative RNA Binding Protein 45
  misc_feature (1)..(365): Homolog of NCBI NO: 21592583 NR Description: putative DNA binding protein [Arabidopsis
  misc_feature (1)..(365): Homolog of NCBI NO: 15221071 NR Description: RNA binding protein 45 (RBP45), putative
  misc_feature (32)..(362): Homolog of NCBI NO: 34896988 NR Description: putative RNA binding protein [Oryza sativa]
  misc_feature (1)..(365): Homolog of NCBI NO: 9663767 NR Description: RNA Binding Protein 45 [Nicotiana plumbaginifolia]
  misc_feature (1)..(362): Homolog of NCBI NO: 18416906 NR Description: RNA binding protein 45 (RBP45), putative
  misc_feature (1)..(365): Homolog of NCBI NO: 7485342 NR Description: hypothetical protein F10M23.340 - Arabidopsis
  misc_feature (1)..(365): Homolog of NCBI NO: 18423684 NR Description: RNA binding protein 45 (RBP45), putative
  misc_feature (1)..(365): Homolog of NCBI NO: 9758270 NR Description: contains similarity to polyadenylate-binding
MMMQQQQQQQQMQLSAAPLGQHQYGIGSQNPGSASDVKSLWIGDLQQWMDENYIMSVFAQSGEATSAKVIRNKLTGQSEGYGFIEFVSHSVAERVLQTYNGAPMPSTEQTFRLNWAQAGAGEKRFQTEGPDHTIFVGDLAPEVTDYMLSDTFKNVYGSVKGAKVVLDRTTGRSKGYGFVRFADENEQMRAMTEMNGQYCSTRPMRIGPAANKNALPMQPAMYQNTQGANAGDNDPNNTTIFVGGLDANVTDDELKSIFGQFGELLHVKIPPGKRCGFVQYANKASAEHALSVLNGTQLGGQSIRLSWGRSPNKQSDQAQWNGGGYYGYPPQPQGGYGYAAQPPTQDPNAYYGGYTGYGNYQQQRQ

SEQ ID NO: 39506 - protein, 364 aa, Arabidopsis thaliana
  peptide (1)..(364): Ceres Seq. ID no. 12379519
  misc_feature (133)..(205): Pfam Name: RNA recognition motif. (a.k.a. RRM, RBD, or RNP domain) Pfam Description: RNA recognition motif. (a.k.a. RRM, RBD, or RNP
  misc_feature (1)..(364): Homolog of NCBI NO: 34395214 NR Description: putative RNA Binding Protein
  misc_feature (1)..(361): Homolog of NCBI NO: 40253807 NR Description: putative RNA Binding Protein 45
  misc_feature (1)..(364): Homolog of NCBI NO: 21592583 NR Description: putative DNA binding protein [Arabidopsis
  misc_feature (1)..(364): Homolog of NCBI NO: 15221071 NR Description: RNA binding protein 45 (RBP45), putative
  misc_feature (31)..(361): Homolog of NCBI NO: 34896988 NR Description: putative RNA binding protein [Oryza sativa]
  misc_feature (1)..(364): Homolog of NCBI NO: 9663767 NR Description: RNA Binding Protein 45 [Nicotiana plumbaginifolia]
  misc_feature (1)..(361): Homolog of NCBI NO: 18416906 NR Description: RNA binding protein 45 (RBP45), putative
  misc_feature (1)..(364): Homolog of NCBI NO: 7485342 NR Description: hypothetical protein F10M23.340 - Arabidopsis
  misc_feature (1)..(364): Homolog of NCBI NO: 18423684 NR Description: RNA binding protein 45 (RBP45), putative
  misc_feature (1)..(364): Homolog of NCBI NO: 9758270 NR Description: contains similarity to polyadenylate-binding
MMQQQQQQQQMQLSAAPLGQHQYGIGSQNPGSASDVKSLWIGDLQQWMDENYIMSVFAQSGEATSAKVIRNKLTGQSEGYGFIEFVSHSVAERVLQTYNGAPMPSTEQTFRLNWAQAGAGEKRFQTEGPDHTIFVGDLAPEVTDYMLSDTFKNVYGSVKGAKVVLDRTTGRSKGYGFVRFADENEQMRAMTEMNGQYCSTRPMRIGPAANKNALPMQPAMYQNTQGANAGDNDPNNTTIFVGGLDANVTDDELKSIFGQFGELLHVKIPPGKRCGFVQYANKASAEHALSVLNGTQLGGQSIRLSWGRSPNKQSDQAQWNGGGYYGYPPQPQGGYGYAAQPPTQDPNAYYGGYTGYGNYQQQRQ

SEQ ID NO: 39507 - DNA, 1900 bp, Arabidopsis thaliana
  misc_feature (1)..(1900): Ceres Seq. ID no. 13491239
  misc_feature: MA Experiment ID: 108462 Result: Up-regulated in Transcription
  misc_feature: MA Experiment 108462 PARAMETER Experiment Name: At_Germinating_Seeds_cDNA_P Parameter: Age (day) Value: 2 vs. 0
  misc_feature: MA Experiment 108462 PARAMETER Experiment Name: At_Germinating_Seeds_cDNA_P Parameter: Tissue Value: Germinating Seeds
  misc_feature: MA Experiment ID: 108464 Result: Up-regulated in Transcription
  misc_feature: MA Experiment 108464 PARAMETER Experiment Name: At_Germinating_Seeds_cDNA_P Parameter: Age (day) Value: 4 vs. 0
  misc_feature: MA Experiment 108464 PARAMETER Experiment Name: At_Germinating_Seeds_cDNA_P Parameter: Tissue Value: Germinating Seeds
  misc_feature: MA Experiment ID: 108569 Result: Up-regulated in Transcription
  misc_feature: MA Experiment 108569 PARAMETER Experiment Name: At_0.001%_MeJA__cDNA_P Parameter: Timepoint (hr) Value: 6
  misc_feature: MA Experiment 108569 PARAMETER Experiment Name: At_0.001%_MeJA__cDNA_P Parameter: Tissue Value: Aerial
  misc_feature: MA Experiment 108569 PARAMETER Experiment Name: At_0.001%_MeJA__cDNA_P Parameter: Treatment Value: 0.001% MeJA vs. No Treatment
  misc_feature: MA Experiment ID: 108573 Result: Up-regulated in Transcription
  misc_feature: MA Experiment 108573 PARAMETER Experiment Name: At_Drought_cDNA_P Parameter: Timepoint (hr) Value: 6
  misc_feature: MA Experiment 108573 PARAMETER Experiment Name: At_Drought_cDNA_P Parameter: Tissue Value: Aerial
  misc_feature: MA Experiment 108573 PARAMETER Experiment Name: At_Drought_cDNA_P Parameter: Treatment Value: Drought vs. No Drought
  misc_feature: MA Experiment ID: 108574 Result: Up-regulated in Transcription
  misc_feature: MA Experiment 108574 PARAMETER Experiment Name: At_Wounding__cDNA_P Parameter: Timepoint (hr) Value: 1
  misc_feature: MA Experiment 108574 PARAMETER Experiment Name: At_Wounding__cDNA_P Parameter: Tissue Value: Aerial
  misc_feature: MA Experiment 108574 PARAMETER Experiment Name: At_Wounding__cDNA_P Parameter: Treatment Value: Wounding vs. No Wounding
  misc_feature: MA Experiment ID: 20000180 Result: Up-regulated in Transcription
  misc_feature: MA Experiment 20000180 PARAMETER Experiment Name: At_Germinating_Seeds_P Parameter: Age (hr) Value: 24 vs. 0
  misc_feature: MA Experiment 20000180 PARAMETER Experiment Name: At_Germinating_Seeds_P Parameter: Tissue Value: Germinating Seeds
  misc_feature: MA Experiment ID: 20000496 Result: Up-regulated in Transcription
  misc_feature: MA Experiment 20000496 PARAMETER Experiment Name: At_Guard_Cells_P Parameter: Harvest Date Value: 7/19/2002
  misc_feature: MA Experiment 20000496 PARAMETER Experiment Name: At_Guard_Cells_P Parameter: Organism Value: Canola
  misc_feature: MA Experiment 20000496 PARAMETER Experiment Name: At_Guard_Cells_P Parameter: Tissue Value: Guard Cells vs. Leaves
ctctttctatcgctctttgattttgtttctcattgttttgcttcaaattacgcattcgaatctgatcttcgttgatctctgtggaagaaacagataagagaaaatcgcatgaatttttttagaaaactaggttttaatccttcgattgcaagctacttcactaatacgagtcttctgatctcaattcttagtttttctcctcaattgccgatttctctctttcttttcgagcagaaatcgttagatcctttatcgctgtgtaatagtagtactaattttaataatcttgagagtaattactccgttcattgttgaatcatggagtccggaggcaaaactaatcgtcagctgcgtaaagctatttgcgtctcaacagacgagaagatgaagaagaagagatcaccttcagtgatagtgattggaggtggtatggctggaatttcagccgctcgcactcttcaggatgcttcctttcaggttgttgtattggagtctcgtgacagaattggtggacgagttcacactgattactcatttggttttccagttgatctcggtgcatcttggttgcatggtgtctgtaaagagaatcctttggctgcagtaattggtagattaggattacctctttatcgtactagcggtgacaattcggttttgtatgatcacgatcttgagagttatgctctgttcgacaaggctggtaaccaagtttctcaagagttggtgacaaaagttggcgaaaattttgagcacattctggaagagatctgtaaagtcagggatgagcaggacgaagacatgtcaatagctcaagccttttctattgtatttaagaggaaccctgaattgaggttggagggacttgcccataatgtgcttcagtggtacttgtgccgcatggaaggatggtttgctgctgatgctgaaaccatctcggcaaagtgttgggatcaggaagaactgttgcccggtggacatggtcttatggttagagggtatcgccctgtaatcaacactctctcgaaaggtcttgatatacgactaagtcacagaattaccaagatttcaaggcgctacagtggtgtgaaggtgactacagagaaaggagacacgtttgttgcggatgctgcagtcattgctcttcctctaggagtcttaaagtcaggaatgataacattcgaaccaaagcttccacagtggaaacaagaagctatcaacgatctcggtgttggaatcgagaacaagatcatattgaattttgacaacgtcttttggccaaacgtagagtttttaggagtcgttgcagaaacttcctacggatgcagttatttcttgaacctgcataaagccacaagccatcctgtccttgtttacatgccggctggtcagctcgctagagacatcgagaaaaagtccgatgaagcagctgcaaattttgccttttcgcaactacagaaaattcttccagatgcctcttcaccgataaattatttggtatcaaggtggggatcagacatcaattcattgggatcatatagctatgacattgtgaacaaacctcacgacctctatgagagactgagagtgccattggataatctattctttgcgggggaagccactagctcaagctacccgggatcagtgcacggtgcttattcaaccggagtgctggcagctgaagactgcaggatgcgtgtgcttgagcgctatggagagctcgaacatgagatggaagaggaagctcctgcttctgtccctcttctgatctcccgtatgtaatttaaacctcaggtgttttatatcacctccatatgggaacattgttagatttgattttatgagatttcactagttggaactcttgtgcctattcaataccactcttttttccttc

SEQ ID NO: 39508 - protein, 488 aa, Arabidopsis thaliana
  peptide (1)..(488): Ceres Seq. ID no. 13491240
  misc_feature (38)..(459): Pfam Name: Flavin containing amine oxidoreductase Pfam Description: Flavin containing amine oxidoreductase
  misc_feature (16)..(457): Homolog of NCBI NO: 38505628 NR Description: slr5093 [Synechocystis sp. PCC 6803]
  misc_feature (373)..(488): Homolog of NCBI NO: 25404949 NR Description: protein F1E22.18 [imported] - Arabidopsis
  misc_feature (21)..(393): Homolog of NCBI NO: 25404949 NR Description: protein F1E22.18 [imported] - Arabidopsis
  misc_feature (21)..(488): Homolog of NCBI NO: 13877615 NR Description: putative protein kinase gb|AAD22129 [Arabidopsis
  misc_feature (21)..(488): Homolog of NCBI NO: 15218830 NR Description: amine oxidase family [Arabidopsis thaliana]
  misc_feature (24)..(488): Homolog of NCBI NO: 38344167 NR Description: OSJNBa0053K19.6 [Oryza sativa (japonica
  misc_feature (1)..(488): Homolog of NCBI NO: 18650598 NR Description: At2g43020/MFL8.12 [Arabidopsis thaliana]
  misc_feature (1)..(488): Homolog of NCBI NO: 15224204 NR Description: amine oxidase family [Arabidopsis thaliana]
  misc_feature (1)..(488): Homolog of NCBI NO: 21553762 NR Description: putative amine oxidase [Arabidopsis thaliana]
  misc_feature (1)..(488): Homolog of NCBI NO: 15231622 NR Description: amine oxidase family [Arabidopsis thaliana]
MESGGKTNRQLRKAICVSTDEKMKKKRSPSVIVIGGGMAGISAARTLQDASFQVVVLESRDRIGGRVHTDYSFGFPVDLGASWLHGVCKENPLAAVIGRLGLPLYRTSGDNSVLYDHDLESYALFDKAGNQVSQELVTKVGENFEHILEEICKVRDEQDEDMSIAQAFSIVFKRNPELRLEGLAHNVLQWYLCRMEGWFAADAETISAKCWDQEELLPGGHGLMVRGYRPVINTLSKGLDIRLSHRITKISRRYSGVKVTTEKGDTFVADAAVIALPLGVLKSGMITFEPKLPQWKQEAINDLGVGIENKIILNFDNVFWPNVEFLGVVAETSYGCSYFLNLHKATSHPVLVYMPAGQLARDIEKKSDEAAANFAFSQLQKILPDASSPINYLVSRWGSDINSLGSYSYDIVNKPHDLYERLRVPLDNLFFAGEATSSSYPGSVHGAYSTGVLAAEDCRMRVLERYGELEHEMEEEAPASVPLLISRM

SEQ ID NO: 39509 - protein, 466 aa, Arabidopsis thaliana
  peptide (1)..(466): Ceres Seq. ID no. 13491241
  misc_feature (16)..(437): Pfam Name: Flavin containing amine oxidoreductase Pfam Description: Flavin containing amine oxidoreductase
  misc_feature (1)..(435): Homolog of NCBI NO: 38505628 NR Description: slr5093 [Synechocystis sp. PCC 6803]
  misc_feature (351)..(466): Homolog of NCBI NO: 25404949 NR Description: protein F1E22.18 [imported] - Arabidopsis
  misc_feature (1)..(371): Homolog of NCBI NO: 25404949 NR Description: protein F1E22.18 [imported] - Arabidopsis
  misc_feature (1)..(466): Homolog of NCBI NO: 13877615 NR Description: putative protein kinase gb|AAD22129 [Arabidopsis
  misc_feature (1)..(466): Homolog of NCBI NO: 15218830 NR Description: amine oxidase family [Arabidopsis thaliana]
  misc_feature (2)..(466): Homolog of NCBI NO: 38344167 NR Description: OSJNBa0053K19.6 [Oryza sativa (japonica
  misc_feature (1)..(466): Homolog of NCBI NO: 18650598 NR Description: At2g43020/MFL8.12 [Arabidopsis thaliana]
  misc_feature (1)..(466): Homolog of NCBI NO: 15224204 NR Description: amine oxidase family [Arabidopsis thaliana]
  misc_feature (1)..(466): Homolog of NCBI NO: 21553762 NR Description: putative amine oxidase [Arabidopsis thaliana]
  misc_feature (1)..(466): Homolog of NCBI NO: 15231622 NR Description: amine oxidase family [Arabidopsis thaliana]
MKKKRSPSVIVIGGGMAGISAARTLQDASFQVVVLESRDRIGGRVHTDYSFGFPVDLGASWLHGVCKENPLAAVIGRLGLPLYRTSGDNSVLYDHDLESYALFDKAGNQVSQELVTKVGENFEHILEEICKVRDEQDEDMSIAQAFSIVFKRNPELRLEGLAHNVLQWYLCRMEGWFAADAETISAKCWDQEELLPGGHGLMVRGYRPVINTLSKGLDIRLSHRITKISRRYSGVKVTTEKGDTFVADAAVIALPLGVLKSGMITFEPKLPQWKQEAINDLGVGIENKIILNFDNVFWPNVEFLGVVAETSYGCSYFLNLHKATSHPVLVYMPAGQLARDIEKKSDEAAANFAFSQLQKILPDASSPINYLVSRWGSDINSLGSYSYDIVNKPHDLYERLRVPLDNLFFAGEATSSSYPGSVHGAYSTGVLAAEDCRMRVLERYGELEHEMEEEAPASVPLLISRM

SEQ ID NO: 39510 - protein, 451 aa, Arabidopsis thaliana
  peptide (1)..(451): Ceres Seq. ID no. 13491242
  misc_feature (1)..(422): Pfam Name: Flavin containing amine oxidoreductase Pfam Description: Flavin containing amine oxidoreductase
  misc_feature (1)..(420): Homolog of NCBI NO: 38505628 NR Description: slr5093 [Synechocystis sp. PCC 6803]
  misc_feature (336)..(451): Homolog of NCBI NO: 25404949 NR Description: protein F1E22.18 [imported] - Arabidopsis
  misc_feature (1)..(356): Homolog of NCBI NO: 25404949 NR Description: protein F1E22.18 [imported] - Arabidopsis
  misc_feature (1)..(451): Homolog of NCBI NO: 13877615 NR Description: putative protein kinase gb|AAD22129 [Arabidopsis
  misc_feature (1)..(451): Homolog of NCBI NO: 15218830 NR Description: amine oxidase family [Arabidopsis thaliana]
  misc_feature (1)..(451): Homolog of NCBI NO: 38344167 NR Description: OSJNBa0053K19.6 [Oryza sativa (japonica
  misc_feature (1)..(451): Homolog of NCBI NO: 18650598 NR Description: At2g43020/MFL8.12 [Arabidopsis thaliana]
  misc_feature (1)..(451): Homolog of NCBI NO: 15224204 NR Description: amine oxidase family [Arabidopsis thaliana]
  misc_feature (1)..(451): Homolog of NCBI NO: 21553762 NR Description: putative amine oxidase [Arabidopsis thaliana]
  misc_feature (1)..(451): Homolog of NCBI NO: 15231622 NR Description: amine oxidase family [Arabidopsis thaliana]
MAGISAARTLQDASFQVVVLESRDRIGGRVHTDYSFGFPVDLGASWLHGVCKENPLAAVIGRLGLPLYRTSGDNSVLYDHDLESYALFDKAGNQVSQELVTKVGENFEHILEEICKVRDEQDEDMSIAQAFSIVFKRNPELRLEGLAHNVLQWYLCRMEGWFAADAETISAKCWDQEELLPGGHGLMVRGYRPVINTLSKGLDIRLSHRITKISRRYSGVKVTTEKGDTFVADAAVIALPLGVLKSGMITFEPKLPQWKQEAINDLGVGIENKIILNFDNVFWPNVEFLGVVAETSYGCSYFLNLHKATSHPVLVYMPAGQLARDIEKKSDEAAANFAFSQLQKILPDASSPINYLVSRWGSDINSLGSYSYDIVNKPHDLYERLRVPLDNLFFAGEATSSSYPGSVHGAYSTGVLAAEDCRMRVLERYGELEHEMEEEAPASVPLLISRM

SEQ ID NO: 39511 - DNA, 1404 bp, Arabidopsis thaliana
  misc_feature (1)..(1404): Ceres Seq. ID no. 13495818
  misc_feature: MA Experiment ID: 108573 Result: Up-regulated in Transcription
  misc_feature: MA Experiment 108573 PARAMETER Experiment Name: At_Drought_cDNA_P Parameter: Timepoint (hr) Value: 6
  misc_feature: MA Experiment 108573 PARAMETER Experiment Name: At_Drought_cDNA_P Parameter: Tissue Value: Aerial
  misc_feature: MA Experiment 108573 PARAMETER Experiment Name: At_Drought_cDNA_P Parameter: Treatment Value: Drought vs. No Drought
  misc_feature: MA Experiment ID: 108595 Result: Down-regulated in Transcription
  misc_feature: MA Experiment 108595 PARAMETER Experiment Name: At_Ler-pi_Ovule_cDNA_P Parameter: Plant Line Value: null
  misc_feature: MA Experiment ID: 20000112 Result: Up-regulated in Transcription
  misc_feature: MA Experiment 20000112 PARAMETER Experiment Name: At_42deg_Heat_cDNA_P Parameter: Temperature (deg C) Value: 42 vs. 22
  misc_feature: MA Experiment 20000112 PARAMETER Experiment Name: At_42deg_Heat_cDNA_P Parameter: Timepoint (hr) Value: 2
  misc_feature: MA Experiment 20000112 PARAMETER Experiment Name: At_42deg_Heat_cDNA_P Parameter: Tissue Value: Aerial
  misc_feature: MA Experiment ID: 20000113 Result: Up-regulated in Transcription
  misc_feature: MA Experiment 20000113 PARAMETER Experiment Name: At_42deg_Heat_cDNA_P Parameter: Temperature (deg C) Value: 42 vs. 22
  misc_feature: MA Experiment 20000113 PARAMETER Experiment Name: At_42deg_Heat_cDNA_P Parameter: Timepoint (hr) Value: 8
  misc_feature: MA Experiment 20000113 PARAMETER Experiment Name: At_42deg_Heat_cDNA_P Parameter: Tissue Value: Aerial
  misc_feature: MA Experiment ID: 20000173 Result: Up-regulated in Transcription
  misc_feature: MA Experiment 20000173 PARAMETER Experiment Name: At_42deg_Heat_P Parameter: Age (day) Value: 14
  misc_feature: MA Experiment 20000173 PARAMETER Experiment Name: At_42deg_Heat_P Parameter: Organism Value: A. thaliana
  misc_feature: MA Experiment 20000173 PARAMETER Experiment Name: At_42deg_Heat_P Parameter: Plant Line Value: WS
  misc_feature: MA Experiment 20000173 PARAMETER Experiment Name: At_42deg_Heat_P Parameter: Temperature (deg C) Value: 42 vs. 22
  misc_feature: MA Experiment 20000173 PARAMETER Experiment Name: At_42deg_Heat_P Parameter: Timepoint (hr) Value: 6
  misc_feature: MA Experiment 20000173 PARAMETER Experiment Name: At_42deg_Heat_P Parameter: Tissue Value: Aerial
  misc_feature: MA Experiment ID: 20000224 Result: Down-regulated in Transcription
gggatcgtaagaacagaggatttttctcggccaagttttctctggctcaggttaaaattcgatttgtgagatctgttagttagattgtacatgacggtgcgaatttattgaatctgtttaaatctattgaacgtgaaacgcatttgagtattgtgaggctgaggaaatttctgaaagtggttttgggacgatgatgctggtgttgcggagtttgccataatcagatctgtatgtatgtgggtttcttgataaaagttgtatgaggaaggcattggagatttgtgttgaagaattgatgtatgggagtatgaaggaggtaatgttgttggtgtgtgtggttgatgttggcaggtgtttgatgtgaattttttgagggaggggaatgagttcaatgagcagaagcagaagtcgaagtagaagtcgtagtcgggatcggtttcgtagtcggagtccgagagacaggagaatgagatctgaacgagtttcttaccatgatgctccttctagaagggagagggagccacgtcgtgccttcagccaaggaaatctctgcaacaactgcaagcgacctggtcactttgcaagagactgttctaatgtttccgtctgtaacaactgtggtcttccagggcacattgcagcagaatgcactgcggaatcacgttgttggaactgtagagaaccgggccacgtagcctcaaactgttcaaacgaaggaatctgccactcctgtggtaaatctggacatcgagccagagactgctctaattcggattctcgtgcaggagacttaaggctctgcaacaactgcttcaaacagggacatcttgccgctgactgcacaaatgacaaggcgtgcaagaactgcaggacttcaggtcacatagctcgcgattgcaggaacgatccagtttgtaacatctgcagtatctcggggcatgttgctagacactgcccaaagggtgacagcaattactctgacagaggaagcagggttcgagatggtggtatgcaaagaggtggtttgagcagaatgagcagagacagagaaggcgttagtgctatgataatatgtcacaattgtggtggccgaggacacagggcgtacgagtgtccgtctgctcgagtcgctgaccgtggattccgccggtactgaggctcttaaatttaccaattgaagttccattcatcttcacctttacccttttagcttctgcactcttgtttttgttgagctacattgttgttttctaatctcatggtttttgtctattggagtgaatcaaggatggttttagttttggtttgttttcggaaaatttgagacattgcttgtgttgtatgaagtattgaacagattagtgtgatgcagagttctgagttttcagaactcaatattatatt

SEQ ID NO: 39512 - protein, 257 aa, Arabidopsis thaliana
  peptide (1)..(257): Ceres Seq. ID no. 13495819
  misc_feature (229)..(246): Pfam Name: Zinc knuckle Pfam Description: Zinc knuckle
  misc_feature (71)..(191): Homolog of NCBI NO: 16549164 NR Description: unnamed protein product [Homo sapiens]
  misc_feature (45)..(255): Homolog of NCBI NO: 729704 NR Description: DNA-binding protein HEXBP (Hexamer-binding
  misc_feature (75)..(191): Homolog of NCBI NO: 26347241 NR Description: unnamed protein product [Mus musculus]
  misc_feature (56)..(172): Homolog of NCBI NO: 6324074 NR Description: GIG3 suppressor; Gis2p [Saccharomyces cerevisiae]
  misc_feature (57)..(193): Homolog of NCBI NO: 6324074 NR Description: GIG3 suppressor; Gis2p [Saccharomyces cerevisiae]
  misc_feature (1)..(172): Homolog of NCBI NO: 25404984 NR Description: protein F10A5.22 [imported] - Arabidopsis
  misc_feature (20)..(252): Homolog of NCBI NO: 37536582 NR Description: putative zinc finger protein
  misc_feature (23)..(257): Homolog of NCBI NO: 25404984 NR Description: protein F10A5.22 [imported] - Arabidopsis
  misc_feature (4)..(257): Homolog of NCBI NO: 21537255 NR Description: DNA-binding protein [Arabidopsis thaliana]
  misc_feature (1)..(257): Homolog of NCBI NO: 18410883 NR Description: DNA-binding protein [Arabidopsis thaliana]
MSSMSRSRSRSRSRSRDRFRSRSPRDRRMRSERVSYHDAPSRREREPRRAFSQGNLCNNCKRPGHFARDCSNVSVCNNCGLPGHIAAECTAESRCWNCREPGHVASNCSNEGICHSCGKSGHRARDCSNSDSRAGDLRLCNNCFKQGHLAADCTNDKACKNCRTSGHIARDCRNDPVCNICSISGHVARHCPKGDSNYSDRGSRVRDGGMQRGGLSRMSRDREGVSAMIICHNCGGRGHRAYECPSARVADRGFRRY

SEQ ID NO: 39513 - protein, 254 aa, Arabidopsis thaliana
  peptide (1)..(254): Ceres Seq. ID no. 13495820
  misc_feature (226)..(243): Pfam Name: Zinc knuckle Pfam Description: Zinc knuckle
  misc_feature (68)..(188): Homolog of NCBI NO: 16549164 NR Description: unnamed protein product [Homo sapiens]
  misc_feature (42)..(252): Homolog of NCBI NO: 729704 NR Description: DNA-binding protein HEXBP (Hexamer-binding
  misc_feature (72)..(188): Homolog of NCBI NO: 26347241 NR Description: unnamed protein product [Mus musculus]
  misc_feature (53)..(169): Homolog of NCBI NO: 6324074 NR Description: GIG3 suppressor; Gis2p [Saccharomyces cerevisiae]
  misc_feature (54)..(190): Homolog of NCBI NO: 6324074 NR Description: GIG3 suppressor; Gis2p [Saccharomyces cerevisiae]
  misc_feature (1)..(169): Homolog of NCBI NO: 25404984 NR Description: protein F10A5.22 [imported] - Arabidopsis
  misc_feature (17)..(249): Homolog of NCBI NO: 37536582 NR Description: putative zinc finger protein
  misc_feature (20)..(254): Homolog of NCBI NO: 25404984 NR Description: protein F10A5.22 [imported] - Arabidopsis
  misc_feature (1)..(254): Homolog of NCBI NO: 21537255 NR Description: DNA-binding protein [Arabidopsis thaliana]
  misc_feature (1)..(254): Homolog of NCBI NO: 18410883 NR Description: DNA-binding protein [Arabidopsis thaliana]
MSRSRSRSRSRSRDRFRSRSPRDRRMRSERVSYHDAPSRREREPRRAFSQGNLCNNCKRPGHFARDCSNVSVCNNCGLPGHIAAECTAESRCWNCREPGHVASNCSNEGICHSCGKSGHRARDCSNSDSRAGDLRLCNNCFKQGHLAADCTNDKACKNCRTSGHIARDCRNDPVCNICSISGHVARHCPKGDSNYSDRGSRVRDGGMQRGGLSRMSRDREGVSAMIICHNCGGRGHRAYECPSARVADRGFRRY

SEQ ID NO: 39514 - protein, 229 aa, Arabidopsis thaliana
  peptide (1)..(229): Ceres Seq. ID no. 13495821
  misc_feature (201)..(218): Pfam Name: Zinc knuckle Pfam Description: Zinc knuckle
  misc_feature (43)..(163): Homolog of NCBI NO: 16549164 NR Description: unnamed protein product [Homo sapiens]
  misc_feature (17)..(227): Homolog of NCBI NO: 729704 NR Description: DNA-binding protein HEXBP (Hexamer-binding
  misc_feature (47)..(163): Homolog of NCBI NO: 26347241 NR Description: unnamed protein product [Mus musculus]
  misc_feature (28)..(144): Homolog of NCBI NO: 6324074 NR Description: GIG3 suppressor; Gis2p [Saccharomyces cerevisiae]
  misc_feature (29)..(165): Homolog of NCBI NO: 6324074 NR Description: GIG3 suppressor; Gis2p [Saccharomyces cerevisiae]
  misc_feature (1)..(144): Homolog of NCBI NO: 25404984 NR Description: protein F10A5.22 [imported] - Arabidopsis
  misc_feature (1)..(224): Homolog of NCBI NO: 37536582 NR Description: putative zinc finger protein
  misc_feature (1)..(229): Homolog of NCBI NO: 25404984 NR Description: protein F10A5.22 [imported] - Arabidopsis
  misc_feature (1)..(229): Homolog of NCBI NO: 21537255 NR Description: DNA-binding protein [Arabidopsis thaliana]
  misc_feature (1)..(229): Homolog of NCBI NO: 18410883 NR Description: DNA-binding protein [Arabidopsis thaliana]
MRSERVSYHDAPSRREREPRRAFSQGNLCNNCKRPGHFARDCSNVSVCNNCGLPGHIAAECTAESRCWNCREPGHVASNCSNEGICHSCGKSGHRARDCSNSDSRAGDLRLCNNCFKQGHLAADCTNDKACKNCRTSGHIARDCRNDPVCNICSISGHVARHCPKGDSNYSDRGSRVRDGGMQRGGLSRMSRDREGVSAMIICHNCGGRGHRAYECPSARVADRGFRRY

SEQ ID NO: 39515 - DNA, 1218 bp, Arabidopsis thaliana
  misc_feature (1)..(1218): Ceres Seq. ID no. 13491690
  misc_feature: MA Experiment ID: 108435 Result: Down-regulated in Transcription
  misc_feature: MA Experiment 108435 PARAMETER Experiment Name: At_stm_Mutants_cDNA_P Parameter: Plant Line Value: wt Landsburg vs stm
  misc_feature: MA Experiment 108435 PARAMETER Experiment Name: At_stm_Mutants_cDNA_P Parameter: Tissue Value: Shoot Apical Meristem Region
  misc_feature: MA Experiment ID: 108461 Result: Down-regulated in Transcription
  misc_feature: MA Experiment 108461 PARAMETER Experiment Name: At_Germinating_Seeds_cDNA_P Parameter: Age (day) Value: 1 vs. 0
  misc_feature: MA Experiment 108461 PARAMETER Experiment Name: At_Germinating_Seeds_cDNA_P Parameter: Tissue Value: Germinating Seeds
  misc_feature: MA Experiment ID: 108462 Result: Down-regulated in Transcription
  misc_feature: MA Experiment 108462 PARAMETER Experiment Name: At_Germinating_Seeds_cDNA_P Parameter: Age (day) Value: 2 vs. 0
  misc_feature: MA Experiment 108462 PARAMETER Experiment Name: At_Germinating_Seeds_cDNA_P Parameter: Tissue Value: Germinating Seeds
  misc_feature: MA Experiment ID: 108488 Result: Down-regulated in Transcription
  misc_feature: MA Experiment ID: 20000069 Result: Up-regulated in Transcription
  misc_feature: MA Experiment 20000069 PARAMETER Experiment Name: At_100uM_ABA_Mutants_cDNA_P Parameter: Plant Line Value: CS23
  misc_feature: MA Experiment 20000069 PARAMETER Experiment Name: At_100uM_ABA_Mutants_cDNA_P Parameter: Timepoint (hr) Value: 6
  misc_feature: MA Experiment 20000069 PARAMETER Experiment Name: At_100uM_ABA_Mutants_cDNA_P Parameter: Tissue Value: Aerial
  misc_feature: MA Experiment 20000069 PARAMETER Experiment Name: At_100uM_ABA_Mutants_cDNA_P Parameter: Treatment Value: 100uM ABA vs. No Treatment
  misc_feature: MA Experiment ID: 20000071 Result: Up-regulated in Transcription
  misc_feature: MA Experiment 20000071 PARAMETER Experiment Name: At_100uM_ABA_Mutants_cDNA_P Parameter: Plant Line Value: CS8104
  misc_feature: MA Experiment 20000071 PARAMETER Experiment Name: At_100uM_ABA_Mutants_cDNA_P Parameter: Timepoint (hr) Value: 6
  misc_feature: MA Experiment 20000071 PARAMETER Experiment Name: At_100uM_ABA_Mutants_cDNA_P Parameter: Tissue Value: Aerial
  misc_feature: MA Experiment 20000071 PARAMETER Experiment Name: At_100uM_ABA_Mutants_cDNA_P Parameter: Treatment Value: 100uM ABA vs. No Treatment
  misc_feature: MA Experiment ID: 20000072 Result: Up-regulated in Transcription
  misc_feature: MA Experiment 20000072 PARAMETER Experiment Name: At_100uM_ABA_Mutants_cDNA_P Parameter: Plant Line Value: CS8105
  misc_feature: MA Experiment 20000072 PARAMETER Experiment Name: At_100uM_ABA_Mutants_cDNA_P Parameter: Timepoint (hr) Value: 6
  misc_feature: MA Experiment 20000072 PARAMETER Experiment Name: At_100uM_ABA_Mutants_cDNA_P Parameter: Tissue Value: Aerial
  misc_feature: MA Experiment 20000072 PARAMETER Experiment Name: At_100uM_ABA_Mutants_cDNA_P Parameter: Treatment Value: 100uM ABA vs. No Treatment
  misc_feature: MA Experiment ID: 20000086 Result: Up-regulated in Transcription
  misc_feature: MA Experiment 20000086 PARAMETER Experiment Name: At_100uM_ABA_Mutants_cDNA_P Parameter: Plant Line Value: CS22
  misc_feature: MA Experiment 20000086 PARAMETER Experiment Name: At_100uM_ABA_Mutants_cDNA_P Parameter: Timepoint (hr) Value: 6
  misc_feature: MA Experiment 20000086 PARAMETER Experiment Name: At_100uM_ABA_Mutants_cDNA_P Parameter: Tissue Value: Aerial
  misc_feature: MA Experiment 20000086 PARAMETER Experiment Name: At_100uM_ABA_Mutants_cDNA_P Parameter: Treatment Value: 100uM ABA vs. No Treatment
  misc_feature: MA Experiment ID: 20000087 Result: Up-regulated in Transcription
  misc_feature: MA Experiment 20000087 PARAMETER Experiment Name: At_100uM_ABA_Mutants_cDNA_P Parameter: Plant Line Value: WS
  misc_feature: MA Experiment 20000087 PARAMETER Experiment Name: At_100uM_ABA_Mutants_cDNA_P Parameter: Timepoint (hr) Value: 6
  misc_feature: MA Experiment 20000087 PARAMETER Experiment Name: At_100uM_ABA_Mutants_cDNA_P Parameter: Tissue Value: Aerial
  misc_feature: MA Experiment 20000087 PARAMETER Experiment Name: At_100uM_ABA_Mutants_cDNA_P Parameter: Treatment Value: 100uM ABA vs. No Treatment
  misc_feature: MA Experiment ID: 20000088 Result: Up-regulated in Transcription
  misc_feature: MA Experiment 20000088 PARAMETER Experiment Name: At_100uM_ABA_Mutants_cDNA_P Parameter: Plant Line Value: Landsberg
  misc_feature: MA Experiment 20000088 PARAMETER Experiment Name: At_100uM_ABA_Mutants_cDNA_P Parameter: Timepoint (hr) Value: 6
  misc_feature: MA Experiment 20000088 PARAMETER Experiment Name: At_100uM_ABA_Mutants_cDNA_P Parameter: Tissue Value: Aerial
  misc_feature: MA Experiment 20000088 PARAMETER Experiment Name: At_100uM_ABA_Mutants_cDNA_P Parameter: Treatment Value: 100uM ABA vs. No Treatment
  misc_feature: MA Experiment ID: 20000089 Result: Up-regulated in Transcription
  misc_feature: MA Experiment ID: 20000090 Result: Up-regulated in Transcription
  misc_feature: MA Experiment ID: 20000111 Result: Down-regulated in Transcription
  misc_feature: MA Experiment 20000111 PARAMETER Experiment Name: At_42deg_Heat_cDNA_P Parameter: Temperature (deg C) Value: 42 vs. 22
  misc_feature: MA Experiment 20000111 PARAMETER Experiment Name: At_42deg_Heat_cDNA_P Parameter: Timepoint (hr) Value: 6
  misc_feature: MA Experiment 20000111 PARAMETER Experiment Name: At_42deg_Heat_cDNA_P Parameter: Tissue Value: Aerial
  misc_feature: MA Experiment ID: 20000117 Result: Up-regulated in Transcription
  misc_feature: MA Experiment 20000117 PARAMETER Experiment Name: At_100uM_ABA_Mutants_cDNA_P Parameter: Plant Line Value: Columbia
  misc_feature: MA Experiment 20000117 PARAMETER Experiment Name: At_100uM_ABA_Mutants_cDNA_P Parameter: Timepoint (hr) Value: 6
  misc_feature: MA Experiment 20000117 PARAMETER Experiment Name: At_100uM_ABA_Mutants_cDNA_P Parameter: Tissue Value: Aerial
  misc_feature: MA Experiment 20000117 PARAMETER Experiment Name: At_100uM_ABA_Mutants_cDNA_P Parameter: Treatment Value: 100uM ABA vs. No Treatment
  misc_feature: MA Experiment ID: 20000173 Result: Down-regulated in Transcription
  misc_feature: MA Experiment 20000173 PARAMETER Experiment Name: At_42deg_Heat_P Parameter: Age (day) Value: 14
  misc_feature: MA Experiment 20000173 PARAMETER Experiment Name: At_42deg_Heat_P Parameter: Organism Value: A. thaliana
  misc_feature: MA Experiment 20000173 PARAMETER Experiment Name: At_42deg_Heat_P Parameter: Plant Line Value: WS
  misc_feature: MA Experiment 20000173 PARAMETER Experiment Name: At_42deg_Heat_P Parameter: Temperature (deg C) Value: 42 vs. 22
  misc_feature: MA Experiment 20000173 PARAMETER Experiment Name: At_42deg_Heat_P Parameter: Timepoint (hr) Value: 6
  misc_feature: MA Experiment 20000173 PARAMETER Experiment Name: At_42deg_Heat_P Parameter: Tissue Value: Aerial
  misc_feature: MA Experiment ID: 20000179 Result: Down-regulated in Transcription
  misc_feature: MA Experiment 20000179 PARAMETER Experiment Name: At_Germinating_Seeds_P Parameter: Age (hr) Value: 6 vs. 0
  misc_feature: MA Experiment 20000179 PARAMETER Experiment Name: At_Germinating_Seeds_P Parameter: Tissue Value: Germinating Seeds
  misc_feature: MA Experiment ID: 20000180 Result: Down-regulated in Transcription
  misc_feature: MA Experiment 20000180 PARAMETER Experiment Name: At_Germinating_Seeds_P Parameter: Age (hr) Value: 24 vs. 0
  misc_feature: MA Experiment 20000180 PARAMETER Experiment Name: At_Germinating_Seeds_P Parameter: Tissue Value: Germinating Seeds
  misc_feature: MA Experiment ID: 20000184 Result: Down-regulated in Transcription
  misc_feature: MA Experiment 20000184 PARAMETER Experiment Name: At_Shoots__P Parameter: Age (day) Value: 7
  misc_feature: MA Experiment 20000184 PARAMETER Experiment Name: At_Shoots__P Parameter: Tissue Value: Shoots vs. Whole Plant
  misc_feature: MA Experiment ID: 20000227 Result: Down-regulated in Transcription
  misc_feature: MA Experiment 20000227 PARAMETER Experiment Name: At_Root-Tips-vs-Tops_P Parameter: Tissue Value: Root Tips vs. Root Tops
  misc_feature: MA Experiment ID: 20000437 Result: Up-regulated in Transcription
  misc_feature: MA Experiment 20000437 PARAMETER Experiment Name: At_Drought_P Parameter: Age (day) Value: 8
  misc_feature: MA Experiment 20000437 PARAMETER Experiment Name: At_Drought_P Parameter: Organism Value: A. thaliana
  misc_feature: MA Experiment 20000437 PARAMETER Experiment Name: At_Drought_P Parameter: Plant Line Value: WS
  misc_feature: MA Experiment 20000437 PARAMETER Experiment Name: At_Drought_P Parameter: Timepoint (hr) Value: 24
  misc_feature: MA Experiment 20000437 PARAMETER Experiment Name: At_Drought_P Parameter: Tissue Value: Whole Plant
  misc_feature: MA Experiment 20000437 PARAMETER Experiment Name: At_Drought_P Parameter: Treatment Value: Drought vs. No Drought
  misc_feature: MA Experiment ID: 20000438 Result: Down-regulated in Transcription
  misc_feature: MA Experiment 20000438 PARAMETER Experiment Name: At_Shoots__P Parameter: Age (day) Value: 14
  misc_feature: MA Experiment 20000438 PARAMETER Experiment Name: At_Shoots__P Parameter: Tissue Value: Shoots vs. Whole Plant
  misc_feature: MA Experiment ID: 20000794 Result: Up-regulated in Transcription
  misc_feature: MA Experiment 20000794 PARAMETER Experiment Name: At_Petals_P Parameter: Age (day) Value: 23-25 days
  misc_feature: MA Experiment 20000794 PARAMETER Experiment Name: At_Petals_P Parameter: Plant Line Value: WS
  misc_feature: MA Experiment 20000794 PARAMETER Experiment Name: At_Petals_P Parameter: Tissue Value: Petals vs. Whole plant
  misc_feature: MA Experiment ID: 20001557 Result: Down-regulated in Transcription
  misc_feature: MA Experiment 20001557 PARAMETER Experiment Name: At_Drought_Soil_Dry_P Parameter: Age (day) Value: 27
  misc_feature: MA Experiment 20001557 PARAMETER Experiment Name: At_Drought_Soil_Dry_P Parameter: Organism Value: A. thaliana
  misc_feature: MA Experiment 20001557 PARAMETER Experiment Name: At_Drought_Soil_Dry_P Parameter: Plant Line Value: WS
  misc_feature: MA Experiment 20001557 PARAMETER Experiment Name: At_Drought_Soil_Dry_P Parameter: Post Timepoint (hr) Value: 3
  misc_feature: MA Experiment 20001557 PARAMETER Experiment Name: At_Drought_Soil_Dry_P Parameter: Post-Treatment Value: Re-Water vs. No Drought
  misc_feature: MA Experiment 20001557 PARAMETER Experiment Name: At_Drought_Soil_Dry_P Parameter: Timepoint (day) Value: 13
  misc_feature: MA Experiment 20001557 PARAMETER Experiment Name: At_Drought_Soil_Dry_P Parameter: Treatment Value: Drought vs. No Drought
  misc_feature: MA Experiment ID: 20001558 Result: Down-regulated in Transcription
  misc_feature: MA Experiment 20001558 PARAMETER Experiment Name: At_Drought_Soil_Dry_P Parameter: Age (day) Value: 27
  misc_feature: MA Experiment 20001558 PARAMETER Experiment Name: At_Drought_Soil_Dry_P Parameter: Organism Value: A. thaliana
  misc_feature: MA Experiment 20001558 PARAMETER Experiment Name: At_Drought_Soil_Dry_P Parameter: Plant Line Value: WS
  misc_feature: MA Experiment 20001558 PARAMETER Experiment Name: At_Drought_Soil_Dry_P Parameter: Post Timepoint (hr) Value: 6
  misc_feature: MA Experiment 20001558 PARAMETER Experiment Name: At_Drought_Soil_Dry_P Parameter: Post-Treatment Value: Re-Water vs. No Drought
  misc_feature: MA Experiment 20001558 PARAMETER Experiment Name: At_Drought_Soil_Dry_P Parameter: Timepoint (day) Value: 13
  misc_feature: MA Experiment 20001558 PARAMETER Experiment Name: At_Drought_Soil_Dry_P Parameter: Treatment Value: Drought vs. No Drought
  misc_feature: MA Experiment ID: 20001757 Result: Down-regulated in Transcription
  misc_feature: MA Experiment 20001757 PARAMETER Experiment Name: At_50mM_NH4NO3_L-to-H_P Parameter: Timepoint (hr) Value: 6
  misc_feature: MA Experiment 20001757 PARAMETER Experiment Name: At_50mM_NH4NO3_L-to-H_P Parameter: Tissue Value: Leaf
  misc_feature: MA Experiment 20001757 PARAMETER Experiment Name: At_50mM_NH4NO3_L-to-H_P Parameter: Treatment Value: 50mM NH4NO3 vs 100mM Mannitol
ttctttacttgattgcttattcatctgttgattctgtggttagataagggtatatgagtttgttggacatgggtggagatatgatggaagatgattgggaatttgcgtcatcatcaaaccctaaaagaaccctagttcttgtgggccgtactggaaacggaaagagtgcgacaggtaacagtatccttgggaggaaagcttttaggtcaagagctagaactgtaggagtgacaagcacgtgcgagtcacagagagttgttcaagaagatggtgatatcattaatgttgttgatactcctggtttgtttgatttgtctactgcagctgattttattggtaaagagattgtgaggtgtataagtttggcagaagatgggattcatgcgatcttgttggtattctctgtgaggcggcttgctgaagaggagcaaactgtgcttagtttcttgcaagcgctattcggcagtaagatcgctgactatatgatcgttgtttttaccggtggcgatgagttggaagagaatgaggagacattggaggagtatttggctgactattgccctgagtttcttaaagaaattcttgggatatgtgacaatcggttggtgttgtttaataacaagactactgataaggtgaagaaagctgagcaagttcagaagcttctctcacttgttgaatctgttgttaaacataacaatggaaaaccgtattcagatgagttgttccatgagctacaggaagaggctatcaagctaagggaccagaaaaaggaggttgagttacttcagggttactctaataatgagatagatgagttcaagaagcaaatcgatatgtcctatgataggcagcttagccgcatcaccgagatggtggagactaagctgagagacactgctaagagactagagcagcaactaggtgaagagcaagctgcaagacttgaagcggagaagagggcaaacgaagttcagaagcggtcgagcgatgagattaagaagctcagagagaatctggagagggcggaaaaagagacgaaggaacttcagaaaaaactgggaaagtgcatcaatctatgatatgttgagatgttgtagctccagtgaaatctgataagatcattcatgtcaagtttttttatgtagtcttttgttttcttttggttttttaacaatatggttttatcattaatggcagtgtgttataagtttgctt

SEQ ID NO: 39516 - protein, 342 aa, Arabidopsis thaliana
  peptide (1)..(342): Ceres Seq. ID no. 13491691
  misc_feature (25)..(239): Pfam Name: AIG1 family Pfam Description: AIG1 family
  misc_feature (11)..(314): Homolog of NCBI NO: 15217719 NR Description: AIG1-related protein [Arabidopsis thaliana]
  misc_feature (16)..(335): Homolog of NCBI NO: 10092442 NR Description: disease resistance protein AIG1; 916-2572
  misc_feature (16)..(335): Homolog of NCBI NO: 15217731 NR Description: AIG1 [Arabidopsis thaliana]
  misc_feature (3)..(338): Homolog of NCBI NO: 15234871 NR Description: AIG1-related protein [Arabidopsis thaliana]
  misc_feature (8)..(330): Homolog of NCBI NO: 15234855 NR Description: AIG1-related protein [Arabidopsis thaliana]
  misc_feature (6)..(333): Homolog of NCBI NO: 4097585 NR Description: NTGP4 [Nicotiana tabacum]
  misc_feature (49)..(342): Homolog of NCBI NO: 12324509 NR Description: AIG1-like protein, 5' partial; 1-1205
  misc_feature (6)..(342): Homolog of NCBI NO: 25373414 NR Description: hypothetical protein F12G12.21 - Arabidopsis
  misc_feature (6)..(342): Homolog of NCBI NO: 24417378 NR Description: unknown [Arabidopsis thaliana]
  misc_feature (1)..(342): Homolog of NCBI NO: 18399081 NR Description: expressed protein [Arabidopsis thaliana]
MSLLDMGGDMMEDDWEFASSSNPKRTLVLVGRTGNGKSATGNSILGRKAFRSRARTVGVTSTCESQRVVQEDGDIINVVDTPGLFDLSTAADFIGKEIVRCISLAEDGIHAILLVFSVRRLAEEEQTVLSFLQALFGSKIADYMIVVFTGGDELEENEETLEEYLADYCPEFLKEILGICDNRLVLFNNKTTDKVKKAEQVQKLLSLVESVVKHNNGKPYSDELFHELQEEAIKLRDQKKEVELLQGYSNNEIDEFKKQIDMSYDRQLSRITEMVETKLRDTAKRLEQQLGEEQAARLEAEKRANEVQKRSSDEIKKLRENLERAEKETKELQKKLGKCINL

SEQ ID NO: 39517 - protein, 337 aa, Arabidopsis thaliana
  peptide (1)..(337): Ceres Seq. ID no. 13491692
  misc_feature (20)..(234): Pfam Name: AIG1 family Pfam Description: AIG1 family
  misc_feature (6)..(309): Homolog of NCBI NO: 15217719 NR Description: AIG1-related protein [Arabidopsis thaliana]
  misc_feature (11)..(330): Homolog of NCBI NO: 10092442 NR Description: disease resistance protein AIG1; 916-2572
  misc_feature (11)..(330): Homolog of NCBI NO: 15217731 NR Description: AIG1 [Arabidopsis thaliana]
  misc_feature (1)..(333): Homolog of NCBI NO: 15234871 NR Description: AIG1-related protein [Arabidopsis thaliana]
  misc_feature (3)..(325): Homolog of NCBI NO: 15234855 NR Description: AIG1-related protein [Arabidopsis thaliana]
  misc_feature (1)..(328): Homolog of NCBI NO: 4097585 NR Description: NTGP4 [Nicotiana tabacum]
  misc_feature (44)..(337): Homolog of NCBI NO: 12324509 NR Description: AIG1-like protein, 5' partial; 1-1205
  misc_feature (1)..(337): Homolog of NCBI NO: 25373414 NR Description: hypothetical protein F12G12.21 - Arabidopsis
  misc_feature (1)..(337): Homolog of NCBI NO: 24417378 NR Description: unknown [Arabidopsis thaliana]
  misc_feature (1)..(337): Homolog of NCBI NO: 18399081 NR Description: expressed protein [Arabidopsis thaliana]
MGGDMMEDDWEFASSSNPKRTLVLVGRTGNGKSATGNSILGRKAFRSRARTVGVTSTCESQRVVQEDGDIINVVDTPGLFDLSTAADFIGKEIVRCISLAEDGIHAILLVFSVRRLAEEEQTVLSFLQALFGSKIADYMIVVFTGGDELEENEETLEEYLADYCPEFLKEILGICDNRLVLFNNKTTDKVKKAEQVQKLLSLVESVVKHNNGKPYSDELFHELQEEAIKLRDQKKEVELLQGYSNNEIDEFKKQIDMSYDRQLSRITEMVETKLRDTAKRLEQQLGEEQAARLEAEKRANEVQKRSSDEIKKLRENLERAEKETKELQKKLGKCINL

SEQ ID NO: 39518 - protein, 333 aa, Arabidopsis thaliana
  peptide (1)..(333): Ceres Seq. ID no. 13491693
  misc_feature (16)..(230): Pfam Name: AIG1 family Pfam Description: AIG1 family
  misc_feature (2)..(305): Homolog of NCBI NO: 15217719 NR Description: AIG1-related protein [Arabidopsis thaliana]
  misc_feature (7)..(326): Homolog of NCBI NO: 10092442 NR Description: disease resistance protein AIG1; 916-2572
  misc_feature (7)..(326): Homolog of NCBI NO: 15217731 NR Description: AIG1 [Arabidopsis thaliana]
  misc_feature (1)..(329): Homolog of NCBI NO: 15234871 NR Description: AIG1-related protein [Arabidopsis thaliana]
  misc_feature (1)..(321): Homolog of NCBI NO: 15234855 NR Description: AIG1-related protein [Arabidopsis thaliana]
  misc_feature (1)..(324): Homolog of NCBI NO: 4097585 NR Description: NTGP4 [Nicotiana tabacum]
  misc_feature (40)..(333): Homolog of NCBI NO: 12324509 NR Description: AIG1-like protein, 5' partial; 1-1205
  misc_feature (1)..(333): Homolog of NCBI NO: 25373414 NR Description: hypothetical protein F12G12.21 - Arabidopsis
  misc_feature (1)..(333): Homolog of NCBI NO: 24417378 NR Description: unknown [Arabidopsis thaliana]
  misc_feature (1)..(333): Homolog of NCBI NO: 18399081 NR Description: expressed protein [Arabidopsis thaliana]
MMEDDWEFASSSNPKRTLVLVGRTGNGKSATGNSILGRKAFRSRARTVGVTSTCESQRVVQEDGDIINVVDTPGLFDLSTAADFIGKEIVRCISLAEDGIHAILLVFSVRRLAEEEQTVLSFLQALFGSKIADYMIVVFTGGDELEENEETLEEYLADYCPEFLKEILGICDNRLVLFNNKTTDKVKKAEQVQKLLSLVESVVKHNNGKPYSDELFHELQEEAIKLRDQKKEVELLQGYSNNEIDEFKKQIDMSYDRQLSRITEMVETKLRDTAKRLEQQLGEEQAARLEAEKRANEVQKRSSDEIKKLRENLERAEKETKELQKKLGKCINL

SEQ ID NO: 39519 - DNA, 1316 bp, Arabidopsis thaliana
  misc_feature (1)..(1316): Ceres Seq. ID no. 12367001
  misc_feature: MA Experiment ID: 108461 Result: Up-regulated in Transcription
  misc_feature: MA Experiment 108461 PARAMETER Experiment Name: At_Germinating_Seeds_cDNA_P Parameter: Age (day) Value: 1 vs. 0
  misc_feature: MA Experiment 108461 PARAMETER Experiment Name: At_Germinating_Seeds_cDNA_P Parameter: Tissue Value: Germinating Seeds
  misc_feature: MA Experiment ID: 108462 Result: Up-regulated in Transcription
  misc_feature: MA Experiment 108462 PARAMETER Experiment Name: At_Germinating_Seeds_cDNA_P Parameter: Age (day) Value: 2 vs. 0
  misc_feature: MA Experiment 108462 PARAMETER Experiment Name: At_Germinating_Seeds_cDNA_P Parameter: Tissue Value: Germinating Seeds
  misc_feature: MA Experiment ID: 108473 Result: Down-regulated in Transcription
  misc_feature: MA Experiment 108473 PARAMETER Experiment Name: At_Drought_Flowers_cDNA_P Parameter: Timepoint (hr) Value: 7 d
  misc_feature: MA Experiment 108473 PARAMETER Experiment Name: At_Drought_Flowers_cDNA_P Parameter: Tissue Value: Flower
  misc_feature: MA Experiment 108473 PARAMETER Experiment Name: At_Drought_Flowers_cDNA_P Parameter: Treatment Value: Drought vs. No Drought
  misc_feature: MA Experiment ID: 108501 Result: Down-regulated in Transcription
  misc_feature: MA Experiment 108501 PARAMETER Experiment Name: At_ap2_floral_buds_cDNA_P Parameter: Plant Line Value: ap2 (Ler.)
  misc_feature: MA Experiment 108501 PARAMETER Experiment Name: At_ap2_floral_buds_cDNA_P Parameter: Tissue Value: Closed Flower
  misc_feature: MA Experiment ID: 108576 Result: Down-regulated in Transcription
  misc_feature: MA Experiment 108576 PARAMETER Experiment Name: At_42deg_Heat_cDNA_P Parameter: Temperature (deg C) Value: 42 vs. 22
  misc_feature: MA Experiment 108576 PARAMETER Experiment Name: At_42deg_Heat_cDNA_P Parameter: Timepoint (hr) Value: 1
  misc_feature: MA Experiment 108576 PARAMETER Experiment Name: At_42deg_Heat_cDNA_P Parameter: Tissue Value: Aerial
  misc_feature: MA Experiment ID: 108577 Result: Down-regulated in Transcription
  misc_feature: MA Experiment 108577 PARAMETER Experiment Name: At_42deg_Heat_cDNA_P Parameter: Temperature (deg C) Value: 42 vs. 22
  misc_feature: MA Experiment 108577 PARAMETER Experiment Name: At_42deg_Heat_cDNA_P Parameter: Timepoint (hr) Value: 6
  misc_feature: MA Experiment 108577 PARAMETER Experiment Name: At_42deg_Heat_cDNA_P Parameter: Tissue Value: Aerial
  misc_feature: MA Experiment ID: 20000089 Result: Down-regulated in Transcription
  misc_feature: MA Experiment ID: 20000185 Result: Up-regulated in Transcription
  misc_feature: MA Experiment 20000185 PARAMETER Experiment Name: At_Roots__P Parameter: Age (day) Value: 7 vs. 21
  misc_feature: MA Experiment 20000185 PARAMETER Experiment Name: At_Roots__P Parameter: Organism Value: A. thaliana
  misc_feature: MA Experiment 20000185 PARAMETER Experiment Name: At_Roots__P Parameter: Tissue Value: Roots vs. Whole Plant
  misc_feature: MA Experiment ID: 20000234 Result: Up-regulated in Transcription
  misc_feature: MA Experiment 20000234 PARAMETER Experiment Name: At_Siliques_P Parameter: Age (day) Value: 21
  misc_feature: MA Experiment 20000234 PARAMETER Experiment Name: At_Siliques_P Parameter: Organism Value: A. thaliana
  misc_feature: MA Experiment 20000234 PARAMETER Experiment Name: At_Siliques_P Parameter: Plant Line Value: WS
  misc_feature: MA Experiment 20000234 PARAMETER Experiment Name: At_Siliques_P Parameter: Tissue Value: Less Than 5mm Siliques vs. Whole Plant
  misc_feature: MA Experiment ID: 20000235 Result: Up-regulated in Transcription
  misc_feature: MA Experiment 20000235 PARAMETER Experiment Name: At_Siliques_P Parameter: Age (day) Value: 21
  misc_feature: MA Experiment 20000235 PARAMETER Experiment Name: At_Siliques_P Parameter: Organism Value: A. thaliana
  misc_feature: MA Experiment 20000235 PARAMETER Experiment Name: At_Siliques_P Parameter: Plant Line Value: WS
  misc_feature: MA Experiment 20000235 PARAMETER Experiment Name: At_Siliques_P Parameter: Tissue Value: 5-10mm Siliques vs. Whole Plant
  misc_feature: MA Experiment ID: 20000265 Result: Up-regulated in Transcription
  misc_feature: MA Experiment 20000265 PARAMETER Experiment Name: At_Open_Flower_P Parameter: Age (day) Value: 21
  misc_feature: MA Experiment 20000265 PARAMETER Experiment Name: At_Open_Flower_P Parameter: Plant Line Value: WS
  misc_feature: MA Experiment 20000265 PARAMETER Experiment Name: At_Open_Flower_P Parameter: Tissue Value: Closed Flower vs. Whole Plant
  misc_feature: MA Experiment ID: 20000286 Result: Up-regulated in Transcription
  misc_feature: MA Experiment 20000286 PARAMETER Experiment Name: At_Open_Flower_P Parameter: Age (day) Value: 21
  misc_feature: MA Experiment 20000286 PARAMETER Experiment Name: At_Open_Flower_P Parameter: Plant Line Value: WS
  misc_feature: MA Experiment 20000286 PARAMETER Experiment Name: At_Open_Flower_P Parameter: Tissue Value: Half Open vs. Whole Plant
  misc_feature: MA Experiment ID: 20000439 Result: Up-regulated in Transcription
  misc_feature: MA Experiment 20000439 PARAMETER Experiment Name: At_Roots__P Parameter: Age (day) Value: 14 vs. 21
  misc_feature: MA Experiment 20000439 PARAMETER Experiment Name: At_Roots__P Parameter: Organism Value: A. thaliana
  misc_feature: MA Experiment 20000439 PARAMETER Experiment Name: At_Roots__P Parameter: Tissue Value: Roots vs. Whole Plant
aacgccacaatcatggctttgttcttatctcctaaaaccatcactcttctcttcttctccctctccctcgcactctactgcagcatcgatcctttccaccactgcgccatttccgatttccccaatttcgtctctcacgaagttatctctccacgtcccgacgaagttccatgggagagagattcacaaaattcacttcagaaatcaaagattctgttttttaaccaaatccaaggtccagagagcgtcgcctttgattctctcggacgtggtccgtacacaggcgttgctgatggtagggttttgttttgggatggagagaaatggattgatttcgcttatacttcgagtaatcgatcggagatttgtgatccgaagccttctgctttgagttacttgaggaatgaacatatatgtggtcgtcctttaggtcttcgtttcgataagagaaccggagatttgtatatagctgatgcttatatgggacttttgaaagttggtcctgaaggtggtttagcaacgccgcttgtaactgaagctgaaggtgtgccgttggggtttactaatgatcttgacattgctgatgatggaactgtttactttacagatagcagcattagttaccagaggaggaacttcttgcagctcgttttctctggagacaatactgggagggttctaaagtatgatccagtagctaagaaagctgttgttttggtctcaaatcttcagtttccgaatggtgtctctatcagcagagacggttctttctttgtattctgcgaaggagatattggaagcctacgaagatactggttgaaaggcgagaaagctggaacgacagatgtgtttgcgtatttaccagggcatcctgataacgtaagaaccaaccaaaagggtgaattttgggtagcgcttcattgcagacgcaactactactcatacttaatggcaagatatcctaagctgaggatgttcatactgagactgccaatcactgcgagaactcactactcgttccagatagggttacggccgcacgggttggtggttaagtatagtcctgaagggaagcttatgcatgttttggaagatagtgaagggaaagttgtgagatcagtaagtgaagtggaagaaaaagatgggaagctttggatgggaagtgtgttgatgaactttgttgctgtctatgacctctgattacttgacctatacgtaaaccacttcactcagtttctagatttagcaaattctcaaaactgttaggtgtgtactgaaaaaatcaaacacttagcacaaacaaactcaatgttatt

SEQ ID NO: 39520 - protein, 399 aa, Arabidopsis thaliana
  peptide (1)..(399): Ceres Seq. ID no. 12367002
  misc_feature (17)..(394): Pfam Name: Strictosidine synthase Pfam Description: Strictosidine synthase
  misc_feature (16)..(395): Homolog of NCBI NO: 34902140 NR Description: putative male fertility protein
  misc_feature (62)..(399): Homolog of NCBI NO: 8489790 NR Description: putative strictosidine synthase [Lycopersicon
  misc_feature (16)..(395): Homolog of NCBI NO: 28393615 NR Description: putative strictosidine synthase [Arabidopsis
  misc_feature (53)..(399): Homolog of NCBI NO: 30694556 NR Description: strictosidine synthase-related [Arabidopsis
  misc_feature (53)..(399): Homolog of NCBI NO: 11280567 NR Description: hypothetical protein F24I3.110 - Arabidopsis
  misc_feature (22)..(398): Homolog of NCBI NO: 40538997 NR Description: putative  strictosidine synthase
  misc_feature (268)..(399): Homolog of NCBI NO: 25335889 NR Description: protein T27G7.16 [imported] - Arabidopsis
  misc_feature (21)..(268): Homolog of NCBI NO: 25335889 NR Description: protein T27G7.16 [imported] - Arabidopsis
  misc_feature (21)..(399): Homolog of NCBI NO: 18390900 NR Description: strictosidine synthase-related
  misc_feature (5)..(399): Homolog of NCBI NO: 22326950 NR Description: similar to strictosidine synthase-related
NATIMALFLSPKTITLLFFSLSLALYCSIDPFHHCAISDFPNFVSHEVISPRPDEVPWERDSQNSLQKSKILFFNQIQGPESVAFDSLGRGPYTGVADGRVLFWDGEKWIDFAYTSSNRSEICDPKPSALSYLRNEHICGRPLGLRFDKRTGDLYIADAYMGLLKVGPEGGLATPLVTEAEGVPLGFTNDLDIADDGTVYFTDSSISYQRRNFLQLVFSGDNTGRVLKYDPVAKKAVVLVSNLQFPNGVSISRDGSFFVFCEGDIGSLRRYWLKGEKAGTTDVFAYLPGHPDNVRTNQKGEFWVALHCRRNYYSYLMARYPKLRMFILRLPITARTHYSFQIGLRPHGLVVKYSPEGKLMHVLEDSEGKVVRSVSEVEEKDGKLWMGSVLMNFVAVYDL

SEQ ID NO: 39521 - protein, 395 aa, Arabidopsis thaliana
  peptide (1)..(395): Ceres Seq. ID no. 12367003
  misc_feature (13)..(390): Pfam Name: Strictosidine synthase Pfam Description: Strictosidine synthase
  misc_feature (12)..(391): Homolog of NCBI NO: 34902140 NR Description: putative male fertility protein
  misc_feature (58)..(395): Homolog of NCBI NO: 8489790 NR Description: putative strictosidine synthase [Lycopersicon
  misc_feature (12)..(391): Homolog of NCBI NO: 28393615 NR Description: putative strictosidine synthase [Arabidopsis
  misc_feature (49)..(395): Homolog of NCBI NO: 30694556 NR Description: strictosidine synthase-related [Arabidopsis
  misc_feature (49)..(395): Homolog of NCBI NO: 11280567 NR Description: hypothetical protein F24I3.110 - Arabidopsis
  misc_feature (18)..(394): Homolog of NCBI NO: 40538997 NR Description: putative  strictosidine synthase
  misc_feature (264)..(395): Homolog of NCBI NO: 25335889 NR Description: protein T27G7.16 [imported] - Arabidopsis
  misc_feature (17)..(264): Homolog of NCBI NO: 25335889 NR Description: protein T27G7.16 [imported] - Arabidopsis
  misc_feature (17)..(395): Homolog of NCBI NO: 18390900 NR Description: strictosidine synthase-related
  misc_feature (1)..(395): Homolog of NCBI NO: 22326950 NR Description: similar to strictosidine synthase-related
MALFLSPKTITLLFFSLSLALYCSIDPFHHCAISDFPNFVSHEVISPRPDEVPWERDSQNSLQKSKILFFNQIQGPESVAFDSLGRGPYTGVADGRVLFWDGEKWIDFAYTSSNRSEICDPKPSALSYLRNEHICGRPLGLRFDKRTGDLYIADAYMGLLKVGPEGGLATPLVTEAEGVPLGFTNDLDIADDGTVYFTDSSISYQRRNFLQLVFSGDNTGRVLKYDPVAKKAVVLVSNLQFPNGVSISRDGSFFVFCEGDIGSLRRYWLKGEKAGTTDVFAYLPGHPDNVRTNQKGEFWVALHCRRNYYSYLMARYPKLRMFILRLPITARTHYSFQIGLRPHGLVVKYSPEGKLMHVLEDSEGKVVRSVSEVEEKDGKLWMGSVLMNFVAVYDL

SEQ ID NO: 39522 - protein, 239 aa, Arabidopsis thaliana
  peptide (1)..(239): Ceres Seq. ID no. 12367004
  misc_feature (1)..(234): Pfam Name: Strictosidine synthase Pfam Description: Strictosidine synthase
  misc_feature (1)..(235): Homolog of NCBI NO: 34902140 NR Description: putative male fertility protein
  misc_feature (1)..(239): Homolog of NCBI NO: 8489790 NR Description: putative strictosidine synthase [Lycopersicon
  misc_feature (1)..(235): Homolog of NCBI NO: 28393615 NR Description: putative strictosidine synthase [Arabidopsis
  misc_feature (1)..(239): Homolog of NCBI NO: 30694556 NR Description: strictosidine synthase-related [Arabidopsis
  misc_feature (1)..(239): Homolog of NCBI NO: 11280567 NR Description: hypothetical protein F24I3.110 - Arabidopsis
  misc_feature (1)..(238): Homolog of NCBI NO: 40538997 NR Description: putative  strictosidine synthase
  misc_feature (108)..(239): Homolog of NCBI NO: 25335889 NR Description: protein T27G7.16 [imported] - Arabidopsis
  misc_feature (1)..(108): Homolog of NCBI NO: 25335889 NR Description: protein T27G7.16 [imported] - Arabidopsis
  misc_feature (1)..(239): Homolog of NCBI NO: 18390900 NR Description: strictosidine synthase-related
  misc_feature (1)..(239): Homolog of NCBI NO: 22326950 NR Description: similar to strictosidine synthase-related
MGLLKVGPEGGLATPLVTEAEGVPLGFTNDLDIADDGTVYFTDSSISYQRRNFLQLVFSGDNTGRVLKYDPVAKKAVVLVSNLQFPNGVSISRDGSFFVFCEGDIGSLRRYWLKGEKAGTTDVFAYLPGHPDNVRTNQKGEFWVALHCRRNYYSYLMARYPKLRMFILRLPITARTHYSFQIGLRPHGLVVKYSPEGKLMHVLEDSEGKVVRSVSEVEEKDGKLWMGSVLMNFVAVYDL

SEQ ID NO: 39523 - DNA, 1402 bp, Arabidopsis thaliana
  misc_feature (1)..(1402): Ceres Seq. ID no. 12422124
  misc_feature: MA Experiment ID: 108434 Result: Down-regulated in Transcription
  misc_feature: MA Experiment 108434 PARAMETER Experiment Name: At_Root_Tips_cDNA_P Parameter: Tissue Value: Root Tips
  misc_feature: MA Experiment ID: 108462 Result: Up-regulated in Transcription
  misc_feature: MA Experiment 108462 PARAMETER Experiment Name: At_Germinating_Seeds_cDNA_P Parameter: Age (day) Value: 2 vs. 0
  misc_feature: MA Experiment 108462 PARAMETER Experiment Name: At_Germinating_Seeds_cDNA_P Parameter: Tissue Value: Germinating Seeds
  misc_feature: MA Experiment ID: 108463 Result: Up-regulated in Transcription
  misc_feature: MA Experiment 108463 PARAMETER Experiment Name: At_Germinating_Seeds_cDNA_P Parameter: Age (day) Value: 3 vs. 0
  misc_feature: MA Experiment 108463 PARAMETER Experiment Name: At_Germinating_Seeds_cDNA_P Parameter: Tissue Value: Germinating Seeds
  misc_feature: MA Experiment ID: 108464 Result: Up-regulated in Transcription
  misc_feature: MA Experiment 108464 PARAMETER Experiment Name: At_Germinating_Seeds_cDNA_P Parameter: Age (day) Value: 4 vs. 0
  misc_feature: MA Experiment 108464 PARAMETER Experiment Name: At_Germinating_Seeds_cDNA_P Parameter: Tissue Value: Germinating Seeds
  misc_feature: MA Experiment ID: 108488 Result: Down-regulated in Transcription
  misc_feature: MA Experiment ID: 108489 Result: Up-regulated in Transcription
  misc_feature: MA Experiment ID: 108595 Result: Up-regulated in Transcription
  misc_feature: MA Experiment 108595 PARAMETER Experiment Name: At_Ler-pi_Ovule_cDNA_P Parameter: Plant Line Value: null
  misc_feature: MA Experiment ID: 108668 Result: Up-regulated in Transcription
  misc_feature: MA Experiment 108668 PARAMETER Experiment Name: At_2mM_SA_cDNA_P Parameter: Plant Line Value: WS
  misc_feature: MA Experiment 108668 PARAMETER Experiment Name: At_2mM_SA_cDNA_P Parameter: Timepoint (hr) Value: 6
  misc_feature: MA Experiment 108668 PARAMETER Experiment Name: At_2mM_SA_cDNA_P Parameter: Treatment Value: 2mM SA vs. No Treatment
  misc_feature: MA Experiment ID: 20000070 Result: Up-regulated in Transcription
  misc_feature: MA Experiment 20000070 PARAMETER Experiment Name: At_100uM_ABA_Mutants_cDNA_P Parameter: Plant Line Value: CS24
  misc_feature: MA Experiment 20000070 PARAMETER Experiment Name: At_100uM_ABA_Mutants_cDNA_P Parameter: Timepoint (hr) Value: 6
  misc_feature: MA Experiment 20000070 PARAMETER Experiment Name: At_100uM_ABA_Mutants_cDNA_P Parameter: Tissue Value: Aerial
  misc_feature: MA Experiment 20000070 PARAMETER Experiment Name: At_100uM_ABA_Mutants_cDNA_P Parameter: Treatment Value: 100uM ABA vs. No Treatment
  misc_feature: MA Experiment ID: 20000090 Result: Up-regulated in Transcription
  misc_feature: MA Experiment ID: 20000111 Result: Down-regulated in Transcription
  misc_feature: MA Experiment 20000111 PARAMETER Experiment Name: At_42deg_Heat_cDNA_P Parameter: Temperature (deg C) Value: 42 vs. 22
  misc_feature: MA Experiment 20000111 PARAMETER Experiment Name: At_42deg_Heat_cDNA_P Parameter: Timepoint (hr) Value: 6
  misc_feature: MA Experiment 20000111 PARAMETER Experiment Name: At_42deg_Heat_cDNA_P Parameter: Tissue Value: Aerial
  misc_feature: MA Experiment ID: 20000144 Result: Down-regulated in Transcription
  misc_feature: MA Experiment 20000144 PARAMETER Experiment Name: At_42deg_Heat_cDNA_P Parameter: Temperature (deg C) Value: 42 vs. 22
  misc_feature: MA Experiment 20000144 PARAMETER Experiment Name: At_42deg_Heat_cDNA_P Parameter: Timepoint (hr) Value: 1
  misc_feature: MA Experiment 20000144 PARAMETER Experiment Name: At_42deg_Heat_cDNA_P Parameter: Tissue Value: Aerial
  misc_feature: MA Experiment ID: 20000180 Result: Up-regulated in Transcription
  misc_feature: MA Experiment 20000180 PARAMETER Experiment Name: At_Germinating_Seeds_P Parameter: Age (hr) Value: 24 vs. 0
  misc_feature: MA Experiment 20000180 PARAMETER Experiment Name: At_Germinating_Seeds_P Parameter: Tissue Value: Germinating Seeds
  misc_feature: MA Experiment ID: 20000182 Result: Up-regulated in Transcription
  misc_feature: MA Experiment 20000182 PARAMETER Experiment Name: At_2mM_SA_P Parameter: Age (day) Value: 14
  misc_feature: MA Experiment 20000182 PARAMETER Experiment Name: At_2mM_SA_P Parameter: Organism Value: A. thaliana
  misc_feature: MA Experiment 20000182 PARAMETER Experiment Name: At_2mM_SA_P Parameter: Plant Line Value: WS
  misc_feature: MA Experiment 20000182 PARAMETER Experiment Name: At_2mM_SA_P Parameter: Timepoint (hr) Value: 6
  misc_feature: MA Experiment 20000182 PARAMETER Experiment Name: At_2mM_SA_P Parameter: Tissue Value: Aerial
  misc_feature: MA Experiment 20000182 PARAMETER Experiment Name: At_2mM_SA_P Parameter: Treatment Value: 2mM SA vs. No Treatment
  misc_feature: MA Experiment ID: 20000184 Result: Down-regulated in Transcription
  misc_feature: MA Experiment 20000184 PARAMETER Experiment Name: At_Shoots__P Parameter: Age (day) Value: 7
  misc_feature: MA Experiment 20000184 PARAMETER Experiment Name: At_Shoots__P Parameter: Tissue Value: Shoots vs. Whole Plant
  misc_feature: MA Experiment ID: 20000185 Result: Up-regulated in Transcription
  misc_feature: MA Experiment 20000185 PARAMETER Experiment Name: At_Roots__P Parameter: Age (day) Value: 7 vs. 21
  misc_feature: MA Experiment 20000185 PARAMETER Experiment Name: At_Roots__P Parameter: Organism Value: A. thaliana
  misc_feature: MA Experiment 20000185 PARAMETER Experiment Name: At_Roots__P Parameter: Tissue Value: Roots vs. Whole Plant
  misc_feature: MA Experiment ID: 20000439 Result: Up-regulated in Transcription
  misc_feature: MA Experiment 20000439 PARAMETER Experiment Name: At_Roots__P Parameter: Age (day) Value: 14 vs. 21
  misc_feature: MA Experiment 20000439 PARAMETER Experiment Name: At_Roots__P Parameter: Organism Value: A. thaliana
  misc_feature: MA Experiment 20000439 PARAMETER Experiment Name: At_Roots__P Parameter: Tissue Value: Roots vs. Whole Plant
  misc_feature: MA Experiment ID: 20000453 Result: Up-regulated in Transcription
  misc_feature: MA Experiment 20000453 PARAMETER Experiment Name: At_100uM_ABA_P Parameter: Age (day) Value: 15
  misc_feature: MA Experiment 20000453 PARAMETER Experiment Name: At_100uM_ABA_P Parameter: Organism Value: A. thaliana
  misc_feature: MA Experiment 20000453 PARAMETER Experiment Name: At_100uM_ABA_P Parameter: Plant Line Value: WS
  misc_feature: MA Experiment 20000453 PARAMETER Experiment Name: At_100uM_ABA_P Parameter: Timepoint (hr) Value: 24
  misc_feature: MA Experiment 20000453 PARAMETER Experiment Name: At_100uM_ABA_P Parameter: Tissue Value: Aerial
  misc_feature: MA Experiment 20000453 PARAMETER Experiment Name: At_100uM_ABA_P Parameter: Treatment Value: 100uM ABA vs. No Treatment
  misc_feature: MA Experiment ID: 20000527 Result: Down-regulated in Transcription
  misc_feature: MA Experiment 20000527 PARAMETER Experiment Name: At_10percent_PEG_P Parameter: Age (day) Value: 20
  misc_feature: MA Experiment 20000527 PARAMETER Experiment Name: At_10percent_PEG_P Parameter: Organism Value: A. thaliana
  misc_feature: MA Experiment 20000527 PARAMETER Experiment Name: At_10percent_PEG_P Parameter: Plant Line Value: WS
  misc_feature: MA Experiment 20000527 PARAMETER Experiment Name: At_10percent_PEG_P Parameter: Timepoint (day) Value: 20
  misc_feature: MA Experiment 20000527 PARAMETER Experiment Name: At_10percent_PEG_P Parameter: Tissue Value: Whole Plant
  misc_feature: MA Experiment 20000527 PARAMETER Experiment Name: At_10percent_PEG_P Parameter: Treatment Value: 10percent PEG vs. No Treatment
  misc_feature: MA Experiment ID: 20000794 Result: Up-regulated in Transcription
  misc_feature: MA Experiment 20000794 PARAMETER Experiment Name: At_Petals_P Parameter: Age (day) Value: 23-25 days
  misc_feature: MA Experiment 20000794 PARAMETER Experiment Name: At_Petals_P Parameter: Plant Line Value: WS
  misc_feature: MA Experiment 20000794 PARAMETER Experiment Name: At_Petals_P Parameter: Tissue Value: Petals vs. Whole plant
  misc_feature: MA Experiment ID: 20001451 Result: Up-regulated in Transcription
  misc_feature: MA Experiment 20001451 PARAMETER Experiment Name: At_Far-red-induction_P Parameter: Age (day) Value: 7
  misc_feature: MA Experiment 20001451 PARAMETER Experiment Name: At_Far-red-induction_P Parameter: Light Value: Far-red vs. White
  misc_feature: MA Experiment 20001451 PARAMETER Experiment Name: At_Far-red-induction_P Parameter: Organism Value: A. thaliana
  misc_feature: MA Experiment 20001451 PARAMETER Experiment Name: At_Far-red-induction_P Parameter: Plant Line Value: Columbia
  misc_feature: MA Experiment 20001451 PARAMETER Experiment Name: At_Far-red-induction_P Parameter: Timepoint (hr) Value: 24
  misc_feature: MA Experiment 20001451 PARAMETER Experiment Name: At_Far-red-induction_P Parameter: Tissue Value: Whole Plant
  misc_feature: MA Experiment ID: 20001560 Result: Down-regulated in Transcription
  misc_feature: MA Experiment 20001560 PARAMETER Experiment Name: At_Drought_Soil_Dry_P Parameter: Age (day) Value: 28
  misc_feature: MA Experiment 20001560 PARAMETER Experiment Name: At_Drought_Soil_Dry_P Parameter: Organism Value: A. thaliana
  misc_feature: MA Experiment 20001560 PARAMETER Experiment Name: At_Drought_Soil_Dry_P Parameter: Plant Line Value: WS
  misc_feature: MA Experiment 20001560 PARAMETER Experiment Name: At_Drought_Soil_Dry_P Parameter: Post Timepoint (hr) Value: None
  misc_feature: MA Experiment 20001560 PARAMETER Experiment Name: At_Drought_Soil_Dry_P Parameter: Post-Treatment Value: None
  misc_feature: MA Experiment 20001560 PARAMETER Experiment Name: At_Drought_Soil_Dry_P Parameter: Timepoint (day) Value: 14
  misc_feature: MA Experiment 20001560 PARAMETER Experiment Name: At_Drought_Soil_Dry_P Parameter: Treatment Value: Drought vs. No Drought
  misc_feature: MA Experiment ID: 20001904 Result: Up-regulated in Transcription
  misc_feature: MA Experiment 20001904 PARAMETER Experiment Name: At_Drought_Reproduction_P Parameter: Age (day) Value: 37
  misc_feature: MA Experiment 20001904 PARAMETER Experiment Name: At_Drought_Reproduction_P Parameter: Organism Value: A. thaliana
  misc_feature: MA Experiment 20001904 PARAMETER Experiment Name: At_Drought_Reproduction_P Parameter: Plant Line Value: WS
  misc_feature: MA Experiment 20001904 PARAMETER Experiment Name: At_Drought_Reproduction_P Parameter: Timepoint (day) Value: 7
  misc_feature: MA Experiment 20001904 PARAMETER Experiment Name: At_Drought_Reproduction_P Parameter: Tissue Value: Rosettes
  misc_feature: MA Experiment 20001904 PARAMETER Experiment Name: At_Drought_Reproduction_P Parameter: Treatment Value: Drought vs. No Drought
  misc_feature: MA Experiment ID: 20001905 Result: Up-regulated in Transcription
  misc_feature: MA Experiment 20001905 PARAMETER Experiment Name: At_Drought_Reproduction_P Parameter: Age (day) Value: 40
  misc_feature: MA Experiment 20001905 PARAMETER Experiment Name: At_Drought_Reproduction_P Parameter: Organism Value: A. thaliana
  misc_feature: MA Experiment 20001905 PARAMETER Experiment Name: At_Drought_Reproduction_P Parameter: Plant Line Value: WS
  misc_feature: MA Experiment 20001905 PARAMETER Experiment Name: At_Drought_Reproduction_P Parameter: Timepoint (day) Value: 10
  misc_feature: MA Experiment 20001905 PARAMETER Experiment Name: At_Drought_Reproduction_P Parameter: Tissue Value: Rosettes
  misc_feature: MA Experiment 20001905 PARAMETER Experiment Name: At_Drought_Reproduction_P Parameter: Treatment Value: Drought vs. No Drought
  misc_feature: MA Experiment ID: 20001906 Result: Up-regulated in Transcription
  misc_feature: MA Experiment 20001906 PARAMETER Experiment Name: At_Drought_Reproduction_P Parameter: Age (day) Value: 35
  misc_feature: MA Experiment 20001906 PARAMETER Experiment Name: At_Drought_Reproduction_P Parameter: Organism Value: A. thaliana
  misc_feature: MA Experiment 20001906 PARAMETER Experiment Name: At_Drought_Reproduction_P Parameter: Plant Line Value: WS
  misc_feature: MA Experiment 20001906 PARAMETER Experiment Name: At_Drought_Reproduction_P Parameter: Timepoint (day) Value: 5
  misc_feature: MA Experiment 20001906 PARAMETER Experiment Name: At_Drought_Reproduction_P Parameter: Tissue Value: Siliques
  misc_feature: MA Experiment 20001906 PARAMETER Experiment Name: At_Drought_Reproduction_P Parameter: Treatment Value: Drought vs. No Drought
attctccttcttctttttttgtgcagttcaaatagtaaaaaaccgaatgacggtatgatgctcgtaatatcgattttcgctggagtagttatcggatttttattaggcatatctttccctacattgtcactaactaagatgaattttccatcaagcattcttccttctgttgctactgtttacatagaaaatgagaaaccagagaaaccatctaagacgagttcacaaaacgagtttaattcaagtgatgcatcacatcatcataagatttgggttccatcgaatcctcgaggtgcagagatgttacctccaagttttgttgcagccgaatcggatttttacttgcgaagattatggggattgcctaaagatgatttaccagtggtgaagcctaaatatctagttgcttttactgtttcttatgaacaaagaaaaaacatcgattcttgtgtcaaaaaattctcagataacttcaccattgttctgtttcattacgatggaaaaacctcggagtatgatgaatttgaatggtctaaacgggcgatacacgtcagtgtacctaagcaaaccaagtggtggtatgctaaaaggtttctgcatcctgatatcatagcaccatatgaatatatattcatttgggatgaagatcttggcgttgaaaacttcgacgcagaagagtacatcaagattgtgaagaagcatggtctagaaatatcgcaacccgctgtggaatcaagaaaatcaatcacatggaagataacaaaaagaatacccggaatcgaagttcacaaagaagtcgaagagaaaccaggccgctgcaatgaccctcacctacctccttgtgcagggtttatagagattatggctccagttttctctagagaggcatggcgctgcgtgtggcatatgattcagaatgacttggttcacggttggggtcttgactttgcgctaagaaaatgcgtcgagcctgcacatgagaagattggtgttgtggattctcaatggatcattcatcaaaagattccttctttaggcagccagggaactgcgcaggaagggaaaaccgcgttccaaggggtaagagagagatgtaaacgggaatggacaatgtttcagaaaagaatgacccgatcagagcagaagtatctgaaagaaattgcatcagcctcttcaaacgctacacgtacttaaaccaaaagaatagaggaactgaataacaaactttagtgttcagatagcattttcagtaataagagaaatagaatgttgatatgataagcacataagtatacacacacaatacacattctttgaaaagaacaatatagctctgttctagaaacagttatactgtagtaacaaaacagttaataaagttcttaataaactcttcatttct

SEQ ID NO: 39524 - protein, 397 aa, Arabidopsis thaliana
  peptide (1)..(397): Ceres Seq. ID no. 12422125
  misc_feature (89)..(267): Pfam Name: Protein of unknown function (DUF707) Pfam Description: Protein of unknown function (DUF707)
  misc_feature (5)..(397): Homolog of NCBI NO: 18408876 NR Description: F12A21.2; protein id: At1g67850.1, supported by
  misc_feature (10)..(52): Homolog of NCBI NO: 25402748 NR Description: protein F3F19.3 [imported] - Arabidopsis thaliana
  misc_feature (284)..(391): Homolog of NCBI NO: 25402748 NR Description: protein F3F19.3 [imported] - Arabidopsis thaliana
  misc_feature (89)..(285): Homolog of NCBI NO: 25402748 NR Description: protein F3F19.3 [imported] - Arabidopsis thaliana
  misc_feature (10)..(391): Homolog of NCBI NO: 22329525 NR Description: unknown protein
  misc_feature (10)..(52): Homolog of NCBI NO: 9294303 NR Description: gb|AAD31054.1~gene_id:F20C19.17~strong similarity
  misc_feature (284)..(397): Homolog of NCBI NO: 9294303 NR Description: gb|AAD31054.1~gene_id:F20C19.17~strong similarity
  misc_feature (89)..(267): Homolog of NCBI NO: 9294303 NR Description: gb|AAD31054.1~gene_id:F20C19.17~strong similarity
  misc_feature (10)..(397): Homolog of NCBI NO: 16612300 NR Description: AT3g26440/F20C19_16 [Arabidopsis thaliana]
  misc_feature (10)..(397): Homolog of NCBI NO: 18404941 NR Description: expressed protein
ILLLLFLCSSNSKKPNDGMMLVISIFAGVVIGFLLGISFPTLSLTKMNFPSSILPSVATVYIENEKPEKPSKTSSQNEFNSSDASHHHKIWVPSNPRGAEMLPPSFVAAESDFYLRRLWGLPKDDLPVVKPKYLVAFTVSYEQRKNIDSCVKKFSDNFTIVLFHYDGKTSEYDEFEWSKRAIHVSVPKQTKWWYAKRFLHPDIIAPYEYIFIWDEDLGVENFDAEEYIKIVKKHGLEISQPAVESRKSITWKITKRIPGIEVHKEVEEKPGRCNDPHLPPCAGFIEIMAPVFSREAWRCVWHMIQNDLVHGWGLDFALRKCVEPAHEKIGVVDSQWIIHQKIPSLGSQGTAQEGKTAFQGVRERCKREWTMFQKRMTRSEQKYLKEIASASSNATRT

SEQ ID NO: 39525 - protein, 379 aa, Arabidopsis thaliana
  peptide (1)..(379): Ceres Seq. ID no. 12422126
  misc_feature (71)..(249): Pfam Name: Protein of unknown function (DUF707) Pfam Description: Protein of unknown function (DUF707)
  misc_feature (1)..(379): Homolog of NCBI NO: 18408876 NR Description: F12A21.2; protein id: At1g67850.1, supported by
  misc_feature (1)..(34): Homolog of NCBI NO: 25402748 NR Description: protein F3F19.3 [imported] - Arabidopsis thaliana
  misc_feature (266)..(373): Homolog of NCBI NO: 25402748 NR Description: protein F3F19.3 [imported] - Arabidopsis thaliana
  misc_feature (71)..(267): Homolog of NCBI NO: 25402748 NR Description: protein F3F19.3 [imported] - Arabidopsis thaliana
  misc_feature (1)..(373): Homolog of NCBI NO: 22329525 NR Description: unknown protein
  misc_feature (1)..(34): Homolog of NCBI NO: 9294303 NR Description: gb|AAD31054.1~gene_id:F20C19.17~strong similarity
  misc_feature (266)..(379): Homolog of NCBI NO: 9294303 NR Description: gb|AAD31054.1~gene_id:F20C19.17~strong similarity
  misc_feature (71)..(249): Homolog of NCBI NO: 9294303 NR Description: gb|AAD31054.1~gene_id:F20C19.17~strong similarity
  misc_feature (1)..(379): Homolog of NCBI NO: 16612300 NR Description: AT3g26440/F20C19_16 [Arabidopsis thaliana]
  misc_feature (1)..(379): Homolog of NCBI NO: 18404941 NR Description: expressed protein
MMLVISIFAGVVIGFLLGISFPTLSLTKMNFPSSILPSVATVYIENEKPEKPSKTSSQNEFNSSDASHHHKIWVPSNPRGAEMLPPSFVAAESDFYLRRLWGLPKDDLPVVKPKYLVAFTVSYEQRKNIDSCVKKFSDNFTIVLFHYDGKTSEYDEFEWSKRAIHVSVPKQTKWWYAKRFLHPDIIAPYEYIFIWDEDLGVENFDAEEYIKIVKKHGLEISQPAVESRKSITWKITKRIPGIEVHKEVEEKPGRCNDPHLPPCAGFIEIMAPVFSREAWRCVWHMIQNDLVHGWGLDFALRKCVEPAHEKIGVVDSQWIIHQKIPSLGSQGTAQEGKTAFQGVRERCKREWTMFQKRMTRSEQKYLKEIASASSNATRT

SEQ ID NO: 39526 - protein, 378 aa, Arabidopsis thaliana
  peptide (1)..(378): Ceres Seq. ID no. 12422127
  misc_feature (70)..(248): Pfam Name: Protein of unknown function (DUF707) Pfam Description: Protein of unknown function (DUF707)
  misc_feature (1)..(378): Homolog of NCBI NO: 18408876 NR Description: F12A21.2; protein id: At1g67850.1, supported by
  misc_feature (1)..(33): Homolog of NCBI NO: 25402748 NR Description: protein F3F19.3 [imported] - Arabidopsis thaliana
  misc_feature (265)..(372): Homolog of NCBI NO: 25402748 NR Description: protein F3F19.3 [imported] - Arabidopsis thaliana
  misc_feature (70)..(266): Homolog of NCBI NO: 25402748 NR Description: protein F3F19.3 [imported] - Arabidopsis thaliana
  misc_feature (1)..(372): Homolog of NCBI NO: 22329525 NR Description: unknown protein
  misc_feature (1)..(33): Homolog of NCBI NO: 9294303 NR Description: gb|AAD31054.1~gene_id:F20C19.17~strong similarity
  misc_feature (265)..(378): Homolog of NCBI NO: 9294303 NR Description: gb|AAD31054.1~gene_id:F20C19.17~strong similarity
  misc_feature (70)..(248): Homolog of NCBI NO: 9294303 NR Description: gb|AAD31054.1~gene_id:F20C19.17~strong similarity
  misc_feature (1)..(378): Homolog of NCBI NO: 16612300 NR Description: AT3g26440/F20C19_16 [Arabidopsis thaliana]
  misc_feature (1)..(378): Homolog of NCBI NO: 18404941 NR Description: expressed protein
MLVISIFAGVVIGFLLGISFPTLSLTKMNFPSSILPSVATVYIENEKPEKPSKTSSQNEFNSSDASHHHKIWVPSNPRGAEMLPPSFVAAESDFYLRRLWGLPKDDLPVVKPKYLVAFTVSYEQRKNIDSCVKKFSDNFTIVLFHYDGKTSEYDEFEWSKRAIHVSVPKQTKWWYAKRFLHPDIIAPYEYIFIWDEDLGVENFDAEEYIKIVKKHGLEISQPAVESRKSITWKITKRIPGIEVHKEVEEKPGRCNDPHLPPCAGFIEIMAPVFSREAWRCVWHMIQNDLVHGWGLDFALRKCVEPAHEKIGVVDSQWIIHQKIPSLGSQGTAQEGKTAFQGVRERCKREWTMFQKRMTRSEQKYLKEIASASSNATRT

SEQ ID NO: 39527 - DNA, 1158 bp, Arabidopsis thaliana
  misc_feature (1)..(1158): Ceres Seq. ID no. 12328522
  misc_feature: MA Experiment ID: 108462 Result: Down-regulated in Transcription
  misc_feature: MA Experiment 108462 PARAMETER Experiment Name: At_Germinating_Seeds_cDNA_P Parameter: Age (day) Value: 2 vs. 0
  misc_feature: MA Experiment 108462 PARAMETER Experiment Name: At_Germinating_Seeds_cDNA_P Parameter: Tissue Value: Germinating Seeds
  misc_feature: MA Experiment ID: 108464 Result: Down-regulated in Transcription
  misc_feature: MA Experiment 108464 PARAMETER Experiment Name: At_Germinating_Seeds_cDNA_P Parameter: Age (day) Value: 4 vs. 0
  misc_feature: MA Experiment 108464 PARAMETER Experiment Name: At_Germinating_Seeds_cDNA_P Parameter: Tissue Value: Germinating Seeds
  misc_feature: MA Experiment ID: 20000437 Result: Up-regulated in Transcription
  misc_feature: MA Experiment 20000437 PARAMETER Experiment Name: At_Drought_P Parameter: Age (day) Value: 8
  misc_feature: MA Experiment 20000437 PARAMETER Experiment Name: At_Drought_P Parameter: Organism Value: A. thaliana
  misc_feature: MA Experiment 20000437 PARAMETER Experiment Name: At_Drought_P Parameter: Plant Line Value: WS
  misc_feature: MA Experiment 20000437 PARAMETER Experiment Name: At_Drought_P Parameter: Timepoint (hr) Value: 24
  misc_feature: MA Experiment 20000437 PARAMETER Experiment Name: At_Drought_P Parameter: Tissue Value: Whole Plant
  misc_feature: MA Experiment 20000437 PARAMETER Experiment Name: At_Drought_P Parameter: Treatment Value: Drought vs. No Drought
  misc_feature: MA Experiment ID: 20001911 Result: Up-regulated in Transcription
  misc_feature: MA Experiment 20001911 PARAMETER Experiment Name: At_Drought_Reproduction_P Parameter: Age (day) Value: 40
  misc_feature: MA Experiment 20001911 PARAMETER Experiment Name: At_Drought_Reproduction_P Parameter: Organism Value: A. thaliana
  misc_feature: MA Experiment 20001911 PARAMETER Experiment Name: At_Drought_Reproduction_P Parameter: Plant Line Value: WS
  misc_feature: MA Experiment 20001911 PARAMETER Experiment Name: At_Drought_Reproduction_P Parameter: Timepoint (day) Value: 10
  misc_feature: MA Experiment 20001911 PARAMETER Experiment Name: At_Drought_Reproduction_P Parameter: Tissue Value: Flowers
  misc_feature: MA Experiment 20001911 PARAMETER Experiment Name: At_Drought_Reproduction_P Parameter: Treatment Value: Drought vs. No Drought
acctaaacctctgtaccacaattcgacgcaattcatcgttacccaaaaacctctgtttcgattcctagacactctcactagggttttacaactatggcaacgactcgaatggttagggtttcgcaagatggttcgggagattactgctctgttcaagacgcaattgattcggtgcctttaggtaacacttgcagaactgtgattcgtctctcacctgggatttatcggcaacctgtgtatgtacccaagaggaagaatttcattaccttcgccggaatctcaccggagatcacggttttgacttggaacaatacagcttccaagattgagcatcaccaggcgtctagagtcattgggactggtacgtttggttgtggtagtgttattgttgaaggtgaagattttattgcagagaacattacttttgagaactctgctcctgagggatcagggcaagctgtggcgatacgagtcactgcagaccgttgcgccttttataattgtcgatttctcggttggcaggatacattgtatttacatcatgggaaacaatatttgaaagactgttacatcgagggaagtgtggatttcatatttggaaacagtaccgctctcttggaacactgccatatccactgcaaatctcaggggtttataacagcacaaagccgaaaatcgtctcaggaatctactggttatgtattcttaagatgtgtgatcacgggtaatggtcagagcgggtatatgtatctcggaaggccatggggaccatttgggagggtagtccttgcttacacttacatggacgcgtgtatcagaaatgtgggttggcataactggggaaacgcagagaacgagagaagtgcttgcttttatgagtataggtgctttggtccgggtagctgttcgtctgaacgtgttccgtggtcgagagaactgatggatgacgaagctggacactttgtgcatcatagttttgtagatcctgaacaggaccggccttggttgtgtctaagaatgggtgtgaaaacaccatattcggcttagagtactgaaaaaaaatgttgtaactgccatggtgaggcctagaataacaaaggatcatgaagaacctattgtaaacaaccctagtatcaaactttggattatcttttgtcc

SEQ ID NO: 39528 - protein, 317 aa, Arabidopsis thaliana
  peptide (1)..(317): Ceres Seq. ID no. 12328523
  misc_feature (6)..(299): Pfam Name: Pectinesterase Pfam Description: Pectinesterase
  misc_feature (1)..(308): Homolog of NCBI NO: 9758778 NR Description: pectin methylesterase-like [Arabidopsis thaliana]
  misc_feature (1)..(297): Homolog of NCBI NO: 38345478 NR Description: OSJNBa0010H02.16 [Oryza sativa (japonica
  misc_feature (1)..(308): Homolog of NCBI NO: 15238111 NR Description: pectinesterase family
  misc_feature (1)..(305): Homolog of NCBI NO: 15226598 NR Description: pectinesterase family; protein id: At2g21610.1
  misc_feature (145)..(266): Homolog of NCBI NO: 10047449 NR Description: pectin methylesterase [Prunus armeniaca]
  misc_feature (6)..(305): Homolog of NCBI NO: 34913006 NR Description: pectin methylesterase-like protein
  misc_feature (11)..(307): Homolog of NCBI NO: 15241163 NR Description: pectinesterase family
  misc_feature (15)..(297): Homolog of NCBI NO: 34909402 NR Description: putative pectin methylesterase
  misc_feature (11)..(317): Homolog of NCBI NO: 37534214 NR Description: putative pectin methylesterase
  misc_feature (1)..(317): Homolog of NCBI NO: 18406048 NR Description: pectinesterase family
MATTRMVRVSQDGSGDYCSVQDAIDSVPLGNTCRTVIRLSPGIYRQPVYVPKRKNFITFAGISPEITVLTWNNTASKIEHHQASRVIGTGTFGCGSVIVEGEDFIAENITFENSAPEGSGQAVAIRVTADRCAFYNCRFLGWQDTLYLHHGKQYLKDCYIEGSVDFIFGNSTALLEHCHIHCKSQGFITAQSRKSSQESTGYVFLRCVITGNGQSGYMYLGRPWGPFGRVVLAYTYMDACIRNVGWHNWGNAENERSACFYEYRCFGPGSCSSERVPWSRELMDDEAGHFVHHSFVDPEQDRPWLCLRMGVKTPYSA

SEQ ID NO: 39529 - protein, 312 aa, Arabidopsis thaliana
  peptide (1)..(312): Ceres Seq. ID no. 12328524
  misc_feature (1)..(294): Pfam Name: Pectinesterase Pfam Description: Pectinesterase
  misc_feature (1)..(303): Homolog of NCBI NO: 9758778 NR Description: pectin methylesterase-like [Arabidopsis thaliana]
  misc_feature (1)..(292): Homolog of NCBI NO: 38345478 NR Description: OSJNBa0010H02.16 [Oryza sativa (japonica
  misc_feature (1)..(303): Homolog of NCBI NO: 15238111 NR Description: pectinesterase family
  misc_feature (1)..(300): Homolog of NCBI NO: 15226598 NR Description: pectinesterase family; protein id: At2g21610.1
  misc_feature (140)..(261): Homolog of NCBI NO: 10047449 NR Description: pectin methylesterase [Prunus armeniaca]
  misc_feature (1)..(300): Homolog of NCBI NO: 34913006 NR Description: pectin methylesterase-like protein
  misc_feature (6)..(302): Homolog of NCBI NO: 15241163 NR Description: pectinesterase family
  misc_feature (10)..(292): Homolog of NCBI NO: 34909402 NR Description: putative pectin methylesterase
  misc_feature (6)..(312): Homolog of NCBI NO: 37534214 NR Description: putative pectin methylesterase
  misc_feature (1)..(312): Homolog of NCBI NO: 18406048 NR Description: pectinesterase family
MVRVSQDGSGDYCSVQDAIDSVPLGNTCRTVIRLSPGIYRQPVYVPKRKNFITFAGISPEITVLTWNNTASKIEHHQASRVIGTGTFGCGSVIVEGEDFIAENITFENSAPEGSGQAVAIRVTADRCAFYNCRFLGWQDTLYLHHGKQYLKDCYIEGSVDFIFGNSTALLEHCHIHCKSQGFITAQSRKSSQESTGYVFLRCVITGNGQSGYMYLGRPWGPFGRVVLAYTYMDACIRNVGWHNWGNAENERSACFYEYRCFGPGSCSSERVPWSRELMDDEAGHFVHHSFVDPEQDRPWLCLRMGVKTPYSA

SEQ ID NO: 39530 - DNA, 5072 bp, Arabidopsis thaliana
  misc_feature (1)..(5072): Ceres Seq. ID no. 13504870
  misc_feature: MA Experiment ID: 108572 Result: Up-regulated in Transcription
  misc_feature: MA Experiment 108572 PARAMETER Experiment Name: At_Drought_cDNA_P Parameter: Timepoint (hr) Value: 1
  misc_feature: MA Experiment 108572 PARAMETER Experiment Name: At_Drought_cDNA_P Parameter: Tissue Value: Aerial
  misc_feature: MA Experiment 108572 PARAMETER Experiment Name: At_Drought_cDNA_P Parameter: Treatment Value: Drought vs. No Drought
  misc_feature: MA Experiment ID: 108574 Result: Up-regulated in Transcription
  misc_feature: MA Experiment 108574 PARAMETER Experiment Name: At_Wounding__cDNA_P Parameter: Timepoint (hr) Value: 1
  misc_feature: MA Experiment 108574 PARAMETER Experiment Name: At_Wounding__cDNA_P Parameter: Tissue Value: Aerial
  misc_feature: MA Experiment 108574 PARAMETER Experiment Name: At_Wounding__cDNA_P Parameter: Treatment Value: Wounding vs. No Wounding
  misc_feature: MA Experiment ID: 108595 Result: Up-regulated in Transcription
  misc_feature: MA Experiment 108595 PARAMETER Experiment Name: At_Ler-pi_Ovule_cDNA_P Parameter: Plant Line Value: null
  misc_feature: MA Experiment ID: 108668 Result: Up-regulated in Transcription
  misc_feature: MA Experiment 108668 PARAMETER Experiment Name: At_2mM_SA_cDNA_P Parameter: Plant Line Value: WS
  misc_feature: MA Experiment 108668 PARAMETER Experiment Name: At_2mM_SA_cDNA_P Parameter: Timepoint (hr) Value: 6
  misc_feature: MA Experiment 108668 PARAMETER Experiment Name: At_2mM_SA_cDNA_P Parameter: Treatment Value: 2mM SA vs. No Treatment
  misc_feature: MA Experiment ID: 20000185 Result: Up-regulated in Transcription
  misc_feature: MA Experiment 20000185 PARAMETER Experiment Name: At_Roots__P Parameter: Age (day) Value: 7 vs. 21
  misc_feature: MA Experiment 20000185 PARAMETER Experiment Name: At_Roots__P Parameter: Organism Value: A. thaliana
  misc_feature: MA Experiment 20000185 PARAMETER Experiment Name: At_Roots__P Parameter: Tissue Value: Roots vs. Whole Plant
  misc_feature: MA Experiment ID: 20000224 Result: Up-regulated in Transcription
  misc_feature: MA Experiment ID: 20000227 Result: Up-regulated in Transcription
  misc_feature: MA Experiment 20000227 PARAMETER Experiment Name: At_Root-Tips-vs-Tops_P Parameter: Tissue Value: Root Tips vs. Root Tops
  misc_feature: MA Experiment ID: 20000234 Result: Up-regulated in Transcription
  misc_feature: MA Experiment 20000234 PARAMETER Experiment Name: At_Siliques_P Parameter: Age (day) Value: 21
  misc_feature: MA Experiment 20000234 PARAMETER Experiment Name: At_Siliques_P Parameter: Organism Value: A. thaliana
  misc_feature: MA Experiment 20000234 PARAMETER Experiment Name: At_Siliques_P Parameter: Plant Line Value: WS
  misc_feature: MA Experiment 20000234 PARAMETER Experiment Name: At_Siliques_P Parameter: Tissue Value: Less Than 5mm Siliques vs. Whole Plant
  misc_feature: MA Experiment ID: 20000235 Result: Up-regulated in Transcription
  misc_feature: MA Experiment 20000235 PARAMETER Experiment Name: At_Siliques_P Parameter: Age (day) Value: 21
  misc_feature: MA Experiment 20000235 PARAMETER Experiment Name: At_Siliques_P Parameter: Organism Value: A. thaliana
  misc_feature: MA Experiment 20000235 PARAMETER Experiment Name: At_Siliques_P Parameter: Plant Line Value: WS
  misc_feature: MA Experiment 20000235 PARAMETER Experiment Name: At_Siliques_P Parameter: Tissue Value: 5-10mm Siliques vs. Whole Plant
  misc_feature: MA Experiment ID: 20000264 Result: Up-regulated in Transcription
  misc_feature: MA Experiment 20000264 PARAMETER Experiment Name: At_Open_Flower_P Parameter: Age (day) Value: 21
  misc_feature: MA Experiment 20000264 PARAMETER Experiment Name: At_Open_Flower_P Parameter: Plant Line Value: WS
  misc_feature: MA Experiment 20000264 PARAMETER Experiment Name: At_Open_Flower_P Parameter: Tissue Value: Open Flower vs. Whole Plant
  misc_feature: MA Experiment ID: 20000265 Result: Up-regulated in Transcription
  misc_feature: MA Experiment 20000265 PARAMETER Experiment Name: At_Open_Flower_P Parameter: Age (day) Value: 21
  misc_feature: MA Experiment 20000265 PARAMETER Experiment Name: At_Open_Flower_P Parameter: Plant Line Value: WS
  misc_feature: MA Experiment 20000265 PARAMETER Experiment Name: At_Open_Flower_P Parameter: Tissue Value: Closed Flower vs. Whole Plant
  misc_feature: MA Experiment ID: 20000286 Result: Up-regulated in Transcription
  misc_feature: MA Experiment 20000286 PARAMETER Experiment Name: At_Open_Flower_P Parameter: Age (day) Value: 21
  misc_feature: MA Experiment 20000286 PARAMETER Experiment Name: At_Open_Flower_P Parameter: Plant Line Value: WS
  misc_feature: MA Experiment 20000286 PARAMETER Experiment Name: At_Open_Flower_P Parameter: Tissue Value: Half Open vs. Whole Plant
  misc_feature: MA Experiment ID: 20000439 Result: Up-regulated in Transcription
  misc_feature: MA Experiment 20000439 PARAMETER Experiment Name: At_Roots__P Parameter: Age (day) Value: 14 vs. 21
  misc_feature: MA Experiment 20000439 PARAMETER Experiment Name: At_Roots__P Parameter: Organism Value: A. thaliana
  misc_feature: MA Experiment 20000439 PARAMETER Experiment Name: At_Roots__P Parameter: Tissue Value: Roots vs. Whole Plant
  misc_feature: MA Experiment ID: 20000495 Result: Up-regulated in Transcription
  misc_feature: MA Experiment 20000495 PARAMETER Experiment Name: At_Guard_Cells_P Parameter: Harvest Date Value: 8/2/2002
  misc_feature: MA Experiment 20000495 PARAMETER Experiment Name: At_Guard_Cells_P Parameter: Organism Value: A. thaliana
  misc_feature: MA Experiment 20000495 PARAMETER Experiment Name: At_Guard_Cells_P Parameter: Tissue Value: Guard Cells vs. Leaves
  misc_feature: MA Experiment ID: 20000794 Result: Up-regulated in Transcription
  misc_feature: MA Experiment 20000794 PARAMETER Experiment Name: At_Petals_P Parameter: Age (day) Value: 23-25 days
  misc_feature: MA Experiment 20000794 PARAMETER Experiment Name: At_Petals_P Parameter: Plant Line Value: WS
  misc_feature: MA Experiment 20000794 PARAMETER Experiment Name: At_Petals_P Parameter: Tissue Value: Petals vs. Whole plant
  misc_feature: MA Experiment ID: 20001557 Result: Up-regulated in Transcription
  misc_feature: MA Experiment 20001557 PARAMETER Experiment Name: At_Drought_Soil_Dry_P Parameter: Age (day) Value: 27
  misc_feature: MA Experiment 20001557 PARAMETER Experiment Name: At_Drought_Soil_Dry_P Parameter: Organism Value: A. thaliana
  misc_feature: MA Experiment 20001557 PARAMETER Experiment Name: At_Drought_Soil_Dry_P Parameter: Plant Line Value: WS
  misc_feature: MA Experiment 20001557 PARAMETER Experiment Name: At_Drought_Soil_Dry_P Parameter: Post Timepoint (hr) Value: 3
  misc_feature: MA Experiment 20001557 PARAMETER Experiment Name: At_Drought_Soil_Dry_P Parameter: Post-Treatment Value: Re-Water vs. No Drought
  misc_feature: MA Experiment 20001557 PARAMETER Experiment Name: At_Drought_Soil_Dry_P Parameter: Timepoint (day) Value: 13
  misc_feature: MA Experiment 20001557 PARAMETER Experiment Name: At_Drought_Soil_Dry_P Parameter: Treatment Value: Drought vs. No Drought
  misc_feature: MA Experiment ID: 20001757 Result: Down-regulated in Transcription
  misc_feature: MA Experiment 20001757 PARAMETER Experiment Name: At_50mM_NH4NO3_L-to-H_P Parameter: Timepoint (hr) Value: 6
  misc_feature: MA Experiment 20001757 PARAMETER Experiment Name: At_50mM_NH4NO3_L-to-H_P Parameter: Tissue Value: Leaf
  misc_feature: MA Experiment 20001757 PARAMETER Experiment Name: At_50mM_NH4NO3_L-to-H_P Parameter: Treatment Value: 50mM NH4NO3 vs 100mM Mannitol
aagagaagagagatctctctctcgattgctctcaagaacccaagtgacgtctggtttcagctgatttgtttcttctcattctctatcttcttctctgggaaatatcgattttgatctattaagagctgctacgagctttgggatgtggtgagatgcttgttctatctcgaacaatccgccggttgttgattttaaacaaactctctatcacaaatctttcccgatcatggattttattgagatctcgttgatctttcgagagcatttgccactactggaactatgttcggtcatcatcaacctcctactctttcttgtctttctatttgctgtctccgcgaggcagattctcgtctgcgtgagaagaggcagagataggctctctaaggacgatacggtttcagcttctaatcttagcttggaaagagaggttaaccatgttagtgttgggtttgggtttaatctgtctttgctctgttgcttatatgtgttaggcgtccaagttttggtgttagtatatgatggggttaaggttagaagagaagtcagtgactggtttgttctttgctttccagcttctcagagtttagcttggtttgtccttagcttcttagttcttcatttgaaatacaagtcttcagagaagctacccttcttggtgaggatatggtggttcctggcgttttcgatttgcctctgtactatgtatgtcgatggaagaaggctagccattgaaggttggagcagatgttcttctcatgttgtcgccaatttagctgttacacctgctcttgggtttctctgctttctggcctggagaggcgtttctggtattcaagttaccagaagctcctctgatcttcaagagcctttgcttgttgaagaagaggcagcttgtcttaaagttactccatatagtactgctgggctagttagccttattacgctttcatggttggatccacttctctcggctggttcaaaaagaccgcttgagcttaaggatataccgcttcttgcaccaagagatagagccaaatcaagttacaaggtcttgaagtcgaattggaagagatgcaagtccgagaatccttcaaagcctccttctttagctcgtgcaattatgaaatcattttggaaagaagctgcttgcaatgccgtatttgctgggttgaatactcttgtgtcctatgtcggtccttacttgatcagctactttgttgattatcttggagggaaggagattttccctcatgaaggatacgtactcgctgggatattctttacgtccaagcttatagagacagtcaccacccgccagtggtatatgggtgttgatatcctagggatgcatgttagatcagctcttacagcaatggtataccgaaaaggtctcaaactttcaagtatagccaagcagaaccacacgagcggtgaaattgtaaactacatggcagtcgatgtccagcgcataggagattactcatggtatcttcatgatatttggatgcttccgatgcaaatagttcttgctcttgcaatcctatataaaagcgtgggcatagctgctgtagctacattggttgctacaataatctcgattcttgtcacgattccactcgctaaggtccaggaagactatcaagataagttgatgactgcgaaagatgaaagaatgaggaaaacctcagagtgtcttaggaacatgagagttctgaaattgcaggcatgggaagatcgttatagagtgagattggaagaaatgagggaagaggagtatggttggcttcgcaaagccttatattctcaggcttttgttacttttatcttttggagttcccccatttttgtcgccgcagttacattcgctacttcgatatttctaggcactcaacttaccgctggaggtgttctttctgctctggcgacattcagaattcttcaggagccacttcggaactttcctgatctggtttcaatgatggctcagacaaaggtttctcttgataggatttctgggttcttgcaggaggaagaacttcaagaagatgcaactgttgttattccacggggactttcgaatatagccatagagattaaagatggtgtgttttgttgggaccctttttcttcaaggccgacattatctgggattcagatgaaagtggagaagggtatgcgtgtggctgtctgtggcacagttggctctggaaaatcaagttttatctcttgcatcctaggggaaatcccaaaaatctctggcgaagttagaatatgtggtactactggttatgtgtctcaatcggcttggattcagtctggtaacattgaagaaaacattctatttggcagtccaatggagaaaacaaagtacaagaatgtgatacaagcatgttccctaaagaaagatatagagcttttctcacatggggaccaaactattatcggggagagaggtataaatctcagcggaggtcagaaacagcgtgtacaacttgcaagggcattatatcaagatgctgacatttatttactagacgacccttttagtgctcttgatgcacacactggctctgatttgtttagggattatattctatctgcattggctgagaaaactgtggtttttgtaacgcatcaagttgagtttctccctgcagctgatctaatattggttctgaaggaaggcaggattattcaatcgggtaaatatgatgatctgctgcaagcaggtactgattttaaggccttagtgtctgcccaccatgaagcaatcgaggcaatggacatcccaagtccctcctcagaagactctgatgaaaatcctattcgcgatagtttggtcttgcataatccaaagtctgatgtttttgaaaatgacatcgagactttggcaaaggaagtacaagagggaggatctgcttcagatctaaaggcaatcaaagagaagaagaagaaagctaagcgttcccgcaaaaagcagcttgttcaagaagaggaacgagtaaagggaaaagtcagcatgaaggtgtacttgtcatacatgggtgctgcatataaaggggctctgattcctcttattatactcgcacaagctgctttccaatttcttcagattgctagtaattggtggatggcttgggcaaatcctcaaactgaaggtgacgaatctaaagtggatcctactctgcttctcatcgtttatacggctttagctttcgggagctctgtgttcatatttgttcgagctgctctggttgcaacttttggtcttgcagctgcacagaaactgttcttaaatatgctcagaagtgtgttccgagcgccaatgtcattctttgattccactcctgcaggaagaattttgaatcgggtttctattgatcaaagtgttgtagatcttgacattccttttagactcggtgggtttgcttcaacaacaatacaactctgtggcattgtcgctgtaatgaccaatgttacctggcaagttttccttcttgttgttccggtagctgttgcttgcttttggatgcagaaatattacatggcttcttcaagagaattggttcggatagttagtatccagaagtctccaataattcatctttttggagaatcaattgctggtgctgccacaataagaggatttggccaggaaaaaagatttatcaaaaggaatctttatcttctagattgttttgttcgacctttcttctgcagtatcgctgctatcgaatggctttgtttacgcatggaattactttccacacttgtatttgctttctgtatggttttactcgtcagttttccacatggaaccattgatccaagcatggcaggtcttgctgtgacatatggacttaacttgaatggacgtctatcacgatggatacttagcttttgtaagcttgaaaacaaaataatctcaatcgaaaggatttatcagtacagtcagattgtaggagaggccccagcaattatagaagatttccgcccgccttcctcgtggcctgcaacgggaacaattgagctagttgatgttaaggttcgttatgctgagaatcttccaacagtactccatggggtgagctgtgtgtttccgggtggaaaaaagattgggattgttgggcgaacgggaagcggaaagtcgactttgattcaagctttgtttcgattgattgagccaactgctggaaaaattactattgacaacattgacatttctcaaattggtcttcatgatcttcgtagtcgccttgggattatacctcaagatcctacattatttgaaggaacaatccgagcaaatcttgacccacttgaagaacattcagatgataaaatctgggaggcgcttgataaatcccagcttggagacgttgttagaggaaaagacctaaaacttgactctccagtactggaaaatggagataactggagtgtagggcagagacagcttgtgtcacttggacgagcattactgaaacaagccaaaatacttgttcttgatgaagcaacagcatcggttgacacagcaacagacaatctgatccagaagataatcagaacagagtttgaagactgcacggtctgcaccattgctcaccggataccaactgttatagacagtgacctagttttggttctcagcgacggtagagtagcagagtttgatactcctgcacggctattagaagacaaatcatcgatgttcttgaaattggtaacagaatactcctcaagatctactggaatccctgaattatgatcctccatgttaaaaattcagtttagggggtttcttttctcaagaggatataaaagaactgatatgtgacaaaagcttaaggtctaaagtaagagagagttttccacagggtttaagaaaagaaaaagcatgaaaggatgccaaaatctccgcgcttaaaaaactttgggtttaaatctcttctgtcgaacattgggagaaactttttttgtatggaacagttagtttctttggttttcatgtttatcaataaactgcaaaaacaaacaaagattagagtagaaactactaatcattcgtc

SEQ ID NO: 39531 - protein, 1514 aa, Arabidopsis thaliana
  peptide (1)..(1514): Ceres Seq. ID no. 13504871
  misc_feature (304)..(576): Pfam Name: ABC transporter transmembrane region Pfam Description: ABC transporter transmembrane region
  misc_feature (285)..(1497): Homolog of NCBI NO: 6678848 NR Description: ATP-binding cassette, sub-family C, member 1
  misc_feature (205)..(291): Homolog of NCBI NO: 19569597 NR Description: multidrug resistance-associated protein Mrp2
  misc_feature (908)..(1503): Homolog of NCBI NO: 19569597 NR Description: multidrug resistance-associated protein Mrp2
  misc_feature (295)..(930): Homolog of NCBI NO: 19569597 NR Description: multidrug resistance-associated protein Mrp2
  misc_feature (848)..(1507): Homolog of NCBI NO: 19172038 NR Description: ABC transporter ABCC.8 [Dictyostelium discoideum]
  misc_feature (233)..(931): Homolog of NCBI NO: 19172038 NR Description: ABC transporter ABCC.8 [Dictyostelium discoideum]
  misc_feature (640)..(854): Homolog of NCBI NO: 27368875 NR Description: MRP-like ABC transporter [Oryza sativa (japonica
  misc_feature (919)..(1511): Homolog of NCBI NO: 27368875 NR Description: MRP-like ABC transporter [Oryza sativa (japonica
  misc_feature (1)..(632): Homolog of NCBI NO: 27368875 NR Description: MRP-like ABC transporter [Oryza sativa (japonica
  misc_feature (67)..(1511): Homolog of NCBI NO: 15227133 NR Description: glutathione-conjugate transporter AtMRP4
MDFIEISLIFREHLPLLELCSVIINLLLFLVFLFAVSARQILVCVRRGRDRLSKDDTVSASNLSLEREVNHVSVGFGFNLSLLCCLYVLGVQVLVLVYDGVKVRREVSDWFVLCFPASQSLAWFVLSFLVLHLKYKSSEKLPFLVRIWWFLAFSICLCTMYVDGRRLAIEGWSRCSSHVVANLAVTPALGFLCFLAWRGVSGIQVTRSSSDLQEPLLVEEEAACLKVTPYSTAGLVSLITLSWLDPLLSAGSKRPLELKDIPLLAPRDRAKSSYKVLKSNWKRCKSENPSKPPSLARAIMKSFWKEAACNAVFAGLNTLVSYVGPYLISYFVDYLGGKEIFPHEGYVLAGIFFTSKLIETVTTRQWYMGVDILGMHVRSALTAMVYRKGLKLSSIAKQNHTSGEIVNYMAVDVQRIGDYSWYLHDIWMLPMQIVLALAILYKSVGIAAVATLVATIISILVTIPLAKVQEDYQDKLMTAKDERMRKTSECLRNMRVLKLQAWEDRYRVRLEEMREEEYGWLRKALYSQAFVTFIFWSSPIFVAAVTFATSIFLGTQLTAGGVLSALATFRILQEPLRNFPDLVSMMAQTKVSLDRISGFLQEEELQEDATVVIPRGLSNIAIEIKDGVFCWDPFSSRPTLSGIQMKVEKGMRVAVCGTVGSGKSSFISCILGEIPKISGEVRICGTTGYVSQSAWIQSGNIEENILFGSPMEKTKYKNVIQACSLKKDIELFSHGDQTIIGERGINLSGGQKQRVQLARALYQDADIYLLDDPFSALDAHTGSDLFRDYILSALAEKTVVFVTHQVEFLPAADLILVLKEGRIIQSGKYDDLLQAGTDFKALVSAHHEAIEAMDIPSPSSEDSDENPIRDSLVLHNPKSDVFENDIETLAKEVQEGGSASDLKAIKEKKKKAKRSRKKQLVQEEERVKGKVSMKVYLSYMGAAYKGALIPLIILAQAAFQFLQIASNWWMAWANPQTEGDESKVDPTLLLIVYTALAFGSSVFIFVRAALVATFGLAAAQKLFLNMLRSVFRAPMSFFDSTPAGRILNRVSIDQSVVDLDIPFRLGGFASTTIQLCGIVAVMTNVTWQVFLLVVPVAVACFWMQKYYMASSRELVRIVSIQKSPIIHLFGESIAGAATIRGFGQEKRFIKRNLYLLDCFVRPFFCSIAAIEWLCLRMELLSTLVFAFCMVLLVSFPHGTIDPSMAGLAVTYGLNLNGRLSRWILSFCKLENKIISIERIYQYSQIVGEAPAIIEDFRPPSSWPATGTIELVDVKVRYAENLPTVLHGVSCVFPGGKKIGIVGRTGSGKSTLIQALFRLIEPTAGKITIDNIDISQIGLHDLRSRLGIIPQDPTLFEGTIRANLDPLEEHSDDKIWEALDKSQLGDVVRGKDLKLDSPVLENGDNWSVGQRQLVSLGRALLKQAKILVLDEATASVDTATDNLIQKIIRTEFEDCTVCTIAHRIPTVIDSDLVLVLSDGRVAEFDTPARLLEDKSSMFLKLVTEYSSRSTGIPEL

SEQ ID NO: 39532 - protein, 1355 aa, Arabidopsis thaliana
  peptide (1)..(1355): Ceres Seq. ID no. 13504872
  misc_feature (145)..(417): Pfam Name: ABC transporter transmembrane region Pfam Description: ABC transporter transmembrane region
  misc_feature (126)..(1338): Homolog of NCBI NO: 6678848 NR Description: ATP-binding cassette, sub-family C, member 1
  misc_feature (46)..(132): Homolog of NCBI NO: 19569597 NR Description: multidrug resistance-associated protein Mrp2
  misc_feature (749)..(1344): Homolog of NCBI NO: 19569597 NR Description: multidrug resistance-associated protein Mrp2
  misc_feature (136)..(771): Homolog of NCBI NO: 19569597 NR Description: multidrug resistance-associated protein Mrp2
  misc_feature (689)..(1348): Homolog of NCBI NO: 19172038 NR Description: ABC transporter ABCC.8 [Dictyostelium discoideum]
  misc_feature (74)..(772): Homolog of NCBI NO: 19172038 NR Description: ABC transporter ABCC.8 [Dictyostelium discoideum]
  misc_feature (481)..(695): Homolog of NCBI NO: 27368875 NR Description: MRP-like ABC transporter [Oryza sativa (japonica
  misc_feature (760)..(1352): Homolog of NCBI NO: 27368875 NR Description: MRP-like ABC transporter [Oryza sativa (japonica
  misc_feature (1)..(473): Homolog of NCBI NO: 27368875 NR Description: MRP-like ABC transporter [Oryza sativa (japonica
  misc_feature (1)..(1352): Homolog of NCBI NO: 15227133 NR Description: glutathione-conjugate transporter AtMRP4
MYVDGRRLAIEGWSRCSSHVVANLAVTPALGFLCFLAWRGVSGIQVTRSSSDLQEPLLVEEEAACLKVTPYSTAGLVSLITLSWLDPLLSAGSKRPLELKDIPLLAPRDRAKSSYKVLKSNWKRCKSENPSKPPSLARAIMKSFWKEAACNAVFAGLNTLVSYVGPYLISYFVDYLGGKEIFPHEGYVLAGIFFTSKLIETVTTRQWYMGVDILGMHVRSALTAMVYRKGLKLSSIAKQNHTSGEIVNYMAVDVQRIGDYSWYLHDIWMLPMQIVLALAILYKSVGIAAVATLVATIISILVTIPLAKVQEDYQDKLMTAKDERMRKTSECLRNMRVLKLQAWEDRYRVRLEEMREEEYGWLRKALYSQAFVTFIFWSSPIFVAAVTFATSIFLGTQLTAGGVLSALATFRILQEPLRNFPDLVSMMAQTKVSLDRISGFLQEEELQEDATVVIPRGLSNIAIEIKDGVFCWDPFSSRPTLSGIQMKVEKGMRVAVCGTVGSGKSSFISCILGEIPKISGEVRICGTTGYVSQSAWIQSGNIEENILFGSPMEKTKYKNVIQACSLKKDIELFSHGDQTIIGERGINLSGGQKQRVQLARALYQDADIYLLDDPFSALDAHTGSDLFRDYILSALAEKTVVFVTHQVEFLPAADLILVLKEGRIIQSGKYDDLLQAGTDFKALVSAHHEAIEAMDIPSPSSEDSDENPIRDSLVLHNPKSDVFENDIETLAKEVQEGGSASDLKAIKEKKKKAKRSRKKQLVQEEERVKGKVSMKVYLSYMGAAYKGALIPLIILAQAAFQFLQIASNWWMAWANPQTEGDESKVDPTLLLIVYTALAFGSSVFIFVRAALVATFGLAAAQKLFLNMLRSVFRAPMSFFDSTPAGRILNRVSIDQSVVDLDIPFRLGGFASTTIQLCGIVAVMTNVTWQVFLLVVPVAVACFWMQKYYMASSRELVRIVSIQKSPIIHLFGESIAGAATIRGFGQEKRFIKRNLYLLDCFVRPFFCSIAAIEWLCLRMELLSTLVFAFCMVLLVSFPHGTIDPSMAGLAVTYGLNLNGRLSRWILSFCKLENKIISIERIYQYSQIVGEAPAIIEDFRPPSSWPATGTIELVDVKVRYAENLPTVLHGVSCVFPGGKKIGIVGRTGSGKSTLIQALFRLIEPTAGKITIDNIDISQIGLHDLRSRLGIIPQDPTLFEGTIRANLDPLEEHSDDKIWEALDKSQLGDVVRGKDLKLDSPVLENGDNWSVGQRQLVSLGRALLKQAKILVLDEATASVDTATDNLIQKIIRTEFEDCTVCTIAHRIPTVIDSDLVLVLSDGRVAEFDTPARLLEDKSSMFLKLVTEYSSRSTGIPEL

SEQ ID NO: 39533 - protein, 1215 aa, Arabidopsis thaliana
  peptide (1)..(1215): Ceres Seq. ID no. 13504873
  misc_feature (5)..(277): Pfam Name: ABC transporter transmembrane region Pfam Description: ABC transporter transmembrane region
  misc_feature (1)..(1198): Homolog of NCBI NO: 29893528 NR Description: multidrug resistance protein 1A [Macaca
  misc_feature (1)..(1198): Homolog of NCBI NO: 6678848 NR Description: ATP-binding cassette, sub-family C, member 1
  misc_feature (609)..(1204): Homolog of NCBI NO: 19569597 NR Description: multidrug resistance-associated protein Mrp2
  misc_feature (1)..(631): Homolog of NCBI NO: 19569597 NR Description: multidrug resistance-associated protein Mrp2
  misc_feature (549)..(1208): Homolog of NCBI NO: 19172038 NR Description: ABC transporter ABCC.8 [Dictyostelium discoideum]
  misc_feature (1)..(632): Homolog of NCBI NO: 19172038 NR Description: ABC transporter ABCC.8 [Dictyostelium discoideum]
  misc_feature (341)..(555): Homolog of NCBI NO: 27368875 NR Description: MRP-like ABC transporter [Oryza sativa (japonica
  misc_feature (620)..(1212): Homolog of NCBI NO: 27368875 NR Description: MRP-like ABC transporter [Oryza sativa (japonica
  misc_feature (1)..(333): Homolog of NCBI NO: 27368875 NR Description: MRP-like ABC transporter [Oryza sativa (japonica
  misc_feature (1)..(1212): Homolog of NCBI NO: 15227133 NR Description: glutathione-conjugate transporter AtMRP4
MKSFWKEAACNAVFAGLNTLVSYVGPYLISYFVDYLGGKEIFPHEGYVLAGIFFTSKLIETVTTRQWYMGVDILGMHVRSALTAMVYRKGLKLSSIAKQNHTSGEIVNYMAVDVQRIGDYSWYLHDIWMLPMQIVLALAILYKSVGIAAVATLVATIISILVTIPLAKVQEDYQDKLMTAKDERMRKTSECLRNMRVLKLQAWEDRYRVRLEEMREEEYGWLRKALYSQAFVTFIFWSSPIFVAAVTFATSIFLGTQLTAGGVLSALATFRILQEPLRNFPDLVSMMAQTKVSLDRISGFLQEEELQEDATVVIPRGLSNIAIEIKDGVFCWDPFSSRPTLSGIQMKVEKGMRVAVCGTVGSGKSSFISCILGEIPKISGEVRICGTTGYVSQSAWIQSGNIEENILFGSPMEKTKYKNVIQACSLKKDIELFSHGDQTIIGERGINLSGGQKQRVQLARALYQDADIYLLDDPFSALDAHTGSDLFRDYILSALAEKTVVFVTHQVEFLPAADLILVLKEGRIIQSGKYDDLLQAGTDFKALVSAHHEAIEAMDIPSPSSEDSDENPIRDSLVLHNPKSDVFENDIETLAKEVQEGGSASDLKAIKEKKKKAKRSRKKQLVQEEERVKGKVSMKVYLSYMGAAYKGALIPLIILAQAAFQFLQIASNWWMAWANPQTEGDESKVDPTLLLIVYTALAFGSSVFIFVRAALVATFGLAAAQKLFLNMLRSVFRAPMSFFDSTPAGRILNRVSIDQSVVDLDIPFRLGGFASTTIQLCGIVAVMTNVTWQVFLLVVPVAVACFWMQKYYMASSRELVRIVSIQKSPIIHLFGESIAGAATIRGFGQEKRFIKRNLYLLDCFVRPFFCSIAAIEWLCLRMELLSTLVFAFCMVLLVSFPHGTIDPSMAGLAVTYGLNLNGRLSRWILSFCKLENKIISIERIYQYSQIVGEAPAIIEDFRPPSSWPATGTIELVDVKVRYAENLPTVLHGVSCVFPGGKKIGIVGRTGSGKSTLIQALFRLIEPTAGKITIDNIDISQIGLHDLRSRLGIIPQDPTLFEGTIRANLDPLEEHSDDKIWEALDKSQLGDVVRGKDLKLDSPVLENGDNWSVGQRQLVSLGRALLKQAKILVLDEATASVDTATDNLIQKIIRTEFEDCTVCTIAHRIPTVIDSDLVLVLSDGRVAEFDTPARLLEDKSSMFLKLVTEYSSRSTGIPEL

SEQ ID NO: 39534 - DNA, 1562 bp, Arabidopsis thaliana; identical to SEQ ID NO: 29964
  misc_feature (1)..(1562): Ceres Seq. ID no. 12439764
  misc_feature: MA Experiment ID: 20000224 Result: Down-regulated in Transcription

SEQ ID NO: 39535 - protein, 423 aa, Arabidopsis thaliana; identical to SEQ ID NO: 29965
  peptide (1)..(423): Ceres Seq. ID no. 12439765
  misc_feature (204)..(349): Pfam Name: HhH-GPD superfamily base excision DNA repair protein Pfam Description: HhH-GPD superfamily base excision DNA repair
  misc_feature (204)..(349): Pfam Name: HhH-GPD superfamily base excision DNA repair protein Pfam Description: HhH-GPD superfamily base excision DNA repair
  misc_feature (167)..(360): Homolog of NCBI NO: 22971879 NR Description: hypothetical protein [Chloroflexus aurantiacus]
  misc_feature (167)..(363): Homolog of NCBI NO: 37521587 NR Description: probable DNA-3-methyladenine glycosylase
  misc_feature (160)..(361): Homolog of NCBI NO: 23116389 NR Description: hypothetical protein [Desulfitobacterium
  misc_feature (138)..(367): Homolog of NCBI NO: 15230333 NR Description: putative DNA-3-methyladenine glycosidase; protein
  misc_feature (87)..(418): Homolog of NCBI NO: 5091600 NR Description: This gene is a member of PF|01332 Alkylbase DNA
  misc_feature (167)..(360): Homolog of NCBI NO: 22971879 NR Description: hypothetical protein [Chloroflexus aurantiacus]
  misc_feature (160)..(361): Homolog of NCBI NO: 23116389 NR Description: hypothetical protein [Desulfitobacterium
  misc_feature (87)..(418): Homolog of NCBI NO: 5091600 NR Description: This gene is a member of PF|01332 Alkylbase DNA
  misc_feature (33)..(423): Homolog of NCBI NO: 18410802 NR Description: 3-methyladenine DNA glycosylase, putative
  misc_feature (33)..(418): Homolog of NCBI NO: 25406423 NR Description: hypothetical protein F22H5.5 [imported] -
  misc_feature (33)..(423): Homolog of NCBI NO: 18394744 NR Description: Expressed protein
  misc_feature (33)..(423): Homolog of NCBI NO: 21593178 NR Description: unknown [Arabidopsis thaliana]
  misc_feature (33)..(423): Homolog of NCBI NO: 25402893 NR Description: protein F18O14.25 [imported] - Arabidopsis
  misc_feature (138)..(367): Homolog of NCBI NO: 15230333 NR Description: putative DNA-3-methyladenine glycosidase; protein
  misc_feature (167)..(363): Homolog of NCBI NO: 37521587 NR Description: probable DNA-3-methyladenine glycosylase
  misc_feature (33)..(423): Homolog of NCBI NO: 25402893 NR Description: protein F18O14.25 [imported] - Arabidopsis
  misc_feature (33)..(423): Homolog of NCBI NO: 21593178 NR Description: unknown [Arabidopsis thaliana]
  misc_feature (33)..(423): Homolog of NCBI NO: 18394744 NR Description: Expressed protein
  misc_feature (33)..(418): Homolog of NCBI NO: 25406423 NR Description: hypothetical protein F22H5.5 [imported] -
  misc_feature (33)..(423): Homolog of NCBI NO: 18410802 NR Description: 3-methyladenine DNA glycosylase, putative

SEQ ID NO: 39536 - protein, 391 aa, Arabidopsis thaliana; identical to SEQ ID NO: 29966
  peptide (1)..(391): Ceres Seq. ID no. 12439766
  misc_feature (172)..(317): Pfam Name: HhH-GPD superfamily base excision DNA repair protein Pfam Description: HhH-GPD superfamily base excision DNA repair
  misc_feature (172)..(317): Pfam Name: HhH-GPD superfamily base excision DNA repair protein Pfam Description: HhH-GPD superfamily base excision DNA repair
  misc_feature (135)..(328): Homolog of NCBI NO: 22971879 NR Description: hypothetical protein [Chloroflexus aurantiacus]
  misc_feature (135)..(331): Homolog of NCBI NO: 37521587 NR Description: probable DNA-3-methyladenine glycosylase
  misc_feature (128)..(329): Homolog of NCBI NO: 23116389 NR Description: hypothetical protein [Desulfitobacterium
  misc_feature (106)..(335): Homolog of NCBI NO: 15230333 NR Description: putative DNA-3-methyladenine glycosidase; protein
  misc_feature (55)..(386): Homolog of NCBI NO: 5091600 NR Description: This gene is a member of PF|01332 Alkylbase DNA
  misc_feature (135)..(328): Homolog of NCBI NO: 22971879 NR Description: hypothetical protein [Chloroflexus aurantiacus]
  misc_feature (128)..(329): Homolog of NCBI NO: 23116389 NR Description: hypothetical protein [Desulfitobacterium
  misc_feature (55)..(386): Homolog of NCBI NO: 5091600 NR Description: This gene is a member of PF|01332 Alkylbase DNA
  misc_feature (1)..(391): Homolog of NCBI NO: 18410802 NR Description: 3-methyladenine DNA glycosylase, putative
  misc_feature (1)..(386): Homolog of NCBI NO: 25406423 NR Description: hypothetical protein F22H5.5 [imported] -
  misc_feature (1)..(391): Homolog of NCBI NO: 18394744 NR Description: Expressed protein
  misc_feature (1)..(391): Homolog of NCBI NO: 21593178 NR Description: unknown [Arabidopsis thaliana]
  misc_feature (1)..(391): Homolog of NCBI NO: 25402893 NR Description: protein F18O14.25 [imported] - Arabidopsis
  misc_feature (106)..(335): Homolog of NCBI NO: 15230333 NR Description: putative DNA-3-methyladenine glycosidase; protein
  misc_feature (135)..(331): Homolog of NCBI NO: 37521587 NR Description: probable DNA-3-methyladenine glycosylase
  misc_feature (1)..(391): Homolog of NCBI NO: 25402893 NR Description: protein F18O14.25 [imported] - Arabidopsis
  misc_feature (1)..(391): Homolog of NCBI NO: 21593178 NR Description: unknown [Arabidopsis thaliana]
  misc_feature (1)..(391): Homolog of NCBI NO: 18394744 NR Description: Expressed protein
  misc_feature (1)..(386): Homolog of NCBI NO: 25406423 NR Description: hypothetical protein F22H5.5 [imported] -
  misc_feature (1)..(391): Homolog of NCBI NO: 18410802 NR Description: 3-methyladenine DNA glycosylase, putative

SEQ ID NO: 39537 - protein, 290 aa, Arabidopsis thaliana; identical to SEQ ID NO: 29967
  peptide (1)..(290): Ceres Seq. ID no. 12439767
  misc_feature (71)..(216): Pfam Name: HhH-GPD superfamily base excision DNA repair protein Pfam Description: HhH-GPD superfamily base excision DNA repair
  misc_feature (71)..(216): Pfam Name: HhH-GPD superfamily base excision DNA repair protein Pfam Description: HhH-GPD superfamily base excision DNA repair
  misc_feature (34)..(227): Homolog of NCBI NO: 22971879 NR Description: hypothetical protein [Chloroflexus aurantiacus]
  misc_feature (34)..(230): Homolog of NCBI NO: 37521587 NR Description: probable DNA-3-methyladenine glycosylase
  misc_feature (27)..(228): Homolog of NCBI NO: 23116389 NR Description: hypothetical protein [Desulfitobacterium
  misc_feature (5)..(234): Homolog of NCBI NO: 15230333 NR Description: putative DNA-3-methyladenine glycosidase; protein
  misc_feature (1)..(285): Homolog of NCBI NO: 5091600 NR Description: This gene is a member of PF|01332 Alkylbase DNA
  misc_feature (34)..(227): Homolog of NCBI NO: 22971879 NR Description: hypothetical protein [Chloroflexus aurantiacus]
  misc_feature (27)..(228): Homolog of NCBI NO: 23116389 NR Description: hypothetical protein [Desulfitobacterium
  misc_feature (1)..(285): Homolog of NCBI NO: 5091600 NR Description: This gene is a member of PF|01332 Alkylbase DNA
  misc_feature (1)..(290): Homolog of NCBI NO: 18410802 NR Description: 3-methyladenine DNA glycosylase, putative
  misc_feature (1)..(285): Homolog of NCBI NO: 25406423 NR Description: hypothetical protein F22H5.5 [imported] -
  misc_feature (1)..(290): Homolog of NCBI NO: 18394744 NR Description: Expressed protein
  misc_feature (1)..(290): Homolog of NCBI NO: 21593178 NR Description: unknown [Arabidopsis thaliana]
  misc_feature (1)..(290): Homolog of NCBI NO: 25402893 NR Description: protein F18O14.25 [imported] - Arabidopsis
  misc_feature (5)..(234): Homolog of NCBI NO: 15230333 NR Description: putative DNA-3-methyladenine glycosidase; protein
  misc_feature (34)..(230): Homolog of NCBI NO: 37521587 NR Description: probable DNA-3-methyladenine glycosylase
  misc_feature (1)..(290): Homolog of NCBI NO: 25402893 NR Description: protein F18O14.25 [imported] - Arabidopsis
  misc_feature (1)..(290): Homolog of NCBI NO: 21593178 NR Description: unknown [Arabidopsis thaliana]
  misc_feature (1)..(290): Homolog of NCBI NO: 18394744 NR Description: Expressed protein
  misc_feature (1)..(285): Homolog of NCBI NO: 25406423 NR Description: hypothetical protein F22H5.5 [imported] -
  misc_feature (1)..(290): Homolog of NCBI NO: 18410802 NR Description: 3-methyladenine DNA glycosylase, putative

SEQ ID NO: 39538 - DNA, 742 bp, Arabidopsis thaliana
  misc_feature (1)..(742): Ceres Seq. ID no. 12422434
  misc_feature: MA Experiment ID: 108434 Result: Down-regulated in Transcription
  misc_feature: MA Experiment 108434 PARAMETER Experiment Name: At_Root_Tips_cDNA_P Parameter: Tissue Value: Root Tips
  misc_feature: MA Experiment ID: 108594 Result: Down-regulated in Transcription
  misc_feature: MA Experiment 108594 PARAMETER Experiment Name: At_Ler-rhl_Root_cDNA_P Parameter: Plant Line Value: null
  misc_feature: MA Experiment ID: 20000171 Result: Up-regulated in Transcription
  misc_feature: MA Experiment 20000171 PARAMETER Experiment Name: At_42deg_Heat_P Parameter: Age (day) Value: 14
  misc_feature: MA Experiment 20000171 PARAMETER Experiment Name: At_42deg_Heat_P Parameter: Organism Value: A. thaliana
  misc_feature: MA Experiment 20000171 PARAMETER Experiment Name: At_42deg_Heat_P Parameter: Plant Line Value: WS
  misc_feature: MA Experiment 20000171 PARAMETER Experiment Name: At_42deg_Heat_P Parameter: Temperature (deg C) Value: 42 vs. 22
  misc_feature: MA Experiment 20000171 PARAMETER Experiment Name: At_42deg_Heat_P Parameter: Timepoint (hr) Value: 1
  misc_feature: MA Experiment 20000171 PARAMETER Experiment Name: At_42deg_Heat_P Parameter: Tissue Value: Aerial
  misc_feature: MA Experiment ID: 20000180 Result: Up-regulated in Transcription
  misc_feature: MA Experiment 20000180 PARAMETER Experiment Name: At_Germinating_Seeds_P Parameter: Age (hr) Value: 24 vs. 0
  misc_feature: MA Experiment 20000180 PARAMETER Experiment Name: At_Germinating_Seeds_P Parameter: Tissue Value: Germinating Seeds
  misc_feature: MA Experiment ID: 20000495 Result: Up-regulated in Transcription
  misc_feature: MA Experiment 20000495 PARAMETER Experiment Name: At_Guard_Cells_P Parameter: Harvest Date Value: 8/2/2002
  misc_feature: MA Experiment 20000495 PARAMETER Experiment Name: At_Guard_Cells_P Parameter: Organism Value: A. thaliana
  misc_feature: MA Experiment 20000495 PARAMETER Experiment Name: At_Guard_Cells_P Parameter: Tissue Value: Guard Cells vs. Leaves
  misc_feature: MA Experiment ID: 20001558 Result: Down-regulated in Transcription
  misc_feature: MA Experiment 20001558 PARAMETER Experiment Name: At_Drought_Soil_Dry_P Parameter: Age (day) Value: 27
  misc_feature: MA Experiment 20001558 PARAMETER Experiment Name: At_Drought_Soil_Dry_P Parameter: Organism Value: A. thaliana
  misc_feature: MA Experiment 20001558 PARAMETER Experiment Name: At_Drought_Soil_Dry_P Parameter: Plant Line Value: WS
  misc_feature: MA Experiment 20001558 PARAMETER Experiment Name: At_Drought_Soil_Dry_P Parameter: Post Timepoint (hr) Value: 6
  misc_feature: MA Experiment 20001558 PARAMETER Experiment Name: At_Drought_Soil_Dry_P Parameter: Post-Treatment Value: Re-Water vs. No Drought
  misc_feature: MA Experiment 20001558 PARAMETER Experiment Name: At_Drought_Soil_Dry_P Parameter: Timepoint (day) Value: 13
  misc_feature: MA Experiment 20001558 PARAMETER Experiment Name: At_Drought_Soil_Dry_P Parameter: Treatment Value: Drought vs. No Drought
  misc_feature: MA Experiment ID: 20001906 Result: Down-regulated in Transcription
  misc_feature: MA Experiment 20001906 PARAMETER Experiment Name: At_Drought_Reproduction_P Parameter: Age (day) Value: 35
  misc_feature: MA Experiment 20001906 PARAMETER Experiment Name: At_Drought_Reproduction_P Parameter: Organism Value: A. thaliana
  misc_feature: MA Experiment 20001906 PARAMETER Experiment Name: At_Drought_Reproduction_P Parameter: Plant Line Value: WS
  misc_feature: MA Experiment 20001906 PARAMETER Experiment Name: At_Drought_Reproduction_P Parameter: Timepoint (day) Value: 5
  misc_feature: MA Experiment 20001906 PARAMETER Experiment Name: At_Drought_Reproduction_P Parameter: Tissue Value: Siliques
  misc_feature: MA Experiment 20001906 PARAMETER Experiment Name: At_Drought_Reproduction_P Parameter: Treatment Value: Drought vs. No Drought
  misc_feature: MA Experiment ID: 20001908 Result: Down-regulated in Transcription
  misc_feature: MA Experiment 20001908 PARAMETER Experiment Name: At_Drought_Reproduction_P Parameter: Age (day) Value: 40
  misc_feature: MA Experiment 20001908 PARAMETER Experiment Name: At_Drought_Reproduction_P Parameter: Organism Value: A. thaliana
  misc_feature: MA Experiment 20001908 PARAMETER Experiment Name: At_Drought_Reproduction_P Parameter: Plant Line Value: WS
  misc_feature: MA Experiment 20001908 PARAMETER Experiment Name: At_Drought_Reproduction_P Parameter: Timepoint (day) Value: 10
  misc_feature: MA Experiment 20001908 PARAMETER Experiment Name: At_Drought_Reproduction_P Parameter: Tissue Value: Siliques
  misc_feature: MA Experiment 20001908 PARAMETER Experiment Name: At_Drought_Reproduction_P Parameter: Treatment Value: Drought vs. No Drought
atcttgtgatcatcccaagacaaaaccagagaaaaagacctttctgtttttttaagaagtctttatatttttttttttgtcggagaatcttataagcatggcttcaggaggatcaaagtcggcagctttcatgcttctgatgctgaatcttggtctctatttcgtcatcaccatcatcgcttcttgggctgttaatcacggcatagagagaactcgcgagtctgcgtcgacactgtcacttccggcgaagatattcccgatatacttcccggtggggaacatggcgaccggttttttcgtaatattcacgttaatcgccggcgtcgtcggaatggccacatcactcaccggaatcatcaacgttcttcaatgggactctccgaatctccactccgccgcggcttcctctctaatctcctggtctctcactctcctcgccatgggattggcctgcaaggagatcaacataggctggaccgaagccaatctaagaactcttgaagttctgactataattgtgagtgctactcagttgttgtgcaccggagctattcatgctggagtcggagaaacagtcgcctccggagaaaggcctcatcttgggagagtttgagtttcatgattcttcttaaaagcggttttacatttgcttcagatcgtgtaatttgtgtgttgtgtcttgtgtgtgtttattcttttgttttgtttgattattatgatcatgtaaaatgattagtttatg

SEQ ID NO: 39539 - protein, 171 aa, Arabidopsis thaliana
  peptide (1)..(171): Ceres Seq. ID no. 12422435
  misc_feature (15)..(156): Pfam Name: AWPM-19-like family Pfam Description: AWPM-19-like family
  misc_feature (60)..(156): Homolog of NCBI NO: 7489659 NR Description: ABA-induced plasma membrane protein PM 19 - wheat
  misc_feature (60)..(155): Homolog of NCBI NO: 18390408 NR Description: expressed protein
  misc_feature (60)..(156): Homolog of NCBI NO: 6851373 NR Description: plasma membrane associated protein [Hordeum
  misc_feature (1)..(156): Homolog of NCBI NO: 7488688 NR Description: maturation protein PM3 - soybean
  misc_feature (1)..(156): Homolog of NCBI NO: 4097340 NR Description: hydrophobic LEA-like protein [Oryza sativa]
  misc_feature (47)..(156): Homolog of NCBI NO: 15237455 NR Description: putative protein; protein id: At5g46530.1
  misc_feature (7)..(131): Homolog of NCBI NO: 34904644 NR Description: putative ABA-induced plasma membrane protein
  misc_feature (1)..(156): Homolog of NCBI NO: 15218953 NR Description: plasma membrane associated protein, putative
  misc_feature (1)..(155): Homolog of NCBI NO: 34911480 NR Description: putative plasma membrane associated protein
  misc_feature (1)..(171): Homolog of NCBI NO: 15239619 NR Description: plasma membrane associated protein -like
MASGGSKSAAFMLLMLNLGLYFVITIIASWAVNHGIERTRESASTLSLPAKIFPIYFPVGNMATGFFVIFTLIAGVVGMATSLTGIINVLQWDSPNLHSAAASSLISWSLTLLAMGLACKEINIGWTEANLRTLEVLTIIVSATQLLCTGAIHAGVGETVASGERPHLGRV

SEQ ID NO: 39540 - protein, 160 aa, Arabidopsis thaliana
  peptide (1)..(160): Ceres Seq. ID no. 12422436
  misc_feature (4)..(145): Pfam Name: AWPM-19-like family Pfam Description: AWPM-19-like family
  misc_feature (49)..(145): Homolog of NCBI NO: 7489659 NR Description: ABA-induced plasma membrane protein PM 19 - wheat
  misc_feature (49)..(144): Homolog of NCBI NO: 18390408 NR Description: expressed protein
  misc_feature (49)..(145): Homolog of NCBI NO: 6851373 NR Description: plasma membrane associated protein [Hordeum
  misc_feature (1)..(145): Homolog of NCBI NO: 7488688 NR Description: maturation protein PM3 - soybean
  misc_feature (1)..(145): Homolog of NCBI NO: 4097340 NR Description: hydrophobic LEA-like protein [Oryza sativa]
  misc_feature (36)..(145): Homolog of NCBI NO: 15237455 NR Description: putative protein; protein id: At5g46530.1
  misc_feature (1)..(120): Homolog of NCBI NO: 34904644 NR Description: putative ABA-induced plasma membrane protein
  misc_feature (1)..(145): Homolog of NCBI NO: 15218953 NR Description: plasma membrane associated protein, putative
  misc_feature (1)..(144): Homolog of NCBI NO: 34911480 NR Description: putative plasma membrane associated protein
  misc_feature (1)..(160): Homolog of NCBI NO: 15239619 NR Description: plasma membrane associated protein -like
MLLMLNLGLYFVITIIASWAVNHGIERTRESASTLSLPAKIFPIYFPVGNMATGFFVIFTLIAGVVGMATSLTGIINVLQWDSPNLHSAAASSLISWSLTLLAMGLACKEINIGWTEANLRTLEVLTIIVSATQLLCTGAIHAGVGETVASGERPHLGRV

SEQ ID NO: 39541 - protein, 157 aa, Arabidopsis thaliana
  peptide (1)..(157): Ceres Seq. ID no. 12422437
  misc_feature (1)..(142): Pfam Name: AWPM-19-like family Pfam Description: AWPM-19-like family
  misc_feature (46)..(142): Homolog of NCBI NO: 7489659 NR Description: ABA-induced plasma membrane protein PM 19 - wheat
  misc_feature (46)..(141): Homolog of NCBI NO: 18390408 NR Description: expressed protein
  misc_feature (46)..(142): Homolog of NCBI NO: 6851373 NR Description: plasma membrane associated protein [Hordeum
  misc_feature (1)..(142): Homolog of NCBI NO: 7488688 NR Description: maturation protein PM3 - soybean
  misc_feature (1)..(142): Homolog of NCBI NO: 4097340 NR Description: hydrophobic LEA-like protein [Oryza sativa]
  misc_feature (33)..(142): Homolog of NCBI NO: 15237455 NR Description: putative protein; protein id: At5g46530.1
  misc_feature (1)..(117): Homolog of NCBI NO: 34904644 NR Description: putative ABA-induced plasma membrane protein
  misc_feature (1)..(142): Homolog of NCBI NO: 15218953 NR Description: plasma membrane associated protein, putative
  misc_feature (1)..(141): Homolog of NCBI NO: 34911480 NR Description: putative plasma membrane associated protein
  misc_feature (1)..(157): Homolog of NCBI NO: 15239619 NR Description: plasma membrane associated protein -like
MLNLGLYFVITIIASWAVNHGIERTRESASTLSLPAKIFPIYFPVGNMATGFFVIFTLIAGVVGMATSLTGIINVLQWDSPNLHSAAASSLISWSLTLLAMGLACKEINIGWTEANLRTLEVLTIIVSATQLLCTGAIHAGVGETVASGERPHLGRV

SEQ ID NO: 39542 - DNA, 1420 bp, Arabidopsis thaliana
  misc_feature (1)..(1420): Ceres Seq. ID no. 13488837
  misc_feature: MA Experiment ID: 108488 Result: Down-regulated in Transcription
  misc_feature: MA Experiment ID: 20000144 Result: Up-regulated in Transcription
  misc_feature: MA Experiment 20000144 PARAMETER Experiment Name: At_42deg_Heat_cDNA_P Parameter: Temperature (deg C) Value: 42 vs. 22
  misc_feature: MA Experiment 20000144 PARAMETER Experiment Name: At_42deg_Heat_cDNA_P Parameter: Timepoint (hr) Value: 1
  misc_feature: MA Experiment 20000144 PARAMETER Experiment Name: At_42deg_Heat_cDNA_P Parameter: Tissue Value: Aerial
  misc_feature: MA Experiment ID: 20001905 Result: Up-regulated in Transcription
  misc_feature: MA Experiment 20001905 PARAMETER Experiment Name: At_Drought_Reproduction_P Parameter: Age (day) Value: 40
  misc_feature: MA Experiment 20001905 PARAMETER Experiment Name: At_Drought_Reproduction_P Parameter: Organism Value: A. thaliana
  misc_feature: MA Experiment 20001905 PARAMETER Experiment Name: At_Drought_Reproduction_P Parameter: Plant Line Value: WS
  misc_feature: MA Experiment 20001905 PARAMETER Experiment Name: At_Drought_Reproduction_P Parameter: Timepoint (day) Value: 10
  misc_feature: MA Experiment 20001905 PARAMETER Experiment Name: At_Drought_Reproduction_P Parameter: Tissue Value: Rosettes
  misc_feature: MA Experiment 20001905 PARAMETER Experiment Name: At_Drought_Reproduction_P Parameter: Treatment Value: Drought vs. No Drought
gccaacaatgaaagcgatccagttgctgtgggaagcgataatggaggcgacgaagagagaaagacggagagaagatgacgacggcgaaaaagcttcaccggaatcactcgttcttccaccagagatcattacagaaattcttctccgattaccagccaaatcgatcgggcgattcaggtgcgtatcaaagctcttttgcactttatcgtcagatccagggttcgcgaagattcacctcgatctgatccttcgaaacgaatccgtaagatcgctccaccgtaagctcattgtgtcttcacataatctgtactcgttagatttcaattcgatcggtgacggaattagggatttagcggctgtggaacacaattatcctcttaaagacgatccaagcattttctctgagatgattaggaattacgtgggggaccatctgtacgatgatcgtcgcgtgatgcttaagctgaatgcgaaatcgtatcgaagaaactgggttgagatcgttggatcttccaatggtttagtgtgtatctctcctggtgaaggagctgttttcttgtataatccaactaccggagattccaagagattacctgaaaattttcgtcccaaatctgtagaatacgaaagagataatttccaaacttatggatttggtttcgatggtctcactgatgattacaaattggtgaagcttgttgctaccagtgaagatattctcgatgctagtgtctattccttgaaggctgactcatggagacggatctgcaatttgaattatgagcacaacgatggctcctacacgtccggtgtgcatttcaacggtgcgattcactgggtgttcacagagagtaggcacaaccaaagagtggttgtagcatttgatattcaaaccgaggagtttcgagagatgccagtgcctgatgaagctgaagattgttcccataggtttagcaactttgtggtcggaagtctcaatggacgtctctgtgtggtcaatagttgctacgatgtgcatgatgatatatgggtgatgagtgagtacggtgaagctaaatcctggagcagaattcgaatcaacttgttgtataggtcgatgaaaccgctctgttcgactaagaacgatgaagaggttcttctggagcttgatggagacctggtgttgtacaactttgaaaccaatgcatcgagtaatctaggaatttgtggggttaagctcagtgacgggttcgaggcaaatacatacgtagagagcctcatatcacccaactcttatggtatagagagctgaggaagtctgctttttgctaagatataataaaccaacattcggattagaaatgttttagaaacataatcatgtaatatgtatcatgtaattaacaacgaatggtcaatgggtattttaagtttctttctc

SEQ ID NO: 39543 - protein, 429 aa, Arabidopsis thaliana
  peptide (1)..(429): Ceres Seq. ID no. 13488838
  misc_feature (41)..(100): Homolog of NCBI NO: 29420803 NR Description: F-box [Prunus mume]
  misc_feature (167)..(424): Homolog of NCBI NO: 29420803 NR Description: F-box [Prunus mume]
  misc_feature (164)..(420): Homolog of NCBI NO: 15235636 NR Description: F-box protein-related [Arabidopsis thaliana]
  misc_feature (41)..(100): Homolog of NCBI NO: 33354147 NR Description: S-locus F-Box protein 6 [Prunus avium]
  misc_feature (128)..(425): Homolog of NCBI NO: 33354147 NR Description: S-locus F-Box protein 6 [Prunus avium]
  misc_feature (45)..(421): Homolog of NCBI NO: 29420813 NR Description: F-box [Prunus mume]
  misc_feature (29)..(110): Homolog of NCBI NO: 15229536 NR Description: F-box protein family [Arabidopsis thaliana]
  misc_feature (162)..(423): Homolog of NCBI NO: 15229536 NR Description: F-box protein family [Arabidopsis thaliana]
  misc_feature (14)..(429): Homolog of NCBI NO: 6862928 NR Description: hypothetical protein [Arabidopsis thaliana]
  misc_feature (3)..(429): Homolog of NCBI NO: 30679777 NR Description: F-box protein family [Arabidopsis thaliana]
PTMKAIQLLWEAIMEATKRERRREDDDGEKASPESLVLPPEIITEILLRLPAKSIGRFRCVSKLFCTLSSDPGFAKIHLDLILRNESVRSLHRKLIVSSHNLYSLDFNSIGDGIRDLAAVEHNYPLKDDPSIFSEMIRNYVGDHLYDDRRVMLKLNAKSYRRNWVEIVGSSNGLVCISPGEGAVFLYNPTTGDSKRLPENFRPKSVEYERDNFQTYGFGFDGLTDDYKLVKLVATSEDILDASVYSLKADSWRRICNLNYEHNDGSYTSGVHFNGAIHWVFTESRHNQRVVVAFDIQTEEFREMPVPDEAEDCSHRFSNFVVGSLNGRLCVVNSCYDVHDDIWVMSEYGEAKSWSRIRINLLYRSMKPLCSTKNDEEVLLELDGDLVLYNFETNASSNLGICGVKLSDGFEANTYVESLISPNSYGIES

SEQ ID NO: 39544 - protein, 427 aa, Arabidopsis thaliana
  peptide (1)..(427): Ceres Seq. ID no. 13488839
  misc_feature (39)..(98): Homolog of NCBI NO: 29420803 NR Description: F-box [Prunus mume]
  misc_feature (165)..(422): Homolog of NCBI NO: 29420803 NR Description: F-box [Prunus mume]
  misc_feature (162)..(418): Homolog of NCBI NO: 15235636 NR Description: F-box protein-related [Arabidopsis thaliana]
  misc_feature (39)..(98): Homolog of NCBI NO: 33354147 NR Description: S-locus F-Box protein 6 [Prunus avium]
  misc_feature (126)..(423): Homolog of NCBI NO: 33354147 NR Description: S-locus F-Box protein 6 [Prunus avium]
  misc_feature (43)..(419): Homolog of NCBI NO: 29420813 NR Description: F-box [Prunus mume]
  misc_feature (27)..(108): Homolog of NCBI NO: 15229536 NR Description: F-box protein family [Arabidopsis thaliana]
  misc_feature (160)..(421): Homolog of NCBI NO: 15229536 NR Description: F-box protein family [Arabidopsis thaliana]
  misc_feature (12)..(427): Homolog of NCBI NO: 6862928 NR Description: hypothetical protein [Arabidopsis thaliana]
  misc_feature (1)..(427): Homolog of NCBI NO: 30679777 NR Description: F-box protein family [Arabidopsis thaliana]
MKAIQLLWEAIMEATKRERRREDDDGEKASPESLVLPPEIITEILLRLPAKSIGRFRCVSKLFCTLSSDPGFAKIHLDLILRNESVRSLHRKLIVSSHNLYSLDFNSIGDGIRDLAAVEHNYPLKDDPSIFSEMIRNYVGDHLYDDRRVMLKLNAKSYRRNWVEIVGSSNGLVCISPGEGAVFLYNPTTGDSKRLPENFRPKSVEYERDNFQTYGFGFDGLTDDYKLVKLVATSEDILDASVYSLKADSWRRICNLNYEHNDGSYTSGVHFNGAIHWVFTESRHNQRVVVAFDIQTEEFREMPVPDEAEDCSHRFSNFVVGSLNGRLCVVNSCYDVHDDIWVMSEYGEAKSWSRIRINLLYRSMKPLCSTKNDEEVLLELDGDLVLYNFETNASSNLGICGVKLSDGFEANTYVESLISPNSYGIES

SEQ ID NO: 39545 - protein, 416 aa, Arabidopsis thaliana
  peptide (1)..(416): Ceres Seq. ID no. 13488840
  misc_feature (28)..(87): Homolog of NCBI NO: 29420803 NR Description: F-box [Prunus mume]
  misc_feature (154)..(411): Homolog of NCBI NO: 29420803 NR Description: F-box [Prunus mume]
  misc_feature (151)..(407): Homolog of NCBI NO: 15235636 NR Description: F-box protein-related [Arabidopsis thaliana]
  misc_feature (28)..(87): Homolog of NCBI NO: 33354147 NR Description: S-locus F-Box protein 6 [Prunus avium]
  misc_feature (115)..(412): Homolog of NCBI NO: 33354147 NR Description: S-locus F-Box protein 6 [Prunus avium]
  misc_feature (32)..(408): Homolog of NCBI NO: 29420813 NR Description: F-box [Prunus mume]
  misc_feature (16)..(97): Homolog of NCBI NO: 15229536 NR Description: F-box protein family [Arabidopsis thaliana]
  misc_feature (149)..(410): Homolog of NCBI NO: 15229536 NR Description: F-box protein family [Arabidopsis thaliana]
  misc_feature (1)..(416): Homolog of NCBI NO: 6862928 NR Description: hypothetical protein [Arabidopsis thaliana]
  misc_feature (1)..(416): Homolog of NCBI NO: 30679777 NR Description: F-box protein family [Arabidopsis thaliana]
MEATKRERRREDDDGEKASPESLVLPPEIITEILLRLPAKSIGRFRCVSKLFCTLSSDPGFAKIHLDLILRNESVRSLHRKLIVSSHNLYSLDFNSIGDGIRDLAAVEHNYPLKDDPSIFSEMIRNYVGDHLYDDRRVMLKLNAKSYRRNWVEIVGSSNGLVCISPGEGAVFLYNPTTGDSKRLPENFRPKSVEYERDNFQTYGFGFDGLTDDYKLVKLVATSEDILDASVYSLKADSWRRICNLNYEHNDGSYTSGVHFNGAIHWVFTESRHNQRVVVAFDIQTEEFREMPVPDEAEDCSHRFSNFVVGSLNGRLCVVNSCYDVHDDIWVMSEYGEAKSWSRIRINLLYRSMKPLCSTKNDEEVLLELDGDLVLYNFETNASSNLGICGVKLSDGFEANTYVESLISPNSYGIES

SEQ ID NO: 39546 - DNA, 1257 bp, Arabidopsis thaliana
  misc_feature (1)..(1257): Ceres Seq. ID no. 12395322
  misc_feature: MA Experiment ID: 108434 Result: Down-regulated in Transcription
  misc_feature: MA Experiment 108434 PARAMETER Experiment Name: At_Root_Tips_cDNA_P Parameter: Tissue Value: Root Tips
  misc_feature: MA Experiment ID: 108462 Result: Up-regulated in Transcription
  misc_feature: MA Experiment 108462 PARAMETER Experiment Name: At_Germinating_Seeds_cDNA_P Parameter: Age (day) Value: 2 vs. 0
  misc_feature: MA Experiment 108462 PARAMETER Experiment Name: At_Germinating_Seeds_cDNA_P Parameter: Tissue Value: Germinating Seeds
  misc_feature: MA Experiment ID: 108463 Result: Up-regulated in Transcription
  misc_feature: MA Experiment 108463 PARAMETER Experiment Name: At_Germinating_Seeds_cDNA_P Parameter: Age (day) Value: 3 vs. 0
  misc_feature: MA Experiment 108463 PARAMETER Experiment Name: At_Germinating_Seeds_cDNA_P Parameter: Tissue Value: Germinating Seeds
  misc_feature: MA Experiment ID: 108464 Result: Up-regulated in Transcription
  misc_feature: MA Experiment 108464 PARAMETER Experiment Name: At_Germinating_Seeds_cDNA_P Parameter: Age (day) Value: 4 vs. 0
  misc_feature: MA Experiment 108464 PARAMETER Experiment Name: At_Germinating_Seeds_cDNA_P Parameter: Tissue Value: Germinating Seeds
  misc_feature: MA Experiment ID: 108488 Result: Down-regulated in Transcription
  misc_feature: MA Experiment ID: 20000173 Result: Down-regulated in Transcription
  misc_feature: MA Experiment 20000173 PARAMETER Experiment Name: At_42deg_Heat_P Parameter: Age (day) Value: 14
  misc_feature: MA Experiment 20000173 PARAMETER Experiment Name: At_42deg_Heat_P Parameter: Organism Value: A. thaliana
  misc_feature: MA Experiment 20000173 PARAMETER Experiment Name: At_42deg_Heat_P Parameter: Plant Line Value: WS
  misc_feature: MA Experiment 20000173 PARAMETER Experiment Name: At_42deg_Heat_P Parameter: Temperature (deg C) Value: 42 vs. 22
  misc_feature: MA Experiment 20000173 PARAMETER Experiment Name: At_42deg_Heat_P Parameter: Timepoint (hr) Value: 6
  misc_feature: MA Experiment 20000173 PARAMETER Experiment Name: At_42deg_Heat_P Parameter: Tissue Value: Aerial
  misc_feature: MA Experiment ID: 20000264 Result: Up-regulated in Transcription
  misc_feature: MA Experiment 20000264 PARAMETER Experiment Name: At_Open_Flower_P Parameter: Age (day) Value: 21
  misc_feature: MA Experiment 20000264 PARAMETER Experiment Name: At_Open_Flower_P Parameter: Plant Line Value: WS
  misc_feature: MA Experiment 20000264 PARAMETER Experiment Name: At_Open_Flower_P Parameter: Tissue Value: Open Flower vs. Whole Plant
  misc_feature: MA Experiment ID: 20000794 Result: Up-regulated in Transcription
  misc_feature: MA Experiment 20000794 PARAMETER Experiment Name: At_Petals_P Parameter: Age (day) Value: 23-25 days
  misc_feature: MA Experiment 20000794 PARAMETER Experiment Name: At_Petals_P Parameter: Plant Line Value: WS
  misc_feature: MA Experiment 20000794 PARAMETER Experiment Name: At_Petals_P Parameter: Tissue Value: Petals vs. Whole plant
  misc_feature: MA Experiment ID: 20001247 Result: Up-regulated in Transcription
  misc_feature: MA Experiment 20001247 PARAMETER Experiment Name: At_Far-red-induction_P Parameter: Age (day) Value: 7
  misc_feature: MA Experiment 20001247 PARAMETER Experiment Name: At_Far-red-induction_P Parameter: Light Value: Far-red vs. White
  misc_feature: MA Experiment 20001247 PARAMETER Experiment Name: At_Far-red-induction_P Parameter: Organism Value: A. thaliana
  misc_feature: MA Experiment 20001247 PARAMETER Experiment Name: At_Far-red-induction_P Parameter: Plant Line Value: Columbia
  misc_feature: MA Experiment 20001247 PARAMETER Experiment Name: At_Far-red-induction_P Parameter: Timepoint (hr) Value: 1
  misc_feature: MA Experiment 20001247 PARAMETER Experiment Name: At_Far-red-induction_P Parameter: Tissue Value: Whole Plant
agattctttcttctaaacccattcgctctctccgatcaacacaacatttgatctaacggtttaattttctcgagaaaccgaaggaaaacaaacagagcaatggcgtcgatgggacggtgcctgagctgaaattgagagtcgaagaagattccgataatggtgattatctgaaattgagaggaggatcaaatgaagaagatgaaggatcatcggcggaatcatcgagatgtccgataggatcggttacttctgtctggttctgggtgaaattgatctccttggtcgtttgtttgggttcattggcctttgttatcatcaaatgggttggtccctttttgattgaaaaggagctgattccatttataaattgggtgagaaacacattcagcataccggttctcggtcttctactatttgcctcagtggcattgtttccaagcattcttcttccttcttccccttccatgtggatggctggtcttacatttggttatggaaaagggtttcttctgattttatcagctgcttccatcggtgttactcttcctttcttaattggacatctcttcctccacaagatgcaagaatggttgaagaaataccctaaaaaagcagccatacttagagctgctggtgaaggaacctggtttcatcagtttcaagcagtcacactaatccgtgtctctccatttccttacatcatttacaactactgcgctttagcgactggagttcattatggtccttatatcttaggctctcttgttggaatggttcctgagatctttgtctcaatttacacgggtataatgctaaggacactagcagttgcatcagacacgagacacacactttcggttgtggagatagtcgtgaatgttcttggcttctgtgtaactgcgagcgcgactatagtctgcacaatctatgcgaagaagaagctaagtgcgatgcaatcagaggacgtagagacattacaaaatccaatactttattaactcttttcaccatgaccacaacataccatcatctaacacgatcttgaaattgataatatataatgttttttttttttttttgttattcttattcatttgaaaatgaatatttatgtctttttctcttgtatatatgatatgtatcaattgaattttgaaaatttccaatgtatatttattagatcatctaagtctttttctttccttgcatataatccaccttatgtatcatggaacaatgtcttgttgggttttgttc

SEQ ID NO: 39547 - protein, 177 aa, Arabidopsis thaliana; identical to SEQ ID NO: 26159
  peptide (1)..(177): Ceres Seq. ID no. 12395323
  misc_feature (1)..(121): Pfam Name: DedA family Pfam Description: DedA family
  misc_feature (39)..(167): Homolog of NCBI NO: 25410981 NR Description: hypothetical protein At2g02370 [imported] -
  misc_feature (15)..(172): Homolog of NCBI NO: 7486891 NR Description: hypothetical protein T12H17.240 - Arabidopsis
  misc_feature (1)..(167): Homolog of NCBI NO: 34913316 NR Description: P0519E12.36 [Oryza sativa (japonica
  misc_feature (1)..(167): Homolog of NCBI NO: 18395356 NR Description: expressed protein
  misc_feature (1)..(130): Homolog of NCBI NO: 8778630 NR Description: F5O11.19 [Arabidopsis thaliana]
  misc_feature (1)..(166): Homolog of NCBI NO: 15234386 NR Description: putative protein
  misc_feature (1)..(172): Homolog of NCBI NO: 30685958 NR Description: expressed protein [Arabidopsis thaliana]
  misc_feature (107)..(177): Homolog of NCBI NO: 8778630 NR Description: F5O11.19 [Arabidopsis thaliana]
  misc_feature (1)..(40): Homolog of NCBI NO: 8778630 NR Description: F5O11.19 [Arabidopsis thaliana]
  misc_feature (1)..(177): Homolog of NCBI NO: 15221330 NR Description: hypothetical protein; protein id: At1g12450.1

SEQ ID NO: 39548 - protein, 175 aa, Arabidopsis thaliana; identical to SEQ ID NO: 26160
  peptide (1)..(175): Ceres Seq. ID no. 12395324
  misc_feature (1)..(119): Pfam Name: DedA family Pfam Description: DedA family
  misc_feature (37)..(165): Homolog of NCBI NO: 25410981 NR Description: hypothetical protein At2g02370 [imported] -
  misc_feature (13)..(170): Homolog of NCBI NO: 7486891 NR Description: hypothetical protein T12H17.240 - Arabidopsis
  misc_feature (1)..(165): Homolog of NCBI NO: 34913316 NR Description: P0519E12.36 [Oryza sativa (japonica
  misc_feature (1)..(165): Homolog of NCBI NO: 18395356 NR Description: expressed protein
  misc_feature (1)..(128): Homolog of NCBI NO: 8778630 NR Description: F5O11.19 [Arabidopsis thaliana]
  misc_feature (1)..(164): Homolog of NCBI NO: 15234386 NR Description: putative protein
  misc_feature (1)..(170): Homolog of NCBI NO: 30685958 NR Description: expressed protein [Arabidopsis thaliana]
  misc_feature (105)..(175): Homolog of NCBI NO: 8778630 NR Description: F5O11.19 [Arabidopsis thaliana]
  misc_feature (1)..(38): Homolog of NCBI NO: 8778630 NR Description: F5O11.19 [Arabidopsis thaliana]
  misc_feature (1)..(175): Homolog of NCBI NO: 15221330 NR Description: hypothetical protein; protein id: At1g12450.1

SEQ ID NO: 39549 - protein, 139 aa, Arabidopsis thaliana
  peptide (1)..(139): Ceres Seq. ID no. 12395325
  misc_feature (1)..(83): Pfam Name: DedA family Pfam Description: DedA family
  misc_feature (1)..(122): Homolog of NCBI NO: 23128177 NR Description: hypothetical protein [Nostoc punctiforme]
  misc_feature (1)..(129): Homolog of NCBI NO: 25410981 NR Description: hypothetical protein At2g02370 [imported] -
  misc_feature (1)..(134): Homolog of NCBI NO: 7486891 NR Description: hypothetical protein T12H17.240 - Arabidopsis
  misc_feature (1)..(129): Homolog of NCBI NO: 34913316 NR Description: P0519E12.36 [Oryza sativa (japonica
  misc_feature (1)..(129): Homolog of NCBI NO: 18395356 NR Description: expressed protein
  misc_feature (1)..(92): Homolog of NCBI NO: 8778630 NR Description: F5O11.19 [Arabidopsis thaliana]
  misc_feature (1)..(128): Homolog of NCBI NO: 15234386 NR Description: putative protein
  misc_feature (1)..(134): Homolog of NCBI NO: 30685958 NR Description: expressed protein [Arabidopsis thaliana]
  misc_feature (69)..(139): Homolog of NCBI NO: 8778630 NR Description: F5O11.19 [Arabidopsis thaliana]
  misc_feature (1)..(139): Homolog of NCBI NO: 15221330 NR Description: hypothetical protein; protein id: At1g12450.1
MQEWLKKYPKKAAILRAAGEGTWFHQFQAVTLIRVSPFPYIIYNYCALATGVHYGPYILGSLVGMVPEIFVSIYTGIMLRTLAVASDTRHTLSVVEIVVNVLGFCVTASATIVCTIYAKKKLSAMQSEDVETLQNPILY

SEQ ID NO: 39550 - DNA, 1317 bp, Arabidopsis thaliana
  misc_feature (1)..(1317): Ceres Seq. ID no. 13488574
  misc_feature: MA Experiment ID: 108474 Result: Down-regulated in Transcription
  misc_feature: MA Experiment 108474 PARAMETER Experiment Name: At_Drought_Flowers_cDNA_P Parameter: Timepoint (hr) Value: null
  misc_feature: MA Experiment 108474 PARAMETER Experiment Name: At_Drought_Flowers_cDNA_P Parameter: Treatment Value: Drought vs. No Drought
  misc_feature: MA Experiment ID: 20000234 Result: Up-regulated in Transcription
  misc_feature: MA Experiment 20000234 PARAMETER Experiment Name: At_Siliques_P Parameter: Age (day) Value: 21
  misc_feature: MA Experiment 20000234 PARAMETER Experiment Name: At_Siliques_P Parameter: Organism Value: A. thaliana
  misc_feature: MA Experiment 20000234 PARAMETER Experiment Name: At_Siliques_P Parameter: Plant Line Value: WS
  misc_feature: MA Experiment 20000234 PARAMETER Experiment Name: At_Siliques_P Parameter: Tissue Value: Less Than 5mm Siliques vs. Whole Plant
  misc_feature: MA Experiment ID: 20000235 Result: Up-regulated in Transcription
  misc_feature: MA Experiment 20000235 PARAMETER Experiment Name: At_Siliques_P Parameter: Age (day) Value: 21
  misc_feature: MA Experiment 20000235 PARAMETER Experiment Name: At_Siliques_P Parameter: Organism Value: A. thaliana
  misc_feature: MA Experiment 20000235 PARAMETER Experiment Name: At_Siliques_P Parameter: Plant Line Value: WS
  misc_feature: MA Experiment 20000235 PARAMETER Experiment Name: At_Siliques_P Parameter: Tissue Value: 5-10mm Siliques vs. Whole Plant
  misc_feature: MA Experiment ID: 20000265 Result: Up-regulated in Transcription
  misc_feature: MA Experiment 20000265 PARAMETER Experiment Name: At_Open_Flower_P Parameter: Age (day) Value: 21
  misc_feature: MA Experiment 20000265 PARAMETER Experiment Name: At_Open_Flower_P Parameter: Plant Line Value: WS
  misc_feature: MA Experiment 20000265 PARAMETER Experiment Name: At_Open_Flower_P Parameter: Tissue Value: Closed Flower vs. Whole Plant
  misc_feature: MA Experiment ID: 20000286 Result: Up-regulated in Transcription
  misc_feature: MA Experiment 20000286 PARAMETER Experiment Name: At_Open_Flower_P Parameter: Age (day) Value: 21
  misc_feature: MA Experiment 20000286 PARAMETER Experiment Name: At_Open_Flower_P Parameter: Plant Line Value: WS
  misc_feature: MA Experiment 20000286 PARAMETER Experiment Name: At_Open_Flower_P Parameter: Tissue Value: Half Open vs. Whole Plant
  misc_feature: Phenotype: WHOLE PLANT Size-Small
  misc_feature: Phenotype: INFLORESCENCE Flowering Time-Late Flowering
  misc_feature: Phenotype: WHOLE PLANT Size-Small
  misc_feature: Phenotype: INFLORESCENCE Flowering Time-Late Flowering
  misc_feature: Phenotype: WHOLE PLANT Size-Small
  misc_feature: Phenotype: INFLORESCENCE Flowering Time-Late Flowering
  misc_feature: Phenotype: WHOLE PLANT Size-Small
  misc_feature: Phenotype: INFLORESCENCE Flowering Time-Late Flowering
ataacaaaccaaacactactcttttctaaccaagagaaaggttttatatatgcagaatgaagtttgagagagcaaggccattcatagccattgttttcatacaatgtttgtacgctttgatgtctatagtagcaaaattagctttgaacaagggaatgagccctcacgtcttagttgcttaccgaatggcagttgcttccgctctcattacgcctttcgctctcatcctcgagaggaacacaagaccaaagttgaccttcaagattttgttacaaatagccatccttagtttatttgagcctgtggtcgaacaaaacctgtactactcagggatgaaacttaccactgccacattcacatcagctttgtgcaatgctcttcctgctatgacattcataatggcctgcgttttcaagctcgagaaggtgacaatcgaaagacgccacagccaggcaaagctggtgggaaccatggtggctattgggggagcaatgctcatgacattcgtgaaagggaatgtcattgagctgccttggacaagcaactcaaggggtcttaatgggcacacacacgctatgaggattccaaagcaggcggatatagcaagaggatcaattatgcttgtagcaagctgcttcagttggtcatgttacatcattttacaggcaaagattctggctcaatataaagctgagctctcgctaacagctcttatgtgcattatggggatgttggaggctactgttatgggattgatatgggaaaggaaaaacatgtcggtctggaaaatcaacccggacgtgacgcttttagcttcaatctacggaggactagtctcagggttagcatactatgttattggatgggcgtcaaaggagagagggcctgtgtttgtgagcgcgtttaacccgctcagcatggttctcgttgctattctgagcacctttgttttcttggaaaaagtgtacgtaggaagggttattgggtcagttgtcattgtcattgggatatatttggtattatggggtaaaagcaaggacaaaggagggatgcttcaaccaaacgctggatgcgcagagactgtggtaaagattgaccaacagaaggttccgacgcctgataataaccaagtagtatctatcagttaccatttaatgatcccgaaggcagcagctcggtctcaagagtgagtctaagatgccgattctgttccaggatctctatatatcgcaaaaaaaacatttttgatagtattggtttgccagaataagagcaagcaatgcgctacattaagtctcataaaagctaagaacttgg

SEQ ID NO: 39551 - protein, 377 aa, Arabidopsis thaliana
  peptide (1)..(377): Ceres Seq. ID no. 13488575
  misc_feature (17)..(150): Pfam Name: Integral membrane protein DUF6 Pfam Description: Integral membrane protein DUF6
  misc_feature (7)..(353): Homolog of NCBI NO: 15219123 NR Description: nodulin N21 family protein [Arabidopsis thaliana]
  misc_feature (1)..(329): Homolog of NCBI NO: 2598575 NR Description: MtN21 [Medicago truncatula]
  misc_feature (4)..(328): Homolog of NCBI NO: 25408555 NR Description: nodulin-like protein [imported] - Arabidopsis
  misc_feature (1)..(328): Homolog of NCBI NO: 34908998 NR Description: nodulin-like protein [Oryza sativa (japonica
  misc_feature (1)..(328): Homolog of NCBI NO: 15240683 NR Description: nodulin MtN21 family protein [Arabidopsis
  misc_feature (12)..(363): Homolog of NCBI NO: 21553757 NR Description: nodulin-like protein [Arabidopsis thaliana]
  misc_feature (4)..(363): Homolog of NCBI NO: 15224291 NR Description: nodulin MtN21 family protein [Arabidopsis
  misc_feature (1)..(329): Homolog of NCBI NO: 15225480 NR Description: nodulin MtN21 family protein [Arabidopsis
  misc_feature (60)..(377): Homolog of NCBI NO: 28393023 NR Description: unknown protein [Arabidopsis thaliana]
  misc_feature (1)..(377): Homolog of NCBI NO: 15240686 NR Description: nodulin MtN21 family protein [Arabidopsis
MKFERARPFIAIVFIQCLYALMSIVAKLALNKGMSPHVLVAYRMAVASALITPFALILERNTRPKLTFKILLQIAILSLFEPVVEQNLYYSGMKLTTATFTSALCNALPAMTFIMACVFKLEKVTIERRHSQAKLVGTMVAIGGAMLMTFVKGNVIELPWTSNSRGLNGHTHAMRIPKQADIARGSIMLVASCFSWSCYIILQAKILAQYKAELSLTALMCIMGMLEATVMGLIWERKNMSVWKINPDVTLLASIYGGLVSGLAYYVIGWASKERGPVFVSAFNPLSMVLVAILSTFVFLEKVYVGRVIGSVVIVIGIYLVLWGKSKDKGGMLQPNAGCAETVVKIDQQKVPTPDNNQVVSISYHLMIPKAAARSQE

SEQ ID NO: 39552 - protein, 356 aa, Arabidopsis thaliana
  peptide (1)..(356): Ceres Seq. ID no. 13488576
  misc_feature (1)..(129): Pfam Name: Integral membrane protein DUF6 Pfam Description: Integral membrane protein DUF6
  misc_feature (1)..(332): Homolog of NCBI NO: 15219123 NR Description: nodulin N21 family protein [Arabidopsis thaliana]
  misc_feature (1)..(308): Homolog of NCBI NO: 2598575 NR Description: MtN21 [Medicago truncatula]
  misc_feature (1)..(307): Homolog of NCBI NO: 25408555 NR Description: nodulin-like protein [imported] - Arabidopsis
  misc_feature (1)..(307): Homolog of NCBI NO: 34908998 NR Description: nodulin-like protein [Oryza sativa (japonica
  misc_feature (1)..(307): Homolog of NCBI NO: 15240683 NR Description: nodulin MtN21 family protein [Arabidopsis
  misc_feature (1)..(342): Homolog of NCBI NO: 21553757 NR Description: nodulin-like protein [Arabidopsis thaliana]
  misc_feature (1)..(342): Homolog of NCBI NO: 15224291 NR Description: nodulin MtN21 family protein [Arabidopsis
  misc_feature (1)..(308): Homolog of NCBI NO: 15225480 NR Description: nodulin MtN21 family protein [Arabidopsis
  misc_feature (39)..(356): Homolog of NCBI NO: 28393023 NR Description: unknown protein [Arabidopsis thaliana]
  misc_feature (1)..(356): Homolog of NCBI NO: 15240686 NR Description: nodulin MtN21 family protein [Arabidopsis
MSIVAKLALNKGMSPHVLVAYRMAVASALITPFALILERNTRPKLTFKILLQIAILSLFEPVVEQNLYYSGMKLTTATFTSALCNALPAMTFIMACVFKLEKVTIERRHSQAKLVGTMVAIGGAMLMTFVKGNVIELPWTSNSRGLNGHTHAMRIPKQADIARGSIMLVASCFSWSCYIILQAKILAQYKAELSLTALMCIMGMLEATVMGLIWERKNMSVWKINPDVTLLASIYGGLVSGLAYYVIGWASKERGPVFVSAFNPLSMVLVAILSTFVFLEKVYVGRVIGSVVIVIGIYLVLWGKSKDKGGMLQPNAGCAETVVKIDQQKVPTPDNNQVVSISYHLMIPKAAARSQE

SEQ ID NO: 39553 - protein, 344 aa, Arabidopsis thaliana
  peptide (1)..(344): Ceres Seq. ID no. 13488577
  misc_feature (1)..(117): Pfam Name: Integral membrane protein DUF6 Pfam Description: Integral membrane protein DUF6
  misc_feature (1)..(320): Homolog of NCBI NO: 15219123 NR Description: nodulin N21 family protein [Arabidopsis thaliana]
  misc_feature (1)..(296): Homolog of NCBI NO: 2598575 NR Description: MtN21 [Medicago truncatula]
  misc_feature (1)..(295): Homolog of NCBI NO: 25408555 NR Description: nodulin-like protein [imported] - Arabidopsis
  misc_feature (1)..(295): Homolog of NCBI NO: 34908998 NR Description: nodulin-like protein [Oryza sativa (japonica
  misc_feature (1)..(295): Homolog of NCBI NO: 15240683 NR Description: nodulin MtN21 family protein [Arabidopsis
  misc_feature (1)..(330): Homolog of NCBI NO: 21553757 NR Description: nodulin-like protein [Arabidopsis thaliana]
  misc_feature (1)..(330): Homolog of NCBI NO: 15224291 NR Description: nodulin MtN21 family protein [Arabidopsis
  misc_feature (1)..(296): Homolog of NCBI NO: 15225480 NR Description: nodulin MtN21 family protein [Arabidopsis
  misc_feature (27)..(344): Homolog of NCBI NO: 28393023 NR Description: unknown protein [Arabidopsis thaliana]
  misc_feature (1)..(344): Homolog of NCBI NO: 15240686 NR Description: nodulin MtN21 family protein [Arabidopsis
MSPHVLVAYRMAVASALITPFALILERNTRPKLTFKILLQIAILSLFEPVVEQNLYYSGMKLTTATFTSALCNALPAMTFIMACVFKLEKVTIERRHSQAKLVGTMVAIGGAMLMTFVKGNVIELPWTSNSRGLNGHTHAMRIPKQADIARGSIMLVASCFSWSCYIILQAKILAQYKAELSLTALMCIMGMLEATVMGLIWERKNMSVWKINPDVTLLASIYGGLVSGLAYYVIGWASKERGPVFVSAFNPLSMVLVAILSTFVFLEKVYVGRVIGSVVIVIGIYLVLWGKSKDKGGMLQPNAGCAETVVKIDQQKVPTPDNNQVVSISYHLMIPKAAARSQE

SEQ ID NO: 39554 - DNA, 1760 bp, Arabidopsis thaliana
  misc_feature (1)..(1760): Ceres Seq. ID no. 12377425
  misc_feature: MA Experiment ID: 20000180 Result: Up-regulated in Transcription
  misc_feature: MA Experiment 20000180 PARAMETER Experiment Name: At_Germinating_Seeds_P Parameter: Age (hr) Value: 24 vs. 0
  misc_feature: MA Experiment 20000180 PARAMETER Experiment Name: At_Germinating_Seeds_P Parameter: Tissue Value: Germinating Seeds
  misc_feature: MA Experiment ID: 20000234 Result: Down-regulated in Transcription
  misc_feature: MA Experiment 20000234 PARAMETER Experiment Name: At_Siliques_P Parameter: Age (day) Value: 21
  misc_feature: MA Experiment 20000234 PARAMETER Experiment Name: At_Siliques_P Parameter: Organism Value: A. thaliana
  misc_feature: MA Experiment 20000234 PARAMETER Experiment Name: At_Siliques_P Parameter: Plant Line Value: WS
  misc_feature: MA Experiment 20000234 PARAMETER Experiment Name: At_Siliques_P Parameter: Tissue Value: Less Than 5mm Siliques vs. Whole Plant
  misc_feature: MA Experiment ID: 20000265 Result: Down-regulated in Transcription
  misc_feature: MA Experiment 20000265 PARAMETER Experiment Name: At_Open_Flower_P Parameter: Age (day) Value: 21
  misc_feature: MA Experiment 20000265 PARAMETER Experiment Name: At_Open_Flower_P Parameter: Plant Line Value: WS
  misc_feature: MA Experiment 20000265 PARAMETER Experiment Name: At_Open_Flower_P Parameter: Tissue Value: Closed Flower vs. Whole Plant
  misc_feature: MA Experiment ID: 20000436 Result: Up-regulated in Transcription
  misc_feature: MA Experiment 20000436 PARAMETER Experiment Name: At_Drought_P Parameter: Age (day) Value: 7
  misc_feature: MA Experiment 20000436 PARAMETER Experiment Name: At_Drought_P Parameter: Organism Value: A. thaliana
  misc_feature: MA Experiment 20000436 PARAMETER Experiment Name: At_Drought_P Parameter: Plant Line Value: WS
  misc_feature: MA Experiment 20000436 PARAMETER Experiment Name: At_Drought_P Parameter: Timepoint (hr) Value: 12
  misc_feature: MA Experiment 20000436 PARAMETER Experiment Name: At_Drought_P Parameter: Tissue Value: Whole Plant
  misc_feature: MA Experiment 20000436 PARAMETER Experiment Name: At_Drought_P Parameter: Treatment Value: Drought vs. No Drought
  misc_feature: MA Experiment ID: 20000437 Result: Up-regulated in Transcription
  misc_feature: MA Experiment 20000437 PARAMETER Experiment Name: At_Drought_P Parameter: Age (day) Value: 8
  misc_feature: MA Experiment 20000437 PARAMETER Experiment Name: At_Drought_P Parameter: Organism Value: A. thaliana
  misc_feature: MA Experiment 20000437 PARAMETER Experiment Name: At_Drought_P Parameter: Plant Line Value: WS
  misc_feature: MA Experiment 20000437 PARAMETER Experiment Name: At_Drought_P Parameter: Timepoint (hr) Value: 24
  misc_feature: MA Experiment 20000437 PARAMETER Experiment Name: At_Drought_P Parameter: Tissue Value: Whole Plant
  misc_feature: MA Experiment 20000437 PARAMETER Experiment Name: At_Drought_P Parameter: Treatment Value: Drought vs. No Drought
  misc_feature: MA Experiment ID: 20000438 Result: Down-regulated in Transcription
  misc_feature: MA Experiment 20000438 PARAMETER Experiment Name: At_Shoots__P Parameter: Age (day) Value: 14
  misc_feature: MA Experiment 20000438 PARAMETER Experiment Name: At_Shoots__P Parameter: Tissue Value: Shoots vs. Whole Plant
  misc_feature: MA Experiment ID: 20000527 Result: Down-regulated in Transcription
  misc_feature: MA Experiment 20000527 PARAMETER Experiment Name: At_10percent_PEG_P Parameter: Age (day) Value: 20
  misc_feature: MA Experiment 20000527 PARAMETER Experiment Name: At_10percent_PEG_P Parameter: Organism Value: A. thaliana
  misc_feature: MA Experiment 20000527 PARAMETER Experiment Name: At_10percent_PEG_P Parameter: Plant Line Value: WS
  misc_feature: MA Experiment 20000527 PARAMETER Experiment Name: At_10percent_PEG_P Parameter: Timepoint (day) Value: 20
  misc_feature: MA Experiment 20000527 PARAMETER Experiment Name: At_10percent_PEG_P Parameter: Tissue Value: Whole Plant
  misc_feature: MA Experiment 20000527 PARAMETER Experiment Name: At_10percent_PEG_P Parameter: Treatment Value: 10percent PEG vs. No Treatment
  misc_feature: MA Experiment ID: 20000709 Result: Down-regulated in Transcription
  misc_feature: MA Experiment 20000709 PARAMETER Experiment Name: At_15mM_NH4NO3_L-to-H_P Parameter: Age (hr) Value: 14
  misc_feature: MA Experiment 20000709 PARAMETER Experiment Name: At_15mM_NH4NO3_L-to-H_P Parameter: Organism Value: A. thaliana
  misc_feature: MA Experiment 20000709 PARAMETER Experiment Name: At_15mM_NH4NO3_L-to-H_P Parameter: Plant Line Value: WS
  misc_feature: MA Experiment 20000709 PARAMETER Experiment Name: At_15mM_NH4NO3_L-to-H_P Parameter: Timepoint (hr) Value: 4
  misc_feature: MA Experiment 20000709 PARAMETER Experiment Name: At_15mM_NH4NO3_L-to-H_P Parameter: Tissue Value: Aerial
  misc_feature: MA Experiment 20000709 PARAMETER Experiment Name: At_15mM_NH4NO3_L-to-H_P Parameter: Treatment Value: 15mM NH4NO3 vs. 30mM Mannitol
  misc_feature: MA Experiment ID: 20000794 Result: Up-regulated in Transcription
  misc_feature: MA Experiment 20000794 PARAMETER Experiment Name: At_Petals_P Parameter: Age (day) Value: 23-25 days
  misc_feature: MA Experiment 20000794 PARAMETER Experiment Name: At_Petals_P Parameter: Plant Line Value: WS
  misc_feature: MA Experiment 20000794 PARAMETER Experiment Name: At_Petals_P Parameter: Tissue Value: Petals vs. Whole plant
  misc_feature: MA Experiment ID: 20001458 Result: Down-regulated in Transcription
  misc_feature: MA Experiment 20001458 PARAMETER Experiment Name: At_50mM_NH4NO3_L-to-H_P Parameter: Age (day) Value: Undefined
  misc_feature: MA Experiment 20001458 PARAMETER Experiment Name: At_50mM_NH4NO3_L-to-H_P Parameter: Organism Value: Undefined
  misc_feature: MA Experiment 20001458 PARAMETER Experiment Name: At_50mM_NH4NO3_L-to-H_P Parameter: Plant Line Value: Undefined
  misc_feature: MA Experiment 20001458 PARAMETER Experiment Name: At_50mM_NH4NO3_L-to-H_P Parameter: Timepoint (hr) Value: 2
  misc_feature: MA Experiment 20001458 PARAMETER Experiment Name: At_50mM_NH4NO3_L-to-H_P Parameter: Tissue Value: Siliques
  misc_feature: MA Experiment 20001458 PARAMETER Experiment Name: At_50mM_NH4NO3_L-to-H_P Parameter: Treatment Value: 50mM NH4NO3 vs. 100mM Manitol
  misc_feature: MA Experiment ID: 20001556 Result: Down-regulated in Transcription
  misc_feature: MA Experiment 20001556 PARAMETER Experiment Name: At_Drought_Soil_Dry_P Parameter: Age (day) Value: 26
  misc_feature: MA Experiment 20001556 PARAMETER Experiment Name: At_Drought_Soil_Dry_P Parameter: Organism Value: A. thaliana
  misc_feature: MA Experiment 20001556 PARAMETER Experiment Name: At_Drought_Soil_Dry_P Parameter: Plant Line Value: WS
  misc_feature: MA Experiment 20001556 PARAMETER Experiment Name: At_Drought_Soil_Dry_P Parameter: Post Timepoint (hr) Value: None
  misc_feature: MA Experiment 20001556 PARAMETER Experiment Name: At_Drought_Soil_Dry_P Parameter: Post-Treatment Value: None
  misc_feature: MA Experiment 20001556 PARAMETER Experiment Name: At_Drought_Soil_Dry_P Parameter: Timepoint (day) Value: 12
  misc_feature: MA Experiment 20001556 PARAMETER Experiment Name: At_Drought_Soil_Dry_P Parameter: Treatment Value: Drought vs. No Drought
  misc_feature: MA Experiment ID: 20001557 Result: Down-regulated in Transcription
  misc_feature: MA Experiment 20001557 PARAMETER Experiment Name: At_Drought_Soil_Dry_P Parameter: Age (day) Value: 27
  misc_feature: MA Experiment 20001557 PARAMETER Experiment Name: At_Drought_Soil_Dry_P Parameter: Organism Value: A. thaliana
  misc_feature: MA Experiment 20001557 PARAMETER Experiment Name: At_Drought_Soil_Dry_P Parameter: Plant Line Value: WS
  misc_feature: MA Experiment 20001557 PARAMETER Experiment Name: At_Drought_Soil_Dry_P Parameter: Post Timepoint (hr) Value: 3
  misc_feature: MA Experiment 20001557 PARAMETER Experiment Name: At_Drought_Soil_Dry_P Parameter: Post-Treatment Value: Re-Water vs. No Drought
  misc_feature: MA Experiment 20001557 PARAMETER Experiment Name: At_Drought_Soil_Dry_P Parameter: Timepoint (day) Value: 13
  misc_feature: MA Experiment 20001557 PARAMETER Experiment Name: At_Drought_Soil_Dry_P Parameter: Treatment Value: Drought vs. No Drought
  misc_feature: MA Experiment ID: 20001558 Result: Down-regulated in Transcription
  misc_feature: MA Experiment 20001558 PARAMETER Experiment Name: At_Drought_Soil_Dry_P Parameter: Age (day) Value: 27
  misc_feature: MA Experiment 20001558 PARAMETER Experiment Name: At_Drought_Soil_Dry_P Parameter: Organism Value: A. thaliana
  misc_feature: MA Experiment 20001558 PARAMETER Experiment Name: At_Drought_Soil_Dry_P Parameter: Plant Line Value: WS
  misc_feature: MA Experiment 20001558 PARAMETER Experiment Name: At_Drought_Soil_Dry_P Parameter: Post Timepoint (hr) Value: 6
  misc_feature: MA Experiment 20001558 PARAMETER Experiment Name: At_Drought_Soil_Dry_P Parameter: Post-Treatment Value: Re-Water vs. No Drought
  misc_feature: MA Experiment 20001558 PARAMETER Experiment Name: At_Drought_Soil_Dry_P Parameter: Timepoint (day) Value: 13
  misc_feature: MA Experiment 20001558 PARAMETER Experiment Name: At_Drought_Soil_Dry_P Parameter: Treatment Value: Drought vs. No Drought
  misc_feature: MA Experiment ID: 20001559 Result: Down-regulated in Transcription
  misc_feature: MA Experiment 20001559 PARAMETER Experiment Name: At_Drought_Soil_Dry_P Parameter: Age (day) Value: 28
  misc_feature: MA Experiment 20001559 PARAMETER Experiment Name: At_Drought_Soil_Dry_P Parameter: Organism Value: A. thaliana
  misc_feature: MA Experiment 20001559 PARAMETER Experiment Name: At_Drought_Soil_Dry_P Parameter: Plant Line Value: WS
  misc_feature: MA Experiment 20001559 PARAMETER Experiment Name: At_Drought_Soil_Dry_P Parameter: Post Timepoint (hr) Value: 29
  misc_feature: MA Experiment 20001559 PARAMETER Experiment Name: At_Drought_Soil_Dry_P Parameter: Post-Treatment Value: Re-Water vs. No Drought
  misc_feature: MA Experiment 20001559 PARAMETER Experiment Name: At_Drought_Soil_Dry_P Parameter: Timepoint (day) Value: 14
  misc_feature: MA Experiment 20001559 PARAMETER Experiment Name: At_Drought_Soil_Dry_P Parameter: Treatment Value: Drought vs. No Drought
  misc_feature: MA Experiment ID: 20001560 Result: Down-regulated in Transcription
  misc_feature: MA Experiment 20001560 PARAMETER Experiment Name: At_Drought_Soil_Dry_P Parameter: Age (day) Value: 28
  misc_feature: MA Experiment 20001560 PARAMETER Experiment Name: At_Drought_Soil_Dry_P Parameter: Organism Value: A. thaliana
  misc_feature: MA Experiment 20001560 PARAMETER Experiment Name: At_Drought_Soil_Dry_P Parameter: Plant Line Value: WS
  misc_feature: MA Experiment 20001560 PARAMETER Experiment Name: At_Drought_Soil_Dry_P Parameter: Post Timepoint (hr) Value: None
  misc_feature: MA Experiment 20001560 PARAMETER Experiment Name: At_Drought_Soil_Dry_P Parameter: Post-Treatment Value: None
  misc_feature: MA Experiment 20001560 PARAMETER Experiment Name: At_Drought_Soil_Dry_P Parameter: Timepoint (day) Value: 14
  misc_feature: MA Experiment 20001560 PARAMETER Experiment Name: At_Drought_Soil_Dry_P Parameter: Treatment Value: Drought vs. No Drought
  misc_feature: MA Experiment ID: 20001761 Result: Down-regulated in Transcription
  misc_feature: MA Experiment 20001761 PARAMETER Experiment Name: At_50mM_NH4NO3_L-to-H_P Parameter: Timepoint (hr) Value: 4
  misc_feature: MA Experiment 20001761 PARAMETER Experiment Name: At_50mM_NH4NO3_L-to-H_P Parameter: Tissue Value: Siliques
  misc_feature: MA Experiment 20001761 PARAMETER Experiment Name: At_50mM_NH4NO3_L-to-H_P Parameter: Treatment Value: 50mM NH4NO3 vs 100mM Mannitol
  misc_feature: MA Experiment ID: 20001911 Result: Up-regulated in Transcription
  misc_feature: MA Experiment 20001911 PARAMETER Experiment Name: At_Drought_Reproduction_P Parameter: Age (day) Value: 40
  misc_feature: MA Experiment 20001911 PARAMETER Experiment Name: At_Drought_Reproduction_P Parameter: Organism Value: A. thaliana
  misc_feature: MA Experiment 20001911 PARAMETER Experiment Name: At_Drought_Reproduction_P Parameter: Plant Line Value: WS
  misc_feature: MA Experiment 20001911 PARAMETER Experiment Name: At_Drought_Reproduction_P Parameter: Timepoint (day) Value: 10
  misc_feature: MA Experiment 20001911 PARAMETER Experiment Name: At_Drought_Reproduction_P Parameter: Tissue Value: Flowers
  misc_feature: MA Experiment 20001911 PARAMETER Experiment Name: At_Drought_Reproduction_P Parameter: Treatment Value: Drought vs. No Drought
agataaaaagattcaattttatttgatagcccggcgattaaaaagattcctatcatcatcactcgccggctaatggccacaacgatgacacgtgtctccgtcggcgtcgtcctctttgttctcttagtctcgctggttgccgtctccgccgcgagaagcggtcctgatgatgttatcaaactcccttcgcaggcttctcgcttcttccgtcctgctgaaaacgacgacgattctaactccggtactaggtgggctgttctagtcgccggatctagcggatattggaattacaggcatcaggctgatatatgccatgcctatcaacttctgaggaaaggtggattgaaagaggagaatattgtggtattcatgtatgatgatattgctaacaattacgagaatccaaggcctggaaccattatcaacagccctcatggaaaagatgtctatcaaggagttcccaaggattatactggagatgatgtcaatgttgataatctatttgctgtgatccttggagacaaaactgctgttaaagggggaagtgggaaggttgtggatagtggtcctaatgatcatatcttcatattctacagtgaccatggtggtcctggagttcttgggatgccaacttctccttacctatatgcaaatgatctcaatgatgtcttgaagaagaaacatgctttaggaacatataaaagcttggtgttttatctcgaagcttgcgaatctggaagtatctttgaagggcttcttcctgagggtttgaacatctatgccacaactgcatcaaacgccgaagaaagcagttggggtacctattgccctggagaggaacccagtcctccaccggagtatgaaacttgtttaggtgacttgtacagtgttgcttggatggaagatagtggtatgcacaatttacagactgagactctgcaccagcaatatgaacttgtgaaaaggaggactgcacctgttgggtactcttatggttctcatgtcatgcaatatggcgatgtaggaattagcaaggataatctcgatctttatatgggaacaaaccctgccaatgacaattttacctttgcggatgcgaattcactaaagccaccttcaagagttacaaaccagcgtgatgcagatcttgttcatttttgggaaaagtaccgaaaagcaccagaaggttcagcaagaaaaacagaagctcagaagcaagtacttgaagccatgtctcacagacttcatattgacaatagcgtgatactcgtcggaaaaatcttgtttggcatttcgagaggtcctgaagtgctaaacaaagtacggtctgctgggcaacctctagtcgatgactggaactgccttaaaaatcaggtgagagctttcgagaggcactgtggatcgctgtctcagtacggtatcaagcacatgaggtcttttgcaaacatctgcaatgcagggattcaaatggagcaaatggaggaggcagcttcacaggcttgtaccacactgccaactggtccttggagctcgcttaaccgtggattcagtgcatagaaaccctaaaccgtcttcgcatttgtttataccaccaatccccaaatattcctatttcgatttgttatgattaaatcagtattctctctgtatatctcagtatcatttccgtcgtcagtgtgtaatttcaaattatgtatttgccatgtacagaagcttgtagaactaaagttgaatgtatagaaggtttgtatattatgatg

SEQ ID NO: 39555 - protein, 494 aa, Arabidopsis thaliana
  peptide (1)..(494): Ceres Seq. ID no. 12377426
  misc_feature (12)..(375): Pfam Name: Peptidase C13 family Pfam Description: Peptidase C13 family
  misc_feature (12)..(494): Homolog of NCBI NO: 1351411 NR Description: Vacuolar processing enzyme precursor (VPE)
  misc_feature (8)..(494): Homolog of NCBI NO: 27544012 NR Description: vacuolar processing enzyme-3 [Nicotiana tabacum]
  misc_feature (9)..(494): Homolog of NCBI NO: 7739789 NR Description: cysteine protease [Ipomoea batatas]
  misc_feature (5)..(494): Homolog of NCBI NO: 27544006 NR Description: vacuolar processing enzyme-1a [Nicotiana tabacum]
  misc_feature (5)..(494): Homolog of NCBI NO: 27544008 NR Description: vacuolar processing enzyme-1b [Nicotiana tabacum]
  misc_feature (13)..(494): Homolog of NCBI NO: 4589396 NR Description: asparaginyl endopeptidase (VmPE-1) [Vigna mungo]
  misc_feature (5)..(494): Homolog of NCBI NO: 1351408 NR Description: Vacuolar processing enzyme precursor (VPE)
  misc_feature (5)..(494): Homolog of NCBI NO: 15225226 NR Description: putative vacuolar processing enzyme
  misc_feature (5)..(494): Homolog of NCBI NO: 14916737 NR Description: Vacuolar processing enzyme, gamma-isozyme
  misc_feature (1)..(494): Homolog of NCBI NO: 15233996 NR Description: gamma-VPE (vacuolar processing enzyme)
MATTMTRVSVGVVLFVLLVSLVAVSAARSGPDDVIKLPSQASRFFRPAENDDDSNSGTRWAVLVAGSSGYWNYRHQADICHAYQLLRKGGLKEENIVVFMYDDIANNYENPRPGTIINSPHGKDVYQGVPKDYTGDDVNVDNLFAVILGDKTAVKGGSGKVVDSGPNDHIFIFYSDHGGPGVLGMPTSPYLYANDLNDVLKKKHALGTYKSLVFYLEACESGSIFEGLLPEGLNIYATTASNAEESSWGTYCPGEEPSPPPEYETCLGDLYSVAWMEDSGMHNLQTETLHQQYELVKRRTAPVGYSYGSHVMQYGDVGISKDNLDLYMGTNPANDNFTFADANSLKPPSRVTNQRDADLVHFWEKYRKAPEGSARKTEAQKQVLEAMSHRLHIDNSVILVGKILFGISRGPEVLNKVRSAGQPLVDDWNCLKNQVRAFERHCGSLSQYGIKHMRSFANICNAGIQMEQMEEAASQACTTLPTGPWSSLNRGFSA

SEQ ID NO: 39556 - protein, 490 aa, Arabidopsis thaliana
  peptide (1)..(490): Ceres Seq. ID no. 12377427
  misc_feature (8)..(371): Pfam Name: Peptidase C13 family Pfam Description: Peptidase C13 family
  misc_feature (8)..(490): Homolog of NCBI NO: 1351411 NR Description: Vacuolar processing enzyme precursor (VPE)
  misc_feature (4)..(490): Homolog of NCBI NO: 27544012 NR Description: vacuolar processing enzyme-3 [Nicotiana tabacum]
  misc_feature (5)..(490): Homolog of NCBI NO: 7739789 NR Description: cysteine protease [Ipomoea batatas]
  misc_feature (1)..(490): Homolog of NCBI NO: 27544006 NR Description: vacuolar processing enzyme-1a [Nicotiana tabacum]
  misc_feature (1)..(490): Homolog of NCBI NO: 27544008 NR Description: vacuolar processing enzyme-1b [Nicotiana tabacum]
  misc_feature (9)..(490): Homolog of NCBI NO: 4589396 NR Description: asparaginyl endopeptidase (VmPE-1) [Vigna mungo]
  misc_feature (1)..(490): Homolog of NCBI NO: 1351408 NR Description: Vacuolar processing enzyme precursor (VPE)
  misc_feature (1)..(490): Homolog of NCBI NO: 15225226 NR Description: putative vacuolar processing enzyme
  misc_feature (1)..(490): Homolog of NCBI NO: 14916737 NR Description: Vacuolar processing enzyme, gamma-isozyme
  misc_feature (1)..(490): Homolog of NCBI NO: 15233996 NR Description: gamma-VPE (vacuolar processing enzyme)
MTRVSVGVVLFVLLVSLVAVSAARSGPDDVIKLPSQASRFFRPAENDDDSNSGTRWAVLVAGSSGYWNYRHQADICHAYQLLRKGGLKEENIVVFMYDDIANNYENPRPGTIINSPHGKDVYQGVPKDYTGDDVNVDNLFAVILGDKTAVKGGSGKVVDSGPNDHIFIFYSDHGGPGVLGMPTSPYLYANDLNDVLKKKHALGTYKSLVFYLEACESGSIFEGLLPEGLNIYATTASNAEESSWGTYCPGEEPSPPPEYETCLGDLYSVAWMEDSGMHNLQTETLHQQYELVKRRTAPVGYSYGSHVMQYGDVGISKDNLDLYMGTNPANDNFTFADANSLKPPSRVTNQRDADLVHFWEKYRKAPEGSARKTEAQKQVLEAMSHRLHIDNSVILVGKILFGISRGPEVLNKVRSAGQPLVDDWNCLKNQVRAFERHCGSLSQYGIKHMRSFANICNAGIQMEQMEEAASQACTTLPTGPWSSLNRGFSA

SEQ ID NO: 39557 - protein, 395 aa, Arabidopsis thaliana
  peptide (1)..(395): Ceres Seq. ID no. 12377428
  misc_feature (1)..(276): Pfam Name: Peptidase C13 family Pfam Description: Peptidase C13 family
  misc_feature (1)..(395): Homolog of NCBI NO: 1351411 NR Description: Vacuolar processing enzyme precursor (VPE)
  misc_feature (1)..(395): Homolog of NCBI NO: 27544012 NR Description: vacuolar processing enzyme-3 [Nicotiana tabacum]
  misc_feature (1)..(395): Homolog of NCBI NO: 7739789 NR Description: cysteine protease [Ipomoea batatas]
  misc_feature (1)..(395): Homolog of NCBI NO: 27544006 NR Description: vacuolar processing enzyme-1a [Nicotiana tabacum]
  misc_feature (1)..(395): Homolog of NCBI NO: 27544008 NR Description: vacuolar processing enzyme-1b [Nicotiana tabacum]
  misc_feature (1)..(395): Homolog of NCBI NO: 4589396 NR Description: asparaginyl endopeptidase (VmPE-1) [Vigna mungo]
  misc_feature (1)..(395): Homolog of NCBI NO: 1351408 NR Description: Vacuolar processing enzyme precursor (VPE)
  misc_feature (1)..(395): Homolog of NCBI NO: 15225226 NR Description: putative vacuolar processing enzyme
  misc_feature (1)..(395): Homolog of NCBI NO: 14916737 NR Description: Vacuolar processing enzyme, gamma-isozyme
  misc_feature (1)..(395): Homolog of NCBI NO: 15233996 NR Description: gamma-VPE (vacuolar processing enzyme)
MYDDIANNYENPRPGTIINSPHGKDVYQGVPKDYTGDDVNVDNLFAVILGDKTAVKGGSGKVVDSGPNDHIFIFYSDHGGPGVLGMPTSPYLYANDLNDVLKKKHALGTYKSLVFYLEACESGSIFEGLLPEGLNIYATTASNAEESSWGTYCPGEEPSPPPEYETCLGDLYSVAWMEDSGMHNLQTETLHQQYELVKRRTAPVGYSYGSHVMQYGDVGISKDNLDLYMGTNPANDNFTFADANSLKPPSRVTNQRDADLVHFWEKYRKAPEGSARKTEAQKQVLEAMSHRLHIDNSVILVGKILFGISRGPEVLNKVRSAGQPLVDDWNCLKNQVRAFERHCGSLSQYGIKHMRSFANICNAGIQMEQMEEAASQACTTLPTGPWSSLNRGFSA

SEQ ID NO: 39558 - DNA, 1530 bp, Arabidopsis thaliana
  misc_feature (1)..(1530): Ceres Seq. ID no. 12466572
  misc_feature: MA Experiment ID: 108469 Result: Up-regulated in Transcription
  misc_feature: MA Experiment ID: 108569 Result: Up-regulated in Transcription
  misc_feature: MA Experiment 108569 PARAMETER Experiment Name: At_0.001%_MeJA__cDNA_P Parameter: Timepoint (hr) Value: 6
  misc_feature: MA Experiment 108569 PARAMETER Experiment Name: At_0.001%_MeJA__cDNA_P Parameter: Tissue Value: Aerial
  misc_feature: MA Experiment 108569 PARAMETER Experiment Name: At_0.001%_MeJA__cDNA_P Parameter: Treatment Value: 0.001% MeJA vs. No Treatment
  misc_feature: MA Experiment ID: 108573 Result: Up-regulated in Transcription
  misc_feature: MA Experiment 108573 PARAMETER Experiment Name: At_Drought_cDNA_P Parameter: Timepoint (hr) Value: 6
  misc_feature: MA Experiment 108573 PARAMETER Experiment Name: At_Drought_cDNA_P Parameter: Tissue Value: Aerial
  misc_feature: MA Experiment 108573 PARAMETER Experiment Name: At_Drought_cDNA_P Parameter: Treatment Value: Drought vs. No Drought
  misc_feature: MA Experiment ID: 108585 Result: Up-regulated in Transcription
  misc_feature: MA Experiment 108585 PARAMETER Experiment Name: At_5mM_NaNP_cDNA_P Parameter: Timepoint (hr) Value: 6
  misc_feature: MA Experiment 108585 PARAMETER Experiment Name: At_5mM_NaNP_cDNA_P Parameter: Tissue Value: Aerial
  misc_feature: MA Experiment 108585 PARAMETER Experiment Name: At_5mM_NaNP_cDNA_P Parameter: Treatment Value: null
  misc_feature: MA Experiment ID: 108594 Result: Down-regulated in Transcription
  misc_feature: MA Experiment 108594 PARAMETER Experiment Name: At_Ler-rhl_Root_cDNA_P Parameter: Plant Line Value: null
  misc_feature: MA Experiment ID: 108595 Result: Down-regulated in Transcription
  misc_feature: MA Experiment 108595 PARAMETER Experiment Name: At_Ler-pi_Ovule_cDNA_P Parameter: Plant Line Value: null
  misc_feature: MA Experiment ID: 108668 Result: Up-regulated in Transcription
  misc_feature: MA Experiment 108668 PARAMETER Experiment Name: At_2mM_SA_cDNA_P Parameter: Plant Line Value: WS
  misc_feature: MA Experiment 108668 PARAMETER Experiment Name: At_2mM_SA_cDNA_P Parameter: Timepoint (hr) Value: 6
  misc_feature: MA Experiment 108668 PARAMETER Experiment Name: At_2mM_SA_cDNA_P Parameter: Treatment Value: 2mM SA vs. No Treatment
  misc_feature: MA Experiment ID: 20000113 Result: Down-regulated in Transcription
  misc_feature: MA Experiment 20000113 PARAMETER Experiment Name: At_42deg_Heat_cDNA_P Parameter: Temperature (deg C) Value: 42 vs. 22
  misc_feature: MA Experiment 20000113 PARAMETER Experiment Name: At_42deg_Heat_cDNA_P Parameter: Timepoint (hr) Value: 8
  misc_feature: MA Experiment 20000113 PARAMETER Experiment Name: At_42deg_Heat_cDNA_P Parameter: Tissue Value: Aerial
  misc_feature: MA Experiment ID: 20000185 Result: Up-regulated in Transcription
  misc_feature: MA Experiment 20000185 PARAMETER Experiment Name: At_Roots__P Parameter: Age (day) Value: 7 vs. 21
  misc_feature: MA Experiment 20000185 PARAMETER Experiment Name: At_Roots__P Parameter: Organism Value: A. thaliana
  misc_feature: MA Experiment 20000185 PARAMETER Experiment Name: At_Roots__P Parameter: Tissue Value: Roots vs. Whole Plant
  misc_feature: MA Experiment ID: 20000439 Result: Up-regulated in Transcription
  misc_feature: MA Experiment 20000439 PARAMETER Experiment Name: At_Roots__P Parameter: Age (day) Value: 14 vs. 21
  misc_feature: MA Experiment 20000439 PARAMETER Experiment Name: At_Roots__P Parameter: Organism Value: A. thaliana
  misc_feature: MA Experiment 20000439 PARAMETER Experiment Name: At_Roots__P Parameter: Tissue Value: Roots vs. Whole Plant
agcaaaaagtctcctctttcctctctttctctctctgcgtccttctgaggctggaagcgatgaccatgacagcatttctcgcgagacggcttatcggtaacggatcgagccagattctcgggacttcgagttctagctccggtccgttcatttccgtttctagggctttcttctcctcctccactccgatcaaagctactctctttcccggtgatgggatcggtcccgaaatcgctgaatctgtcaagcaggtgtttactgccgctgatgtggttattgattgggacgaacagtttgttggtactgaagtagatcctagaaccaatagtttcttgacatgggataatcttcaatctgtgcttaaaaacaaggttggtttgaaaggaccaatggctactccaattggaaagggtcaccgttccttgaaccttactcttaggaaagagctgaatttgtatgccaatgttaggccttgttacagtcttcctggttacaaaacccgttatgatgatgttgatctcattaccattcgtgagaacactgaaggagagtacagtgggcttgaacaccaggtcgtcaagggtgtagtggaaagtcttaaaattattacccgtaaggcgagtatgagagttgccgagtatgcctttctttatgccaagactcacggaaggaagaaagtttctgcaattcacaaagccaacattatgcagaaaactgatggtcttttcctgcagtgttgtgatgaagttgctgcgaagtatcctgagatatattacgagaaggttgttattgacaattgctgtatgatgcttgtgaaaaacccagcactttttgatgtcttggtgatgccaaatctctatggagatattatcagcgatttgtgtgctggacttgttgggggactaggactgactcctagtatgaatattggggaggatggtattgcccttgctgaagctgttcacggctctgcacctgatattgctggaatgaacctggcgaacccaacagctttgctactgagtggagtgatgatgttgcggcacctgaagctcaacaaacaagcagagcaaatccacagtgccatcatcaacacaatagccgagggaaagtatagaactgctgatctcggaggttcctcaactacaacagatttcacaaaagccatctgtgatcatctctaaacacccgtgaaaaaccataattctttccttacttacttattggatcttcctcttggattttcactccaaaatttttctacatattgatcctcttcctatgaggagaaacaaagccgccataggctttagacattgacttgtgttttccttagatttgaagttcttgcagagctgtattacttcttctgcctttaagatccataacaaaagaaggatacagatattggaagaatccatcaaaaggttcacatttacagtttgtggattttgcctgaattgtttggcgttatgtcttattctctgtgaattttcaacaataataatatcgtcccttttgtccttacct

SEQ ID NO: 39559 - protein, 393 aa, Arabidopsis thaliana
  peptide (1)..(393): Ceres Seq. ID no. 12466573
  misc_feature (64)..(389): Pfam Name: Isocitrate/isopropylmalate dehydrogenase Pfam Description: Isocitrate/isopropylmalate dehydrogenase
  misc_feature (66)..(390): Homolog of NCBI NO: 39850137 NR Description: Unknown (protein for MGC:76128) [Silurana
  misc_feature (38)..(390): Homolog of NCBI NO: 39595592 NR Description: Hypothetical protein CBG12504 [Caenorhabditis
  misc_feature (42)..(370): Homolog of NCBI NO: 7427677 NR Description: 3-isopropylmalate dehydrogenase (EC 1.1.1.85)
  misc_feature (42)..(370): Homolog of NCBI NO: 266463 NR Description: 3-isopropylmalate dehydrogenase, chloroplast
  misc_feature (58)..(393): Homolog of NCBI NO: 34903262 NR Description: unnamed protein product [Oryza sativa (japonica
  misc_feature (37)..(393): Homolog of NCBI NO: 7431333 NR Description: probable isocitrate dehydrogenase (NAD) (EC
  misc_feature (65)..(393): Homolog of NCBI NO: 28974492 NR Description: NAD-dependent isocitrate dehydrogenase alpha
  misc_feature (22)..(393): Homolog of NCBI NO: 11251553 NR Description: 3-isopropylmalate dehydrogenase-like protein -
  misc_feature (20)..(393): Homolog of NCBI NO: 18414179 NR Description: putative protein
  misc_feature (20)..(393): Homolog of NCBI NO: 21536667 NR Description: putative (NAD+) isocitrate dehydrogenase
QKVSSFLSFSLCVLLRLEAMTMTAFLARRLIGNGSSQILGTSSSSSGPFISVSRAFFSSSTPIKATLFPGDGIGPEIAESVKQVFTAADVVIDWDEQFVGTEVDPRTNSFLTWDNLQSVLKNKVGLKGPMATPIGKGHRSLNLTLRKELNLYANVRPCYSLPGYKTRYDDVDLITIRENTEGEYSGLEHQVVKGVVESLKIITRKASMRVAEYAFLYAKTHGRKKVSAIHKANIMQKTDGLFLQCCDEVAAKYPEIYYEKVVIDNCCMMLVKNPALFDVLVMPNLYGDIISDLCAGLVGGLGLTPSMNIGEDGIALAEAVHGSAPDIAGMNLANPTALLLSGVMMLRHLKLNKQAEQIHSAIINTIAEGKYRTADLGGSSTTTDFTKAICDHL

SEQ ID NO: 39560 - protein, 374 aa, Arabidopsis thaliana
  peptide (1)..(374): Ceres Seq. ID no. 12466574
  misc_feature (45)..(370): Pfam Name: Isocitrate/isopropylmalate dehydrogenase Pfam Description: Isocitrate/isopropylmalate dehydrogenase
  misc_feature (47)..(371): Homolog of NCBI NO: 39850137 NR Description: Unknown (protein for MGC:76128) [Silurana
  misc_feature (19)..(371): Homolog of NCBI NO: 39595592 NR Description: Hypothetical protein CBG12504 [Caenorhabditis
  misc_feature (23)..(351): Homolog of NCBI NO: 7427677 NR Description: 3-isopropylmalate dehydrogenase (EC 1.1.1.85)
  misc_feature (23)..(351): Homolog of NCBI NO: 266463 NR Description: 3-isopropylmalate dehydrogenase, chloroplast
  misc_feature (39)..(374): Homolog of NCBI NO: 34903262 NR Description: unnamed protein product [Oryza sativa (japonica
  misc_feature (18)..(374): Homolog of NCBI NO: 7431333 NR Description: probable isocitrate dehydrogenase (NAD) (EC
  misc_feature (46)..(374): Homolog of NCBI NO: 28974492 NR Description: NAD-dependent isocitrate dehydrogenase alpha
  misc_feature (3)..(374): Homolog of NCBI NO: 11251553 NR Description: 3-isopropylmalate dehydrogenase-like protein -
  misc_feature (1)..(374): Homolog of NCBI NO: 18414179 NR Description: putative protein
  misc_feature (1)..(374): Homolog of NCBI NO: 21536667 NR Description: putative (NAD+) isocitrate dehydrogenase
MTMTAFLARRLIGNGSSQILGTSSSSSGPFISVSRAFFSSSTPIKATLFPGDGIGPEIAESVKQVFTAADVVIDWDEQFVGTEVDPRTNSFLTWDNLQSVLKNKVGLKGPMATPIGKGHRSLNLTLRKELNLYANVRPCYSLPGYKTRYDDVDLITIRENTEGEYSGLEHQVVKGVVESLKIITRKASMRVAEYAFLYAKTHGRKKVSAIHKANIMQKTDGLFLQCCDEVAAKYPEIYYEKVVIDNCCMMLVKNPALFDVLVMPNLYGDIISDLCAGLVGGLGLTPSMNIGEDGIALAEAVHGSAPDIAGMNLANPTALLLSGVMMLRHLKLNKQAEQIHSAIINTIAEGKYRTADLGGSSTTTDFTKAICDHL

SEQ ID NO: 39561 - protein, 372 aa, Arabidopsis thaliana
  peptide (1)..(372): Ceres Seq. ID no. 12466575
  misc_feature (43)..(368): Pfam Name: Isocitrate/isopropylmalate dehydrogenase Pfam Description: Isocitrate/isopropylmalate dehydrogenase
  misc_feature (45)..(369): Homolog of NCBI NO: 39850137 NR Description: Unknown (protein for MGC:76128) [Silurana
  misc_feature (17)..(369): Homolog of NCBI NO: 39595592 NR Description: Hypothetical protein CBG12504 [Caenorhabditis
  misc_feature (21)..(349): Homolog of NCBI NO: 7427677 NR Description: 3-isopropylmalate dehydrogenase (EC 1.1.1.85)
  misc_feature (21)..(349): Homolog of NCBI NO: 266463 NR Description: 3-isopropylmalate dehydrogenase, chloroplast
  misc_feature (37)..(372): Homolog of NCBI NO: 34903262 NR Description: unnamed protein product [Oryza sativa (japonica
  misc_feature (16)..(372): Homolog of NCBI NO: 7431333 NR Description: probable isocitrate dehydrogenase (NAD) (EC
  misc_feature (44)..(372): Homolog of NCBI NO: 28974492 NR Description: NAD-dependent isocitrate dehydrogenase alpha
  misc_feature (1)..(372): Homolog of NCBI NO: 11251553 NR Description: 3-isopropylmalate dehydrogenase-like protein -
  misc_feature (1)..(372): Homolog of NCBI NO: 18414179 NR Description: putative protein
  misc_feature (1)..(372): Homolog of NCBI NO: 21536667 NR Description: putative (NAD+) isocitrate dehydrogenase
MTAFLARRLIGNGSSQILGTSSSSSGPFISVSRAFFSSSTPIKATLFPGDGIGPEIAESVKQVFTAADVVIDWDEQFVGTEVDPRTNSFLTWDNLQSVLKNKVGLKGPMATPIGKGHRSLNLTLRKELNLYANVRPCYSLPGYKTRYDDVDLITIRENTEGEYSGLEHQVVKGVVESLKIITRKASMRVAEYAFLYAKTHGRKKVSAIHKANIMQKTDGLFLQCCDEVAAKYPEIYYEKVVIDNCCMMLVKNPALFDVLVMPNLYGDIISDLCAGLVGGLGLTPSMNIGEDGIALAEAVHGSAPDIAGMNLANPTALLLSGVMMLRHLKLNKQAEQIHSAIINTIAEGKYRTADLGGSSTTTDFTKAICDHL

SEQ ID NO: 39562 - DNA, 1119 bp, Arabidopsis thaliana
  misc_feature (1)..(1119): Ceres Seq. ID no. 12328119
  misc_feature: MA Experiment ID: 108434 Result: Down-regulated in Transcription
  misc_feature: MA Experiment 108434 PARAMETER Experiment Name: At_Root_Tips_cDNA_P Parameter: Tissue Value: Root Tips
  misc_feature: MA Experiment ID: 108462 Result: Up-regulated in Transcription
  misc_feature: MA Experiment 108462 PARAMETER Experiment Name: At_Germinating_Seeds_cDNA_P Parameter: Age (day) Value: 2 vs. 0
  misc_feature: MA Experiment 108462 PARAMETER Experiment Name: At_Germinating_Seeds_cDNA_P Parameter: Tissue Value: Germinating Seeds
  misc_feature: MA Experiment ID: 108464 Result: Up-regulated in Transcription
  misc_feature: MA Experiment 108464 PARAMETER Experiment Name: At_Germinating_Seeds_cDNA_P Parameter: Age (day) Value: 4 vs. 0
  misc_feature: MA Experiment 108464 PARAMETER Experiment Name: At_Germinating_Seeds_cDNA_P Parameter: Tissue Value: Germinating Seeds
  misc_feature: MA Experiment ID: 108469 Result: Up-regulated in Transcription
  misc_feature: MA Experiment ID: 108572 Result: Down-regulated in Transcription
  misc_feature: MA Experiment 108572 PARAMETER Experiment Name: At_Drought_cDNA_P Parameter: Timepoint (hr) Value: 1
  misc_feature: MA Experiment 108572 PARAMETER Experiment Name: At_Drought_cDNA_P Parameter: Tissue Value: Aerial
  misc_feature: MA Experiment 108572 PARAMETER Experiment Name: At_Drought_cDNA_P Parameter: Treatment Value: Drought vs. No Drought
  misc_feature: MA Experiment ID: 108573 Result: Down-regulated in Transcription
  misc_feature: MA Experiment 108573 PARAMETER Experiment Name: At_Drought_cDNA_P Parameter: Timepoint (hr) Value: 6
  misc_feature: MA Experiment 108573 PARAMETER Experiment Name: At_Drought_cDNA_P Parameter: Tissue Value: Aerial
  misc_feature: MA Experiment 108573 PARAMETER Experiment Name: At_Drought_cDNA_P Parameter: Treatment Value: Drought vs. No Drought
  misc_feature: MA Experiment ID: 108574 Result: Down-regulated in Transcription
  misc_feature: MA Experiment 108574 PARAMETER Experiment Name: At_Wounding__cDNA_P Parameter: Timepoint (hr) Value: 1
  misc_feature: MA Experiment 108574 PARAMETER Experiment Name: At_Wounding__cDNA_P Parameter: Tissue Value: Aerial
  misc_feature: MA Experiment 108574 PARAMETER Experiment Name: At_Wounding__cDNA_P Parameter: Treatment Value: Wounding vs. No Wounding
  misc_feature: MA Experiment ID: 108577 Result: Down-regulated in Transcription
  misc_feature: MA Experiment 108577 PARAMETER Experiment Name: At_42deg_Heat_cDNA_P Parameter: Temperature (deg C) Value: 42 vs. 22
  misc_feature: MA Experiment 108577 PARAMETER Experiment Name: At_42deg_Heat_cDNA_P Parameter: Timepoint (hr) Value: 6
  misc_feature: MA Experiment 108577 PARAMETER Experiment Name: At_42deg_Heat_cDNA_P Parameter: Tissue Value: Aerial
  misc_feature: MA Experiment ID: 108595 Result: Down-regulated in Transcription
  misc_feature: MA Experiment 108595 PARAMETER Experiment Name: At_Ler-pi_Ovule_cDNA_P Parameter: Plant Line Value: null
  misc_feature: MA Experiment ID: 108668 Result: Up-regulated in Transcription
  misc_feature: MA Experiment 108668 PARAMETER Experiment Name: At_2mM_SA_cDNA_P Parameter: Plant Line Value: WS
  misc_feature: MA Experiment 108668 PARAMETER Experiment Name: At_2mM_SA_cDNA_P Parameter: Timepoint (hr) Value: 6
  misc_feature: MA Experiment 108668 PARAMETER Experiment Name: At_2mM_SA_cDNA_P Parameter: Treatment Value: 2mM SA vs. No Treatment
  misc_feature: MA Experiment ID: 20000069 Result: Up-regulated in Transcription
  misc_feature: MA Experiment 20000069 PARAMETER Experiment Name: At_100uM_ABA_Mutants_cDNA_P Parameter: Plant Line Value: CS23
  misc_feature: MA Experiment 20000069 PARAMETER Experiment Name: At_100uM_ABA_Mutants_cDNA_P Parameter: Timepoint (hr) Value: 6
  misc_feature: MA Experiment 20000069 PARAMETER Experiment Name: At_100uM_ABA_Mutants_cDNA_P Parameter: Tissue Value: Aerial
  misc_feature: MA Experiment 20000069 PARAMETER Experiment Name: At_100uM_ABA_Mutants_cDNA_P Parameter: Treatment Value: 100uM ABA vs. No Treatment
  misc_feature: MA Experiment ID: 20000072 Result: Up-regulated in Transcription
  misc_feature: MA Experiment 20000072 PARAMETER Experiment Name: At_100uM_ABA_Mutants_cDNA_P Parameter: Plant Line Value: CS8105
  misc_feature: MA Experiment 20000072 PARAMETER Experiment Name: At_100uM_ABA_Mutants_cDNA_P Parameter: Timepoint (hr) Value: 6
  misc_feature: MA Experiment 20000072 PARAMETER Experiment Name: At_100uM_ABA_Mutants_cDNA_P Parameter: Tissue Value: Aerial
  misc_feature: MA Experiment 20000072 PARAMETER Experiment Name: At_100uM_ABA_Mutants_cDNA_P Parameter: Treatment Value: 100uM ABA vs. No Treatment
  misc_feature: MA Experiment ID: 20000090 Result: Up-regulated in Transcription
  misc_feature: MA Experiment ID: 20000111 Result: Down-regulated in Transcription
  misc_feature: MA Experiment 20000111 PARAMETER Experiment Name: At_42deg_Heat_cDNA_P Parameter: Temperature (deg C) Value: 42 vs. 22
  misc_feature: MA Experiment 20000111 PARAMETER Experiment Name: At_42deg_Heat_cDNA_P Parameter: Timepoint (hr) Value: 6
  misc_feature: MA Experiment 20000111 PARAMETER Experiment Name: At_42deg_Heat_cDNA_P Parameter: Tissue Value: Aerial
  misc_feature: MA Experiment ID: 20000113 Result: Down-regulated in Transcription
  misc_feature: MA Experiment 20000113 PARAMETER Experiment Name: At_42deg_Heat_cDNA_P Parameter: Temperature (deg C) Value: 42 vs. 22
  misc_feature: MA Experiment 20000113 PARAMETER Experiment Name: At_42deg_Heat_cDNA_P Parameter: Timepoint (hr) Value: 8
  misc_feature: MA Experiment 20000113 PARAMETER Experiment Name: At_42deg_Heat_cDNA_P Parameter: Tissue Value: Aerial
  misc_feature: MA Experiment ID: 20000180 Result: Up-regulated in Transcription
  misc_feature: MA Experiment 20000180 PARAMETER Experiment Name: At_Germinating_Seeds_P Parameter: Age (hr) Value: 24 vs. 0
  misc_feature: MA Experiment 20000180 PARAMETER Experiment Name: At_Germinating_Seeds_P Parameter: Tissue Value: Germinating Seeds
  misc_feature: MA Experiment ID: 20000182 Result: Up-regulated in Transcription
  misc_feature: MA Experiment 20000182 PARAMETER Experiment Name: At_2mM_SA_P Parameter: Age (day) Value: 14
  misc_feature: MA Experiment 20000182 PARAMETER Experiment Name: At_2mM_SA_P Parameter: Organism Value: A. thaliana
  misc_feature: MA Experiment 20000182 PARAMETER Experiment Name: At_2mM_SA_P Parameter: Plant Line Value: WS
  misc_feature: MA Experiment 20000182 PARAMETER Experiment Name: At_2mM_SA_P Parameter: Timepoint (hr) Value: 6
  misc_feature: MA Experiment 20000182 PARAMETER Experiment Name: At_2mM_SA_P Parameter: Tissue Value: Aerial
  misc_feature: MA Experiment 20000182 PARAMETER Experiment Name: At_2mM_SA_P Parameter: Treatment Value: 2mM SA vs. No Treatment
  misc_feature: MA Experiment ID: 20000184 Result: Down-regulated in Transcription
  misc_feature: MA Experiment 20000184 PARAMETER Experiment Name: At_Shoots__P Parameter: Age (day) Value: 7
  misc_feature: MA Experiment 20000184 PARAMETER Experiment Name: At_Shoots__P Parameter: Tissue Value: Shoots vs. Whole Plant
  misc_feature: MA Experiment ID: 20000224 Result: Down-regulated in Transcription
  misc_feature: MA Experiment ID: 20000227 Result: Down-regulated in Transcription
  misc_feature: MA Experiment 20000227 PARAMETER Experiment Name: At_Root-Tips-vs-Tops_P Parameter: Tissue Value: Root Tips vs. Root Tops
  misc_feature: MA Experiment ID: 20000234 Result: Down-regulated in Transcription
  misc_feature: MA Experiment 20000234 PARAMETER Experiment Name: At_Siliques_P Parameter: Age (day) Value: 21
  misc_feature: MA Experiment 20000234 PARAMETER Experiment Name: At_Siliques_P Parameter: Organism Value: A. thaliana
  misc_feature: MA Experiment 20000234 PARAMETER Experiment Name: At_Siliques_P Parameter: Plant Line Value: WS
  misc_feature: MA Experiment 20000234 PARAMETER Experiment Name: At_Siliques_P Parameter: Tissue Value: Less Than 5mm Siliques vs. Whole Plant
  misc_feature: MA Experiment ID: 20000264 Result: Down-regulated in Transcription
  misc_feature: MA Experiment 20000264 PARAMETER Experiment Name: At_Open_Flower_P Parameter: Age (day) Value: 21
  misc_feature: MA Experiment 20000264 PARAMETER Experiment Name: At_Open_Flower_P Parameter: Plant Line Value: WS
  misc_feature: MA Experiment 20000264 PARAMETER Experiment Name: At_Open_Flower_P Parameter: Tissue Value: Open Flower vs. Whole Plant
  misc_feature: MA Experiment ID: 20000265 Result: Down-regulated in Transcription
  misc_feature: MA Experiment 20000265 PARAMETER Experiment Name: At_Open_Flower_P Parameter: Age (day) Value: 21
  misc_feature: MA Experiment 20000265 PARAMETER Experiment Name: At_Open_Flower_P Parameter: Plant Line Value: WS
  misc_feature: MA Experiment 20000265 PARAMETER Experiment Name: At_Open_Flower_P Parameter: Tissue Value: Closed Flower vs. Whole Plant
  misc_feature: MA Experiment ID: 20000267 Result: Down-regulated in Transcription
  misc_feature: MA Experiment 20000267 PARAMETER Experiment Name: At_Drought_P Parameter: Age (day) Value: 7
  misc_feature: MA Experiment 20000267 PARAMETER Experiment Name: At_Drought_P Parameter: Organism Value: A. thaliana
  misc_feature: MA Experiment 20000267 PARAMETER Experiment Name: At_Drought_P Parameter: Plant Line Value: WS
  misc_feature: MA Experiment 20000267 PARAMETER Experiment Name: At_Drought_P Parameter: Timepoint (hr) Value: 6
  misc_feature: MA Experiment 20000267 PARAMETER Experiment Name: At_Drought_P Parameter: Tissue Value: Whole Plant
  misc_feature: MA Experiment 20000267 PARAMETER Experiment Name: At_Drought_P Parameter: Treatment Value: Drought vs. No Drought
  misc_feature: MA Experiment ID: 20000268 Result: Down-regulated in Transcription
  misc_feature: MA Experiment 20000268 PARAMETER Experiment Name: At_100mM_NaCl__P Parameter: Age (day) Value: 14
  misc_feature: MA Experiment 20000268 PARAMETER Experiment Name: At_100mM_NaCl__P Parameter: Organism Value: A. thaliana
  misc_feature: MA Experiment 20000268 PARAMETER Experiment Name: At_100mM_NaCl__P Parameter: Plant Line Value: WS
  misc_feature: MA Experiment 20000268 PARAMETER Experiment Name: At_100mM_NaCl__P Parameter: Timepoint (hr) Value: 6
  misc_feature: MA Experiment 20000268 PARAMETER Experiment Name: At_100mM_NaCl__P Parameter: Tissue Value: Whole Plant
  misc_feature: MA Experiment 20000268 PARAMETER Experiment Name: At_100mM_NaCl__P Parameter: Treatment Value: 100mM NaCl vs. No Treatment
  misc_feature: MA Experiment ID: 20000286 Result: Down-regulated in Transcription
  misc_feature: MA Experiment 20000286 PARAMETER Experiment Name: At_Open_Flower_P Parameter: Age (day) Value: 21
  misc_feature: MA Experiment 20000286 PARAMETER Experiment Name: At_Open_Flower_P Parameter: Plant Line Value: WS
  misc_feature: MA Experiment 20000286 PARAMETER Experiment Name: At_Open_Flower_P Parameter: Tissue Value: Half Open vs. Whole Plant
  misc_feature: MA Experiment ID: 20000437 Result: Down-regulated in Transcription
  misc_feature: MA Experiment 20000437 PARAMETER Experiment Name: At_Drought_P Parameter: Age (day) Value: 8
  misc_feature: MA Experiment 20000437 PARAMETER Experiment Name: At_Drought_P Parameter: Organism Value: A. thaliana
  misc_feature: MA Experiment 20000437 PARAMETER Experiment Name: At_Drought_P Parameter: Plant Line Value: WS
  misc_feature: MA Experiment 20000437 PARAMETER Experiment Name: At_Drought_P Parameter: Timepoint (hr) Value: 24
  misc_feature: MA Experiment 20000437 PARAMETER Experiment Name: At_Drought_P Parameter: Tissue Value: Whole Plant
  misc_feature: MA Experiment 20000437 PARAMETER Experiment Name: At_Drought_P Parameter: Treatment Value: Drought vs. No Drought
  misc_feature: MA Experiment ID: 20000438 Result: Down-regulated in Transcription
  misc_feature: MA Experiment 20000438 PARAMETER Experiment Name: At_Shoots__P Parameter: Age (day) Value: 14
  misc_feature: MA Experiment 20000438 PARAMETER Experiment Name: At_Shoots__P Parameter: Tissue Value: Shoots vs. Whole Plant
  misc_feature: MA Experiment ID: 20000441 Result: Up-regulated in Transcription
  misc_feature: MA Experiment 20000441 PARAMETER Experiment Name: At_1uM_BR-BRZ__P Parameter: Tissue Value: Shoot Apices
  misc_feature: MA Experiment 20000441 PARAMETER Experiment Name: At_1uM_BR-BRZ__P Parameter: Treatment Value: 1uM BR vs. No Treatment
  misc_feature: MA Experiment ID: 20000445 Result: Up-regulated in Transcription
  misc_feature: MA Experiment 20000445 PARAMETER Experiment Name: At_100uM_NAA__P Parameter: Age (day) Value: 14
  misc_feature: MA Experiment 20000445 PARAMETER Experiment Name: At_100uM_NAA__P Parameter: Organism Value: A. thaliana
  misc_feature: MA Experiment 20000445 PARAMETER Experiment Name: At_100uM_NAA__P Parameter: Plant Line Value: WS
  misc_feature: MA Experiment 20000445 PARAMETER Experiment Name: At_100uM_NAA__P Parameter: Timepoint (hr) Value: 6
  misc_feature: MA Experiment 20000445 PARAMETER Experiment Name: At_100uM_NAA__P Parameter: Tissue Value: Aerial
  misc_feature: MA Experiment 20000445 PARAMETER Experiment Name: At_100uM_NAA__P Parameter: Treatment Value: 100uM NAA vs. No Treatment
  misc_feature: MA Experiment ID: 20000451 Result: Down-regulated in Transcription
  misc_feature: MA Experiment 20000451 PARAMETER Experiment Name: At_CS6879_Shoots-Roots_P Parameter: Age (day) Value: 14
  misc_feature: MA Experiment 20000451 PARAMETER Experiment Name: At_CS6879_Shoots-Roots_P Parameter: Organism Value: A. thaliana
  misc_feature: MA Experiment 20000451 PARAMETER Experiment Name: At_CS6879_Shoots-Roots_P Parameter: Plant Line Value: CS6879 vs. WS
  misc_feature: MA Experiment 20000451 PARAMETER Experiment Name: At_CS6879_Shoots-Roots_P Parameter: Tissue Value: Roots
  misc_feature: MA Experiment ID: 20000452 Result: Down-regulated in Transcription
  misc_feature: MA Experiment 20000452 PARAMETER Experiment Name: At_CS6879_Shoots-Roots_P Parameter: Age (day) Value: 14
  misc_feature: MA Experiment 20000452 PARAMETER Experiment Name: At_CS6879_Shoots-Roots_P Parameter: Organism Value: A. thaliana
  misc_feature: MA Experiment 20000452 PARAMETER Experiment Name: At_CS6879_Shoots-Roots_P Parameter: Plant Line Value: CS6879 vs. WS
  misc_feature: MA Experiment 20000452 PARAMETER Experiment Name: At_CS6879_Shoots-Roots_P Parameter: Tissue Value: Shoots
  misc_feature: MA Experiment ID: 20000573 Result: Up-regulated in Transcription
  misc_feature: MA Experiment 20000573 PARAMETER Experiment Name: At_100uM_ABA_Mutants__P Parameter: Organism Value: A. thaliana
  misc_feature: MA Experiment 20000573 PARAMETER Experiment Name: At_100uM_ABA_Mutants__P Parameter: Plant Line Value: CS22 vs. Ler wt
  misc_feature: MA Experiment 20000573 PARAMETER Experiment Name: At_100uM_ABA_Mutants__P Parameter: Timepoint (hr) Value: N/A
  misc_feature: MA Experiment 20000573 PARAMETER Experiment Name: At_100uM_ABA_Mutants__P Parameter: Tissue Value: Whole Plant
  misc_feature: MA Experiment 20000573 PARAMETER Experiment Name: At_100uM_ABA_Mutants__P Parameter: Treatment Value: None
  misc_feature: MA Experiment ID: 20000574 Result: Up-regulated in Transcription
  misc_feature: MA Experiment 20000574 PARAMETER Experiment Name: At_100uM_ABA_Mutants__P Parameter: Organism Value: A. thaliana
  misc_feature: MA Experiment 20000574 PARAMETER Experiment Name: At_100uM_ABA_Mutants__P Parameter: Plant Line Value: CS23 vs. Ler wt
  misc_feature: MA Experiment 20000574 PARAMETER Experiment Name: At_100uM_ABA_Mutants__P Parameter: Timepoint (hr) Value: N/A
  misc_feature: MA Experiment 20000574 PARAMETER Experiment Name: At_100uM_ABA_Mutants__P Parameter: Tissue Value: Whole Plant
  misc_feature: MA Experiment 20000574 PARAMETER Experiment Name: At_100uM_ABA_Mutants__P Parameter: Treatment Value: None
  misc_feature: MA Experiment ID: 20000606 Result: Up-regulated in Transcription
  misc_feature: MA Experiment 20000606 PARAMETER Experiment Name: At_CS8548_Mutant_P Parameter: Age (day) Value: 14
  misc_feature: MA Experiment 20000606 PARAMETER Experiment Name: At_CS8548_Mutant_P Parameter: Plant Line Value: CS8548 vs. wt
  misc_feature: MA Experiment 20000606 PARAMETER Experiment Name: At_CS8548_Mutant_P Parameter: Tissue Value: Whole Plant
  misc_feature: MA Experiment ID: 20000794 Result: Down-regulated in Transcription
  misc_feature: MA Experiment 20000794 PARAMETER Experiment Name: At_Petals_P Parameter: Age (day) Value: 23-25 days
  misc_feature: MA Experiment 20000794 PARAMETER Experiment Name: At_Petals_P Parameter: Plant Line Value: WS
  misc_feature: MA Experiment 20000794 PARAMETER Experiment Name: At_Petals_P Parameter: Tissue Value: Petals vs. Whole plant
  misc_feature: MA Experiment ID: 20001247 Result: Up-regulated in Transcription
  misc_feature: MA Experiment 20001247 PARAMETER Experiment Name: At_Far-red-induction_P Parameter: Age (day) Value: 7
  misc_feature: MA Experiment 20001247 PARAMETER Experiment Name: At_Far-red-induction_P Parameter: Light Value: Far-red vs. White
  misc_feature: MA Experiment 20001247 PARAMETER Experiment Name: At_Far-red-induction_P Parameter: Organism Value: A. thaliana
  misc_feature: MA Experiment 20001247 PARAMETER Experiment Name: At_Far-red-induction_P Parameter: Plant Line Value: Columbia
  misc_feature: MA Experiment 20001247 PARAMETER Experiment Name: At_Far-red-induction_P Parameter: Timepoint (hr) Value: 1
  misc_feature: MA Experiment 20001247 PARAMETER Experiment Name: At_Far-red-induction_P Parameter: Tissue Value: Whole Plant
  misc_feature: MA Experiment ID: 20001248 Result: Up-regulated in Transcription
  misc_feature: MA Experiment 20001248 PARAMETER Experiment Name: At_Far-red-induction_P Parameter: Age (day) Value: 7
  misc_feature: MA Experiment 20001248 PARAMETER Experiment Name: At_Far-red-induction_P Parameter: Light Value: Far-red vs. White
  misc_feature: MA Experiment 20001248 PARAMETER Experiment Name: At_Far-red-induction_P Parameter: Organism Value: A. thaliana
  misc_feature: MA Experiment 20001248 PARAMETER Experiment Name: At_Far-red-induction_P Parameter: Plant Line Value: Columbia
  misc_feature: MA Experiment 20001248 PARAMETER Experiment Name: At_Far-red-induction_P Parameter: Timepoint (hr) Value: 4
  misc_feature: MA Experiment 20001248 PARAMETER Experiment Name: At_Far-red-induction_P Parameter: Tissue Value: Whole Plant
  misc_feature: MA Experiment ID: 20001554 Result: Down-regulated in Transcription
  misc_feature: MA Experiment 20001554 PARAMETER Experiment Name: At_Drought_Soil_Dry_P Parameter: Age (day) Value: 21
  misc_feature: MA Experiment 20001554 PARAMETER Experiment Name: At_Drought_Soil_Dry_P Parameter: Organism Value: A. thaliana
  misc_feature: MA Experiment 20001554 PARAMETER Experiment Name: At_Drought_Soil_Dry_P Parameter: Plant Line Value: WS
  misc_feature: MA Experiment 20001554 PARAMETER Experiment Name: At_Drought_Soil_Dry_P Parameter: Post Timepoint (hr) Value: None
  misc_feature: MA Experiment 20001554 PARAMETER Experiment Name: At_Drought_Soil_Dry_P Parameter: Post-Treatment Value: None
  misc_feature: MA Experiment 20001554 PARAMETER Experiment Name: At_Drought_Soil_Dry_P Parameter: Timepoint (day) Value: 7
  misc_feature: MA Experiment 20001554 PARAMETER Experiment Name: At_Drought_Soil_Dry_P Parameter: Treatment Value: Drought vs. No Drought
  misc_feature: MA Experiment ID: 20001555 Result: Down-regulated in Transcription
  misc_feature: MA Experiment 20001555 PARAMETER Experiment Name: At_Drought_Soil_Dry_P Parameter: Age (day) Value: 24
  misc_feature: MA Experiment 20001555 PARAMETER Experiment Name: At_Drought_Soil_Dry_P Parameter: Organism Value: A. thaliana
  misc_feature: MA Experiment 20001555 PARAMETER Experiment Name: At_Drought_Soil_Dry_P Parameter: Plant Line Value: WS
  misc_feature: MA Experiment 20001555 PARAMETER Experiment Name: At_Drought_Soil_Dry_P Parameter: Post Timepoint (hr) Value: None
  misc_feature: MA Experiment 20001555 PARAMETER Experiment Name: At_Drought_Soil_Dry_P Parameter: Post-Treatment Value: None
  misc_feature: MA Experiment 20001555 PARAMETER Experiment Name: At_Drought_Soil_Dry_P Parameter: Timepoint (day) Value: 10
  misc_feature: MA Experiment 20001555 PARAMETER Experiment Name: At_Drought_Soil_Dry_P Parameter: Treatment Value: Drought vs. No Drought
  misc_feature: MA Experiment ID: 20001556 Result: Down-regulated in Transcription
  misc_feature: MA Experiment 20001556 PARAMETER Experiment Name: At_Drought_Soil_Dry_P Parameter: Age (day) Value: 26
  misc_feature: MA Experiment 20001556 PARAMETER Experiment Name: At_Drought_Soil_Dry_P Parameter: Organism Value: A. thaliana
  misc_feature: MA Experiment 20001556 PARAMETER Experiment Name: At_Drought_Soil_Dry_P Parameter: Plant Line Value: WS
  misc_feature: MA Experiment 20001556 PARAMETER Experiment Name: At_Drought_Soil_Dry_P Parameter: Post Timepoint (hr) Value: None
  misc_feature: MA Experiment 20001556 PARAMETER Experiment Name: At_Drought_Soil_Dry_P Parameter: Post-Treatment Value: None
  misc_feature: MA Experiment 20001556 PARAMETER Experiment Name: At_Drought_Soil_Dry_P Parameter: Timepoint (day) Value: 12
  misc_feature: MA Experiment 20001556 PARAMETER Experiment Name: At_Drought_Soil_Dry_P Parameter: Treatment Value: Drought vs. No Drought
  misc_feature: MA Experiment ID: 20001560 Result: Down-regulated in Transcription
  misc_feature: MA Experiment 20001560 PARAMETER Experiment Name: At_Drought_Soil_Dry_P Parameter: Age (day) Value: 28
  misc_feature: MA Experiment 20001560 PARAMETER Experiment Name: At_Drought_Soil_Dry_P Parameter: Organism Value: A. thaliana
  misc_feature: MA Experiment 20001560 PARAMETER Experiment Name: At_Drought_Soil_Dry_P Parameter: Plant Line Value: WS
  misc_feature: MA Experiment 20001560 PARAMETER Experiment Name: At_Drought_Soil_Dry_P Parameter: Post Timepoint (hr) Value: None
  misc_feature: MA Experiment 20001560 PARAMETER Experiment Name: At_Drought_Soil_Dry_P Parameter: Post-Treatment Value: None
  misc_feature: MA Experiment 20001560 PARAMETER Experiment Name: At_Drought_Soil_Dry_P Parameter: Timepoint (day) Value: 14
  misc_feature: MA Experiment 20001560 PARAMETER Experiment Name: At_Drought_Soil_Dry_P Parameter: Treatment Value: Drought vs. No Drought
  misc_feature: MA Experiment ID: 20001760 Result: Down-regulated in Transcription
  misc_feature: MA Experiment 20001760 PARAMETER Experiment Name: At_50mM_NH4NO3_L-to-H_P Parameter: Timepoint (hr) Value: 2
  misc_feature: MA Experiment 20001760 PARAMETER Experiment Name: At_50mM_NH4NO3_L-to-H_P Parameter: Tissue Value: Siliques
  misc_feature: MA Experiment 20001760 PARAMETER Experiment Name: At_50mM_NH4NO3_L-to-H_P Parameter: Treatment Value: 50mM NH4NO3 vs 100mM Mannitol
  misc_feature: MA Experiment ID: 20001906 Result: Down-regulated in Transcription
  misc_feature: MA Experiment 20001906 PARAMETER Experiment Name: At_Drought_Reproduction_P Parameter: Age (day) Value: 35
  misc_feature: MA Experiment 20001906 PARAMETER Experiment Name: At_Drought_Reproduction_P Parameter: Organism Value: A. thaliana
  misc_feature: MA Experiment 20001906 PARAMETER Experiment Name: At_Drought_Reproduction_P Parameter: Plant Line Value: WS
  misc_feature: MA Experiment 20001906 PARAMETER Experiment Name: At_Drought_Reproduction_P Parameter: Timepoint (day) Value: 5
  misc_feature: MA Experiment 20001906 PARAMETER Experiment Name: At_Drought_Reproduction_P Parameter: Tissue Value: Siliques
  misc_feature: MA Experiment 20001906 PARAMETER Experiment Name: At_Drought_Reproduction_P Parameter: Treatment Value: Drought vs. No Drought
  misc_feature: MA Experiment ID: 20001907 Result: Down-regulated in Transcription
  misc_feature: MA Experiment 20001907 PARAMETER Experiment Name: At_Drought_Reproduction_P Parameter: Age (day) Value: 37
  misc_feature: MA Experiment 20001907 PARAMETER Experiment Name: At_Drought_Reproduction_P Parameter: Organism Value: A. thaliana
  misc_feature: MA Experiment 20001907 PARAMETER Experiment Name: At_Drought_Reproduction_P Parameter: Plant Line Value: WS
  misc_feature: MA Experiment 20001907 PARAMETER Experiment Name: At_Drought_Reproduction_P Parameter: Timepoint (day) Value: 7
  misc_feature: MA Experiment 20001907 PARAMETER Experiment Name: At_Drought_Reproduction_P Parameter: Tissue Value: Siliques
  misc_feature: MA Experiment 20001907 PARAMETER Experiment Name: At_Drought_Reproduction_P Parameter: Treatment Value: Drought vs. No Drought
  misc_feature: MA Experiment ID: 20001910 Result: Down-regulated in Transcription
  misc_feature: MA Experiment 20001910 PARAMETER Experiment Name: At_Drought_Reproduction_P Parameter: Age (day) Value: 37
  misc_feature: MA Experiment 20001910 PARAMETER Experiment Name: At_Drought_Reproduction_P Parameter: Organism Value: A. thaliana
  misc_feature: MA Experiment 20001910 PARAMETER Experiment Name: At_Drought_Reproduction_P Parameter: Plant Line Value: WS
  misc_feature: MA Experiment 20001910 PARAMETER Experiment Name: At_Drought_Reproduction_P Parameter: Timepoint (day) Value: 7
  misc_feature: MA Experiment 20001910 PARAMETER Experiment Name: At_Drought_Reproduction_P Parameter: Tissue Value: Flowers
  misc_feature: MA Experiment 20001910 PARAMETER Experiment Name: At_Drought_Reproduction_P Parameter: Treatment Value: Drought vs. No Drought
aaacttacagagagacaaatacctataataagccattcataatcttcttgcttcttgttcagaataatggggaatcttttctgttgcgtgcttgtgaagcaatcagatgttgcggtcaaggagagatttggcaaattccaaaaagtacttaatccaggtctccaatttgttccatgggtcatcggtgattacgtcgccggtacactgacccttcgtcttcagcaactcgatgttcagtgtgaaaccaaaacaaaggacaatgtgtttgtgacagtggttgcatccatacaatacagagtcttagctgacaaggcaagtgatgctttttacagactcagcaatccaaccacccaaatcaaagcctacgtctttgatgtgatcagagcatgtgttccaaagctgaacttggacgatgtgttcgagcagaagaatgaaattgccaaatctgtggaagaagagctagacaaagccatgactgcttatggttacgaaatccttcaaaccctaattatcgacattgagcctgatcaacaggttaaacgtgccatgaacgaaatcaacgccgcggcgaggatgagagtggcagcgagcgaaaaagcagaggctgagaaaatcattcagatcaaaagagcagagggtgaagcagagtcaaagtacctgtcgggactcggaatagctcggcagagacaagcgatcgtggacggtctgagagacagtgttctagggttcgcaggaaacgtgccagggacgtcagcgaaggatgtgttggacatggtgatgatgactcagtactttgacacaatgagagatatcggagcaacttctaaatcctctgcggtgtttatccctcacggtccaggcgccgtctctgacgtggcagcgcagattcgaaatggattattacaggccaacaatgcctcctaatcactcaagtcaaattgtcttggtcgtctctttatatatttttgtatcttcttattaaaaaggtaaattttacttttaatataatggtgtgcttattgtgatttgtcattatgtttgtacctatctcttttgtgagttgtgtgatagatatactttgtattttttcttaaaagtcaatataaatttctgtttgcg

SEQ ID NO: 39563 - protein, 285 aa, Arabidopsis thaliana
  peptide (1)..(285): Ceres Seq. ID no. 12328120
  misc_feature (1)..(282): Homolog of NCBI NO: 13194676 NR Description: hypersensitivity-induced response-like protein
  misc_feature (1)..(280): Homolog of NCBI NO: 23345042 NR Description: hypersensitive-induced reaction protein 1
  misc_feature (1)..(281): Homolog of NCBI NO: 14150732 NR Description: hypersensitive-induced response protein [Oryza
  misc_feature (1)..(282): Homolog of NCBI NO: 7716466 NR Description: hypersensitive-induced response protein [Zea mays]
  misc_feature (1)..(282): Homolog of NCBI NO: 7716468 NR Description: hypersensitive-induced response protein [Zea mays]
  misc_feature (1)..(285): Homolog of NCBI NO: 23345046 NR Description: hypersensitive-induced reaction protein 3
  misc_feature (1)..(285): Homolog of NCBI NO: 7716470 NR Description: hypersensitive-induced response protein [Zea mays]
  misc_feature (1)..(282): Homolog of NCBI NO: 37535170 NR Description: putative hypersensitive-induced response protein
  misc_feature (1)..(285): Homolog of NCBI NO: 15241939 NR Description: putative protein
  misc_feature (1)..(285): Homolog of NCBI NO: 18395770 NR Description: expressed protein
MGNLFCCVLVKQSDVAVKERFGKFQKVLNPGLQFVPWVIGDYVAGTLTLRLQQLDVQCETKTKDNVFVTVVASIQYRVLADKASDAFYRLSNPTTQIKAYVFDVIRACVPKLNLDDVFEQKNEIAKSVEEELDKAMTAYGYEILQTLIIDIEPDQQVKRAMNEINAAARMRVAASEKAEAEKIIQIKRAEGEAESKYLSGLGIARQRQAIVDGLRDSVLGFAGNVPGTSAKDVLDMVMMTQYFDTMRDIGATSKSSAVFIPHGPGAVSDVAAQIRNGLLQANNAS

SEQ ID NO: 39564 - protein, 150 aa, Arabidopsis thaliana
  peptide (1)..(150): Ceres Seq. ID no. 12328121
  misc_feature (1)..(147): Homolog of NCBI NO: 13194676 NR Description: hypersensitivity-induced response-like protein
  misc_feature (1)..(145): Homolog of NCBI NO: 23345042 NR Description: hypersensitive-induced reaction protein 1
  misc_feature (1)..(146): Homolog of NCBI NO: 14150732 NR Description: hypersensitive-induced response protein [Oryza
  misc_feature (1)..(147): Homolog of NCBI NO: 7716466 NR Description: hypersensitive-induced response protein [Zea mays]
  misc_feature (1)..(147): Homolog of NCBI NO: 7716468 NR Description: hypersensitive-induced response protein [Zea mays]
  misc_feature (1)..(150): Homolog of NCBI NO: 23345046 NR Description: hypersensitive-induced reaction protein 3
  misc_feature (1)..(150): Homolog of NCBI NO: 7716470 NR Description: hypersensitive-induced response protein [Zea mays]
  misc_feature (1)..(147): Homolog of NCBI NO: 37535170 NR Description: putative hypersensitive-induced response protein
  misc_feature (1)..(150): Homolog of NCBI NO: 15241939 NR Description: putative protein
  misc_feature (1)..(150): Homolog of NCBI NO: 18395770 NR Description: expressed protein
MTAYGYEILQTLIIDIEPDQQVKRAMNEINAAARMRVAASEKAEAEKIIQIKRAEGEAESKYLSGLGIARQRQAIVDGLRDSVLGFAGNVPGTSAKDVLDMVMMTQYFDTMRDIGATSKSSAVFIPHGPGAVSDVAAQIRNGLLQANNAS

SEQ ID NO: 39565 - DNA, 1391 bp, Arabidopsis thaliana
  misc_feature (1)..(1391): Ceres Seq. ID no. 12348403
  misc_feature: MA Experiment ID: 108462 Result: Down-regulated in Transcription
  misc_feature: MA Experiment 108462 PARAMETER Experiment Name: At_Germinating_Seeds_cDNA_P Parameter: Age (day) Value: 2 vs. 0
  misc_feature: MA Experiment 108462 PARAMETER Experiment Name: At_Germinating_Seeds_cDNA_P Parameter: Tissue Value: Germinating Seeds
  misc_feature: MA Experiment ID: 108463 Result: Down-regulated in Transcription
  misc_feature: MA Experiment 108463 PARAMETER Experiment Name: At_Germinating_Seeds_cDNA_P Parameter: Age (day) Value: 3 vs. 0
  misc_feature: MA Experiment 108463 PARAMETER Experiment Name: At_Germinating_Seeds_cDNA_P Parameter: Tissue Value: Germinating Seeds
  misc_feature: MA Experiment ID: 108464 Result: Down-regulated in Transcription
  misc_feature: MA Experiment 108464 PARAMETER Experiment Name: At_Germinating_Seeds_cDNA_P Parameter: Age (day) Value: 4 vs. 0
  misc_feature: MA Experiment 108464 PARAMETER Experiment Name: At_Germinating_Seeds_cDNA_P Parameter: Tissue Value: Germinating Seeds
  misc_feature: MA Experiment ID: 20000071 Result: Up-regulated in Transcription
  misc_feature: MA Experiment 20000071 PARAMETER Experiment Name: At_100uM_ABA_Mutants_cDNA_P Parameter: Plant Line Value: CS8104
  misc_feature: MA Experiment 20000071 PARAMETER Experiment Name: At_100uM_ABA_Mutants_cDNA_P Parameter: Timepoint (hr) Value: 6
  misc_feature: MA Experiment 20000071 PARAMETER Experiment Name: At_100uM_ABA_Mutants_cDNA_P Parameter: Tissue Value: Aerial
  misc_feature: MA Experiment 20000071 PARAMETER Experiment Name: At_100uM_ABA_Mutants_cDNA_P Parameter: Treatment Value: 100uM ABA vs. No Treatment
  misc_feature: MA Experiment ID: 20000089 Result: Up-regulated in Transcription
  misc_feature: MA Experiment ID: 20000111 Result: Down-regulated in Transcription
  misc_feature: MA Experiment 20000111 PARAMETER Experiment Name: At_42deg_Heat_cDNA_P Parameter: Temperature (deg C) Value: 42 vs. 22
  misc_feature: MA Experiment 20000111 PARAMETER Experiment Name: At_42deg_Heat_cDNA_P Parameter: Timepoint (hr) Value: 6
  misc_feature: MA Experiment 20000111 PARAMETER Experiment Name: At_42deg_Heat_cDNA_P Parameter: Tissue Value: Aerial
  misc_feature: MA Experiment ID: 20000113 Result: Down-regulated in Transcription
  misc_feature: MA Experiment 20000113 PARAMETER Experiment Name: At_42deg_Heat_cDNA_P Parameter: Temperature (deg C) Value: 42 vs. 22
  misc_feature: MA Experiment 20000113 PARAMETER Experiment Name: At_42deg_Heat_cDNA_P Parameter: Timepoint (hr) Value: 8
  misc_feature: MA Experiment 20000113 PARAMETER Experiment Name: At_42deg_Heat_cDNA_P Parameter: Tissue Value: Aerial
  misc_feature: MA Experiment ID: 20000173 Result: Down-regulated in Transcription
  misc_feature: MA Experiment 20000173 PARAMETER Experiment Name: At_42deg_Heat_P Parameter: Age (day) Value: 14
  misc_feature: MA Experiment 20000173 PARAMETER Experiment Name: At_42deg_Heat_P Parameter: Organism Value: A. thaliana
  misc_feature: MA Experiment 20000173 PARAMETER Experiment Name: At_42deg_Heat_P Parameter: Plant Line Value: WS
  misc_feature: MA Experiment 20000173 PARAMETER Experiment Name: At_42deg_Heat_P Parameter: Temperature (deg C) Value: 42 vs. 22
  misc_feature: MA Experiment 20000173 PARAMETER Experiment Name: At_42deg_Heat_P Parameter: Timepoint (hr) Value: 6
  misc_feature: MA Experiment 20000173 PARAMETER Experiment Name: At_42deg_Heat_P Parameter: Tissue Value: Aerial
  misc_feature: MA Experiment ID: 20000185 Result: Down-regulated in Transcription
  misc_feature: MA Experiment 20000185 PARAMETER Experiment Name: At_Roots__P Parameter: Age (day) Value: 7 vs. 21
  misc_feature: MA Experiment 20000185 PARAMETER Experiment Name: At_Roots__P Parameter: Organism Value: A. thaliana
  misc_feature: MA Experiment 20000185 PARAMETER Experiment Name: At_Roots__P Parameter: Tissue Value: Roots vs. Whole Plant
aaaaacagcctggtaagcttcttcgttttcccttctagagaccattgattatcataattgttctacaaactttagctttttcattagtctctcgatctacttgatcgttgtcacttagcaaccctaatttctgggagaatcatccctgcagtattacccatcccgatgagtgttaaggttggatgatagaagacattttttgaccttctcttacaatgactacacgaagaaatggcgtttccaggcatcagcggtttgagagttttcgcggtgaaggaccaaattggatcttaattgctgggggtgctttgttgagtacattgtccattcgttttggctacaaattaaagcagtctattgactccaaacctcctcattccaatgccactggtggattaaaacctaatggaacaaccgacagaggaagatttaagggctgctgcttgcattctaatgcatcaccctgtgaaaggaataatgattgttgctttcactgcactcccggaactgagaatggggaaggaaatcatgctacaaatgagcaaatggcagagtccagtacttctctgcctcttgtgacagttcctgcttcatcatatagcaaagagagtgcagtcgtatggggatcttctcctgaccacctggaagtgccgatgaaagcataccatcaacattcgacctgctcagatactccttgcgtatctgaatccggctcagacatcttcagcaagcgagaagtaatacagaaactgaggcaacagctgaagagacgtgacgacatgatagttgaaatgcaggaacagattctagagctgcaaaactcgctaaacgcccagatgggacactctagccatatccaaacacagctagacgcaacaaacagggacctgtttgaatcagaaagagaagtccagagactgagaaaggcaatcgctgatcactgcgtgggacacacaggtagcaatggttggagtggcgatgtgaacagcgaaaacaactacgagtcaccagaaaatggaataagggatggagaaagaatagagatgttgagaaaagaagtgggtgagcttaaagaagtgatagatgggaaagagtatctacttaggagctataaggagcagaaaacagagcttttgcagaaggtaaaagagttgcagcagagactggactcgcagctcccaaacattttgtaggtgaagaaggttaggcattgtgcattcttaccactctcttttgtttccccgagtaaaaaatatgaatctttgttcaaaaatatctcaatttctccggggaaacttatcaactgactacattgttttgggtgtcaattatgattttatccaaattgtttttttctcttggtgaagtggatattcgaaagttgcaaaccc

SEQ ID NO: 39566 - protein, 325 aa, Arabidopsis thaliana
  peptide (1)..(325): Ceres Seq. ID no. 12348404
  misc_feature (1)..(62): Homolog of NCBI NO: 7487505 NR Description: hypothetical protein T29A15.100 - Arabidopsis
  misc_feature (98)..(325): Homolog of NCBI NO: 7487505 NR Description: hypothetical protein T29A15.100 - Arabidopsis
  misc_feature (1)..(325): Homolog of NCBI NO: 30687652 NR Description: expressed protein [Arabidopsis thaliana]
  misc_feature (1)..(62): Homolog of NCBI NO: 7487506 NR Description: hypothetical protein T29A15.110 - Arabidopsis
  misc_feature (98)..(325): Homolog of NCBI NO: 7487506 NR Description: hypothetical protein T29A15.110 - Arabidopsis
  misc_feature (1)..(325): Homolog of NCBI NO: 18417030 NR Description: expressed protein
  misc_feature (1)..(325): Homolog of NCBI NO: 21536672 NR Description: unknown [Arabidopsis thaliana]
MTTRRNGVSRHQRFESFRGEGPNWILIAGGALLSTLSIRFGYKLKQSIDSKPPHSNATGGLKPNGTTDRGRFKGCCLHSNASPCERNNDCCFHCTPGTENGEGNHATNEQMAESSTSLPLVTVPASSYSKESAVVWGSSPDHLEVPMKAYHQHSTCSDTPCVSESGSDIFSKREVIQKLRQQLKRRDDMIVEMQEQILELQNSLNAQMGHSSHIQTQLDATNRDLFESEREVQRLRKAIADHCVGHTGSNGWSGDVNSENNYESPENGIRDGERIEMLRKEVGELKEVIDGKEYLLRSYKEQKTELLQKVKELQQRLDSQLPNIL

SEQ ID NO: 39567 - protein, 215 aa, Arabidopsis thaliana
  peptide (1)..(215): Ceres Seq. ID no. 12348405
  misc_feature (1)..(215): Homolog of NCBI NO: 7487505 NR Description: hypothetical protein T29A15.100 - Arabidopsis
  misc_feature (1)..(215): Homolog of NCBI NO: 30687652 NR Description: expressed protein [Arabidopsis thaliana]
  misc_feature (1)..(215): Homolog of NCBI NO: 7487506 NR Description: hypothetical protein T29A15.110 - Arabidopsis
  misc_feature (1)..(215): Homolog of NCBI NO: 18417030 NR Description: expressed protein
  misc_feature (1)..(215): Homolog of NCBI NO: 21536672 NR Description: unknown [Arabidopsis thaliana]
MAESSTSLPLVTVPASSYSKESAVVWGSSPDHLEVPMKAYHQHSTCSDTPCVSESGSDIFSKREVIQKLRQQLKRRDDMIVEMQEQILELQNSLNAQMGHSSHIQTQLDATNRDLFESEREVQRLRKAIADHCVGHTGSNGWSGDVNSENNYESPENGIRDGERIEMLRKEVGELKEVIDGKEYLLRSYKEQKTELLQKVKELQQRLDSQLPNIL

SEQ ID NO: 39568 - protein, 179 aa, Arabidopsis thaliana
  peptide (1)..(179): Ceres Seq. ID no. 12348406
  misc_feature (1)..(179): Homolog of NCBI NO: 7487505 NR Description: hypothetical protein T29A15.100 - Arabidopsis
  misc_feature (1)..(179): Homolog of NCBI NO: 30687652 NR Description: expressed protein [Arabidopsis thaliana]
  misc_feature (1)..(179): Homolog of NCBI NO: 7487506 NR Description: hypothetical protein T29A15.110 - Arabidopsis
  misc_feature (1)..(179): Homolog of NCBI NO: 18417030 NR Description: expressed protein
  misc_feature (1)..(179): Homolog of NCBI NO: 21536672 NR Description: unknown [Arabidopsis thaliana]
MKAYHQHSTCSDTPCVSESGSDIFSKREVIQKLRQQLKRRDDMIVEMQEQILELQNSLNAQMGHSSHIQTQLDATNRDLFESEREVQRLRKAIADHCVGHTGSNGWSGDVNSENNYESPENGIRDGERIEMLRKEVGELKEVIDGKEYLLRSYKEQKTELLQKVKELQQRLDSQLPNIL

SEQ ID NO: 39569 - DNA, 1128 bp, Arabidopsis thaliana
  misc_feature (1)..(1128): Ceres Seq. ID no. 13580354
  misc_feature: MA Experiment ID: 108435 Result: Down-regulated in Transcription
  misc_feature: MA Experiment 108435 PARAMETER Experiment Name: At_stm_Mutants_cDNA_P Parameter: Plant Line Value: wt Landsburg vs stm
  misc_feature: MA Experiment 108435 PARAMETER Experiment Name: At_stm_Mutants_cDNA_P Parameter: Tissue Value: Shoot Apical Meristem Region
  misc_feature: MA Experiment ID: 108463 Result: Up-regulated in Transcription
  misc_feature: MA Experiment 108463 PARAMETER Experiment Name: At_Germinating_Seeds_cDNA_P Parameter: Age (day) Value: 3 vs. 0
  misc_feature: MA Experiment 108463 PARAMETER Experiment Name: At_Germinating_Seeds_cDNA_P Parameter: Tissue Value: Germinating Seeds
  misc_feature: MA Experiment ID: 108464 Result: Up-regulated in Transcription
  misc_feature: MA Experiment 108464 PARAMETER Experiment Name: At_Germinating_Seeds_cDNA_P Parameter: Age (day) Value: 4 vs. 0
  misc_feature: MA Experiment 108464 PARAMETER Experiment Name: At_Germinating_Seeds_cDNA_P Parameter: Tissue Value: Germinating Seeds
  misc_feature: MA Experiment ID: 108488 Result: Up-regulated in Transcription
  misc_feature: MA Experiment ID: 108573 Result: Down-regulated in Transcription
  misc_feature: MA Experiment 108573 PARAMETER Experiment Name: At_Drought_cDNA_P Parameter: Timepoint (hr) Value: 6
  misc_feature: MA Experiment 108573 PARAMETER Experiment Name: At_Drought_cDNA_P Parameter: Tissue Value: Aerial
  misc_feature: MA Experiment 108573 PARAMETER Experiment Name: At_Drought_cDNA_P Parameter: Treatment Value: Drought vs. No Drought
  misc_feature: MA Experiment ID: 108607 Result: Down-regulated in Transcription
  misc_feature: MA Experiment 108607 PARAMETER Experiment Name: At_100uM_ABA_cDNA_P Parameter: Timepoint (hr) Value: 4
  misc_feature: MA Experiment 108607 PARAMETER Experiment Name: At_100uM_ABA_cDNA_P Parameter: Tissue Value: Aerial
  misc_feature: MA Experiment 108607 PARAMETER Experiment Name: At_100uM_ABA_cDNA_P Parameter: Treatment Value: 100uM ABA vs. No Treatment
  misc_feature: MA Experiment ID: 108667 Result: Down-regulated in Transcription
  misc_feature: MA Experiment 108667 PARAMETER Experiment Name: At_2mM_SA_cDNA_P Parameter: Plant Line Value: WS
  misc_feature: MA Experiment 108667 PARAMETER Experiment Name: At_2mM_SA_cDNA_P Parameter: Timepoint (hr) Value: 1
  misc_feature: MA Experiment 108667 PARAMETER Experiment Name: At_2mM_SA_cDNA_P Parameter: Treatment Value: 2mM SA vs. No Treatment
  misc_feature: MA Experiment ID: 20000068 Result: Down-regulated in Transcription
  misc_feature: MA Experiment ID: 20000069 Result: Down-regulated in Transcription
  misc_feature: MA Experiment 20000069 PARAMETER Experiment Name: At_100uM_ABA_Mutants_cDNA_P Parameter: Plant Line Value: CS23
  misc_feature: MA Experiment 20000069 PARAMETER Experiment Name: At_100uM_ABA_Mutants_cDNA_P Parameter: Timepoint (hr) Value: 6
  misc_feature: MA Experiment 20000069 PARAMETER Experiment Name: At_100uM_ABA_Mutants_cDNA_P Parameter: Tissue Value: Aerial
  misc_feature: MA Experiment 20000069 PARAMETER Experiment Name: At_100uM_ABA_Mutants_cDNA_P Parameter: Treatment Value: 100uM ABA vs. No Treatment
  misc_feature: MA Experiment ID: 20000070 Result: Down-regulated in Transcription
  misc_feature: MA Experiment 20000070 PARAMETER Experiment Name: At_100uM_ABA_Mutants_cDNA_P Parameter: Plant Line Value: CS24
  misc_feature: MA Experiment 20000070 PARAMETER Experiment Name: At_100uM_ABA_Mutants_cDNA_P Parameter: Timepoint (hr) Value: 6
  misc_feature: MA Experiment 20000070 PARAMETER Experiment Name: At_100uM_ABA_Mutants_cDNA_P Parameter: Tissue Value: Aerial
  misc_feature: MA Experiment 20000070 PARAMETER Experiment Name: At_100uM_ABA_Mutants_cDNA_P Parameter: Treatment Value: 100uM ABA vs. No Treatment
  misc_feature: MA Experiment ID: 20000071 Result: Down-regulated in Transcription
  misc_feature: MA Experiment 20000071 PARAMETER Experiment Name: At_100uM_ABA_Mutants_cDNA_P Parameter: Plant Line Value: CS8104
  misc_feature: MA Experiment 20000071 PARAMETER Experiment Name: At_100uM_ABA_Mutants_cDNA_P Parameter: Timepoint (hr) Value: 6
  misc_feature: MA Experiment 20000071 PARAMETER Experiment Name: At_100uM_ABA_Mutants_cDNA_P Parameter: Tissue Value: Aerial
  misc_feature: MA Experiment 20000071 PARAMETER Experiment Name: At_100uM_ABA_Mutants_cDNA_P Parameter: Treatment Value: 100uM ABA vs. No Treatment
  misc_feature: MA Experiment ID: 20000072 Result: Down-regulated in Transcription
  misc_feature: MA Experiment 20000072 PARAMETER Experiment Name: At_100uM_ABA_Mutants_cDNA_P Parameter: Plant Line Value: CS8105
  misc_feature: MA Experiment 20000072 PARAMETER Experiment Name: At_100uM_ABA_Mutants_cDNA_P Parameter: Timepoint (hr) Value: 6
  misc_feature: MA Experiment 20000072 PARAMETER Experiment Name: At_100uM_ABA_Mutants_cDNA_P Parameter: Tissue Value: Aerial
  misc_feature: MA Experiment 20000072 PARAMETER Experiment Name: At_100uM_ABA_Mutants_cDNA_P Parameter: Treatment Value: 100uM ABA vs. No Treatment
  misc_feature: MA Experiment ID: 20000086 Result: Down-regulated in Transcription
  misc_feature: MA Experiment 20000086 PARAMETER Experiment Name: At_100uM_ABA_Mutants_cDNA_P Parameter: Plant Line Value: CS22
  misc_feature: MA Experiment 20000086 PARAMETER Experiment Name: At_100uM_ABA_Mutants_cDNA_P Parameter: Timepoint (hr) Value: 6
  misc_feature: MA Experiment 20000086 PARAMETER Experiment Name: At_100uM_ABA_Mutants_cDNA_P Parameter: Tissue Value: Aerial
  misc_feature: MA Experiment 20000086 PARAMETER Experiment Name: At_100uM_ABA_Mutants_cDNA_P Parameter: Treatment Value: 100uM ABA vs. No Treatment
  misc_feature: MA Experiment ID: 20000087 Result: Down-regulated in Transcription
  misc_feature: MA Experiment 20000087 PARAMETER Experiment Name: At_100uM_ABA_Mutants_cDNA_P Parameter: Plant Line Value: WS
  misc_feature: MA Experiment 20000087 PARAMETER Experiment Name: At_100uM_ABA_Mutants_cDNA_P Parameter: Timepoint (hr) Value: 6
  misc_feature: MA Experiment 20000087 PARAMETER Experiment Name: At_100uM_ABA_Mutants_cDNA_P Parameter: Tissue Value: Aerial
  misc_feature: MA Experiment 20000087 PARAMETER Experiment Name: At_100uM_ABA_Mutants_cDNA_P Parameter: Treatment Value: 100uM ABA vs. No Treatment
  misc_feature: MA Experiment ID: 20000088 Result: Down-regulated in Transcription
  misc_feature: MA Experiment 20000088 PARAMETER Experiment Name: At_100uM_ABA_Mutants_cDNA_P Parameter: Plant Line Value: Landsberg
  misc_feature: MA Experiment 20000088 PARAMETER Experiment Name: At_100uM_ABA_Mutants_cDNA_P Parameter: Timepoint (hr) Value: 6
  misc_feature: MA Experiment 20000088 PARAMETER Experiment Name: At_100uM_ABA_Mutants_cDNA_P Parameter: Tissue Value: Aerial
  misc_feature: MA Experiment 20000088 PARAMETER Experiment Name: At_100uM_ABA_Mutants_cDNA_P Parameter: Treatment Value: 100uM ABA vs. No Treatment
atcggtacgacgttctttttggttctttcttgtttctccattcatccataagaaaagataatgtagttctgcttgttcgtccattttctgattttggtatcagtttttgtatttgtgtatagtaaatctgaaggagttttccaaagacaaaccaacatggaagaccgcgtcttgatcaagaacgatgtcactgaattgataggtaacacaccaatggtgtatctaaataaaattgtggatggttgtgtggctcgtattgctgccaagcttgagatgatggagccttgctctagcatcaaagatagaatcgcatatagtatgatcaaagatgctgaagacaaaggattgattactccgggaaagagtacattgattgaggcaacgggtggtaacaccgggattggtttagccagcatcggggcttcaagaggttataaagtgatccttttgatgccttcaacaatgagtttagaaaggagaatcattctaagagcattaggtgcagaggttcatctcactgacattagcataggcattaaaggacagttggagaaagctaaagagatattaagcaaaactcccggtggttacataccacaccagtttattaatcctgaaaatccagagattcattatagaaccacgggtccggagatttggagagattcagcagggaaagtagatatcttagtcgccggtgttggaactggtggaacggttactggaacagggaagtttcttaaagaaaagaacaaagatattaaggtttgtgtggtggaaccttccgaaagtgcggtactcagcggaggaaaaccaggtccacatttgatccaaggaataggctctggtgaaattccagccaatttggacttaagcattgttgatgaaatcattcaagtgactggtgaggaagctattgaaacaaccaagcttcttgctatcaaagaaggattattggttggaatatcctctggagcctcagctgcggctgcgttaaaggttgcaaagcggcctgaaaacgtagggaaactcattgtggttatttttcctagtggaggagaacgttatttatcgactgaattgttcgagtcagtcagatatgaagctgagaatttgccagttgaatga

SEQ ID NO: 39570 - protein, 323 aa, Arabidopsis thaliana
  peptide (1)..(323): Ceres Seq. ID no. 13580355
  misc_feature (11)..(300): Pfam Name: Pyridoxal-phosphate dependent enzyme Pfam Description: Pyridoxal-phosphate dependent enzyme
  misc_feature (3)..(323): Homolog of NCBI NO: 12081917 NR Description: cytosolic cysteine synthase [Solanum tuberosum]
  misc_feature (7)..(323): Homolog of NCBI NO: 2493895 NR Description: Cysteine synthase (O-acetylserine sulfhydrylase)
  misc_feature (7)..(323): Homolog of NCBI NO: 38350579 NR Description: cysteine synthase [Nicotiana plumbaginifolia]
  misc_feature (2)..(323): Homolog of NCBI NO: 18397061 NR Description: cysteine synthase (O-acetylserine
  misc_feature (2)..(323): Homolog of NCBI NO: 12322845 NR Description: putative cysteine synthase; 39489-37437
  misc_feature (2)..(323): Homolog of NCBI NO: 21593263 NR Description: putative cysteine synthase [Arabidopsis thaliana]
  misc_feature (1)..(323): Homolog of NCBI NO: 2245144 NR Description: O-acetylserine(thiol) lyase [Brassica juncea]
  misc_feature (1)..(323): Homolog of NCBI NO: 21553635 NR Description: cysteine synthase [Arabidopsis thaliana]
  misc_feature (1)..(323): Homolog of NCBI NO: 15241111 NR Description: cysteine synthase (O-acetylserine
  misc_feature (1)..(323): Homolog of NCBI NO: 15241112 NR Description: cysteine synthase (O-acetylserine
MEDRVLIKNDVTELIGNTPMVYLNKIVDGCVARIAAKLEMMEPCSSIKDRIAYSMIKDAEDKGLITPGKSTLIEATGGNTGIGLASIGASRGYKVILLMPSTMSLERRIILRALGAEVHLTDISIGIKGQLEKAKEILSKTPGGYIPHQFINPENPEIHYRTTGPEIWRDSAGKVDILVAGVGTGGTVTGTGKFLKEKNKDIKVCVVEPSESAVLSGGKPGPHLIQGIGSGEIPANLDLSIVDEIIQVTGEEAIETTKLLAIKEGLLVGISSGASAAAALKVAKRPENVGKLIVVIFPSGGERYLSTELFESVRYEAENLPVE

SEQ ID NO: 39571 - protein, 304 aa, Arabidopsis thaliana
  peptide (1)..(304): Ceres Seq. ID no. 13580356
  misc_feature (1)..(281): Pfam Name: Pyridoxal-phosphate dependent enzyme Pfam Description: Pyridoxal-phosphate dependent enzyme
  misc_feature (1)..(304): Homolog of NCBI NO: 12081917 NR Description: cytosolic cysteine synthase [Solanum tuberosum]
  misc_feature (1)..(304): Homolog of NCBI NO: 2493895 NR Description: Cysteine synthase (O-acetylserine sulfhydrylase)
  misc_feature (1)..(304): Homolog of NCBI NO: 38350579 NR Description: cysteine synthase [Nicotiana plumbaginifolia]
  misc_feature (1)..(304): Homolog of NCBI NO: 18397061 NR Description: cysteine synthase (O-acetylserine
  misc_feature (1)..(304): Homolog of NCBI NO: 12322845 NR Description: putative cysteine synthase; 39489-37437
  misc_feature (1)..(304): Homolog of NCBI NO: 21593263 NR Description: putative cysteine synthase [Arabidopsis thaliana]
  misc_feature (1)..(304): Homolog of NCBI NO: 2245144 NR Description: O-acetylserine(thiol) lyase [Brassica juncea]
  misc_feature (1)..(304): Homolog of NCBI NO: 21553635 NR Description: cysteine synthase [Arabidopsis thaliana]
  misc_feature (1)..(304): Homolog of NCBI NO: 15241111 NR Description: cysteine synthase (O-acetylserine
  misc_feature (1)..(304): Homolog of NCBI NO: 15241112 NR Description: cysteine synthase (O-acetylserine
MVYLNKIVDGCVARIAAKLEMMEPCSSIKDRIAYSMIKDAEDKGLITPGKSTLIEATGGNTGIGLASIGASRGYKVILLMPSTMSLERRIILRALGAEVHLTDISIGIKGQLEKAKEILSKTPGGYIPHQFINPENPEIHYRTTGPEIWRDSAGKVDILVAGVGTGGTVTGTGKFLKEKNKDIKVCVVEPSESAVLSGGKPGPHLIQGIGSGEIPANLDLSIVDEIIQVTGEEAIETTKLLAIKEGLLVGISSGASAAAALKVAKRPENVGKLIVVIFPSGGERYLSTELFESVRYEAENLPVE

SEQ ID NO: 39572 - protein, 284 aa, Arabidopsis thaliana
  peptide (1)..(284): Ceres Seq. ID no. 13580357
  misc_feature (1)..(261): Pfam Name: Pyridoxal-phosphate dependent enzyme Pfam Description: Pyridoxal-phosphate dependent enzyme
  misc_feature (1)..(284): Homolog of NCBI NO: 12081917 NR Description: cytosolic cysteine synthase [Solanum tuberosum]
  misc_feature (1)..(284): Homolog of NCBI NO: 2493895 NR Description: Cysteine synthase (O-acetylserine sulfhydrylase)
  misc_feature (1)..(284): Homolog of NCBI NO: 38350579 NR Description: cysteine synthase [Nicotiana plumbaginifolia]
  misc_feature (1)..(284): Homolog of NCBI NO: 18397061 NR Description: cysteine synthase (O-acetylserine
  misc_feature (1)..(284): Homolog of NCBI NO: 12322845 NR Description: putative cysteine synthase; 39489-37437
  misc_feature (1)..(284): Homolog of NCBI NO: 21593263 NR Description: putative cysteine synthase [Arabidopsis thaliana]
  misc_feature (1)..(284): Homolog of NCBI NO: 2245144 NR Description: O-acetylserine(thiol) lyase [Brassica juncea]
  misc_feature (1)..(284): Homolog of NCBI NO: 21553635 NR Description: cysteine synthase [Arabidopsis thaliana]
  misc_feature (1)..(284): Homolog of NCBI NO: 15241111 NR Description: cysteine synthase (O-acetylserine
  misc_feature (1)..(284): Homolog of NCBI NO: 15241112 NR Description: cysteine synthase (O-acetylserine
MMEPCSSIKDRIAYSMIKDAEDKGLITPGKSTLIEATGGNTGIGLASIGASRGYKVILLMPSTMSLERRIILRALGAEVHLTDISIGIKGQLEKAKEILSKTPGGYIPHQFINPENPEIHYRTTGPEIWRDSAGKVDILVAGVGTGGTVTGTGKFLKEKNKDIKVCVVEPSESAVLSGGKPGPHLIQGIGSGEIPANLDLSIVDEIIQVTGEEAIETTKLLAIKEGLLVGISSGASAAAALKVAKRPENVGKLIVVIFPSGGERYLSTELFESVRYEAENLPVE

SEQ ID NO: 39573 - DNA, 1071 bp, Arabidopsis thaliana
  misc_feature (1)..(1071): Ceres Seq. ID no. 12394412
  misc_feature: MA Experiment ID: 108595 Result: Down-regulated in Transcription
  misc_feature: MA Experiment 108595 PARAMETER Experiment Name: At_Ler-pi_Ovule_cDNA_P Parameter: Plant Line Value: null
  misc_feature: MA Experiment ID: 20000179 Result: Up-regulated in Transcription
  misc_feature: MA Experiment 20000179 PARAMETER Experiment Name: At_Germinating_Seeds_P Parameter: Age (hr) Value: 6 vs. 0
  misc_feature: MA Experiment 20000179 PARAMETER Experiment Name: At_Germinating_Seeds_P Parameter: Tissue Value: Germinating Seeds
  misc_feature: MA Experiment ID: 20000180 Result: Up-regulated in Transcription
  misc_feature: MA Experiment 20000180 PARAMETER Experiment Name: At_Germinating_Seeds_P Parameter: Age (hr) Value: 24 vs. 0
  misc_feature: MA Experiment 20000180 PARAMETER Experiment Name: At_Germinating_Seeds_P Parameter: Tissue Value: Germinating Seeds
attgtgttagtggtaatcaaatccggtgaaaatggagcggagccgagtgaccagagaagcaccgaccggaaccaggatcctgcttgcttcactctctgcgatggttgcagagtcagttacgtttccgattgatctcacaaagactagaatgcagctccatggttcgggatccgcttctggtgcgcatcggattggcgctttcggagtcgtatcggagattgcgagaaaggaaggagtgattggtctctacaaaggtctatctccggcgattatcagacacctgttctacacgcctatcagaatcattggatacgagaatttgaaaggactcatcgtcagatctgaaactaacaatagcgagtctcttcctctcgccacaaaggctctcgtcggaggattttctggtgttatagctcaggtagtggctagtccagctgatttggtcaaagtgagaatgcaagcagatggtagattggtgagccaaggcctgaaaccgaggtactcgggaccaatcgaggcttttaccaaaatcctacaatcagaaggagtaaaagggttatggaaaggtgttcttccaaacatccagagagcatttctagtgaatatgggagaactagcttgctatgatcacgccaaacactttgtcatcgataagaagattgctgaggataacatttttgcgcacactcttgcttctataatgtccggtcttgcttcgacaagtttgagttgtccagctgatgtggtgaagacgaggatgatgaaccagggtgaaaatgctgtgtacagaaattcttacgactgtttggtgaagacggttaagtttgaaggaataagagctttgtggaaaggtttcttcccgacatgggcaaggcttggaccgtggcagttcgtgttttgggtctcctatgagaagtttagactgctggcaggaatctcttccttctagacctgagaaactggaaaagcaaatttgagatttgtgttctttagttcttacttgttagttgttacacattttgtaagaaccttgagaagtagcatcagtttctgattaacgcgagaagagtt

SEQ ID NO: 39574 - protein, 305 aa, Arabidopsis thaliana
  peptide (1)..(305): Ceres Seq. ID no. 12394413
  misc_feature (1)..(299): Homolog of NCBI NO: 38969885 NR Description: Unknown (protein for IMAGE:5308614) [Silurana
  misc_feature (14)..(305): Homolog of NCBI NO: 39594577 NR Description: Hypothetical protein CBG19253 [Caenorhabditis
  misc_feature (18)..(305): Homolog of NCBI NO: 7505416 NR Description: hypothetical protein K07B1.3 - Caenorhabditis
  misc_feature (14)..(305): Homolog of NCBI NO: 17562272 NR Description: Uncoupling protein [Caenorhabditis elegans]
  misc_feature (17)..(305): Homolog of NCBI NO: 18860079 NR Description: CG6492-PA [Drosophila melanogaster]
  misc_feature (1)..(129): Homolog of NCBI NO: 26450423 NR Description: putative mitochondrial uncoupling protein
  misc_feature (6)..(305): Homolog of NCBI NO: 21312006 NR Description: RIKEN cDNA 3632410G24 [Mus musculus]
  misc_feature (6)..(305): Homolog of NCBI NO: 16758260 NR Description: uncoupling protein UCP-4 [Rattus norvegicus]
  misc_feature (12)..(305): Homolog of NCBI NO: 38344836 NR Description: OSJNBa0064H22.17 [Oryza sativa (japonica
  misc_feature (1)..(305): Homolog of NCBI NO: 15223098 NR Description: mitochondrial carrier protein family
MERSRVTREAPTGTRILLASLSAMVAESVTFPIDLTKTRMQLHGSGSASGAHRIGAFGVVSEIARKEGVIGLYKGLSPAIIRHLFYTPIRIIGYENLKGLIVRSETNNSESLPLATKALVGGFSGVIAQVVASPADLVKVRMQADGRLVSQGLKPRYSGPIEAFTKILQSEGVKGLWKGVLPNIQRAFLVNMGELACYDHAKHFVIDKKIAEDNIFAHTLASIMSGLASTSLSCPADVVKTRMMNQGENAVYRNSYDCLVKTVKFEGIRALWKGFFPTWARLGPWQFVFWVSYEKFRLLAGISSF

SEQ ID NO: 39575 - protein, 282 aa, Arabidopsis thaliana
  peptide (1)..(282): Ceres Seq. ID no. 12394414
  misc_feature (1)..(276): Homolog of NCBI NO: 38969885 NR Description: Unknown (protein for IMAGE:5308614) [Silurana
  misc_feature (1)..(282): Homolog of NCBI NO: 39594577 NR Description: Hypothetical protein CBG19253 [Caenorhabditis
  misc_feature (1)..(282): Homolog of NCBI NO: 7505416 NR Description: hypothetical protein K07B1.3 - Caenorhabditis
  misc_feature (1)..(282): Homolog of NCBI NO: 17562272 NR Description: Uncoupling protein [Caenorhabditis elegans]
  misc_feature (1)..(282): Homolog of NCBI NO: 18860079 NR Description: CG6492-PA [Drosophila melanogaster]
  misc_feature (1)..(106): Homolog of NCBI NO: 26450423 NR Description: putative mitochondrial uncoupling protein
  misc_feature (1)..(282): Homolog of NCBI NO: 21312006 NR Description: RIKEN cDNA 3632410G24 [Mus musculus]
  misc_feature (1)..(282): Homolog of NCBI NO: 16758260 NR Description: uncoupling protein UCP-4 [Rattus norvegicus]
  misc_feature (1)..(282): Homolog of NCBI NO: 38344836 NR Description: OSJNBa0064H22.17 [Oryza sativa (japonica
  misc_feature (1)..(282): Homolog of NCBI NO: 15223098 NR Description: mitochondrial carrier protein family
MVAESVTFPIDLTKTRMQLHGSGSASGAHRIGAFGVVSEIARKEGVIGLYKGLSPAIIRHLFYTPIRIIGYENLKGLIVRSETNNSESLPLATKALVGGFSGVIAQVVASPADLVKVRMQADGRLVSQGLKPRYSGPIEAFTKILQSEGVKGLWKGVLPNIQRAFLVNMGELACYDHAKHFVIDKKIAEDNIFAHTLASIMSGLASTSLSCPADVVKTRMMNQGENAVYRNSYDCLVKTVKFEGIRALWKGFFPTWARLGPWQFVFWVSYEKFRLLAGISSF

SEQ ID NO: 39576 - protein, 266 aa, Arabidopsis thaliana
  peptide (1)..(266): Ceres Seq. ID no. 12394415
  misc_feature (1)..(260): Homolog of NCBI NO: 38969885 NR Description: Unknown (protein for IMAGE:5308614) [Silurana
  misc_feature (1)..(266): Homolog of NCBI NO: 39594577 NR Description: Hypothetical protein CBG19253 [Caenorhabditis
  misc_feature (1)..(266): Homolog of NCBI NO: 7505416 NR Description: hypothetical protein K07B1.3 - Caenorhabditis
  misc_feature (1)..(266): Homolog of NCBI NO: 17562272 NR Description: Uncoupling protein [Caenorhabditis elegans]
  misc_feature (1)..(266): Homolog of NCBI NO: 18860079 NR Description: CG6492-PA [Drosophila melanogaster]
  misc_feature (1)..(90): Homolog of NCBI NO: 26450423 NR Description: putative mitochondrial uncoupling protein
  misc_feature (1)..(266): Homolog of NCBI NO: 21312006 NR Description: RIKEN cDNA 3632410G24 [Mus musculus]
  misc_feature (1)..(266): Homolog of NCBI NO: 16758260 NR Description: uncoupling protein UCP-4 [Rattus norvegicus]
  misc_feature (1)..(266): Homolog of NCBI NO: 38344836 NR Description: OSJNBa0064H22.17 [Oryza sativa (japonica
  misc_feature (1)..(266): Homolog of NCBI NO: 15223098 NR Description: mitochondrial carrier protein family
MQLHGSGSASGAHRIGAFGVVSEIARKEGVIGLYKGLSPAIIRHLFYTPIRIIGYENLKGLIVRSETNNSESLPLATKALVGGFSGVIAQVVASPADLVKVRMQADGRLVSQGLKPRYSGPIEAFTKILQSEGVKGLWKGVLPNIQRAFLVNMGELACYDHAKHFVIDKKIAEDNIFAHTLASIMSGLASTSLSCPADVVKTRMMNQGENAVYRNSYDCLVKTVKFEGIRALWKGFFPTWARLGPWQFVFWVSYEKFRLLAGISSF

SEQ ID NO: 39577 - DNA, 1178 bp, Arabidopsis thaliana
  misc_feature (1)..(1178): Ceres Seq. ID no. 13575024
  misc_feature: MA Experiment ID: 20000495 Result: Down-regulated in Transcription
  misc_feature: MA Experiment 20000495 PARAMETER Experiment Name: At_Guard_Cells_P Parameter: Harvest Date Value: 8/2/2002
  misc_feature: MA Experiment 20000495 PARAMETER Experiment Name: At_Guard_Cells_P Parameter: Organism Value: A. thaliana
  misc_feature: MA Experiment 20000495 PARAMETER Experiment Name: At_Guard_Cells_P Parameter: Tissue Value: Guard Cells vs. Leaves
  misc_feature: MA Experiment ID: 20001451 Result: Down-regulated in Transcription
  misc_feature: MA Experiment 20001451 PARAMETER Experiment Name: At_Far-red-induction_P Parameter: Age (day) Value: 7
  misc_feature: MA Experiment 20001451 PARAMETER Experiment Name: At_Far-red-induction_P Parameter: Light Value: Far-red vs. White
  misc_feature: MA Experiment 20001451 PARAMETER Experiment Name: At_Far-red-induction_P Parameter: Organism Value: A. thaliana
  misc_feature: MA Experiment 20001451 PARAMETER Experiment Name: At_Far-red-induction_P Parameter: Plant Line Value: Columbia
  misc_feature: MA Experiment 20001451 PARAMETER Experiment Name: At_Far-red-induction_P Parameter: Timepoint (hr) Value: 24
  misc_feature: MA Experiment 20001451 PARAMETER Experiment Name: At_Far-red-induction_P Parameter: Tissue Value: Whole Plant
gcttagtcttcttcgctctatcccaacactcgatcaaataatcccagtgagcttcttccattccaagttgataaggaatttgaagaagcctttgtttaatggaaagcaaaggaagaatccatccatctcatcatcatatgaggcgtcctcttccaggtcccggtggctgtatagcgcatccggagactttcggtaatcacggtgctataccaccttctgctgctcaaggtgtgtatccttccttcaacatgttacctccacctgaagttatggagcaaaagtttgtggcacaacacggggaattacagagacttgctatagagaatcagagacttggtggaactcatggtagtttaagacaagagttagcagcagcacagcatgaaatacagatgttgcacgcgcaaattgggtcgatgaagtccgagagagagcaacggatgatgggtcttgctgagaaagttgctaaaatggagactgagcttcagaaatctgaggctgttaagttggagatgcaacaagcacgtgctgaggcacggagtcttgttgtggctagggaggagcttatgtctaaagtgcatcagttgactcaggaacttcaaaaatctcgttctgatgtgcagcaaatacctgctctgatgtctgaacttgagaatctaagacaggagtaccagcagtgcagggcaacatatgactatgagaagaagttttataatgaccatctcgagtcacttcaggcaatggagaagaactacatgactatggctagggaagttgaaaaacttcaagcacagttgatgaacaatgcaaattcagatagaagagcaggtggcccttatggtaacaacataaatgctgaaattgacgcttctggacatcagagtggaaacggttattatgaagatgcttttggtcctcagggatatattcctcaaccagtagctggtaacgcaactggaccaaattcagttgttggcgcagctcaatacccttatcaaggagtaactcagccaggatacttccctcaaagacccggttacaactttccaagaggccctcctggttcatatgacccaacaacaaggttaccaacaggaccttacggcgctccattcccacctggaccatctaacaatactccttacgccggtacacacggaaaccctagtcgcagatga

SEQ ID NO: 39578 - protein, 359 aa, Arabidopsis thaliana
  peptide (1)..(359): Ceres Seq. ID no. 13575025
  misc_feature (9)..(290): Homolog of NCBI NO: 33146484 NR Description: myosin-like protein [Oryza sativa (japonica
  misc_feature (29)..(252): Homolog of NCBI NO: 25405799 NR Description: myosin-like protein, 97843-94399
  misc_feature (29)..(252): Homolog of NCBI NO: 18405242 NR Description: myosin -related [Arabidopsis thaliana]
  misc_feature (38)..(358): Homolog of NCBI NO: 28876008 NR Description: hypothetical protein [Oryza sativa (japonica
  misc_feature (35)..(356): Homolog of NCBI NO: 38605778 NR Description: OSJNBa0044K18.21 [Oryza sativa (japonica
  misc_feature (1)..(192): Homolog of NCBI NO: 5441873 NR Description: hypothetical protein [Oryza sativa (japonica
  misc_feature (52)..(321): Homolog of NCBI NO: 18400511 NR Description: expressed protein [Arabidopsis thaliana]
  misc_feature (52)..(326): Homolog of NCBI NO: 9294396 NR Description: gb|AAD10662.1~gene_id:MIE1.26~similar to unknown
  misc_feature (14)..(359): Homolog of NCBI NO: 25404669 NR Description: hypothetical protein F5A8.8 [imported] -
  misc_feature (1)..(359): Homolog of NCBI NO: 30697468 NR Description: expressed protein [Arabidopsis thaliana]
MESKGRIHPSHHHMRRPLPGPGGCIAHPETFGNHGAIPPSAAQGVYPSFNMLPPPEVMEQKFVAQHGELQRLAIENQRLGGTHGSLRQELAAAQHEIQMLHAQIGSMKSEREQRMMGLAEKVAKMETELQKSEAVKLEMQQARAEARSLVVAREELMSKVHQLTQELQKSRSDVQQIPALMSELENLRQEYQQCRATYDYEKKFYNDHLESLQAMEKNYMTMAREVEKLQAQLMNNANSDRRAGGPYGNNINAEIDASGHQSGNGYYEDAFGPQGYIPQPVAGNATGPNSVVGAAQYPYQGVTQPGYFPQRPGYNFPRGPPGSYDPTTRLPTGPYGAPFPPGPSNNTPYAGTHGNPSRR

SEQ ID NO: 39579 - protein, 346 aa, Arabidopsis thaliana
  peptide (1)..(346): Ceres Seq. ID no. 13575026
  misc_feature (1)..(277): Homolog of NCBI NO: 33146484 NR Description: myosin-like protein [Oryza sativa (japonica
  misc_feature (16)..(239): Homolog of NCBI NO: 25405799 NR Description: myosin-like protein, 97843-94399
  misc_feature (16)..(239): Homolog of NCBI NO: 18405242 NR Description: myosin -related [Arabidopsis thaliana]
  misc_feature (25)..(345): Homolog of NCBI NO: 28876008 NR Description: hypothetical protein [Oryza sativa (japonica
  misc_feature (22)..(343): Homolog of NCBI NO: 38605778 NR Description: OSJNBa0044K18.21 [Oryza sativa (japonica
  misc_feature (1)..(179): Homolog of NCBI NO: 5441873 NR Description: hypothetical protein [Oryza sativa (japonica
  misc_feature (39)..(308): Homolog of NCBI NO: 18400511 NR Description: expressed protein [Arabidopsis thaliana]
  misc_feature (39)..(313): Homolog of NCBI NO: 9294396 NR Description: gb|AAD10662.1~gene_id:MIE1.26~similar to unknown
  misc_feature (1)..(346): Homolog of NCBI NO: 25404669 NR Description: hypothetical protein F5A8.8 [imported] -
  misc_feature (1)..(346): Homolog of NCBI NO: 30697468 NR Description: expressed protein [Arabidopsis thaliana]
MRRPLPGPGGCIAHPETFGNHGAIPPSAAQGVYPSFNMLPPPEVMEQKFVAQHGELQRLAIENQRLGGTHGSLRQELAAAQHEIQMLHAQIGSMKSEREQRMMGLAEKVAKMETELQKSEAVKLEMQQARAEARSLVVAREELMSKVHQLTQELQKSRSDVQQIPALMSELENLRQEYQQCRATYDYEKKFYNDHLESLQAMEKNYMTMAREVEKLQAQLMNNANSDRRAGGPYGNNINAEIDASGHQSGNGYYEDAFGPQGYIPQPVAGNATGPNSVVGAAQYPYQGVTQPGYFPQRPGYNFPRGPPGSYDPTTRLPTGPYGAPFPPGPSNNTPYAGTHGNPSRR

SEQ ID NO: 39580 - protein, 309 aa, Arabidopsis thaliana
  peptide (1)..(309): Ceres Seq. ID no. 13575027
  misc_feature (1)..(240): Homolog of NCBI NO: 33146484 NR Description: myosin-like protein [Oryza sativa (japonica
  misc_feature (1)..(202): Homolog of NCBI NO: 25405799 NR Description: myosin-like protein, 97843-94399
  misc_feature (1)..(202): Homolog of NCBI NO: 18405242 NR Description: myosin -related [Arabidopsis thaliana]
  misc_feature (1)..(308): Homolog of NCBI NO: 28876008 NR Description: hypothetical protein [Oryza sativa (japonica
  misc_feature (1)..(306): Homolog of NCBI NO: 38605778 NR Description: OSJNBa0044K18.21 [Oryza sativa (japonica
  misc_feature (1)..(142): Homolog of NCBI NO: 5441873 NR Description: hypothetical protein [Oryza sativa (japonica
  misc_feature (2)..(271): Homolog of NCBI NO: 18400511 NR Description: expressed protein [Arabidopsis thaliana]
  misc_feature (2)..(276): Homolog of NCBI NO: 9294396 NR Description: gb|AAD10662.1~gene_id:MIE1.26~similar to unknown
  misc_feature (1)..(309): Homolog of NCBI NO: 25404669 NR Description: hypothetical protein F5A8.8 [imported] -
  misc_feature (1)..(309): Homolog of NCBI NO: 30697468 NR Description: expressed protein [Arabidopsis thaliana]
MLPPPEVMEQKFVAQHGELQRLAIENQRLGGTHGSLRQELAAAQHEIQMLHAQIGSMKSEREQRMMGLAEKVAKMETELQKSEAVKLEMQQARAEARSLVVAREELMSKVHQLTQELQKSRSDVQQIPALMSELENLRQEYQQCRATYDYEKKFYNDHLESLQAMEKNYMTMAREVEKLQAQLMNNANSDRRAGGPYGNNINAEIDASGHQSGNGYYEDAFGPQGYIPQPVAGNATGPNSVVGAAQYPYQGVTQPGYFPQRPGYNFPRGPPGSYDPTTRLPTGPYGAPFPPGPSNNTPYAGTHGNPSRR

SEQ ID NO: 39581 - DNA, 1709 bp, Arabidopsis thaliana
  misc_feature (1)..(1709): Ceres Seq. ID no. 13497388
  misc_feature: MA Experiment ID: 108434 Result: Down-regulated in Transcription
  misc_feature: MA Experiment 108434 PARAMETER Experiment Name: At_Root_Tips_cDNA_P Parameter: Tissue Value: Root Tips
  misc_feature: MA Experiment ID: 108463 Result: Up-regulated in Transcription
  misc_feature: MA Experiment 108463 PARAMETER Experiment Name: At_Germinating_Seeds_cDNA_P Parameter: Age (day) Value: 3 vs. 0
  misc_feature: MA Experiment 108463 PARAMETER Experiment Name: At_Germinating_Seeds_cDNA_P Parameter: Tissue Value: Germinating Seeds
  misc_feature: MA Experiment ID: 108488 Result: Down-regulated in Transcription
  misc_feature: MA Experiment ID: 108574 Result: Up-regulated in Transcription
  misc_feature: MA Experiment 108574 PARAMETER Experiment Name: At_Wounding__cDNA_P Parameter: Timepoint (hr) Value: 1
  misc_feature: MA Experiment 108574 PARAMETER Experiment Name: At_Wounding__cDNA_P Parameter: Tissue Value: Aerial
  misc_feature: MA Experiment 108574 PARAMETER Experiment Name: At_Wounding__cDNA_P Parameter: Treatment Value: Wounding vs. No Wounding
  misc_feature: MA Experiment ID: 108577 Result: Down-regulated in Transcription
  misc_feature: MA Experiment 108577 PARAMETER Experiment Name: At_42deg_Heat_cDNA_P Parameter: Temperature (deg C) Value: 42 vs. 22
  misc_feature: MA Experiment 108577 PARAMETER Experiment Name: At_42deg_Heat_cDNA_P Parameter: Timepoint (hr) Value: 6
  misc_feature: MA Experiment 108577 PARAMETER Experiment Name: At_42deg_Heat_cDNA_P Parameter: Tissue Value: Aerial
  misc_feature: MA Experiment ID: 108579 Result: Up-regulated in Transcription
  misc_feature: MA Experiment 108579 PARAMETER Experiment Name: At_4deg_Cold_cDNA_P Parameter: Temperature (deg C) Value: 4 vs. 22
  misc_feature: MA Experiment 108579 PARAMETER Experiment Name: At_4deg_Cold_cDNA_P Parameter: Timepoint (hr) Value: 6
  misc_feature: MA Experiment 108579 PARAMETER Experiment Name: At_4deg_Cold_cDNA_P Parameter: Tissue Value: Aerial
  misc_feature: MA Experiment ID: 108585 Result: Up-regulated in Transcription
  misc_feature: MA Experiment 108585 PARAMETER Experiment Name: At_5mM_NaNP_cDNA_P Parameter: Timepoint (hr) Value: 6
  misc_feature: MA Experiment 108585 PARAMETER Experiment Name: At_5mM_NaNP_cDNA_P Parameter: Tissue Value: Aerial
  misc_feature: MA Experiment 108585 PARAMETER Experiment Name: At_5mM_NaNP_cDNA_P Parameter: Treatment Value: null
  misc_feature: MA Experiment ID: 108595 Result: Up-regulated in Transcription
  misc_feature: MA Experiment 108595 PARAMETER Experiment Name: At_Ler-pi_Ovule_cDNA_P Parameter: Plant Line Value: null
  misc_feature: MA Experiment ID: 108667 Result: Up-regulated in Transcription
  misc_feature: MA Experiment 108667 PARAMETER Experiment Name: At_2mM_SA_cDNA_P Parameter: Plant Line Value: WS
  misc_feature: MA Experiment 108667 PARAMETER Experiment Name: At_2mM_SA_cDNA_P Parameter: Timepoint (hr) Value: 1
  misc_feature: MA Experiment 108667 PARAMETER Experiment Name: At_2mM_SA_cDNA_P Parameter: Treatment Value: 2mM SA vs. No Treatment
  misc_feature: MA Experiment ID: 20000089 Result: Down-regulated in Transcription
  misc_feature: MA Experiment ID: 20000184 Result: Down-regulated in Transcription
  misc_feature: MA Experiment 20000184 PARAMETER Experiment Name: At_Shoots__P Parameter: Age (day) Value: 7
  misc_feature: MA Experiment 20000184 PARAMETER Experiment Name: At_Shoots__P Parameter: Tissue Value: Shoots vs. Whole Plant
  misc_feature: MA Experiment ID: 20000185 Result: Down-regulated in Transcription
  misc_feature: MA Experiment 20000185 PARAMETER Experiment Name: At_Roots__P Parameter: Age (day) Value: 7 vs. 21
  misc_feature: MA Experiment 20000185 PARAMETER Experiment Name: At_Roots__P Parameter: Organism Value: A. thaliana
  misc_feature: MA Experiment 20000185 PARAMETER Experiment Name: At_Roots__P Parameter: Tissue Value: Roots vs. Whole Plant
  misc_feature: MA Experiment ID: 20000234 Result: Down-regulated in Transcription
  misc_feature: MA Experiment 20000234 PARAMETER Experiment Name: At_Siliques_P Parameter: Age (day) Value: 21
  misc_feature: MA Experiment 20000234 PARAMETER Experiment Name: At_Siliques_P Parameter: Organism Value: A. thaliana
  misc_feature: MA Experiment 20000234 PARAMETER Experiment Name: At_Siliques_P Parameter: Plant Line Value: WS
  misc_feature: MA Experiment 20000234 PARAMETER Experiment Name: At_Siliques_P Parameter: Tissue Value: Less Than 5mm Siliques vs. Whole Plant
  misc_feature: MA Experiment ID: 20000235 Result: Down-regulated in Transcription
  misc_feature: MA Experiment 20000235 PARAMETER Experiment Name: At_Siliques_P Parameter: Age (day) Value: 21
  misc_feature: MA Experiment 20000235 PARAMETER Experiment Name: At_Siliques_P Parameter: Organism Value: A. thaliana
  misc_feature: MA Experiment 20000235 PARAMETER Experiment Name: At_Siliques_P Parameter: Plant Line Value: WS
  misc_feature: MA Experiment 20000235 PARAMETER Experiment Name: At_Siliques_P Parameter: Tissue Value: 5-10mm Siliques vs. Whole Plant
  misc_feature: MA Experiment ID: 20000264 Result: Down-regulated in Transcription
  misc_feature: MA Experiment 20000264 PARAMETER Experiment Name: At_Open_Flower_P Parameter: Age (day) Value: 21
  misc_feature: MA Experiment 20000264 PARAMETER Experiment Name: At_Open_Flower_P Parameter: Plant Line Value: WS
  misc_feature: MA Experiment 20000264 PARAMETER Experiment Name: At_Open_Flower_P Parameter: Tissue Value: Open Flower vs. Whole Plant
  misc_feature: MA Experiment ID: 20000265 Result: Down-regulated in Transcription
  misc_feature: MA Experiment 20000265 PARAMETER Experiment Name: At_Open_Flower_P Parameter: Age (day) Value: 21
  misc_feature: MA Experiment 20000265 PARAMETER Experiment Name: At_Open_Flower_P Parameter: Plant Line Value: WS
  misc_feature: MA Experiment 20000265 PARAMETER Experiment Name: At_Open_Flower_P Parameter: Tissue Value: Closed Flower vs. Whole Plant
  misc_feature: MA Experiment ID: 20000267 Result: Up-regulated in Transcription
  misc_feature: MA Experiment 20000267 PARAMETER Experiment Name: At_Drought_P Parameter: Age (day) Value: 7
  misc_feature: MA Experiment 20000267 PARAMETER Experiment Name: At_Drought_P Parameter: Organism Value: A. thaliana
  misc_feature: MA Experiment 20000267 PARAMETER Experiment Name: At_Drought_P Parameter: Plant Line Value: WS
  misc_feature: MA Experiment 20000267 PARAMETER Experiment Name: At_Drought_P Parameter: Timepoint (hr) Value: 6
  misc_feature: MA Experiment 20000267 PARAMETER Experiment Name: At_Drought_P Parameter: Tissue Value: Whole Plant
  misc_feature: MA Experiment 20000267 PARAMETER Experiment Name: At_Drought_P Parameter: Treatment Value: Drought vs. No Drought
  misc_feature: MA Experiment ID: 20000286 Result: Down-regulated in Transcription
  misc_feature: MA Experiment 20000286 PARAMETER Experiment Name: At_Open_Flower_P Parameter: Age (day) Value: 21
  misc_feature: MA Experiment 20000286 PARAMETER Experiment Name: At_Open_Flower_P Parameter: Plant Line Value: WS
  misc_feature: MA Experiment 20000286 PARAMETER Experiment Name: At_Open_Flower_P Parameter: Tissue Value: Half Open vs. Whole Plant
  misc_feature: MA Experiment ID: 20000438 Result: Down-regulated in Transcription
  misc_feature: MA Experiment 20000438 PARAMETER Experiment Name: At_Shoots__P Parameter: Age (day) Value: 14
  misc_feature: MA Experiment 20000438 PARAMETER Experiment Name: At_Shoots__P Parameter: Tissue Value: Shoots vs. Whole Plant
  misc_feature: MA Experiment ID: 20000439 Result: Down-regulated in Transcription
  misc_feature: MA Experiment 20000439 PARAMETER Experiment Name: At_Roots__P Parameter: Age (day) Value: 14 vs. 21
  misc_feature: MA Experiment 20000439 PARAMETER Experiment Name: At_Roots__P Parameter: Organism Value: A. thaliana
  misc_feature: MA Experiment 20000439 PARAMETER Experiment Name: At_Roots__P Parameter: Tissue Value: Roots vs. Whole Plant
  misc_feature: MA Experiment ID: 20000460 Result: Up-regulated in Transcription
  misc_feature: MA Experiment 20000460 PARAMETER Experiment Name: At_10percent_PEG_P Parameter: Age (day) Value: 12
  misc_feature: MA Experiment 20000460 PARAMETER Experiment Name: At_10percent_PEG_P Parameter: Organism Value: A. thaliana
  misc_feature: MA Experiment 20000460 PARAMETER Experiment Name: At_10percent_PEG_P Parameter: Plant Line Value: WS
  misc_feature: MA Experiment 20000460 PARAMETER Experiment Name: At_10percent_PEG_P Parameter: Timepoint (day) Value: 12
  misc_feature: MA Experiment 20000460 PARAMETER Experiment Name: At_10percent_PEG_P Parameter: Tissue Value: Whole Plant
  misc_feature: MA Experiment 20000460 PARAMETER Experiment Name: At_10percent_PEG_P Parameter: Treatment Value: 10percent PEG vs. No Treatment
  misc_feature: MA Experiment ID: 20000495 Result: Down-regulated in Transcription
  misc_feature: MA Experiment 20000495 PARAMETER Experiment Name: At_Guard_Cells_P Parameter: Harvest Date Value: 8/2/2002
  misc_feature: MA Experiment 20000495 PARAMETER Experiment Name: At_Guard_Cells_P Parameter: Organism Value: A. thaliana
  misc_feature: MA Experiment 20000495 PARAMETER Experiment Name: At_Guard_Cells_P Parameter: Tissue Value: Guard Cells vs. Leaves
  misc_feature: MA Experiment ID: 20000527 Result: Up-regulated in Transcription
  misc_feature: MA Experiment 20000527 PARAMETER Experiment Name: At_10percent_PEG_P Parameter: Age (day) Value: 20
  misc_feature: MA Experiment 20000527 PARAMETER Experiment Name: At_10percent_PEG_P Parameter: Organism Value: A. thaliana
  misc_feature: MA Experiment 20000527 PARAMETER Experiment Name: At_10percent_PEG_P Parameter: Plant Line Value: WS
  misc_feature: MA Experiment 20000527 PARAMETER Experiment Name: At_10percent_PEG_P Parameter: Timepoint (day) Value: 20
  misc_feature: MA Experiment 20000527 PARAMETER Experiment Name: At_10percent_PEG_P Parameter: Tissue Value: Whole Plant
  misc_feature: MA Experiment 20000527 PARAMETER Experiment Name: At_10percent_PEG_P Parameter: Treatment Value: 10percent PEG vs. No Treatment
  misc_feature: MA Experiment ID: 20000573 Result: Down-regulated in Transcription
  misc_feature: MA Experiment 20000573 PARAMETER Experiment Name: At_100uM_ABA_Mutants__P Parameter: Organism Value: A. thaliana
  misc_feature: MA Experiment 20000573 PARAMETER Experiment Name: At_100uM_ABA_Mutants__P Parameter: Plant Line Value: CS22 vs. Ler wt
  misc_feature: MA Experiment 20000573 PARAMETER Experiment Name: At_100uM_ABA_Mutants__P Parameter: Timepoint (hr) Value: N/A
  misc_feature: MA Experiment 20000573 PARAMETER Experiment Name: At_100uM_ABA_Mutants__P Parameter: Tissue Value: Whole Plant
  misc_feature: MA Experiment 20000573 PARAMETER Experiment Name: At_100uM_ABA_Mutants__P Parameter: Treatment Value: None
  misc_feature: MA Experiment ID: 20000574 Result: Down-regulated in Transcription
  misc_feature: MA Experiment 20000574 PARAMETER Experiment Name: At_100uM_ABA_Mutants__P Parameter: Organism Value: A. thaliana
  misc_feature: MA Experiment 20000574 PARAMETER Experiment Name: At_100uM_ABA_Mutants__P Parameter: Plant Line Value: CS23 vs. Ler wt
  misc_feature: MA Experiment 20000574 PARAMETER Experiment Name: At_100uM_ABA_Mutants__P Parameter: Timepoint (hr) Value: N/A
  misc_feature: MA Experiment 20000574 PARAMETER Experiment Name: At_100uM_ABA_Mutants__P Parameter: Tissue Value: Whole Plant
  misc_feature: MA Experiment 20000574 PARAMETER Experiment Name: At_100uM_ABA_Mutants__P Parameter: Treatment Value: None
  misc_feature: MA Experiment ID: 20000794 Result: Down-regulated in Transcription
  misc_feature: MA Experiment 20000794 PARAMETER Experiment Name: At_Petals_P Parameter: Age (day) Value: 23-25 days
  misc_feature: MA Experiment 20000794 PARAMETER Experiment Name: At_Petals_P Parameter: Plant Line Value: WS
  misc_feature: MA Experiment 20000794 PARAMETER Experiment Name: At_Petals_P Parameter: Tissue Value: Petals vs. Whole plant
  misc_feature: MA Experiment ID: 20001247 Result: Up-regulated in Transcription
  misc_feature: MA Experiment 20001247 PARAMETER Experiment Name: At_Far-red-induction_P Parameter: Age (day) Value: 7
  misc_feature: MA Experiment 20001247 PARAMETER Experiment Name: At_Far-red-induction_P Parameter: Light Value: Far-red vs. White
  misc_feature: MA Experiment 20001247 PARAMETER Experiment Name: At_Far-red-induction_P Parameter: Organism Value: A. thaliana
  misc_feature: MA Experiment 20001247 PARAMETER Experiment Name: At_Far-red-induction_P Parameter: Plant Line Value: Columbia
  misc_feature: MA Experiment 20001247 PARAMETER Experiment Name: At_Far-red-induction_P Parameter: Timepoint (hr) Value: 1
  misc_feature: MA Experiment 20001247 PARAMETER Experiment Name: At_Far-red-induction_P Parameter: Tissue Value: Whole Plant
  misc_feature: MA Experiment ID: 20001757 Result: Down-regulated in Transcription
  misc_feature: MA Experiment 20001757 PARAMETER Experiment Name: At_50mM_NH4NO3_L-to-H_P Parameter: Timepoint (hr) Value: 6
  misc_feature: MA Experiment 20001757 PARAMETER Experiment Name: At_50mM_NH4NO3_L-to-H_P Parameter: Tissue Value: Leaf
  misc_feature: MA Experiment 20001757 PARAMETER Experiment Name: At_50mM_NH4NO3_L-to-H_P Parameter: Treatment Value: 50mM NH4NO3 vs 100mM Mannitol
  misc_feature: MA Experiment ID: 20001774 Result: Down-regulated in Transcription
  misc_feature: MA Experiment 20001774 PARAMETER Experiment Name: At_Far-red-enriched-adult_P Parameter: Age (day) Value: 31
  misc_feature: MA Experiment 20001774 PARAMETER Experiment Name: At_Far-red-enriched-adult_P Parameter: Light Value: Far-red enriched vs. White
  misc_feature: MA Experiment 20001774 PARAMETER Experiment Name: At_Far-red-enriched-adult_P Parameter: Organism Value: A. thaliana
  misc_feature: MA Experiment 20001774 PARAMETER Experiment Name: At_Far-red-enriched-adult_P Parameter: Plant Line Value: Columbia
  misc_feature: MA Experiment 20001774 PARAMETER Experiment Name: At_Far-red-enriched-adult_P Parameter: Timepoint (hr) Value: 72
  misc_feature: MA Experiment 20001774 PARAMETER Experiment Name: At_Far-red-enriched-adult_P Parameter: Tissue Value: Aerial
atcacaaattacatactaaaaaaaaatagacgcggtcaaaattctctctcaattctatcaatataaagacaatctctttctcattagggtttttaattttcatcatcatcatcactctctctgctcccaaattcagaaaaaaaggaacgatttttatttccggtgaatgagaattttctctcgaatttgatcgatcacatatttcatctgtgtgttttcattttgaggatgccagcaacggaatatcaaagatcattcgggaggtcttttctgaatttacggcgagacacggcggtgaactcggttgagtcaacgacggttacccccgagttgactcagatggaagcagagcttgtttcgtttcagagaaaagttgctgagaggtttatcgatctcaatgcgtctagttgtgaagatctactgtctctcgaatgggttgggaagcttcttgattcgtttctatcttgtcaagaagagtttcgttccatagtcatcaatcatcgttcgatgattactaaaccaccgatggatcgattggtttcagattacttcgagagaagtgttaaagctcttgatgtttgtaacgcgattcgtgatggtgttgaacagatccgtcaatggcagaaacttatcgagattgtaatttgtgctttcaacaacaatggaggaggaagtagtggcaagagacctcttggagaaggtcagtttcgtcgtgcgaggaagactttgattgagttagctattggtatgcttgatgagaaggattcatcttctagctcagtgtcgtctcagcatcgtaaccggtcttttggaaggaacaaggagcagcttcatcaccgaacaatcgggcatttcaggtcgctttcttggagtgtttcgagatcatggtctgcttctaagcaactacaagctattggaaacaacttagctacgcctcgagctagtgacattactgcaactaatggtcttattgttccggtttatacaatgactacggtattgttgtttgtgatgtgggcacttgtagctgcgattccttgtcaagacagaggtttgcaagtacatttcaatgttcctaggaattaccaatggggaggttcgttgatgtcgttgcacgataggatcattgaggaatcgaagaagagagagaggaagaatacatgtgggttgttgaaagagattcatcagtttgagaagacttcaagattgatgaatgagttggttgattctgttcagtttcctttgtctgaagagaaagagatggaagtgagagagagagttgaggaattggggaagcttcaagaggctttgaagaatggtttggatccgtttgagaggaaagtgagggaagtgtttcatcggattgtaagaagcagaacagaaggtcttgatactgttggaaagcatcatggttctgaatgatgtttatcgaaaattcaatggaacatcatcatctgtttaatattctggagagttgaagtatgtttatcaaattgtgggtttgtttgtctggtgaacgtgaagatcatggagacaaattgctagagaacgagagaacattttggttaaaggttgttaatataaaagacaggagatacaaaccactccatttttccaatctttgttgtttatgtataattttctcatcaaagattgttaattatgaataaggttccattttatacggatcggaacttgcattacaattt

SEQ ID NO: 39582 - protein, 397 aa, Arabidopsis thaliana
  peptide (1)..(397): Ceres Seq. ID no. 13497389
  misc_feature (1)..(390): Pfam Name: Protein of unknown function (DUF793) Pfam Description: Protein of unknown function (DUF793)
  misc_feature (2)..(372): Homolog of NCBI NO: 15237130 NR Description: expressed protein [Arabidopsis thaliana]
  misc_feature (3)..(385): Homolog of NCBI NO: 15236522 NR Description: expressed protein [Arabidopsis thaliana]
  misc_feature (2)..(390): Homolog of NCBI NO: 15222577 NR Description: hypothetical protein [Arabidopsis thaliana]
  misc_feature (55)..(396): Homolog of NCBI NO: 5777630 NR Description: CAA303718.1 protein [Oryza sativa]
  misc_feature (1)..(396): Homolog of NCBI NO: 38345505 NR Description: OSJNBa0039K24.3 [Oryza sativa (japonica
  misc_feature (1)..(397): Homolog of NCBI NO: 15218428 NR Description: hypothetical protein [Arabidopsis thaliana]
  misc_feature (1)..(390): Homolog of NCBI NO: 21593634 NR Description: unknown [Arabidopsis thaliana]
  misc_feature (1)..(390): Homolog of NCBI NO: 18394649 NR Description: expressed protein [Arabidopsis thaliana]
  misc_feature (1)..(397): Homolog of NCBI NO: 21536674 NR Description: unknown [Arabidopsis thaliana]
  misc_feature (1)..(397): Homolog of NCBI NO: 18410617 NR Description: expressed protein [Arabidopsis thaliana]
MPATEYQRSFGRSFLNLRRDTAVNSVESTTVTPELTQMEAELVSFQRKVAERFIDLNASSCEDLLSLEWVGKLLDSFLSCQEEFRSIVINHRSMITKPPMDRLVSDYFERSVKALDVCNAIRDGVEQIRQWQKLIEIVICAFNNNGGGSSGKRPLGEGQFRRARKTLIELAIGMLDEKDSSSSSVSSQHRNRSFGRNKEQLHHRTIGHFRSLSWSVSRSWSASKQLQAIGNNLATPRASDITATNGLIVPVYTMTTVLLFVMWALVAAIPCQDRGLQVHFNVPRNYQWGGSLMSLHDRIIEESKKRERKNTCGLLKEIHQFEKTSRLMNELVDSVQFPLSEEKEMEVRERVEELGKLQEALKNGLDPFERKVREVFHRIVRSRTEGLDTVGKHHGSE

SEQ ID NO: 39583 - protein, 360 aa, Arabidopsis thaliana
  peptide (1)..(360): Ceres Seq. ID no. 13497390
  misc_feature (1)..(353): Pfam Name: Protein of unknown function (DUF793) Pfam Description: Protein of unknown function (DUF793)
  misc_feature (1)..(335): Homolog of NCBI NO: 15237130 NR Description: expressed protein [Arabidopsis thaliana]
  misc_feature (1)..(348): Homolog of NCBI NO: 15236522 NR Description: expressed protein [Arabidopsis thaliana]
  misc_feature (1)..(353): Homolog of NCBI NO: 15222577 NR Description: hypothetical protein [Arabidopsis thaliana]
  misc_feature (18)..(359): Homolog of NCBI NO: 5777630 NR Description: CAA303718.1 protein [Oryza sativa]
  misc_feature (1)..(359): Homolog of NCBI NO: 38345505 NR Description: OSJNBa0039K24.3 [Oryza sativa (japonica
  misc_feature (1)..(360): Homolog of NCBI NO: 15218428 NR Description: hypothetical protein [Arabidopsis thaliana]
  misc_feature (1)..(353): Homolog of NCBI NO: 21593634 NR Description: unknown [Arabidopsis thaliana]
  misc_feature (1)..(353): Homolog of NCBI NO: 18394649 NR Description: expressed protein [Arabidopsis thaliana]
  misc_feature (1)..(360): Homolog of NCBI NO: 21536674 NR Description: unknown [Arabidopsis thaliana]
  misc_feature (1)..(360): Homolog of NCBI NO: 18410617 NR Description: expressed protein [Arabidopsis thaliana]
MEAELVSFQRKVAERFIDLNASSCEDLLSLEWVGKLLDSFLSCQEEFRSIVINHRSMITKPPMDRLVSDYFERSVKALDVCNAIRDGVEQIRQWQKLIEIVICAFNNNGGGSSGKRPLGEGQFRRARKTLIELAIGMLDEKDSSSSSVSSQHRNRSFGRNKEQLHHRTIGHFRSLSWSVSRSWSASKQLQAIGNNLATPRASDITATNGLIVPVYTMTTVLLFVMWALVAAIPCQDRGLQVHFNVPRNYQWGGSLMSLHDRIIEESKKRERKNTCGLLKEIHQFEKTSRLMNELVDSVQFPLSEEKEMEVRERVEELGKLQEALKNGLDPFERKVREVFHRIVRSRTEGLDTVGKHHGSE

SEQ ID NO: 39584 - protein, 304 aa, Arabidopsis thaliana
  peptide (1)..(304): Ceres Seq. ID no. 13497391
  misc_feature (1)..(297): Pfam Name: Protein of unknown function (DUF793) Pfam Description: Protein of unknown function (DUF793)
  misc_feature (1)..(279): Homolog of NCBI NO: 15237130 NR Description: expressed protein [Arabidopsis thaliana]
  misc_feature (1)..(292): Homolog of NCBI NO: 15236522 NR Description: expressed protein [Arabidopsis thaliana]
  misc_feature (1)..(297): Homolog of NCBI NO: 15222577 NR Description: hypothetical protein [Arabidopsis thaliana]
  misc_feature (1)..(303): Homolog of NCBI NO: 5777630 NR Description: CAA303718.1 protein [Oryza sativa]
  misc_feature (1)..(303): Homolog of NCBI NO: 38345505 NR Description: OSJNBa0039K24.3 [Oryza sativa (japonica
  misc_feature (1)..(304): Homolog of NCBI NO: 15218428 NR Description: hypothetical protein [Arabidopsis thaliana]
  misc_feature (1)..(297): Homolog of NCBI NO: 21593634 NR Description: unknown [Arabidopsis thaliana]
  misc_feature (1)..(297): Homolog of NCBI NO: 18394649 NR Description: expressed protein [Arabidopsis thaliana]
  misc_feature (1)..(304): Homolog of NCBI NO: 21536674 NR Description: unknown [Arabidopsis thaliana]
  misc_feature (1)..(304): Homolog of NCBI NO: 18410617 NR Description: expressed protein [Arabidopsis thaliana]
MITKPPMDRLVSDYFERSVKALDVCNAIRDGVEQIRQWQKLIEIVICAFNNNGGGSSGKRPLGEGQFRRARKTLIELAIGMLDEKDSSSSSVSSQHRNRSFGRNKEQLHHRTIGHFRSLSWSVSRSWSASKQLQAIGNNLATPRASDITATNGLIVPVYTMTTVLLFVMWALVAAIPCQDRGLQVHFNVPRNYQWGGSLMSLHDRIIEESKKRERKNTCGLLKEIHQFEKTSRLMNELVDSVQFPLSEEKEMEVRERVEELGKLQEALKNGLDPFERKVREVFHRIVRSRTEGLDTVGKHHGSE

SEQ ID NO: 39585 - DNA, 787 bp, Arabidopsis thaliana; identical to SEQ ID NO: 29524
  misc_feature (1)..(787): Ceres Seq. ID no. 13580358
  misc_feature: MA Experiment ID: 20000180 Result: Down-regulated in Transcription
  misc_feature: MA Experiment 20000180 PARAMETER Experiment Name: At_Germinating_Seeds_P Parameter: Age (hr) Value: 24 vs. 0
  misc_feature: MA Experiment 20000180 PARAMETER Experiment Name: At_Germinating_Seeds_P Parameter: Tissue Value: Germinating Seeds
  misc_feature: MA Experiment ID: 20000227 Result: Up-regulated in Transcription
  misc_feature: MA Experiment 20000227 PARAMETER Experiment Name: At_Root-Tips-vs-Tops_P Parameter: Tissue Value: Root Tips vs. Root Tops
  misc_feature: MA Experiment ID: 20000234 Result: Up-regulated in Transcription
  misc_feature: MA Experiment 20000234 PARAMETER Experiment Name: At_Siliques_P Parameter: Age (day) Value: 21
  misc_feature: MA Experiment 20000234 PARAMETER Experiment Name: At_Siliques_P Parameter: Organism Value: A. thaliana
  misc_feature: MA Experiment 20000234 PARAMETER Experiment Name: At_Siliques_P Parameter: Plant Line Value: WS
  misc_feature: MA Experiment 20000234 PARAMETER Experiment Name: At_Siliques_P Parameter: Tissue Value: Less Than 5mm Siliques vs. Whole Plant
  misc_feature: MA Experiment ID: 20000794 Result: Down-regulated in Transcription
  misc_feature: MA Experiment 20000794 PARAMETER Experiment Name: At_Petals_P Parameter: Age (day) Value: 23-25 days
  misc_feature: MA Experiment 20000794 PARAMETER Experiment Name: At_Petals_P Parameter: Plant Line Value: WS
  misc_feature: MA Experiment 20000794 PARAMETER Experiment Name: At_Petals_P Parameter: Tissue Value: Petals vs. Whole plant
  misc_feature: MA Experiment ID: 20001451 Result: Down-regulated in Transcription
  misc_feature: MA Experiment 20001451 PARAMETER Experiment Name: At_Far-red-induction_P Parameter: Age (day) Value: 7
  misc_feature: MA Experiment 20001451 PARAMETER Experiment Name: At_Far-red-induction_P Parameter: Light Value: Far-red vs. White
  misc_feature: MA Experiment 20001451 PARAMETER Experiment Name: At_Far-red-induction_P Parameter: Organism Value: A. thaliana
  misc_feature: MA Experiment 20001451 PARAMETER Experiment Name: At_Far-red-induction_P Parameter: Plant Line Value: Columbia
  misc_feature: MA Experiment 20001451 PARAMETER Experiment Name: At_Far-red-induction_P Parameter: Timepoint (hr) Value: 24
  misc_feature: MA Experiment 20001451 PARAMETER Experiment Name: At_Far-red-induction_P Parameter: Tissue Value: Whole Plant
  misc_feature: MA Experiment ID: 20001557 Result: Up-regulated in Transcription
  misc_feature: MA Experiment 20001557 PARAMETER Experiment Name: At_Drought_Soil_Dry_P Parameter: Age (day) Value: 27
  misc_feature: MA Experiment 20001557 PARAMETER Experiment Name: At_Drought_Soil_Dry_P Parameter: Organism Value: A. thaliana
  misc_feature: MA Experiment 20001557 PARAMETER Experiment Name: At_Drought_Soil_Dry_P Parameter: Plant Line Value: WS
  misc_feature: MA Experiment 20001557 PARAMETER Experiment Name: At_Drought_Soil_Dry_P Parameter: Post Timepoint (hr) Value: 3
  misc_feature: MA Experiment 20001557 PARAMETER Experiment Name: At_Drought_Soil_Dry_P Parameter: Post-Treatment Value: Re-Water vs. No Drought
  misc_feature: MA Experiment 20001557 PARAMETER Experiment Name: At_Drought_Soil_Dry_P Parameter: Timepoint (day) Value: 13
  misc_feature: MA Experiment 20001557 PARAMETER Experiment Name: At_Drought_Soil_Dry_P Parameter: Treatment Value: Drought vs. No Drought
  misc_feature: MA Experiment ID: 20001558 Result: Up-regulated in Transcription
  misc_feature: MA Experiment 20001558 PARAMETER Experiment Name: At_Drought_Soil_Dry_P Parameter: Age (day) Value: 27
  misc_feature: MA Experiment 20001558 PARAMETER Experiment Name: At_Drought_Soil_Dry_P Parameter: Organism Value: A. thaliana
  misc_feature: MA Experiment 20001558 PARAMETER Experiment Name: At_Drought_Soil_Dry_P Parameter: Plant Line Value: WS
  misc_feature: MA Experiment 20001558 PARAMETER Experiment Name: At_Drought_Soil_Dry_P Parameter: Post Timepoint (hr) Value: 6
  misc_feature: MA Experiment 20001558 PARAMETER Experiment Name: At_Drought_Soil_Dry_P Parameter: Post-Treatment Value: Re-Water vs. No Drought
  misc_feature: MA Experiment 20001558 PARAMETER Experiment Name: At_Drought_Soil_Dry_P Parameter: Timepoint (day) Value: 13
  misc_feature: MA Experiment 20001558 PARAMETER Experiment Name: At_Drought_Soil_Dry_P Parameter: Treatment Value: Drought vs. No Drought
  misc_feature: MA Experiment ID: 20001560 Result: Up-regulated in Transcription
  misc_feature: MA Experiment 20001560 PARAMETER Experiment Name: At_Drought_Soil_Dry_P Parameter: Age (day) Value: 28
  misc_feature: MA Experiment 20001560 PARAMETER Experiment Name: At_Drought_Soil_Dry_P Parameter: Organism Value: A. thaliana
  misc_feature: MA Experiment 20001560 PARAMETER Experiment Name: At_Drought_Soil_Dry_P Parameter: Plant Line Value: WS
  misc_feature: MA Experiment 20001560 PARAMETER Experiment Name: At_Drought_Soil_Dry_P Parameter: Post Timepoint (hr) Value: None
  misc_feature: MA Experiment 20001560 PARAMETER Experiment Name: At_Drought_Soil_Dry_P Parameter: Post-Treatment Value: None
  misc_feature: MA Experiment 20001560 PARAMETER Experiment Name: At_Drought_Soil_Dry_P Parameter: Timepoint (day) Value: 14
  misc_feature: MA Experiment 20001560 PARAMETER Experiment Name: At_Drought_Soil_Dry_P Parameter: Treatment Value: Drought vs. No Drought
  misc_feature: MA Experiment ID: 20001757 Result: Up-regulated in Transcription
  misc_feature: MA Experiment 20001757 PARAMETER Experiment Name: At_50mM_NH4NO3_L-to-H_P Parameter: Timepoint (hr) Value: 6
  misc_feature: MA Experiment 20001757 PARAMETER Experiment Name: At_50mM_NH4NO3_L-to-H_P Parameter: Tissue Value: Leaf
  misc_feature: MA Experiment 20001757 PARAMETER Experiment Name: At_50mM_NH4NO3_L-to-H_P Parameter: Treatment Value: 50mM NH4NO3 vs 100mM Mannitol

SEQ ID NO: 39586 - protein, 151 aa, Arabidopsis thaliana; identical to SEQ ID NO: 29525
  peptide (1)..(151): Ceres Seq. ID no. 13580359
  misc_feature (1)..(151): Homolog of NCBI NO: 17136832 NR Description: Ribosomal protein S13 CG13389-PA [Drosophila
  misc_feature (1)..(151): Homolog of NCBI NO: 3688434 NR Description: 40S ribosomal protein S13 [Lumbricus rubellus]
  misc_feature (1)..(151): Homolog of NCBI NO: 464705 NR Description: 40S RIBOSOMAL PROTEIN S13
  misc_feature (1)..(151): Homolog of NCBI NO: 1173198 NR Description: 40S RIBOSOMAL PROTEIN S13
  misc_feature (1)..(151): Homolog of NCBI NO: 7440402 NR Description: ribosomal protein S13, cytosolic - Arabidopsis
  misc_feature (1)..(151): Homolog of NCBI NO: 8131699 NR Description: cytoplasmic ribosomal protein S13 [Panax ginseng]
  misc_feature (1)..(151): Homolog of NCBI NO: 11276609 NR Description: ribosomal protein S13-like - Arabidopsis thaliana
  misc_feature (1)..(151): Homolog of NCBI NO: 18411224 NR Description: 40S ribosomal protein S13 (RPS13B) [Arabidopsis
  misc_feature (1)..(151): Homolog of NCBI NO: 14190367 NR Description: AT3g60770/T4C21_180 [Arabidopsis thaliana]
  misc_feature (1)..(151): Homolog of NCBI NO: 18411716 NR Description: 40S ribosomal protein S13 (RPS13A) [Arabidopsis
  misc_feature (1)..(151): Homolog of NCBI NO: 17136832 NR Description: Ribosomal protein S13 CG13389-PA [Drosophila
  misc_feature (1)..(151): Homolog of NCBI NO: 3688434 NR Description: 40S ribosomal protein S13 [Lumbricus rubellus]
  misc_feature (1)..(151): Homolog of NCBI NO: 464705 NR Description: 40S RIBOSOMAL PROTEIN S13
  misc_feature (1)..(151): Homolog of NCBI NO: 1173198 NR Description: 40S RIBOSOMAL PROTEIN S13
  misc_feature (1)..(151): Homolog of NCBI NO: 7440402 NR Description: ribosomal protein S13, cytosolic - Arabidopsis
  misc_feature (1)..(151): Homolog of NCBI NO: 8131699 NR Description: cytoplasmic ribosomal protein S13 [Panax ginseng]
  misc_feature (1)..(151): Homolog of NCBI NO: 11276609 NR Description: ribosomal protein S13-like - Arabidopsis thaliana
  misc_feature (1)..(151): Homolog of NCBI NO: 18411224 NR Description: 40S ribosomal protein S13 (RPS13B) [Arabidopsis
  misc_feature (1)..(151): Homolog of NCBI NO: 14190367 NR Description: AT3g60770/T4C21_180 [Arabidopsis thaliana]
  misc_feature (1)..(151): Homolog of NCBI NO: 18411716 NR Description: 40S ribosomal protein S13 (RPS13A) [Arabidopsis

SEQ ID NO: 39587 - protein, 148 aa, Arabidopsis thaliana; identical to SEQ ID NO: 29526
  peptide (1)..(148): Ceres Seq. ID no. 13580360
  misc_feature (1)..(148): Homolog of NCBI NO: 17136832 NR Description: Ribosomal protein S13 CG13389-PA [Drosophila
  misc_feature (1)..(148): Homolog of NCBI NO: 3688434 NR Description: 40S ribosomal protein S13 [Lumbricus rubellus]
  misc_feature (1)..(148): Homolog of NCBI NO: 464705 NR Description: 40S RIBOSOMAL PROTEIN S13
  misc_feature (1)..(148): Homolog of NCBI NO: 1173198 NR Description: 40S RIBOSOMAL PROTEIN S13
  misc_feature (1)..(148): Homolog of NCBI NO: 7440402 NR Description: ribosomal protein S13, cytosolic - Arabidopsis
  misc_feature (1)..(148): Homolog of NCBI NO: 8131699 NR Description: cytoplasmic ribosomal protein S13 [Panax ginseng]
  misc_feature (1)..(148): Homolog of NCBI NO: 11276609 NR Description: ribosomal protein S13-like - Arabidopsis thaliana
  misc_feature (1)..(148): Homolog of NCBI NO: 18411224 NR Description: 40S ribosomal protein S13 (RPS13B) [Arabidopsis
  misc_feature (1)..(148): Homolog of NCBI NO: 14190367 NR Description: AT3g60770/T4C21_180 [Arabidopsis thaliana]
  misc_feature (1)..(148): Homolog of NCBI NO: 18411716 NR Description: 40S ribosomal protein S13 (RPS13A) [Arabidopsis
  misc_feature (1)..(148): Homolog of NCBI NO: 17136832 NR Description: Ribosomal protein S13 CG13389-PA [Drosophila
  misc_feature (1)..(148): Homolog of NCBI NO: 3688434 NR Description: 40S ribosomal protein S13 [Lumbricus rubellus]
  misc_feature (1)..(148): Homolog of NCBI NO: 464705 NR Description: 40S RIBOSOMAL PROTEIN S13
  misc_feature (1)..(148): Homolog of NCBI NO: 1173198 NR Description: 40S RIBOSOMAL PROTEIN S13
  misc_feature (1)..(148): Homolog of NCBI NO: 7440402 NR Description: ribosomal protein S13, cytosolic - Arabidopsis
  misc_feature (1)..(148): Homolog of NCBI NO: 8131699 NR Description: cytoplasmic ribosomal protein S13 [Panax ginseng]
  misc_feature (1)..(148): Homolog of NCBI NO: 11276609 NR Description: ribosomal protein S13-like - Arabidopsis thaliana
  misc_feature (1)..(148): Homolog of NCBI NO: 18411224 NR Description: 40S ribosomal protein S13 (RPS13B) [Arabidopsis
  misc_feature (1)..(148): Homolog of NCBI NO: 14190367 NR Description: AT3g60770/T4C21_180 [Arabidopsis thaliana]
  misc_feature (1)..(148): Homolog of NCBI NO: 18411716 NR Description: 40S ribosomal protein S13 (RPS13A) [Arabidopsis

SEQ ID NO: 39588 - DNA, 1025 bp, Arabidopsis thaliana
  misc_feature (1)..(1025): Ceres Seq. ID no. 13497575
  misc_feature: MA Experiment ID: 108434 Result: Down-regulated in Transcription
  misc_feature: MA Experiment 108434 PARAMETER Experiment Name: At_Root_Tips_cDNA_P Parameter: Tissue Value: Root Tips
  misc_feature: MA Experiment ID: 108461 Result: Up-regulated in Transcription
  misc_feature: MA Experiment 108461 PARAMETER Experiment Name: At_Germinating_Seeds_cDNA_P Parameter: Age (day) Value: 1 vs. 0
  misc_feature: MA Experiment 108461 PARAMETER Experiment Name: At_Germinating_Seeds_cDNA_P Parameter: Tissue Value: Germinating Seeds
  misc_feature: MA Experiment ID: 108462 Result: Up-regulated in Transcription
  misc_feature: MA Experiment 108462 PARAMETER Experiment Name: At_Germinating_Seeds_cDNA_P Parameter: Age (day) Value: 2 vs. 0
  misc_feature: MA Experiment 108462 PARAMETER Experiment Name: At_Germinating_Seeds_cDNA_P Parameter: Tissue Value: Germinating Seeds
  misc_feature: MA Experiment ID: 108463 Result: Up-regulated in Transcription
  misc_feature: MA Experiment 108463 PARAMETER Experiment Name: At_Germinating_Seeds_cDNA_P Parameter: Age (day) Value: 3 vs. 0
  misc_feature: MA Experiment 108463 PARAMETER Experiment Name: At_Germinating_Seeds_cDNA_P Parameter: Tissue Value: Germinating Seeds
  misc_feature: MA Experiment ID: 108464 Result: Up-regulated in Transcription
  misc_feature: MA Experiment 108464 PARAMETER Experiment Name: At_Germinating_Seeds_cDNA_P Parameter: Age (day) Value: 4 vs. 0
  misc_feature: MA Experiment 108464 PARAMETER Experiment Name: At_Germinating_Seeds_cDNA_P Parameter: Tissue Value: Germinating Seeds
  misc_feature: MA Experiment ID: 108577 Result: Down-regulated in Transcription
  misc_feature: MA Experiment 108577 PARAMETER Experiment Name: At_42deg_Heat_cDNA_P Parameter: Temperature (deg C) Value: 42 vs. 22
  misc_feature: MA Experiment 108577 PARAMETER Experiment Name: At_42deg_Heat_cDNA_P Parameter: Timepoint (hr) Value: 6
  misc_feature: MA Experiment 108577 PARAMETER Experiment Name: At_42deg_Heat_cDNA_P Parameter: Tissue Value: Aerial
  misc_feature: MA Experiment ID: 20000171 Result: Up-regulated in Transcription
  misc_feature: MA Experiment 20000171 PARAMETER Experiment Name: At_42deg_Heat_P Parameter: Age (day) Value: 14
  misc_feature: MA Experiment 20000171 PARAMETER Experiment Name: At_42deg_Heat_P Parameter: Organism Value: A. thaliana
  misc_feature: MA Experiment 20000171 PARAMETER Experiment Name: At_42deg_Heat_P Parameter: Plant Line Value: WS
  misc_feature: MA Experiment 20000171 PARAMETER Experiment Name: At_42deg_Heat_P Parameter: Temperature (deg C) Value: 42 vs. 22
  misc_feature: MA Experiment 20000171 PARAMETER Experiment Name: At_42deg_Heat_P Parameter: Timepoint (hr) Value: 1
  misc_feature: MA Experiment 20000171 PARAMETER Experiment Name: At_42deg_Heat_P Parameter: Tissue Value: Aerial
  misc_feature: MA Experiment ID: 20000185 Result: Down-regulated in Transcription
  misc_feature: MA Experiment 20000185 PARAMETER Experiment Name: At_Roots__P Parameter: Age (day) Value: 7 vs. 21
  misc_feature: MA Experiment 20000185 PARAMETER Experiment Name: At_Roots__P Parameter: Organism Value: A. thaliana
  misc_feature: MA Experiment 20000185 PARAMETER Experiment Name: At_Roots__P Parameter: Tissue Value: Roots vs. Whole Plant
  misc_feature: MA Experiment ID: 20000452 Result: Up-regulated in Transcription
  misc_feature: MA Experiment 20000452 PARAMETER Experiment Name: At_CS6879_Shoots-Roots_P Parameter: Age (day) Value: 14
  misc_feature: MA Experiment 20000452 PARAMETER Experiment Name: At_CS6879_Shoots-Roots_P Parameter: Organism Value: A. thaliana
  misc_feature: MA Experiment 20000452 PARAMETER Experiment Name: At_CS6879_Shoots-Roots_P Parameter: Plant Line Value: CS6879 vs. WS
  misc_feature: MA Experiment 20000452 PARAMETER Experiment Name: At_CS6879_Shoots-Roots_P Parameter: Tissue Value: Shoots
cacttggaaagaatccttcactcactttccctttaagaagcaagtctcctccacttgtacgataccaacatcatcagcatcacaaaaagtatcattatcatcttcatcgaattagatggcaccggtgaagaggagggtgttcaagacaaataatgaaatggcagtggagctggccaaatacacggctgatctttcctccaaattttgcaaagaaagaggagttttcaccgttgttctctccggcggcgacctcatagcctggctctggaaattgttagaagctccttatattgattcaattgagtggtctaagtggcacatcttttgggtcgacgagagggtttgtgcttgggatcatgcggatagcaactataaactcgcttacgatggttttctctccaaggttccagttccagctgaaaacatctacgctatcgataacggactcggggcagaaggcaacgccgagctagcagctgaaaggtacgaggagtgcctcaaacaaaaagtgaaccaaaacataatccgaacgtacaaatcttctggttttccacagttcgatcttcagcttctaggtatgggaccggacggtcacatggcgtctctattccctggacatgctcagatcaatgagaaggtgaaatgggtcacatctataaccgattcacctaagccaccgtcaaaaaggatcacattgactttaccggttatcaattgtgcttcctataatgttatggccgtatgtgataaagagcaggctgattcggttgcggctgctcttaatcataccaaagacttaccagctggtagactaaccgcggatgttgaagtggtttggttccttgaccaagctgctgcgtctaaactccctcatggctggtgctccatcctttgatttaaacgtttatgtttttgtctcactaagtcgtatggtttggtgttttgtaaaccgtgtattgcttaattacttgttatgttgtgtagcaacaccatattgtgatattgatcttggtgactttggtttt

SEQ ID NO: 39589 - protein, 259 aa, Arabidopsis thaliana
  peptide (1)..(259): Ceres Seq. ID no. 13497576
  misc_feature (19)..(254): Pfam Name: Glucosamine-6-phosphate Pfam Description: Glucosamine-6-phosphate
  misc_feature (8)..(251): Homolog of NCBI NO: 28140256 NR Description: putative 6-phosphogluconolactonase [Elaeis
  misc_feature (5)..(251): Homolog of NCBI NO: 10177901 NR Description: 6-phosphogluconolactonase-like protein
  misc_feature (1)..(251): Homolog of NCBI NO: 18420789 NR Description: 6-phosphogluconolactonase-related protein
  misc_feature (1)..(251): Homolog of NCBI NO: 21554291 NR Description: 6-phosphogluconolactonase-like protein
  misc_feature (5)..(251): Homolog of NCBI NO: 14009294 NR Description: putative 6-phosphogluconolactonase [Brassica
  misc_feature (1)..(251): Homolog of NCBI NO: 15238526 NR Description: 6-phosphogluconolactonase-related protein
  misc_feature (1)..(251): Homolog of NCBI NO: 21537412 NR Description: 6-phosphogluconolactonase-like protein
  misc_feature (5)..(254): Homolog of NCBI NO: 15238523 NR Description: 6-phosphogluconolactonase-related protein
  misc_feature (1)..(259): Homolog of NCBI NO: 21536675 NR Description: 6-phosphogluconolactonase-like protein
  misc_feature (1)..(259): Homolog of NCBI NO: 15229127 NR Description: 6-phosphogluconolactonase - like protein
MAPVKRRVFKTNNEMAVELAKYTADLSSKFCKERGVFTVVLSGGDLIAWLWKLLEAPYIDSIEWSKWHIFWVDERVCAWDHADSNYKLAYDGFLSKVPVPAENIYAIDNGLGAEGNAELAAERYEECLKQKVNQNIIRTYKSSGFPQFDLQLLGMGPDGHMASLFPGHAQINEKVKWVTSITDSPKPPSKRITLTLPVINCASYNVMAVCDKEQADSVAAALNHTKDLPAGRLTADVEVVWFLDQAAASKLPHGWCSIL

SEQ ID NO: 39590 - protein, 245 aa, Arabidopsis thaliana
  peptide (1)..(245): Ceres Seq. ID no. 13497577
  misc_feature (5)..(240): Pfam Name: Glucosamine-6-phosphate Pfam Description: Glucosamine-6-phosphate
  misc_feature (1)..(237): Homolog of NCBI NO: 28140256 NR Description: putative 6-phosphogluconolactonase [Elaeis
  misc_feature (1)..(237): Homolog of NCBI NO: 10177901 NR Description: 6-phosphogluconolactonase-like protein
  misc_feature (1)..(237): Homolog of NCBI NO: 18420789 NR Description: 6-phosphogluconolactonase-related protein
  misc_feature (1)..(237): Homolog of NCBI NO: 21554291 NR Description: 6-phosphogluconolactonase-like protein
  misc_feature (1)..(237): Homolog of NCBI NO: 14009294 NR Description: putative 6-phosphogluconolactonase [Brassica
  misc_feature (1)..(237): Homolog of NCBI NO: 15238526 NR Description: 6-phosphogluconolactonase-related protein
  misc_feature (1)..(237): Homolog of NCBI NO: 21537412 NR Description: 6-phosphogluconolactonase-like protein
  misc_feature (1)..(240): Homolog of NCBI NO: 15238523 NR Description: 6-phosphogluconolactonase-related protein
  misc_feature (1)..(245): Homolog of NCBI NO: 21536675 NR Description: 6-phosphogluconolactonase-like protein
  misc_feature (1)..(245): Homolog of NCBI NO: 15229127 NR Description: 6-phosphogluconolactonase - like protein
MAVELAKYTADLSSKFCKERGVFTVVLSGGDLIAWLWKLLEAPYIDSIEWSKWHIFWVDERVCAWDHADSNYKLAYDGFLSKVPVPAENIYAIDNGLGAEGNAELAAERYEECLKQKVNQNIIRTYKSSGFPQFDLQLLGMGPDGHMASLFPGHAQINEKVKWVTSITDSPKPPSKRITLTLPVINCASYNVMAVCDKEQADSVAAALNHTKDLPAGRLTADVEVVWFLDQAAASKLPHGWCSIL

SEQ ID NO: 39591 - DNA, 1648 bp, Arabidopsis thaliana
  misc_feature (1)..(1648): Ceres Seq. ID no. 12395358
  misc_feature: MA Experiment ID: 108434 Result: Up-regulated in Transcription
  misc_feature: MA Experiment 108434 PARAMETER Experiment Name: At_Root_Tips_cDNA_P Parameter: Tissue Value: Root Tips
  misc_feature: MA Experiment ID: 108461 Result: Up-regulated in Transcription
  misc_feature: MA Experiment 108461 PARAMETER Experiment Name: At_Germinating_Seeds_cDNA_P Parameter: Age (day) Value: 1 vs. 0
  misc_feature: MA Experiment 108461 PARAMETER Experiment Name: At_Germinating_Seeds_cDNA_P Parameter: Tissue Value: Germinating Seeds
  misc_feature: MA Experiment ID: 108462 Result: Up-regulated in Transcription
  misc_feature: MA Experiment 108462 PARAMETER Experiment Name: At_Germinating_Seeds_cDNA_P Parameter: Age (day) Value: 2 vs. 0
  misc_feature: MA Experiment 108462 PARAMETER Experiment Name: At_Germinating_Seeds_cDNA_P Parameter: Tissue Value: Germinating Seeds
  misc_feature: MA Experiment ID: 20000071 Result: Down-regulated in Transcription
  misc_feature: MA Experiment 20000071 PARAMETER Experiment Name: At_100uM_ABA_Mutants_cDNA_P Parameter: Plant Line Value: CS8104
  misc_feature: MA Experiment 20000071 PARAMETER Experiment Name: At_100uM_ABA_Mutants_cDNA_P Parameter: Timepoint (hr) Value: 6
  misc_feature: MA Experiment 20000071 PARAMETER Experiment Name: At_100uM_ABA_Mutants_cDNA_P Parameter: Tissue Value: Aerial
  misc_feature: MA Experiment 20000071 PARAMETER Experiment Name: At_100uM_ABA_Mutants_cDNA_P Parameter: Treatment Value: 100uM ABA vs. No Treatment
  misc_feature: MA Experiment ID: 20000185 Result: Up-regulated in Transcription
  misc_feature: MA Experiment 20000185 PARAMETER Experiment Name: At_Roots__P Parameter: Age (day) Value: 7 vs. 21
  misc_feature: MA Experiment 20000185 PARAMETER Experiment Name: At_Roots__P Parameter: Organism Value: A. thaliana
  misc_feature: MA Experiment 20000185 PARAMETER Experiment Name: At_Roots__P Parameter: Tissue Value: Roots vs. Whole Plant
  misc_feature: MA Experiment ID: 20000227 Result: Up-regulated in Transcription
  misc_feature: MA Experiment 20000227 PARAMETER Experiment Name: At_Root-Tips-vs-Tops_P Parameter: Tissue Value: Root Tips vs. Root Tops
  misc_feature: MA Experiment ID: 20000234 Result: Up-regulated in Transcription
  misc_feature: MA Experiment 20000234 PARAMETER Experiment Name: At_Siliques_P Parameter: Age (day) Value: 21
  misc_feature: MA Experiment 20000234 PARAMETER Experiment Name: At_Siliques_P Parameter: Organism Value: A. thaliana
  misc_feature: MA Experiment 20000234 PARAMETER Experiment Name: At_Siliques_P Parameter: Plant Line Value: WS
  misc_feature: MA Experiment 20000234 PARAMETER Experiment Name: At_Siliques_P Parameter: Tissue Value: Less Than 5mm Siliques vs. Whole Plant
  misc_feature: MA Experiment ID: 20000439 Result: Up-regulated in Transcription
  misc_feature: MA Experiment 20000439 PARAMETER Experiment Name: At_Roots__P Parameter: Age (day) Value: 14 vs. 21
  misc_feature: MA Experiment 20000439 PARAMETER Experiment Name: At_Roots__P Parameter: Organism Value: A. thaliana
  misc_feature: MA Experiment 20000439 PARAMETER Experiment Name: At_Roots__P Parameter: Tissue Value: Roots vs. Whole Plant
  misc_feature: MA Experiment ID: 20001560 Result: Up-regulated in Transcription
  misc_feature: MA Experiment 20001560 PARAMETER Experiment Name: At_Drought_Soil_Dry_P Parameter: Age (day) Value: 28
  misc_feature: MA Experiment 20001560 PARAMETER Experiment Name: At_Drought_Soil_Dry_P Parameter: Organism Value: A. thaliana
  misc_feature: MA Experiment 20001560 PARAMETER Experiment Name: At_Drought_Soil_Dry_P Parameter: Plant Line Value: WS
  misc_feature: MA Experiment 20001560 PARAMETER Experiment Name: At_Drought_Soil_Dry_P Parameter: Post Timepoint (hr) Value: None
  misc_feature: MA Experiment 20001560 PARAMETER Experiment Name: At_Drought_Soil_Dry_P Parameter: Post-Treatment Value: None
  misc_feature: MA Experiment 20001560 PARAMETER Experiment Name: At_Drought_Soil_Dry_P Parameter: Timepoint (day) Value: 14
  misc_feature: MA Experiment 20001560 PARAMETER Experiment Name: At_Drought_Soil_Dry_P Parameter: Treatment Value: Drought vs. No Drought
aaagaaacaaaaggatttatttataaaaaaaaaaaagagatgaagacagctcaagggatgcaatagagccaagaggaggagaaagatgggatctgctccaaacttgtaccagtcgcatcaaagcaagttttggtgaagaagaagagacgaggtcttcctcttactgtggtggtgacattttctctaaaaagaaagtctccgatatgtcgcagagatggagtagaaagaagagtagacttccattagcgggtctcctctttattctcgttgtcacctttatgattctcttcaacgagcgtagcattcagcagattcatcaccacgccgcgagtcacactcaaaatctccgagaaccttccacgttcgatttcgtcaagcctaatgttcctcggattaactacttgggagctcatgaggttttgggtagattcagcaaatgcaactcgacgaaagagtacagtgggaagaaaatcggatgcgttgacccgtttgaagaccacccgggtcaagtaacaaaggaggagcagaaatgtgatgtcttttctgggaaatgggtctttgataattcatcatcataccctttacacaaggaatctcagtgtccttacatgtccgaccagttggcttgtcagaagcatggtaggaaggatttggagtatcagcattggagatggcaacctcatgcctgcaacttgaagagatggaatgtgatagaaatgtgggagaagctgagaggaaagagattgatgtttgttggagactcgttaaacagaagccaatggatttcaatggtttgtctcttacggtctgtcattccacgtgacaagcagtctatgtctcctaacgctcacctcaccattttcagggctgaggactacaatgccacagtggagtttctctgggcaccgttgctcgtggagtcgaattctgatgaccctgttaatcacagattgagcgagcggattatccgacccgattctgttcttaaacatgcatcaaagtggcaacatgctgatattctaatcttcaacacctacttatggtggagacaagactctgtcaagctccgatggagcagtgaagaaaaagggtcatgcgaggaggtgaagagcgccgagggaatggagatggcaatggatagttggggtgattgggttgctaacaatgtcgatccaaacaaaaagcgagttttcttcgttacaatgtctcctacacatcaatggagccgagaatggaacccgggaagcgaaggaaactgctacggggagaagaaaccaatagaggaagagagttattggggaagtgggtcggacattccgacaatgaggatggtgaagagagttttggagagattgggaccaaaggtctcagttataaacatcactcagttgtctgagtatcgaaaagatggtcatccatcggtgtaccggaaattctgggaacctctaaatgaagaccggttgaaaaacccggcatcgtattctgactgtactcattggtgtgtacctggagttcctgatgtctggaatcaattgcttttccattttttgtgaaaatgaaatgaatataaccttaccttgatggccgaatatcacccataaattatataacggggtgatttcagctagctataaggatccaaatttgt

SEQ ID NO: 39592 - protein, 449 aa, Arabidopsis thaliana
  peptide (1)..(449): Ceres Seq. ID no. 12395359
  misc_feature (280)..(449): Pfam Name: Arabidopsis proteins of unknown function Pfam Description: Arabidopsis proteins of unknown function
  misc_feature (103)..(449): Homolog of NCBI NO: 15219382 NR Description: hypothetical protein; protein id: At1g73140.1
  misc_feature (103)..(446): Homolog of NCBI NO: 15228429 NR Description: unknown protein; protein id: At3g11030.1
  misc_feature (103)..(446): Homolog of NCBI NO: 15226647 NR Description: hypothetical protein; protein id: At2g40320.1
  misc_feature (103)..(446): Homolog of NCBI NO: 28393743 NR Description: unknown protein [Arabidopsis thaliana]
  misc_feature (110)..(446): Homolog of NCBI NO: 28876013 NR Description: unknown protein [Oryza sativa (japonica
  misc_feature (108)..(449): Homolog of NCBI NO: 18404712 NR Description: expressed protein
  misc_feature (108)..(449): Homolog of NCBI NO: 7487161 NR Description: hypothetical protein At2g38320 [imported] -
  misc_feature (1)..(449): Homolog of NCBI NO: 11291876 NR Description: hypothetical protein F7A7.140 - Arabidopsis
  misc_feature (1)..(449): Homolog of NCBI NO: 18413698 NR Description: putative protein
  misc_feature (1)..(449): Homolog of NCBI NO: 21536676 NR Description: unknown [Arabidopsis thaliana]
MSQRWSRKKSRLPLAGLLFILVVTFMILFNERSIQQIHHHAASHTQNLREPSTFDFVKPNVPRINYLGAHEVLGRFSKCNSTKEYSGKKIGCVDPFEDHPGQVTKEEQKCDVFSGKWVFDNSSSYPLHKESQCPYMSDQLACQKHGRKDLEYQHWRWQPHACNLKRWNVIEMWEKLRGKRLMFVGDSLNRSQWISMVCLLRSVIPRDKQSMSPNAHLTIFRAEDYNATVEFLWAPLLVESNSDDPVNHRLSERIIRPDSVLKHASKWQHADILIFNTYLWWRQDSVKLRWSSEEKGSCEEVKSAEGMEMAMDSWGDWVANNVDPNKKRVFFVTMSPTHQWSREWNPGSEGNCYGEKKPIEEESYWGSGSDIPTMRMVKRVLERLGPKVSVINITQLSEYRKDGHPSVYRKFWEPLNEDRLKNPASYSDCTHWCVPGVPDVWNQLLFHFL

SEQ ID NO: 39593 - protein, 424 aa, Arabidopsis thaliana
  peptide (1)..(424): Ceres Seq. ID no. 12395360
  misc_feature (255)..(424): Pfam Name: Arabidopsis proteins of unknown function Pfam Description: Arabidopsis proteins of unknown function
  misc_feature (78)..(424): Homolog of NCBI NO: 15219382 NR Description: hypothetical protein; protein id: At1g73140.1
  misc_feature (78)..(421): Homolog of NCBI NO: 15228429 NR Description: unknown protein; protein id: At3g11030.1
  misc_feature (78)..(421): Homolog of NCBI NO: 15226647 NR Description: hypothetical protein; protein id: At2g40320.1
  misc_feature (78)..(421): Homolog of NCBI NO: 28393743 NR Description: unknown protein [Arabidopsis thaliana]
  misc_feature (85)..(421): Homolog of NCBI NO: 28876013 NR Description: unknown protein [Oryza sativa (japonica
  misc_feature (83)..(424): Homolog of NCBI NO: 18404712 NR Description: expressed protein
  misc_feature (83)..(424): Homolog of NCBI NO: 7487161 NR Description: hypothetical protein At2g38320 [imported] -
  misc_feature (1)..(424): Homolog of NCBI NO: 11291876 NR Description: hypothetical protein F7A7.140 - Arabidopsis
  misc_feature (1)..(424): Homolog of NCBI NO: 18413698 NR Description: putative protein
  misc_feature (1)..(424): Homolog of NCBI NO: 21536676 NR Description: unknown [Arabidopsis thaliana]
MILFNERSIQQIHHHAASHTQNLREPSTFDFVKPNVPRINYLGAHEVLGRFSKCNSTKEYSGKKIGCVDPFEDHPGQVTKEEQKCDVFSGKWVFDNSSSYPLHKESQCPYMSDQLACQKHGRKDLEYQHWRWQPHACNLKRWNVIEMWEKLRGKRLMFVGDSLNRSQWISMVCLLRSVIPRDKQSMSPNAHLTIFRAEDYNATVEFLWAPLLVESNSDDPVNHRLSERIIRPDSVLKHASKWQHADILIFNTYLWWRQDSVKLRWSSEEKGSCEEVKSAEGMEMAMDSWGDWVANNVDPNKKRVFFVTMSPTHQWSREWNPGSEGNCYGEKKPIEEESYWGSGSDIPTMRMVKRVLERLGPKVSVINITQLSEYRKDGHPSVYRKFWEPLNEDRLKNPASYSDCTHWCVPGVPDVWNQLLFHFL

SEQ ID NO: 39594 - protein, 314 aa, Arabidopsis thaliana
  peptide (1)..(314): Ceres Seq. ID no. 12395361
  misc_feature (145)..(314): Pfam Name: Arabidopsis proteins of unknown function Pfam Description: Arabidopsis proteins of unknown function
  misc_feature (1)..(314): Homolog of NCBI NO: 15219382 NR Description: hypothetical protein; protein id: At1g73140.1
  misc_feature (1)..(311): Homolog of NCBI NO: 15228429 NR Description: unknown protein; protein id: At3g11030.1
  misc_feature (1)..(311): Homolog of NCBI NO: 15226647 NR Description: hypothetical protein; protein id: At2g40320.1
  misc_feature (1)..(311): Homolog of NCBI NO: 28393743 NR Description: unknown protein [Arabidopsis thaliana]
  misc_feature (1)..(311): Homolog of NCBI NO: 28876013 NR Description: unknown protein [Oryza sativa (japonica
  misc_feature (1)..(314): Homolog of NCBI NO: 18404712 NR Description: expressed protein
  misc_feature (1)..(314): Homolog of NCBI NO: 7487161 NR Description: hypothetical protein At2g38320 [imported] -
  misc_feature (1)..(314): Homolog of NCBI NO: 11291876 NR Description: hypothetical protein F7A7.140 - Arabidopsis
  misc_feature (1)..(314): Homolog of NCBI NO: 18413698 NR Description: putative protein
  misc_feature (1)..(314): Homolog of NCBI NO: 21536676 NR Description: unknown [Arabidopsis thaliana]
MSDQLACQKHGRKDLEYQHWRWQPHACNLKRWNVIEMWEKLRGKRLMFVGDSLNRSQWISMVCLLRSVIPRDKQSMSPNAHLTIFRAEDYNATVEFLWAPLLVESNSDDPVNHRLSERIIRPDSVLKHASKWQHADILIFNTYLWWRQDSVKLRWSSEEKGSCEEVKSAEGMEMAMDSWGDWVANNVDPNKKRVFFVTMSPTHQWSREWNPGSEGNCYGEKKPIEEESYWGSGSDIPTMRMVKRVLERLGPKVSVINITQLSEYRKDGHPSVYRKFWEPLNEDRLKNPASYSDCTHWCVPGVPDVWNQLLFHFL

SEQ ID NO: 39595 - DNA, 1117 bp, Arabidopsis thaliana
  misc_feature (1)..(1117): Ceres Seq. ID no. 12325040
  misc_feature: MA Experiment ID: 108461 Result: Up-regulated in Transcription
  misc_feature: MA Experiment 108461 PARAMETER Experiment Name: At_Germinating_Seeds_cDNA_P Parameter: Age (day) Value: 1 vs. 0
  misc_feature: MA Experiment 108461 PARAMETER Experiment Name: At_Germinating_Seeds_cDNA_P Parameter: Tissue Value: Germinating Seeds
  misc_feature: MA Experiment ID: 108488 Result: Down-regulated in Transcription
  misc_feature: MA Experiment ID: 108561 Result: Up-regulated in Transcription
  misc_feature: MA Experiment 108561 PARAMETER Experiment Name: At_100uM_ABA_cDNA_P Parameter: Timepoint (hr) Value: 6
  misc_feature: MA Experiment 108561 PARAMETER Experiment Name: At_100uM_ABA_cDNA_P Parameter: Tissue Value: Aerial
  misc_feature: MA Experiment 108561 PARAMETER Experiment Name: At_100uM_ABA_cDNA_P Parameter: Treatment Value: 100uM ABA vs. No Treatment
  misc_feature: MA Experiment ID: 108572 Result: Up-regulated in Transcription
  misc_feature: MA Experiment 108572 PARAMETER Experiment Name: At_Drought_cDNA_P Parameter: Timepoint (hr) Value: 1
  misc_feature: MA Experiment 108572 PARAMETER Experiment Name: At_Drought_cDNA_P Parameter: Tissue Value: Aerial
  misc_feature: MA Experiment 108572 PARAMETER Experiment Name: At_Drought_cDNA_P Parameter: Treatment Value: Drought vs. No Drought
  misc_feature: MA Experiment ID: 108573 Result: Up-regulated in Transcription
  misc_feature: MA Experiment 108573 PARAMETER Experiment Name: At_Drought_cDNA_P Parameter: Timepoint (hr) Value: 6
  misc_feature: MA Experiment 108573 PARAMETER Experiment Name: At_Drought_cDNA_P Parameter: Tissue Value: Aerial
  misc_feature: MA Experiment 108573 PARAMETER Experiment Name: At_Drought_cDNA_P Parameter: Treatment Value: Drought vs. No Drought
  misc_feature: MA Experiment ID: 108605 Result: Up-regulated in Transcription
  misc_feature: MA Experiment 108605 PARAMETER Experiment Name: At_100uM_ABA_cDNA_P Parameter: Timepoint (hr) Value: 6
  misc_feature: MA Experiment 108605 PARAMETER Experiment Name: At_100uM_ABA_cDNA_P Parameter: Tissue Value: Aerial
  misc_feature: MA Experiment 108605 PARAMETER Experiment Name: At_100uM_ABA_cDNA_P Parameter: Treatment Value: 100uM ABA vs. No Treatment
  misc_feature: MA Experiment ID: 108607 Result: Up-regulated in Transcription
  misc_feature: MA Experiment 108607 PARAMETER Experiment Name: At_100uM_ABA_cDNA_P Parameter: Timepoint (hr) Value: 4
  misc_feature: MA Experiment 108607 PARAMETER Experiment Name: At_100uM_ABA_cDNA_P Parameter: Tissue Value: Aerial
  misc_feature: MA Experiment 108607 PARAMETER Experiment Name: At_100uM_ABA_cDNA_P Parameter: Treatment Value: 100uM ABA vs. No Treatment
  misc_feature: MA Experiment ID: 20000070 Result: Up-regulated in Transcription
  misc_feature: MA Experiment 20000070 PARAMETER Experiment Name: At_100uM_ABA_Mutants_cDNA_P Parameter: Plant Line Value: CS24
  misc_feature: MA Experiment 20000070 PARAMETER Experiment Name: At_100uM_ABA_Mutants_cDNA_P Parameter: Timepoint (hr) Value: 6
  misc_feature: MA Experiment 20000070 PARAMETER Experiment Name: At_100uM_ABA_Mutants_cDNA_P Parameter: Tissue Value: Aerial
  misc_feature: MA Experiment 20000070 PARAMETER Experiment Name: At_100uM_ABA_Mutants_cDNA_P Parameter: Treatment Value: 100uM ABA vs. No Treatment
  misc_feature: MA Experiment ID: 20000072 Result: Up-regulated in Transcription
  misc_feature: MA Experiment 20000072 PARAMETER Experiment Name: At_100uM_ABA_Mutants_cDNA_P Parameter: Plant Line Value: CS8105
  misc_feature: MA Experiment 20000072 PARAMETER Experiment Name: At_100uM_ABA_Mutants_cDNA_P Parameter: Timepoint (hr) Value: 6
  misc_feature: MA Experiment 20000072 PARAMETER Experiment Name: At_100uM_ABA_Mutants_cDNA_P Parameter: Tissue Value: Aerial
  misc_feature: MA Experiment 20000072 PARAMETER Experiment Name: At_100uM_ABA_Mutants_cDNA_P Parameter: Treatment Value: 100uM ABA vs. No Treatment
  misc_feature: MA Experiment ID: 20000086 Result: Up-regulated in Transcription
  misc_feature: MA Experiment 20000086 PARAMETER Experiment Name: At_100uM_ABA_Mutants_cDNA_P Parameter: Plant Line Value: CS22
  misc_feature: MA Experiment 20000086 PARAMETER Experiment Name: At_100uM_ABA_Mutants_cDNA_P Parameter: Timepoint (hr) Value: 6
  misc_feature: MA Experiment 20000086 PARAMETER Experiment Name: At_100uM_ABA_Mutants_cDNA_P Parameter: Tissue Value: Aerial
  misc_feature: MA Experiment 20000086 PARAMETER Experiment Name: At_100uM_ABA_Mutants_cDNA_P Parameter: Treatment Value: 100uM ABA vs. No Treatment
  misc_feature: MA Experiment ID: 20000087 Result: Up-regulated in Transcription
  misc_feature: MA Experiment 20000087 PARAMETER Experiment Name: At_100uM_ABA_Mutants_cDNA_P Parameter: Plant Line Value: WS
  misc_feature: MA Experiment 20000087 PARAMETER Experiment Name: At_100uM_ABA_Mutants_cDNA_P Parameter: Timepoint (hr) Value: 6
  misc_feature: MA Experiment 20000087 PARAMETER Experiment Name: At_100uM_ABA_Mutants_cDNA_P Parameter: Tissue Value: Aerial
  misc_feature: MA Experiment 20000087 PARAMETER Experiment Name: At_100uM_ABA_Mutants_cDNA_P Parameter: Treatment Value: 100uM ABA vs. No Treatment
  misc_feature: MA Experiment ID: 20000111 Result: Down-regulated in Transcription
  misc_feature: MA Experiment 20000111 PARAMETER Experiment Name: At_42deg_Heat_cDNA_P Parameter: Temperature (deg C) Value: 42 vs. 22
  misc_feature: MA Experiment 20000111 PARAMETER Experiment Name: At_42deg_Heat_cDNA_P Parameter: Timepoint (hr) Value: 6
  misc_feature: MA Experiment 20000111 PARAMETER Experiment Name: At_42deg_Heat_cDNA_P Parameter: Tissue Value: Aerial
  misc_feature: MA Experiment ID: 20000180 Result: Up-regulated in Transcription
  misc_feature: MA Experiment 20000180 PARAMETER Experiment Name: At_Germinating_Seeds_P Parameter: Age (hr) Value: 24 vs. 0
  misc_feature: MA Experiment 20000180 PARAMETER Experiment Name: At_Germinating_Seeds_P Parameter: Tissue Value: Germinating Seeds
  misc_feature: MA Experiment ID: 20000227 Result: Up-regulated in Transcription
  misc_feature: MA Experiment 20000227 PARAMETER Experiment Name: At_Root-Tips-vs-Tops_P Parameter: Tissue Value: Root Tips vs. Root Tops
  misc_feature: MA Experiment ID: 20001757 Result: Down-regulated in Transcription
  misc_feature: MA Experiment 20001757 PARAMETER Experiment Name: At_50mM_NH4NO3_L-to-H_P Parameter: Timepoint (hr) Value: 6
  misc_feature: MA Experiment 20001757 PARAMETER Experiment Name: At_50mM_NH4NO3_L-to-H_P Parameter: Tissue Value: Leaf
  misc_feature: MA Experiment 20001757 PARAMETER Experiment Name: At_50mM_NH4NO3_L-to-H_P Parameter: Treatment Value: 50mM NH4NO3 vs 100mM Mannitol
actggatttgatgatgttgtagatgatgcaatggcgatattcgtagctttaaattcacctaaagttgatgtcattggcctcactactatctttggaaacgtgtataccactctcgccactcgaaacgccttgcatttgttggaggttgcgggtaggaccgatattccggtggctgaaggaacacataaaaccttcttgaacgatacgaagcttcgaatagctgactttgttcatggaaaagatgggcttagcaaccaaaacttccctccacctaaaggaaaaccaattgaaaagtctggacctgagtttttagttgaacaagcaaagctttaccctggtgaaatcacggttgttgctttgggaccactaacaaatctcgcgttggctgttcagcttgatccagagttttcgaaaaatgtcggacaaattgttcttcttggtggagcatttgcagtaaacggaaatgtaaatccagcttcggaagctaatatttttggcgatcccgaagctgcagatattgtgttcacatgtggggccgatataattgctgtgggaatcaatgtgacccatcaagttattatgacagctgatgacaaggacaaactagcatcatcgaaggggaaattagctcaatatctctgtaaaatccttgatgtgtactatgattatcatctcacggcttacgaaatcaaaggtgtgtaccttcatgatcctgcgacgatccttgcggctttccttccttctctattcacttatacagaaggagttgctagagtgcagacaagtggtatcactaggggactcactttactgtacaacaatcttaagaggtttgaggaagcgaacgagtggtcagacaaaccaacggtaaaagtggcagtgacggttgatgctcctgcagtcgtgaagctcataatggataggcttatggagtcttaaaccatcttgggtcgttaattagttatctctttctctttgatgtttcactattgcgagccatttctcttgttaaaaataaggctcctcttgctgcattatttatttattgtttaatctttattaaaacgaatattattatgttaccaattaccaataataaagttaagatttttcctcc

SEQ ID NO: 39596 - protein, 312 aa, Arabidopsis thaliana
  peptide (1)..(312): Ceres Seq. ID no. 12325041
  misc_feature (4)..(304): Homolog of NCBI NO: 22984963 NR Description: hypothetical protein [Burkholderia fungorum]
  misc_feature (4)..(305): Homolog of NCBI NO: 17935486 NR Description: inosine-uridine preferring nucleoside hydrolase
  misc_feature (4)..(305): Homolog of NCBI NO: 15888904 NR Description: AGR_C_2923p [Agrobacterium tumefaciens]
  misc_feature (230)..(278): Homolog of NCBI NO: 25321061 NR Description: hypothetical protein At2g36310 [imported] -
  misc_feature (11)..(234): Homolog of NCBI NO: 25321061 NR Description: hypothetical protein At2g36310 [imported] -
  misc_feature (4)..(311): Homolog of NCBI NO: 18404099 NR Description: expressed protein
  misc_feature (4)..(309): Homolog of NCBI NO: 30089728 NR Description: putative inosine-uridine preferring nucleoside
  misc_feature (4)..(312): Homolog of NCBI NO: 18390550 NR Description: expressed protein
  misc_feature (196)..(312): Homolog of NCBI NO: 25321071 NR Description: hypothetical protein [imported] - Arabidopsis
  misc_feature (1)..(195): Homolog of NCBI NO: 25321071 NR Description: hypothetical protein [imported] - Arabidopsis
  misc_feature (4)..(304): Homolog of NCBI NO: 22984963 NR Description: hypothetical protein [Burkholderia fungorum]
  misc_feature (4)..(305): Homolog of NCBI NO: 17935486 NR Description: inosine-uridine preferring nucleoside hydrolase
  misc_feature (4)..(305): Homolog of NCBI NO: 15888904 NR Description: AGR_C_2923p [Agrobacterium tumefaciens]
  misc_feature (230)..(278): Homolog of NCBI NO: 25321061 NR Description: hypothetical protein At2g36310 [imported] -
  misc_feature (11)..(234): Homolog of NCBI NO: 25321061 NR Description: hypothetical protein At2g36310 [imported] -
  misc_feature (4)..(311): Homolog of NCBI NO: 18404099 NR Description: expressed protein
  misc_feature (4)..(309): Homolog of NCBI NO: 30089728 NR Description: putative inosine-uridine preferring nucleoside
  misc_feature (4)..(312): Homolog of NCBI NO: 18390550 NR Description: expressed protein
  misc_feature (196)..(312): Homolog of NCBI NO: 25321071 NR Description: hypothetical protein [imported] - Arabidopsis
  misc_feature (1)..(195): Homolog of NCBI NO: 25321071 NR Description: hypothetical protein [imported] - Arabidopsis
TGFDDVVDDAMAIFVALNSPKVDVIGLTTIFGNVYTTLATRNALHLLEVAGRTDIPVAEGTHKTFLNDTKLRIADFVHGKDGLSNQNFPPPKGKPIEKSGPEFLVEQAKLYPGEITVVALGPLTNLALAVQLDPEFSKNVGQIVLLGGAFAVNGNVNPASEANIFGDPEAADIVFTCGADIIAVGINVTHQVIMTADDKDKLASSKGKLAQYLCKILDVYYDYHLTAYEIKGVYLHDPATILAAFLPSLFTYTEGVARVQTSGITRGLTLLYNNLKRFEEANEWSDKPTVKVAVTVDAPAVVKLIMDRLMES

SEQ ID NO: 39597 - protein, 302 aa, Arabidopsis thaliana
  peptide (1)..(302): Ceres Seq. ID no. 12325042
  misc_feature (1)..(294): Homolog of NCBI NO: 22984963 NR Description: hypothetical protein [Burkholderia fungorum]
  misc_feature (1)..(295): Homolog of NCBI NO: 17935486 NR Description: inosine-uridine preferring nucleoside hydrolase
  misc_feature (1)..(295): Homolog of NCBI NO: 15888904 NR Description: AGR_C_2923p [Agrobacterium tumefaciens]
  misc_feature (220)..(268): Homolog of NCBI NO: 25321061 NR Description: hypothetical protein At2g36310 [imported] -
  misc_feature (1)..(224): Homolog of NCBI NO: 25321061 NR Description: hypothetical protein At2g36310 [imported] -
  misc_feature (1)..(301): Homolog of NCBI NO: 18404099 NR Description: expressed protein
  misc_feature (1)..(299): Homolog of NCBI NO: 30089728 NR Description: putative inosine-uridine preferring nucleoside
  misc_feature (1)..(302): Homolog of NCBI NO: 18390550 NR Description: expressed protein
  misc_feature (186)..(302): Homolog of NCBI NO: 25321071 NR Description: hypothetical protein [imported] - Arabidopsis
  misc_feature (1)..(185): Homolog of NCBI NO: 25321071 NR Description: hypothetical protein [imported] - Arabidopsis
  misc_feature (1)..(294): Homolog of NCBI NO: 22984963 NR Description: hypothetical protein [Burkholderia fungorum]
  misc_feature (1)..(295): Homolog of NCBI NO: 17935486 NR Description: inosine-uridine preferring nucleoside hydrolase
  misc_feature (1)..(295): Homolog of NCBI NO: 15888904 NR Description: AGR_C_2923p [Agrobacterium tumefaciens]
  misc_feature (220)..(268): Homolog of NCBI NO: 25321061 NR Description: hypothetical protein At2g36310 [imported] -
  misc_feature (1)..(224): Homolog of NCBI NO: 25321061 NR Description: hypothetical protein At2g36310 [imported] -
  misc_feature (1)..(301): Homolog of NCBI NO: 18404099 NR Description: expressed protein
  misc_feature (1)..(299): Homolog of NCBI NO: 30089728 NR Description: putative inosine-uridine preferring nucleoside
  misc_feature (1)..(302): Homolog of NCBI NO: 18390550 NR Description: expressed protein
  misc_feature (186)..(302): Homolog of NCBI NO: 25321071 NR Description: hypothetical protein [imported] - Arabidopsis
  misc_feature (1)..(185): Homolog of NCBI NO: 25321071 NR Description: hypothetical protein [imported] - Arabidopsis
MAIFVALNSPKVDVIGLTTIFGNVYTTLATRNALHLLEVAGRTDIPVAEGTHKTFLNDTKLRIADFVHGKDGLSNQNFPPPKGKPIEKSGPEFLVEQAKLYPGEITVVALGPLTNLALAVQLDPEFSKNVGQIVLLGGAFAVNGNVNPASEANIFGDPEAADIVFTCGADIIAVGINVTHQVIMTADDKDKLASSKGKLAQYLCKILDVYYDYHLTAYEIKGVYLHDPATILAAFLPSLFTYTEGVARVQTSGITRGLTLLYNNLKRFEEANEWSDKPTVKVAVTVDAPAVVKLIMDRLMES

SEQ ID NO: 39598 - DNA, 1707 bp, Arabidopsis thaliana
  misc_feature (1)..(1707): Ceres Seq. ID no. 13488719
  misc_feature: MA Experiment ID: 108461 Result: Up-regulated in Transcription
  misc_feature: MA Experiment 108461 PARAMETER Experiment Name: At_Germinating_Seeds_cDNA_P Parameter: Age (day) Value: 1 vs. 0
  misc_feature: MA Experiment 108461 PARAMETER Experiment Name: At_Germinating_Seeds_cDNA_P Parameter: Tissue Value: Germinating Seeds
  misc_feature: MA Experiment ID: 20000171 Result: Down-regulated in Transcription
  misc_feature: MA Experiment 20000171 PARAMETER Experiment Name: At_42deg_Heat_P Parameter: Age (day) Value: 14
  misc_feature: MA Experiment 20000171 PARAMETER Experiment Name: At_42deg_Heat_P Parameter: Organism Value: A. thaliana
  misc_feature: MA Experiment 20000171 PARAMETER Experiment Name: At_42deg_Heat_P Parameter: Plant Line Value: WS
  misc_feature: MA Experiment 20000171 PARAMETER Experiment Name: At_42deg_Heat_P Parameter: Temperature (deg C) Value: 42 vs. 22
  misc_feature: MA Experiment 20000171 PARAMETER Experiment Name: At_42deg_Heat_P Parameter: Timepoint (hr) Value: 1
  misc_feature: MA Experiment 20000171 PARAMETER Experiment Name: At_42deg_Heat_P Parameter: Tissue Value: Aerial
  misc_feature: MA Experiment ID: 20000173 Result: Down-regulated in Transcription
  misc_feature: MA Experiment 20000173 PARAMETER Experiment Name: At_42deg_Heat_P Parameter: Age (day) Value: 14
  misc_feature: MA Experiment 20000173 PARAMETER Experiment Name: At_42deg_Heat_P Parameter: Organism Value: A. thaliana
  misc_feature: MA Experiment 20000173 PARAMETER Experiment Name: At_42deg_Heat_P Parameter: Plant Line Value: WS
  misc_feature: MA Experiment 20000173 PARAMETER Experiment Name: At_42deg_Heat_P Parameter: Temperature (deg C) Value: 42 vs. 22
  misc_feature: MA Experiment 20000173 PARAMETER Experiment Name: At_42deg_Heat_P Parameter: Timepoint (hr) Value: 6
  misc_feature: MA Experiment 20000173 PARAMETER Experiment Name: At_42deg_Heat_P Parameter: Tissue Value: Aerial
  misc_feature: MA Experiment ID: 20000179 Result: Up-regulated in Transcription
  misc_feature: MA Experiment 20000179 PARAMETER Experiment Name: At_Germinating_Seeds_P Parameter: Age (hr) Value: 6 vs. 0
  misc_feature: MA Experiment 20000179 PARAMETER Experiment Name: At_Germinating_Seeds_P Parameter: Tissue Value: Germinating Seeds
  misc_feature: MA Experiment ID: 20000180 Result: Up-regulated in Transcription
  misc_feature: MA Experiment 20000180 PARAMETER Experiment Name: At_Germinating_Seeds_P Parameter: Age (hr) Value: 24 vs. 0
  misc_feature: MA Experiment 20000180 PARAMETER Experiment Name: At_Germinating_Seeds_P Parameter: Tissue Value: Germinating Seeds
  misc_feature: MA Experiment ID: 20000185 Result: Down-regulated in Transcription
  misc_feature: MA Experiment 20000185 PARAMETER Experiment Name: At_Roots__P Parameter: Age (day) Value: 7 vs. 21
  misc_feature: MA Experiment 20000185 PARAMETER Experiment Name: At_Roots__P Parameter: Organism Value: A. thaliana
  misc_feature: MA Experiment 20000185 PARAMETER Experiment Name: At_Roots__P Parameter: Tissue Value: Roots vs. Whole Plant
  misc_feature: MA Experiment ID: 20000439 Result: Down-regulated in Transcription
  misc_feature: MA Experiment 20000439 PARAMETER Experiment Name: At_Roots__P Parameter: Age (day) Value: 14 vs. 21
  misc_feature: MA Experiment 20000439 PARAMETER Experiment Name: At_Roots__P Parameter: Organism Value: A. thaliana
  misc_feature: MA Experiment 20000439 PARAMETER Experiment Name: At_Roots__P Parameter: Tissue Value: Roots vs. Whole Plant
  misc_feature: MA Experiment ID: 20000794 Result: Down-regulated in Transcription
  misc_feature: MA Experiment 20000794 PARAMETER Experiment Name: At_Petals_P Parameter: Age (day) Value: 23-25 days
  misc_feature: MA Experiment 20000794 PARAMETER Experiment Name: At_Petals_P Parameter: Plant Line Value: WS
  misc_feature: MA Experiment 20000794 PARAMETER Experiment Name: At_Petals_P Parameter: Tissue Value: Petals vs. Whole plant
  misc_feature: MA Experiment ID: 20001247 Result: Up-regulated in Transcription
  misc_feature: MA Experiment 20001247 PARAMETER Experiment Name: At_Far-red-induction_P Parameter: Age (day) Value: 7
  misc_feature: MA Experiment 20001247 PARAMETER Experiment Name: At_Far-red-induction_P Parameter: Light Value: Far-red vs. White
  misc_feature: MA Experiment 20001247 PARAMETER Experiment Name: At_Far-red-induction_P Parameter: Organism Value: A. thaliana
  misc_feature: MA Experiment 20001247 PARAMETER Experiment Name: At_Far-red-induction_P Parameter: Plant Line Value: Columbia
  misc_feature: MA Experiment 20001247 PARAMETER Experiment Name: At_Far-red-induction_P Parameter: Timepoint (hr) Value: 1
  misc_feature: MA Experiment 20001247 PARAMETER Experiment Name: At_Far-red-induction_P Parameter: Tissue Value: Whole Plant
  misc_feature: MA Experiment ID: 20001557 Result: Up-regulated in Transcription
  misc_feature: MA Experiment 20001557 PARAMETER Experiment Name: At_Drought_Soil_Dry_P Parameter: Age (day) Value: 27
  misc_feature: MA Experiment 20001557 PARAMETER Experiment Name: At_Drought_Soil_Dry_P Parameter: Organism Value: A. thaliana
  misc_feature: MA Experiment 20001557 PARAMETER Experiment Name: At_Drought_Soil_Dry_P Parameter: Plant Line Value: WS
  misc_feature: MA Experiment 20001557 PARAMETER Experiment Name: At_Drought_Soil_Dry_P Parameter: Post Timepoint (hr) Value: 3
  misc_feature: MA Experiment 20001557 PARAMETER Experiment Name: At_Drought_Soil_Dry_P Parameter: Post-Treatment Value: Re-Water vs. No Drought
  misc_feature: MA Experiment 20001557 PARAMETER Experiment Name: At_Drought_Soil_Dry_P Parameter: Timepoint (day) Value: 13
  misc_feature: MA Experiment 20001557 PARAMETER Experiment Name: At_Drought_Soil_Dry_P Parameter: Treatment Value: Drought vs. No Drought
  misc_feature: MA Experiment ID: 20001558 Result: Up-regulated in Transcription
  misc_feature: MA Experiment 20001558 PARAMETER Experiment Name: At_Drought_Soil_Dry_P Parameter: Age (day) Value: 27
  misc_feature: MA Experiment 20001558 PARAMETER Experiment Name: At_Drought_Soil_Dry_P Parameter: Organism Value: A. thaliana
  misc_feature: MA Experiment 20001558 PARAMETER Experiment Name: At_Drought_Soil_Dry_P Parameter: Plant Line Value: WS
  misc_feature: MA Experiment 20001558 PARAMETER Experiment Name: At_Drought_Soil_Dry_P Parameter: Post Timepoint (hr) Value: 6
  misc_feature: MA Experiment 20001558 PARAMETER Experiment Name: At_Drought_Soil_Dry_P Parameter: Post-Treatment Value: Re-Water vs. No Drought
  misc_feature: MA Experiment 20001558 PARAMETER Experiment Name: At_Drought_Soil_Dry_P Parameter: Timepoint (day) Value: 13
  misc_feature: MA Experiment 20001558 PARAMETER Experiment Name: At_Drought_Soil_Dry_P Parameter: Treatment Value: Drought vs. No Drought
  misc_feature: MA Experiment ID: 20001911 Result: Down-regulated in Transcription
  misc_feature: MA Experiment 20001911 PARAMETER Experiment Name: At_Drought_Reproduction_P Parameter: Age (day) Value: 40
  misc_feature: MA Experiment 20001911 PARAMETER Experiment Name: At_Drought_Reproduction_P Parameter: Organism Value: A. thaliana
  misc_feature: MA Experiment 20001911 PARAMETER Experiment Name: At_Drought_Reproduction_P Parameter: Plant Line Value: WS
  misc_feature: MA Experiment 20001911 PARAMETER Experiment Name: At_Drought_Reproduction_P Parameter: Timepoint (day) Value: 10
  misc_feature: MA Experiment 20001911 PARAMETER Experiment Name: At_Drought_Reproduction_P Parameter: Tissue Value: Flowers
  misc_feature: MA Experiment 20001911 PARAMETER Experiment Name: At_Drought_Reproduction_P Parameter: Treatment Value: Drought vs. No Drought
caaattccatcatcgtcgccgcaacaatatcttttgctttctctctcattcttcaccagtaacaagcccatctctcgattcttcactctcaaggaaggagacgttttgaaaatcagaaatggtgaagatatgctgcataggagctggttatgtgggtggtccaaccatggcggtgatggctcttaagtgtcctgagattgaagtagtcgttgtggatatctctgaaccaaggatcaatgcttggaacagtgataggcttcctatttacgagccgggattggaagatgtggtgaaacaatgcagagggaaaaacctcttctttagcacagacgtggagaaacatgtatttgagagtgatattgtatttgtctcagttaacactccaaccaaaacacaaggtcttggtgctggcaaagctgctgatcttacttactgggagagtgctgctcggatgatcgctgatgtctccaaatctagcaaaatcgttgttgagaaatccacggttcctgtgaggacagcagaggctattgaaaagatactgacacataacagcaaaggcatagagtttcagattctctctaaccctgaatttcttgctgagggtactgcaattaaggatctttataacccagaccgtgtgttgattggtggtagggatactgcagcagggcaaaaggctattaaagctttaagagatgtttatgctcattgggttccagtggaacaaatcatttgcacgaacctgtggtccgctgagctctctaagcttgcagcaaatgcattcttagctcagaggatatcatctgtcaatgccatgtcagctctatgtgaggcaactggcgctgatgttacacaagttgcgcatgccgtgggtacagatactagaattggtccaaagttcttgaatgctagtgttggttttggtggatcatgtttccaaaaggacatcctaaatcttatctatatttgtgaatgcaacggcttgcccgaagcagctaattactggaaacaagtcgtaaaggtgaacgactatcagaaaatacggtttgcaaaccgggttgtttcttcaatgtttaacacagtctcgggcaagaaaatcgcgatcctcggttttgccttcaagaaggacacaggtgacacgagagagactccagcgattgatgtttgtaacagattagttgcagacaaggccaagctgagcatatacgacccacaagttcttgaagaacagatcagaagagatctttccatggctaggtttgactgggaccaccctgttcctcttcagcagattaaagctgaaggtatctcagagcaagtgaatgtcgtctcagatgcttacgaggcaactaaagatgcgcacggcctatgtgtcttaaccgaatgggatgagtttaaatccttggacttcaagaaaatctttgacaatatgcagaaaccagcttttgtgttcgatggtaggaatgttgttgatgcagtgaagctgcgtgagatcggtttcatcgtctactccattggtaaaccgcttgattcatggctcaaggatatgcctgctgtggcatgaaggtgccaacttcaaccaaactatatgtcttttctaaaatatagtatcttaagattccttataaattctgttgtaaccaagctgaaacaatgatatgtatttgctgaatctgccttagctggaatagtatatgaatttctttc

SEQ ID NO: 39599 - protein, 481 aa, Arabidopsis thaliana
  peptide (1)..(481): Ceres Seq. ID no. 13488720
  misc_feature (2)..(200): Pfam Name: UDP-glucose/GDP-mannose dehydrogenase family, Pfam Description: UDP-glucose/GDP-mannose dehydrogenase family,
MVKICCIGAGYVGGPTMAVMALKCPEIEVVVVDISEPRINAWNSDRLPIYEPGLEDVVKQCRGKNLFFSTDVEKHVFESDIVFVSVNTPTKTQGLGAGKAADLTYWESAARMIADVSKSSKIVVEKSTVPVRTAEAIEKILTHNSKGIEFQILSNPEFLAEGTAIKDLYNPDRVLIGGRDTAAGQKAIKALRDVYAHWVPVEQIICTNLWSAELSKLAANAFLAQRISSVNAMSALCEATGADVTQVAHAVGTDTRIGPKFLNASVGFGGSCFQKDILNLIYICECNGLPEAANYWKQVVKVNDYQKIRFANRVVSSMFNTVSGKKIAILGFAFKKDTGDTRETPAIDVCNRLVADKAKLSIYDPQVLEEQIRRDLSMARFDWDHPVPLQQIKAEGISEQVNVVSDAYEATKDAHGLCVLTEWDEFKSLDFKKIFDNMQKPAFVFDGRNVVDAVKLREIGFIVYSIGKPLDSWLKDMPAVA

SEQ ID NO: 39600 - protein, 465 aa, Arabidopsis thaliana
  peptide (1)..(465): Ceres Seq. ID no. 13488721
  misc_feature (1)..(184): Pfam Name: UDP-glucose/GDP-mannose dehydrogenase family, Pfam Description: UDP-glucose/GDP-mannose dehydrogenase family,
MAVMALKCPEIEVVVVDISEPRINAWNSDRLPIYEPGLEDVVKQCRGKNLFFSTDVEKHVFESDIVFVSVNTPTKTQGLGAGKAADLTYWESAARMIADVSKSSKIVVEKSTVPVRTAEAIEKILTHNSKGIEFQILSNPEFLAEGTAIKDLYNPDRVLIGGRDTAAGQKAIKALRDVYAHWVPVEQIICTNLWSAELSKLAANAFLAQRISSVNAMSALCEATGADVTQVAHAVGTDTRIGPKFLNASVGFGGSCFQKDILNLIYICECNGLPEAANYWKQVVKVNDYQKIRFANRVVSSMFNTVSGKKIAILGFAFKKDTGDTRETPAIDVCNRLVADKAKLSIYDPQVLEEQIRRDLSMARFDWDHPVPLQQIKAEGISEQVNVVSDAYEATKDAHGLCVLTEWDEFKSLDFKKIFDNMQKPAFVFDGRNVVDAVKLREIGFIVYSIGKPLDSWLKDMPAVA

SEQ ID NO: 39601 - protein, 462 aa, Arabidopsis thaliana
  peptide (1)..(462): Ceres Seq. ID no. 13488722
  misc_feature (1)..(181): Pfam Name: UDP-glucose/GDP-mannose dehydrogenase family, Pfam Description: UDP-glucose/GDP-mannose dehydrogenase family,
MALKCPEIEVVVVDISEPRINAWNSDRLPIYEPGLEDVVKQCRGKNLFFSTDVEKHVFESDIVFVSVNTPTKTQGLGAGKAADLTYWESAARMIADVSKSSKIVVEKSTVPVRTAEAIEKILTHNSKGIEFQILSNPEFLAEGTAIKDLYNPDRVLIGGRDTAAGQKAIKALRDVYAHWVPVEQIICTNLWSAELSKLAANAFLAQRISSVNAMSALCEATGADVTQVAHAVGTDTRIGPKFLNASVGFGGSCFQKDILNLIYICECNGLPEAANYWKQVVKVNDYQKIRFANRVVSSMFNTVSGKKIAILGFAFKKDTGDTRETPAIDVCNRLVADKAKLSIYDPQVLEEQIRRDLSMARFDWDHPVPLQQIKAEGISEQVNVVSDAYEATKDAHGLCVLTEWDEFKSLDFKKIFDNMQKPAFVFDGRNVVDAVKLREIGFIVYSIGKPLDSWLKDMPAVA

SEQ ID NO: 39602 - DNA, 1628 bp, Arabidopsis thaliana
  misc_feature (1)..(1628): Ceres Seq. ID no. 12705166
  misc_feature: MA Experiment ID: 108434 Result: Up-regulated in Transcription
  misc_feature: MA Experiment 108434 PARAMETER Experiment Name: At_Root_Tips_cDNA_P Parameter: Tissue Value: Root Tips
  misc_feature: MA Experiment ID: 108462 Result: Down-regulated in Transcription
  misc_feature: MA Experiment 108462 PARAMETER Experiment Name: At_Germinating_Seeds_cDNA_P Parameter: Age (day) Value: 2 vs. 0
  misc_feature: MA Experiment 108462 PARAMETER Experiment Name: At_Germinating_Seeds_cDNA_P Parameter: Tissue Value: Germinating Seeds
  misc_feature: MA Experiment ID: 108463 Result: Down-regulated in Transcription
  misc_feature: MA Experiment 108463 PARAMETER Experiment Name: At_Germinating_Seeds_cDNA_P Parameter: Age (day) Value: 3 vs. 0
  misc_feature: MA Experiment 108463 PARAMETER Experiment Name: At_Germinating_Seeds_cDNA_P Parameter: Tissue Value: Germinating Seeds
  misc_feature: MA Experiment ID: 108464 Result: Down-regulated in Transcription
  misc_feature: MA Experiment 108464 PARAMETER Experiment Name: At_Germinating_Seeds_cDNA_P Parameter: Age (day) Value: 4 vs. 0
  misc_feature: MA Experiment 108464 PARAMETER Experiment Name: At_Germinating_Seeds_cDNA_P Parameter: Tissue Value: Germinating Seeds
  misc_feature: MA Experiment ID: 108595 Result: Down-regulated in Transcription
  misc_feature: MA Experiment 108595 PARAMETER Experiment Name: At_Ler-pi_Ovule_cDNA_P Parameter: Plant Line Value: null
atctgtgctcagctactcccaaaagctctctcatctctctcgtccgtctcctctttctccatagtttaaagcttcgtcgttccgtcaccagaatttcaactactttgagttgattctcgttggatttctcacgatgggagacagcgggaagcttgaggcaacgatagatcggcttctgaatgaagagaagcagatgagactcgccgaaaacgtagccggtacaaggaaagccgccactgagattcttcagctttgtttcgatgctaaggattggaaacttctgaatgagcagattctcaatctctctaagaaacgtggtcagctcaaacaggctgtgcaatccatggtgcagcaagcaatgcagtatatcgatcagacaccagacattgaaactcggatagagcttatcaagacgctgaacaatgtatctgctggaaagatatatgttgaaatcgagagggcacgtctcaccaagaaacttgctaagattaaggaagaacagggtcagatagctgaagctgcagatcttatgcaagaagttgctgtggagacatttggtgctatggcaaaaactgagaaaattgcatttatccttgaacaagttcgcttgtgcttggatcgtcaagattttgttcgtgcacaaatcttatctaggaagatcaatcctagagtttttgacgcagatacaaaaaaagataagaagaaacctaaggaaggtgataacatggtagaagaggctcctgctgatataccaacccttttggagcttaagcgaatttactacgagcttatgattcggtactattctcataacaatgagtacattgaaatctgccgtagctacaaggcgatatatgatatcccttcagtaaaagaaactccggagcagtggattccggtcctgaggaagatctgctggttcttggtcttggcacctcatgacccaatgcaatcaagcttgctcaatgcaactctggaagacaagaatttatcagaaatccctgatttcaagatgcttctaaaacaggtagtgacaatggaggttattcaatggacatctctgtggaacaaatacaaggatgagttcgagaaagagaaaagcatgattggaggttctttgggtgacaaagctggtgaagatctgaaactgagaatcatcgaacataatatcctcgttgtctcaaagtactacgcaaggataaccttaaagagacttgccgagcttttatgcctgagcatggaggaggcggagaagcatctatcggagatggtagtgtcaaaagcactgattgcaaaaatagacagaccatctggaattgtgtgcttccagatcgcaaaggacagcaacgagattctaaactcgtgggcagggaatttggagaagcttctagatcttgtggaaaagagttgccaccaaattcacaaggaaaccatggttcacaaagccgctctcagaccttgaaaacatgcggtcttcttcatgaaaacttttcaggatcttcttcgttgagttattagcatctttatgtggtaaaaactcgaatcagtgtttccttttaaaaattgtactatggatctgtacactaacgaagtgttttgccacttattggttatttcaagtgttggtg

SEQ ID NO: 39603 - protein, 442 aa, Arabidopsis thaliana
  peptide (1)..(442): Ceres Seq. ID no. 12705167
  misc_feature (290)..(400): Pfam Name: PCI domain Pfam Description: PCI domain
  misc_feature (7)..(442): Homolog of NCBI NO: 32422811 NR Description: hypothetical protein [Neurospora crassa]
  misc_feature (1)..(436): Homolog of NCBI NO: 27924244 NR Description: Similar to proteasome (prosome, macropain) 26S
  misc_feature (1)..(436): Homolog of NCBI NO: 13385384 NR Description: proteasome 26S non-ATPase subunit 12 [Mus
  misc_feature (1)..(436): Homolog of NCBI NO: 27503944 NR Description: Similar to proteasome (prosome, macropain) 26S
  misc_feature (1)..(436): Homolog of NCBI NO: 4506221 NR Description: proteasome 26S non-ATPase subunit 12 isoform 1
  misc_feature (175)..(441): Homolog of NCBI NO: 17298157 NR Description: 26S proteasome regulatory particle non-ATPase
  misc_feature (2)..(441): Homolog of NCBI NO: 27573351 NR Description: putative proteasome regulatory non-ATPase subunit
  misc_feature (1)..(441): Homolog of NCBI NO: 30698065 NR Description: 26S proteasome regulatory subunit (RPN5),
  misc_feature (1)..(441): Homolog of NCBI NO: 10177207 NR Description: proteasome regulatory subunit-like [Arabidopsis
  misc_feature (1)..(442): Homolog of NCBI NO: 15242545 NR Description: 26S proteasome regulatory subunit (RPN5), putative
MGDSGKLEATIDRLLNEEKQMRLAENVAGTRKAATEILQLCFDAKDWKLLNEQILNLSKKRGQLKQAVQSMVQQAMQYIDQTPDIETRIELIKTLNNVSAGKIYVEIERARLTKKLAKIKEEQGQIAEAADLMQEVAVETFGAMAKTEKIAFILEQVRLCLDRQDFVRAQILSRKINPRVFDADTKKDKKKPKEGDNMVEEAPADIPTLLELKRIYYELMIRYYSHNNEYIEICRSYKAIYDIPSVKETPEQWIPVLRKICWFLVLAPHDPMQSSLLNATLEDKNLSEIPDFKMLLKQVVTMEVIQWTSLWNKYKDEFEKEKSMIGGSLGDKAGEDLKLRIIEHNILVVSKYYARITLKRLAELLCLSMEEAEKHLSEMVVSKALIAKIDRPSGIVCFQIAKDSNEILNSWAGNLEKLLDLVEKSCHQIHKETMVHKAALRP

SEQ ID NO: 39604 - protein, 422 aa, Arabidopsis thaliana
  peptide (1)..(422): Ceres Seq. ID no. 12705168
  misc_feature (270)..(380): Pfam Name: PCI domain Pfam Description: PCI domain
  misc_feature (1)..(422): Homolog of NCBI NO: 32422811 NR Description: hypothetical protein [Neurospora crassa]
  misc_feature (1)..(416): Homolog of NCBI NO: 27924244 NR Description: Similar to proteasome (prosome, macropain) 26S
  misc_feature (1)..(416): Homolog of NCBI NO: 13385384 NR Description: proteasome 26S non-ATPase subunit 12 [Mus
  misc_feature (1)..(416): Homolog of NCBI NO: 27503944 NR Description: Similar to proteasome (prosome, macropain) 26S
  misc_feature (1)..(416): Homolog of NCBI NO: 4506221 NR Description: proteasome 26S non-ATPase subunit 12 isoform 1
  misc_feature (155)..(421): Homolog of NCBI NO: 17298157 NR Description: 26S proteasome regulatory particle non-ATPase
  misc_feature (1)..(421): Homolog of NCBI NO: 27573351 NR Description: putative proteasome regulatory non-ATPase subunit
  misc_feature (1)..(421): Homolog of NCBI NO: 30698065 NR Description: 26S proteasome regulatory subunit (RPN5),
  misc_feature (1)..(421): Homolog of NCBI NO: 10177207 NR Description: proteasome regulatory subunit-like [Arabidopsis
  misc_feature (1)..(422): Homolog of NCBI NO: 15242545 NR Description: 26S proteasome regulatory subunit (RPN5), putative
MRLAENVAGTRKAATEILQLCFDAKDWKLLNEQILNLSKKRGQLKQAVQSMVQQAMQYIDQTPDIETRIELIKTLNNVSAGKIYVEIERARLTKKLAKIKEEQGQIAEAADLMQEVAVETFGAMAKTEKIAFILEQVRLCLDRQDFVRAQILSRKINPRVFDADTKKDKKKPKEGDNMVEEAPADIPTLLELKRIYYELMIRYYSHNNEYIEICRSYKAIYDIPSVKETPEQWIPVLRKICWFLVLAPHDPMQSSLLNATLEDKNLSEIPDFKMLLKQVVTMEVIQWTSLWNKYKDEFEKEKSMIGGSLGDKAGEDLKLRIIEHNILVVSKYYARITLKRLAELLCLSMEEAEKHLSEMVVSKALIAKIDRPSGIVCFQIAKDSNEILNSWAGNLEKLLDLVEKSCHQIHKETMVHKAALRP

SEQ ID NO: 39605 - protein, 372 aa, Arabidopsis thaliana
  peptide (1)..(372): Ceres Seq. ID no. 12705169
  misc_feature (220)..(330): Pfam Name: PCI domain Pfam Description: PCI domain
  misc_feature (1)..(372): Homolog of NCBI NO: 32422811 NR Description: hypothetical protein [Neurospora crassa]
  misc_feature (1)..(366): Homolog of NCBI NO: 27924244 NR Description: Similar to proteasome (prosome, macropain) 26S
  misc_feature (1)..(366): Homolog of NCBI NO: 13385384 NR Description: proteasome 26S non-ATPase subunit 12 [Mus
  misc_feature (1)..(366): Homolog of NCBI NO: 27503944 NR Description: Similar to proteasome (prosome, macropain) 26S
  misc_feature (1)..(366): Homolog of NCBI NO: 4506221 NR Description: proteasome 26S non-ATPase subunit 12 isoform 1
  misc_feature (105)..(371): Homolog of NCBI NO: 17298157 NR Description: 26S proteasome regulatory particle non-ATPase
  misc_feature (1)..(371): Homolog of NCBI NO: 27573351 NR Description: putative proteasome regulatory non-ATPase subunit
  misc_feature (1)..(371): Homolog of NCBI NO: 30698065 NR Description: 26S proteasome regulatory subunit (RPN5),
  misc_feature (1)..(371): Homolog of NCBI NO: 10177207 NR Description: proteasome regulatory subunit-like [Arabidopsis
  misc_feature (1)..(372): Homolog of NCBI NO: 15242545 NR Description: 26S proteasome regulatory subunit (RPN5), putative
MVQQAMQYIDQTPDIETRIELIKTLNNVSAGKIYVEIERARLTKKLAKIKEEQGQIAEAADLMQEVAVETFGAMAKTEKIAFILEQVRLCLDRQDFVRAQILSRKINPRVFDADTKKDKKKPKEGDNMVEEAPADIPTLLELKRIYYELMIRYYSHNNEYIEICRSYKAIYDIPSVKETPEQWIPVLRKICWFLVLAPHDPMQSSLLNATLEDKNLSEIPDFKMLLKQVVTMEVIQWTSLWNKYKDEFEKEKSMIGGSLGDKAGEDLKLRIIEHNILVVSKYYARITLKRLAELLCLSMEEAEKHLSEMVVSKALIAKIDRPSGIVCFQIAKDSNEILNSWAGNLEKLLDLVEKSCHQIHKETMVHKAALRP

SEQ ID NO: 39606 - DNA, 1160 bp, Arabidopsis thaliana
  misc_feature (1)..(1160): Ceres Seq. ID no. 12328218
  misc_feature: MA Experiment ID: 108577 Result: Down-regulated in Transcription
  misc_feature: MA Experiment 108577 PARAMETER Experiment Name: At_42deg_Heat_cDNA_P Parameter: Temperature (deg C) Value: 42 vs. 22
  misc_feature: MA Experiment 108577 PARAMETER Experiment Name: At_42deg_Heat_cDNA_P Parameter: Timepoint (hr) Value: 6
  misc_feature: MA Experiment 108577 PARAMETER Experiment Name: At_42deg_Heat_cDNA_P Parameter: Tissue Value: Aerial
  misc_feature: MA Experiment ID: 108595 Result: Down-regulated in Transcription
  misc_feature: MA Experiment 108595 PARAMETER Experiment Name: At_Ler-pi_Ovule_cDNA_P Parameter: Plant Line Value: null
  misc_feature: MA Experiment ID: 20000328 Result: Down-regulated in Transcription
  misc_feature: MA Experiment 20000328 PARAMETER Experiment Name: At_42deg_Heat_Sub_P Parameter: Age (day) Value: 14
  misc_feature: MA Experiment 20000328 PARAMETER Experiment Name: At_42deg_Heat_Sub_P Parameter: Organism Value: A. thaliana
  misc_feature: MA Experiment 20000328 PARAMETER Experiment Name: At_42deg_Heat_Sub_P Parameter: Plant Line Value: WS
  misc_feature: MA Experiment 20000328 PARAMETER Experiment Name: At_42deg_Heat_Sub_P Parameter: Temperature (deg C) Value: 42 vs. 22
  misc_feature: MA Experiment 20000328 PARAMETER Experiment Name: At_42deg_Heat_Sub_P Parameter: Timepoint (hr) Value: 6
  misc_feature: MA Experiment 20000328 PARAMETER Experiment Name: At_42deg_Heat_Sub_P Parameter: Tissue Value: Aerial
aaaaaaatcaaaaacagaaagaagcagagagacgatggcgagcaaagacgaattttcccgagatctcactgcgattcgctgcgccagagctacgatgcttctctattcacttgcatcatctcgcacaatcgattccgccggcgtgaagcaggagaaaggagaaacgcgaagagagatagaggatctgaggagaaagcttaccatggtgaagataaagatgaatcggattaagctttgcggattgatggaactgcttcttctcgtctttttgaacattcttagctccacttgagagactaaagcttgaatatacagttcgtggtgaacagaggaacttgttggtggttgctaagtcaattgcaactacacagggcttgactggattctggaaaggtaatttgctcaatgttcttcgaactgctcctttcaaagccgtcaatttttgtgcctatgatacctatagaaagcaattgcttaaaatcgctgggaatcaagaagcaaccaactttgaaagattcgttgctggtgccgctgctgggattactgctactgtgctctgcttgccactcgacactatacgaaccaaactagtggctcggggtggagaagccttggggggaatcggaggagcttttcggtatatgatccaaacagaagggttgttctccctctacaagggtctagtgccgtccatagcaagcatggctctgtccggtgcagttttctatggcgtttacgacatccttaagtcatcgtttctgcatacaccagaaggccggaaaagactgatagacatgaagcagcagggacaagaactcaatgctctagacaggctcgagttaggacccatcagaactctcatgtacggtgctatagcaggtgcttgtactgaagtagccacttatcctttcgaagtagtgagacgacagcttcagatgcagatgggtaaaaacaagctcaatgctttagctatgggattcaatatcattgaaagaggagggatcccagctttatacgctggacttttacctagcttgctccaggtattgccttcggcttcaataagttactttgtctacgagtgtatgaagatagtacttaaagtagaataacaagattatgatattggaagagtactagagcttaaagaatcatccatt

SEQ ID NO: 39607 - protein, 156 aa, Arabidopsis thaliana
  peptide (1)..(156): Ceres Seq. ID no. 12328219
  misc_feature (1)..(156): Homolog of NCBI NO: 4138581 NR Description: mitochondrial energy transfer protein [Solanum
  misc_feature (1)..(156): Homolog of NCBI NO: 15241360 NR Description: calcium-binding transporter-like protein; protein
  misc_feature (1)..(154): Homolog of NCBI NO: 21554682 NR Description: Ca-dependent solute carrier-like protein
  misc_feature (94)..(155): Homolog of NCBI NO: 33598954 NR Description: calcium-binding transporter [Homo sapiens]
  misc_feature (1)..(40): Homolog of NCBI NO: 33598954 NR Description: calcium-binding transporter [Homo sapiens]
  misc_feature (1)..(154): Homolog of NCBI NO: 15228163 NR Description: mitochondrial carrier protein family
  misc_feature (1)..(156): Homolog of NCBI NO: 231654 NR Description: Brittle-1 protein, chloroplast precursor
  misc_feature (1)..(155): Homolog of NCBI NO: 34860155 NR Description: similar to calcium-binding transporter [Rattus
  misc_feature (1)..(156): Homolog of NCBI NO: 15238315 NR Description: mitochondrial carrier protein family; protein id:
  misc_feature (1)..(156): Homolog of NCBI NO: 25406546 NR Description: hypothetical protein T11I11.12 [imported] -
MIQTEGLFSLYKGLVPSIASMALSGAVFYGVYDILKSSFLHTPEGRKRLIDMKQQGQELNALDRLELGPIRTLMYGAIAGACTEVATYPFEVVRRQLQMQMGKNKLNALAMGFNIIERGGIPALYAGLLPSLLQVLPSASISYFVYECMKIVLKVE

SEQ ID NO: 39608 - protein, 136 aa, Arabidopsis thaliana
  peptide (1)..(136): Ceres Seq. ID no. 12328220
  misc_feature (1)..(136): Homolog of NCBI NO: 4138581 NR Description: mitochondrial energy transfer protein [Solanum
  misc_feature (1)..(136): Homolog of NCBI NO: 15241360 NR Description: calcium-binding transporter-like protein; protein
  misc_feature (1)..(134): Homolog of NCBI NO: 21554682 NR Description: Ca-dependent solute carrier-like protein
  misc_feature (74)..(135): Homolog of NCBI NO: 33598954 NR Description: calcium-binding transporter [Homo sapiens]
  misc_feature (1)..(20): Homolog of NCBI NO: 33598954 NR Description: calcium-binding transporter [Homo sapiens]
  misc_feature (1)..(134): Homolog of NCBI NO: 15228163 NR Description: mitochondrial carrier protein family
  misc_feature (1)..(136): Homolog of NCBI NO: 231654 NR Description: Brittle-1 protein, chloroplast precursor
  misc_feature (1)..(135): Homolog of NCBI NO: 34860155 NR Description: similar to calcium-binding transporter [Rattus
  misc_feature (1)..(136): Homolog of NCBI NO: 15238315 NR Description: mitochondrial carrier protein family; protein id:
  misc_feature (1)..(136): Homolog of NCBI NO: 25406546 NR Description: hypothetical protein T11I11.12 [imported] -
MALSGAVFYGVYDILKSSFLHTPEGRKRLIDMKQQGQELNALDRLELGPIRTLMYGAIAGACTEVATYPFEVVRRQLQMQMGKNKLNALAMGFNIIERGGIPALYAGLLPSLLQVLPSASISYFVYECMKIVLKVE

SEQ ID NO: 39609 - protein, 105 aa, Arabidopsis thaliana
  peptide (1)..(105): Ceres Seq. ID no. 12328221
  misc_feature (18)..(102): Homolog of NCBI NO: 34903084 NR Description: unnamed protein product [Oryza sativa (japonica
  misc_feature (1)..(105): Homolog of NCBI NO: 4138581 NR Description: mitochondrial energy transfer protein [Solanum
  misc_feature (1)..(105): Homolog of NCBI NO: 15241360 NR Description: calcium-binding transporter-like protein; protein
  misc_feature (1)..(103): Homolog of NCBI NO: 21554682 NR Description: Ca-dependent solute carrier-like protein
  misc_feature (43)..(104): Homolog of NCBI NO: 33598954 NR Description: calcium-binding transporter [Homo sapiens]
  misc_feature (1)..(103): Homolog of NCBI NO: 15228163 NR Description: mitochondrial carrier protein family
  misc_feature (1)..(105): Homolog of NCBI NO: 231654 NR Description: Brittle-1 protein, chloroplast precursor
  misc_feature (1)..(104): Homolog of NCBI NO: 34860155 NR Description: similar to calcium-binding transporter [Rattus
  misc_feature (1)..(105): Homolog of NCBI NO: 15238315 NR Description: mitochondrial carrier protein family; protein id:
  misc_feature (1)..(105): Homolog of NCBI NO: 25406546 NR Description: hypothetical protein T11I11.12 [imported] -
MKQQGQELNALDRLELGPIRTLMYGAIAGACTEVATYPFEVVRRQLQMQMGKNKLNALAMGFNIIERGGIPALYAGLLPSLLQVLPSASISYFVYECMKIVLKVE

SEQ ID NO: 39610 - DNA, 1132 bp, Arabidopsis thaliana; identical to SEQ ID NO: 39087
  misc_feature (1)..(1132): Ceres Seq. ID no. 13503082
  misc_feature: MA Experiment ID: 108434 Result: Down-regulated in Transcription
  misc_feature: MA Experiment 108434 PARAMETER Experiment Name: At_Root_Tips_cDNA_P Parameter: Tissue Value: Root Tips
  misc_feature: MA Experiment ID: 108435 Result: Down-regulated in Transcription
  misc_feature: MA Experiment 108435 PARAMETER Experiment Name: At_stm_Mutants_cDNA_P Parameter: Plant Line Value: wt Landsburg vs stm
  misc_feature: MA Experiment 108435 PARAMETER Experiment Name: At_stm_Mutants_cDNA_P Parameter: Tissue Value: Shoot Apical Meristem Region
  misc_feature: MA Experiment ID: 108461 Result: Up-regulated in Transcription
  misc_feature: MA Experiment 108461 PARAMETER Experiment Name: At_Germinating_Seeds_cDNA_P Parameter: Age (day) Value: 1 vs. 0
  misc_feature: MA Experiment 108461 PARAMETER Experiment Name: At_Germinating_Seeds_cDNA_P Parameter: Tissue Value: Germinating Seeds
  misc_feature: MA Experiment ID: 108462 Result: Up-regulated in Transcription
  misc_feature: MA Experiment 108462 PARAMETER Experiment Name: At_Germinating_Seeds_cDNA_P Parameter: Age (day) Value: 2 vs. 0
  misc_feature: MA Experiment 108462 PARAMETER Experiment Name: At_Germinating_Seeds_cDNA_P Parameter: Tissue Value: Germinating Seeds
  misc_feature: MA Experiment ID: 108463 Result: Up-regulated in Transcription
  misc_feature: MA Experiment 108463 PARAMETER Experiment Name: At_Germinating_Seeds_cDNA_P Parameter: Age (day) Value: 3 vs. 0
  misc_feature: MA Experiment 108463 PARAMETER Experiment Name: At_Germinating_Seeds_cDNA_P Parameter: Tissue Value: Germinating Seeds
  misc_feature: MA Experiment ID: 108464 Result: Up-regulated in Transcription
  misc_feature: MA Experiment 108464 PARAMETER Experiment Name: At_Germinating_Seeds_cDNA_P Parameter: Age (day) Value: 4 vs. 0
  misc_feature: MA Experiment 108464 PARAMETER Experiment Name: At_Germinating_Seeds_cDNA_P Parameter: Tissue Value: Germinating Seeds
  misc_feature: MA Experiment ID: 108473 Result: Down-regulated in Transcription
  misc_feature: MA Experiment 108473 PARAMETER Experiment Name: At_Drought_Flowers_cDNA_P Parameter: Timepoint (hr) Value: 7 d
  misc_feature: MA Experiment 108473 PARAMETER Experiment Name: At_Drought_Flowers_cDNA_P Parameter: Tissue Value: Flower
  misc_feature: MA Experiment 108473 PARAMETER Experiment Name: At_Drought_Flowers_cDNA_P Parameter: Treatment Value: Drought vs. No Drought
  misc_feature: MA Experiment ID: 108561 Result: Down-regulated in Transcription
  misc_feature: MA Experiment 108561 PARAMETER Experiment Name: At_100uM_ABA_cDNA_P Parameter: Timepoint (hr) Value: 6
  misc_feature: MA Experiment 108561 PARAMETER Experiment Name: At_100uM_ABA_cDNA_P Parameter: Tissue Value: Aerial
  misc_feature: MA Experiment 108561 PARAMETER Experiment Name: At_100uM_ABA_cDNA_P Parameter: Treatment Value: 100uM ABA vs. No Treatment
  misc_feature: MA Experiment ID: 108572 Result: Down-regulated in Transcription
  misc_feature: MA Experiment 108572 PARAMETER Experiment Name: At_Drought_cDNA_P Parameter: Timepoint (hr) Value: 1
  misc_feature: MA Experiment 108572 PARAMETER Experiment Name: At_Drought_cDNA_P Parameter: Tissue Value: Aerial
  misc_feature: MA Experiment 108572 PARAMETER Experiment Name: At_Drought_cDNA_P Parameter: Treatment Value: Drought vs. No Drought
  misc_feature: MA Experiment ID: 108573 Result: Down-regulated in Transcription
  misc_feature: MA Experiment 108573 PARAMETER Experiment Name: At_Drought_cDNA_P Parameter: Timepoint (hr) Value: 6
  misc_feature: MA Experiment 108573 PARAMETER Experiment Name: At_Drought_cDNA_P Parameter: Tissue Value: Aerial
  misc_feature: MA Experiment 108573 PARAMETER Experiment Name: At_Drought_cDNA_P Parameter: Treatment Value: Drought vs. No Drought
  misc_feature: MA Experiment ID: 108577 Result: Down-regulated in Transcription
  misc_feature: MA Experiment 108577 PARAMETER Experiment Name: At_42deg_Heat_cDNA_P Parameter: Temperature (deg C) Value: 42 vs. 22
  misc_feature: MA Experiment 108577 PARAMETER Experiment Name: At_42deg_Heat_cDNA_P Parameter: Timepoint (hr) Value: 6
  misc_feature: MA Experiment 108577 PARAMETER Experiment Name: At_42deg_Heat_cDNA_P Parameter: Tissue Value: Aerial
  misc_feature: MA Experiment ID: 108579 Result: Up-regulated in Transcription
  misc_feature: MA Experiment 108579 PARAMETER Experiment Name: At_4deg_Cold_cDNA_P Parameter: Temperature (deg C) Value: 4 vs. 22
  misc_feature: MA Experiment 108579 PARAMETER Experiment Name: At_4deg_Cold_cDNA_P Parameter: Timepoint (hr) Value: 6
  misc_feature: MA Experiment 108579 PARAMETER Experiment Name: At_4deg_Cold_cDNA_P Parameter: Tissue Value: Aerial
  misc_feature: MA Experiment ID: 108595 Result: Down-regulated in Transcription
  misc_feature: MA Experiment 108595 PARAMETER Experiment Name: At_Ler-pi_Ovule_cDNA_P Parameter: Plant Line Value: null
  misc_feature: MA Experiment ID: 108668 Result: Down-regulated in Transcription
  misc_feature: MA Experiment 108668 PARAMETER Experiment Name: At_2mM_SA_cDNA_P Parameter: Plant Line Value: WS
  misc_feature: MA Experiment 108668 PARAMETER Experiment Name: At_2mM_SA_cDNA_P Parameter: Timepoint (hr) Value: 6
  misc_feature: MA Experiment 108668 PARAMETER Experiment Name: At_2mM_SA_cDNA_P Parameter: Treatment Value: 2mM SA vs. No Treatment
  misc_feature: MA Experiment ID: 20000069 Result: Down-regulated in Transcription
  misc_feature: MA Experiment 20000069 PARAMETER Experiment Name: At_100uM_ABA_Mutants_cDNA_P Parameter: Plant Line Value: CS23
  misc_feature: MA Experiment 20000069 PARAMETER Experiment Name: At_100uM_ABA_Mutants_cDNA_P Parameter: Timepoint (hr) Value: 6
  misc_feature: MA Experiment 20000069 PARAMETER Experiment Name: At_100uM_ABA_Mutants_cDNA_P Parameter: Tissue Value: Aerial
  misc_feature: MA Experiment 20000069 PARAMETER Experiment Name: At_100uM_ABA_Mutants_cDNA_P Parameter: Treatment Value: 100uM ABA vs. No Treatment
  misc_feature: MA Experiment ID: 20000070 Result: Down-regulated in Transcription
  misc_feature: MA Experiment 20000070 PARAMETER Experiment Name: At_100uM_ABA_Mutants_cDNA_P Parameter: Plant Line Value: CS24
  misc_feature: MA Experiment 20000070 PARAMETER Experiment Name: At_100uM_ABA_Mutants_cDNA_P Parameter: Timepoint (hr) Value: 6
  misc_feature: MA Experiment 20000070 PARAMETER Experiment Name: At_100uM_ABA_Mutants_cDNA_P Parameter: Tissue Value: Aerial
  misc_feature: MA Experiment 20000070 PARAMETER Experiment Name: At_100uM_ABA_Mutants_cDNA_P Parameter: Treatment Value: 100uM ABA vs. No Treatment
  misc_feature: MA Experiment ID: 20000071 Result: Down-regulated in Transcription
  misc_feature: MA Experiment 20000071 PARAMETER Experiment Name: At_100uM_ABA_Mutants_cDNA_P Parameter: Plant Line Value: CS8104
  misc_feature: MA Experiment 20000071 PARAMETER Experiment Name: At_100uM_ABA_Mutants_cDNA_P Parameter: Timepoint (hr) Value: 6
  misc_feature: MA Experiment 20000071 PARAMETER Experiment Name: At_100uM_ABA_Mutants_cDNA_P Parameter: Tissue Value: Aerial
  misc_feature: MA Experiment 20000071 PARAMETER Experiment Name: At_100uM_ABA_Mutants_cDNA_P Parameter: Treatment Value: 100uM ABA vs. No Treatment
  misc_feature: MA Experiment ID: 20000072 Result: Down-regulated in Transcription
  misc_feature: MA Experiment 20000072 PARAMETER Experiment Name: At_100uM_ABA_Mutants_cDNA_P Parameter: Plant Line Value: CS8105
  misc_feature: MA Experiment 20000072 PARAMETER Experiment Name: At_100uM_ABA_Mutants_cDNA_P Parameter: Timepoint (hr) Value: 6
  misc_feature: MA Experiment 20000072 PARAMETER Experiment Name: At_100uM_ABA_Mutants_cDNA_P Parameter: Tissue Value: Aerial
  misc_feature: MA Experiment 20000072 PARAMETER Experiment Name: At_100uM_ABA_Mutants_cDNA_P Parameter: Treatment Value: 100uM ABA vs. No Treatment
  misc_feature: MA Experiment ID: 20000086 Result: Down-regulated in Transcription
  misc_feature: MA Experiment 20000086 PARAMETER Experiment Name: At_100uM_ABA_Mutants_cDNA_P Parameter: Plant Line Value: CS22
  misc_feature: MA Experiment 20000086 PARAMETER Experiment Name: At_100uM_ABA_Mutants_cDNA_P Parameter: Timepoint (hr) Value: 6
  misc_feature: MA Experiment 20000086 PARAMETER Experiment Name: At_100uM_ABA_Mutants_cDNA_P Parameter: Tissue Value: Aerial
  misc_feature: MA Experiment 20000086 PARAMETER Experiment Name: At_100uM_ABA_Mutants_cDNA_P Parameter: Treatment Value: 100uM ABA vs. No Treatment
  misc_feature: MA Experiment ID: 20000087 Result: Down-regulated in Transcription
  misc_feature: MA Experiment 20000087 PARAMETER Experiment Name: At_100uM_ABA_Mutants_cDNA_P Parameter: Plant Line Value: WS
  misc_feature: MA Experiment 20000087 PARAMETER Experiment Name: At_100uM_ABA_Mutants_cDNA_P Parameter: Timepoint (hr) Value: 6
  misc_feature: MA Experiment 20000087 PARAMETER Experiment Name: At_100uM_ABA_Mutants_cDNA_P Parameter: Tissue Value: Aerial
  misc_feature: MA Experiment 20000087 PARAMETER Experiment Name: At_100uM_ABA_Mutants_cDNA_P Parameter: Treatment Value: 100uM ABA vs. No Treatment
  misc_feature: MA Experiment ID: 20000088 Result: Down-regulated in Transcription
  misc_feature: MA Experiment 20000088 PARAMETER Experiment Name: At_100uM_ABA_Mutants_cDNA_P Parameter: Plant Line Value: Landsberg
  misc_feature: MA Experiment 20000088 PARAMETER Experiment Name: At_100uM_ABA_Mutants_cDNA_P Parameter: Timepoint (hr) Value: 6
  misc_feature: MA Experiment 20000088 PARAMETER Experiment Name: At_100uM_ABA_Mutants_cDNA_P Parameter: Tissue Value: Aerial
  misc_feature: MA Experiment 20000088 PARAMETER Experiment Name: At_100uM_ABA_Mutants_cDNA_P Parameter: Treatment Value: 100uM ABA vs. No Treatment
  misc_feature: MA Experiment ID: 20000090 Result: Down-regulated in Transcription
  misc_feature: MA Experiment ID: 20000111 Result: Down-regulated in Transcription
  misc_feature: MA Experiment 20000111 PARAMETER Experiment Name: At_42deg_Heat_cDNA_P Parameter: Temperature (deg C) Value: 42 vs. 22
  misc_feature: MA Experiment 20000111 PARAMETER Experiment Name: At_42deg_Heat_cDNA_P Parameter: Timepoint (hr) Value: 6
  misc_feature: MA Experiment 20000111 PARAMETER Experiment Name: At_42deg_Heat_cDNA_P Parameter: Tissue Value: Aerial
  misc_feature: MA Experiment ID: 20000113 Result: Down-regulated in Transcription
  misc_feature: MA Experiment 20000113 PARAMETER Experiment Name: At_42deg_Heat_cDNA_P Parameter: Temperature (deg C) Value: 42 vs. 22
  misc_feature: MA Experiment 20000113 PARAMETER Experiment Name: At_42deg_Heat_cDNA_P Parameter: Timepoint (hr) Value: 8
  misc_feature: MA Experiment 20000113 PARAMETER Experiment Name: At_42deg_Heat_cDNA_P Parameter: Tissue Value: Aerial
  misc_feature: MA Experiment ID: 20000117 Result: Down-regulated in Transcription
  misc_feature: MA Experiment 20000117 PARAMETER Experiment Name: At_100uM_ABA_Mutants_cDNA_P Parameter: Plant Line Value: Columbia
  misc_feature: MA Experiment 20000117 PARAMETER Experiment Name: At_100uM_ABA_Mutants_cDNA_P Parameter: Timepoint (hr) Value: 6
  misc_feature: MA Experiment 20000117 PARAMETER Experiment Name: At_100uM_ABA_Mutants_cDNA_P Parameter: Tissue Value: Aerial
  misc_feature: MA Experiment 20000117 PARAMETER Experiment Name: At_100uM_ABA_Mutants_cDNA_P Parameter: Treatment Value: 100uM ABA vs. No Treatment
  misc_feature: MA Experiment ID: 20000144 Result: Down-regulated in Transcription
  misc_feature: MA Experiment 20000144 PARAMETER Experiment Name: At_42deg_Heat_cDNA_P Parameter: Temperature (deg C) Value: 42 vs. 22
  misc_feature: MA Experiment 20000144 PARAMETER Experiment Name: At_42deg_Heat_cDNA_P Parameter: Timepoint (hr) Value: 1
  misc_feature: MA Experiment 20000144 PARAMETER Experiment Name: At_42deg_Heat_cDNA_P Parameter: Tissue Value: Aerial
  misc_feature: MA Experiment ID: 20000169 Result: Down-regulated in Transcription
  misc_feature: MA Experiment 20000169 PARAMETER Experiment Name: At_100uM_ABA_P Parameter: Age (day) Value: 14
  misc_feature: MA Experiment 20000169 PARAMETER Experiment Name: At_100uM_ABA_P Parameter: Organism Value: A. thaliana
  misc_feature: MA Experiment 20000169 PARAMETER Experiment Name: At_100uM_ABA_P Parameter: Plant Line Value: WS
  misc_feature: MA Experiment 20000169 PARAMETER Experiment Name: At_100uM_ABA_P Parameter: Timepoint (hr) Value: 6
  misc_feature: MA Experiment 20000169 PARAMETER Experiment Name: At_100uM_ABA_P Parameter: Tissue Value: Aerial
  misc_feature: MA Experiment 20000169 PARAMETER Experiment Name: At_100uM_ABA_P Parameter: Treatment Value: 100uM ABA vs. No Treatment
  misc_feature: MA Experiment ID: 20000180 Result: Up-regulated in Transcription
  misc_feature: MA Experiment 20000180 PARAMETER Experiment Name: At_Germinating_Seeds_P Parameter: Age (hr) Value: 24 vs. 0
  misc_feature: MA Experiment 20000180 PARAMETER Experiment Name: At_Germinating_Seeds_P Parameter: Tissue Value: Germinating Seeds
  misc_feature: MA Experiment ID: 20000182 Result: Down-regulated in Transcription
  misc_feature: MA Experiment 20000182 PARAMETER Experiment Name: At_2mM_SA_P Parameter: Age (day) Value: 14
  misc_feature: MA Experiment 20000182 PARAMETER Experiment Name: At_2mM_SA_P Parameter: Organism Value: A. thaliana
  misc_feature: MA Experiment 20000182 PARAMETER Experiment Name: At_2mM_SA_P Parameter: Plant Line Value: WS
  misc_feature: MA Experiment 20000182 PARAMETER Experiment Name: At_2mM_SA_P Parameter: Timepoint (hr) Value: 6
  misc_feature: MA Experiment 20000182 PARAMETER Experiment Name: At_2mM_SA_P Parameter: Tissue Value: Aerial
  misc_feature: MA Experiment 20000182 PARAMETER Experiment Name: At_2mM_SA_P Parameter: Treatment Value: 2mM SA vs. No Treatment
  misc_feature: MA Experiment ID: 20000184 Result: Up-regulated in Transcription
  misc_feature: MA Experiment 20000184 PARAMETER Experiment Name: At_Shoots__P Parameter: Age (day) Value: 7
  misc_feature: MA Experiment 20000184 PARAMETER Experiment Name: At_Shoots__P Parameter: Tissue Value: Shoots vs. Whole Plant
  misc_feature: MA Experiment ID: 20000185 Result: Down-regulated in Transcription
  misc_feature: MA Experiment 20000185 PARAMETER Experiment Name: At_Roots__P Parameter: Age (day) Value: 7 vs. 21
  misc_feature: MA Experiment 20000185 PARAMETER Experiment Name: At_Roots__P Parameter: Organism Value: A. thaliana
  misc_feature: MA Experiment 20000185 PARAMETER Experiment Name: At_Roots__P Parameter: Tissue Value: Roots vs. Whole Plant
  misc_feature: MA Experiment ID: 20000214 Result: Up-regulated in Transcription
  misc_feature: MA Experiment 20000214 PARAMETER Experiment Name: At_4deg_Cold_P Parameter: Timepoint (hr) Value: 6
  misc_feature: MA Experiment ID: 20000234 Result: Up-regulated in Transcription
  misc_feature: MA Experiment 20000234 PARAMETER Experiment Name: At_Siliques_P Parameter: Age (day) Value: 21
  misc_feature: MA Experiment 20000234 PARAMETER Experiment Name: At_Siliques_P Parameter: Organism Value: A. thaliana
  misc_feature: MA Experiment 20000234 PARAMETER Experiment Name: At_Siliques_P Parameter: Plant Line Value: WS
  misc_feature: MA Experiment 20000234 PARAMETER Experiment Name: At_Siliques_P Parameter: Tissue Value: Less Than 5mm Siliques vs. Whole Plant
  misc_feature: MA Experiment ID: 20000267 Result: Down-regulated in Transcription
  misc_feature: MA Experiment 20000267 PARAMETER Experiment Name: At_Drought_P Parameter: Age (day) Value: 7
  misc_feature: MA Experiment 20000267 PARAMETER Experiment Name: At_Drought_P Parameter: Organism Value: A. thaliana
  misc_feature: MA Experiment 20000267 PARAMETER Experiment Name: At_Drought_P Parameter: Plant Line Value: WS
  misc_feature: MA Experiment 20000267 PARAMETER Experiment Name: At_Drought_P Parameter: Timepoint (hr) Value: 6
  misc_feature: MA Experiment 20000267 PARAMETER Experiment Name: At_Drought_P Parameter: Tissue Value: Whole Plant
  misc_feature: MA Experiment 20000267 PARAMETER Experiment Name: At_Drought_P Parameter: Treatment Value: Drought vs. No Drought
  misc_feature: MA Experiment ID: 20000268 Result: Down-regulated in Transcription
  misc_feature: MA Experiment 20000268 PARAMETER Experiment Name: At_100mM_NaCl__P Parameter: Age (day) Value: 14
  misc_feature: MA Experiment 20000268 PARAMETER Experiment Name: At_100mM_NaCl__P Parameter: Organism Value: A. thaliana
  misc_feature: MA Experiment 20000268 PARAMETER Experiment Name: At_100mM_NaCl__P Parameter: Plant Line Value: WS
  misc_feature: MA Experiment 20000268 PARAMETER Experiment Name: At_100mM_NaCl__P Parameter: Timepoint (hr) Value: 6
  misc_feature: MA Experiment 20000268 PARAMETER Experiment Name: At_100mM_NaCl__P Parameter: Tissue Value: Whole Plant
  misc_feature: MA Experiment 20000268 PARAMETER Experiment Name: At_100mM_NaCl__P Parameter: Treatment Value: 100mM NaCl vs. No Treatment
  misc_feature: MA Experiment ID: 20000286 Result: Up-regulated in Transcription
  misc_feature: MA Experiment 20000286 PARAMETER Experiment Name: At_Open_Flower_P Parameter: Age (day) Value: 21
  misc_feature: MA Experiment 20000286 PARAMETER Experiment Name: At_Open_Flower_P Parameter: Plant Line Value: WS
  misc_feature: MA Experiment 20000286 PARAMETER Experiment Name: At_Open_Flower_P Parameter: Tissue Value: Half Open vs. Whole Plant
  misc_feature: MA Experiment ID: 20000436 Result: Down-regulated in Transcription
  misc_feature: MA Experiment 20000436 PARAMETER Experiment Name: At_Drought_P Parameter: Age (day) Value: 7
  misc_feature: MA Experiment 20000436 PARAMETER Experiment Name: At_Drought_P Parameter: Organism Value: A. thaliana
  misc_feature: MA Experiment 20000436 PARAMETER Experiment Name: At_Drought_P Parameter: Plant Line Value: WS
  misc_feature: MA Experiment 20000436 PARAMETER Experiment Name: At_Drought_P Parameter: Timepoint (hr) Value: 12
  misc_feature: MA Experiment 20000436 PARAMETER Experiment Name: At_Drought_P Parameter: Tissue Value: Whole Plant
  misc_feature: MA Experiment 20000436 PARAMETER Experiment Name: At_Drought_P Parameter: Treatment Value: Drought vs. No Drought
  misc_feature: MA Experiment ID: 20000438 Result: Up-regulated in Transcription
  misc_feature: MA Experiment 20000438 PARAMETER Experiment Name: At_Shoots__P Parameter: Age (day) Value: 14
  misc_feature: MA Experiment 20000438 PARAMETER Experiment Name: At_Shoots__P Parameter: Tissue Value: Shoots vs. Whole Plant
  misc_feature: MA Experiment ID: 20000439 Result: Down-regulated in Transcription
  misc_feature: MA Experiment 20000439 PARAMETER Experiment Name: At_Roots__P Parameter: Age (day) Value: 14 vs. 21
  misc_feature: MA Experiment 20000439 PARAMETER Experiment Name: At_Roots__P Parameter: Organism Value: A. thaliana
  misc_feature: MA Experiment 20000439 PARAMETER Experiment Name: At_Roots__P Parameter: Tissue Value: Roots vs. Whole Plant
  misc_feature: MA Experiment ID: 20000451 Result: Up-regulated in Transcription
  misc_feature: MA Experiment 20000451 PARAMETER Experiment Name: At_CS6879_Shoots-Roots_P Parameter: Age (day) Value: 14
  misc_feature: MA Experiment 20000451 PARAMETER Experiment Name: At_CS6879_Shoots-Roots_P Parameter: Organism Value: A. thaliana
  misc_feature: MA Experiment 20000451 PARAMETER Experiment Name: At_CS6879_Shoots-Roots_P Parameter: Plant Line Value: CS6879 vs. WS
  misc_feature: MA Experiment 20000451 PARAMETER Experiment Name: At_CS6879_Shoots-Roots_P Parameter: Tissue Value: Roots
  misc_feature: MA Experiment ID: 20001247 Result: Up-regulated in Transcription
  misc_feature: MA Experiment 20001247 PARAMETER Experiment Name: At_Far-red-induction_P Parameter: Age (day) Value: 7
  misc_feature: MA Experiment 20001247 PARAMETER Experiment Name: At_Far-red-induction_P Parameter: Light Value: Far-red vs. White
  misc_feature: MA Experiment 20001247 PARAMETER Experiment Name: At_Far-red-induction_P Parameter: Organism Value: A. thaliana
  misc_feature: MA Experiment 20001247 PARAMETER Experiment Name: At_Far-red-induction_P Parameter: Plant Line Value: Columbia
  misc_feature: MA Experiment 20001247 PARAMETER Experiment Name: At_Far-red-induction_P Parameter: Timepoint (hr) Value: 1
  misc_feature: MA Experiment 20001247 PARAMETER Experiment Name: At_Far-red-induction_P Parameter: Tissue Value: Whole Plant
  misc_feature: MA Experiment ID: 20001554 Result: Down-regulated in Transcription
  misc_feature: MA Experiment 20001554 PARAMETER Experiment Name: At_Drought_Soil_Dry_P Parameter: Age (day) Value: 21
  misc_feature: MA Experiment 20001554 PARAMETER Experiment Name: At_Drought_Soil_Dry_P Parameter: Organism Value: A. thaliana
  misc_feature: MA Experiment 20001554 PARAMETER Experiment Name: At_Drought_Soil_Dry_P Parameter: Plant Line Value: WS
  misc_feature: MA Experiment 20001554 PARAMETER Experiment Name: At_Drought_Soil_Dry_P Parameter: Post Timepoint (hr) Value: None
  misc_feature: MA Experiment 20001554 PARAMETER Experiment Name: At_Drought_Soil_Dry_P Parameter: Post-Treatment Value: None
  misc_feature: MA Experiment 20001554 PARAMETER Experiment Name: At_Drought_Soil_Dry_P Parameter: Timepoint (day) Value: 7
  misc_feature: MA Experiment 20001554 PARAMETER Experiment Name: At_Drought_Soil_Dry_P Parameter: Treatment Value: Drought vs. No Drought
  misc_feature: MA Experiment ID: 20001555 Result: Down-regulated in Transcription
  misc_feature: MA Experiment 20001555 PARAMETER Experiment Name: At_Drought_Soil_Dry_P Parameter: Age (day) Value: 24
  misc_feature: MA Experiment 20001555 PARAMETER Experiment Name: At_Drought_Soil_Dry_P Parameter: Organism Value: A. thaliana
  misc_feature: MA Experiment 20001555 PARAMETER Experiment Name: At_Drought_Soil_Dry_P Parameter: Plant Line Value: WS
  misc_feature: MA Experiment 20001555 PARAMETER Experiment Name: At_Drought_Soil_Dry_P Parameter: Post Timepoint (hr) Value: None
  misc_feature: MA Experiment 20001555 PARAMETER Experiment Name: At_Drought_Soil_Dry_P Parameter: Post-Treatment Value: None
  misc_feature: MA Experiment 20001555 PARAMETER Experiment Name: At_Drought_Soil_Dry_P Parameter: Timepoint (day) Value: 10
  misc_feature: MA Experiment 20001555 PARAMETER Experiment Name: At_Drought_Soil_Dry_P Parameter: Treatment Value: Drought vs. No Drought
  misc_feature: MA Experiment ID: 20001556 Result: Down-regulated in Transcription
  misc_feature: MA Experiment 20001556 PARAMETER Experiment Name: At_Drought_Soil_Dry_P Parameter: Age (day) Value: 26
  misc_feature: MA Experiment 20001556 PARAMETER Experiment Name: At_Drought_Soil_Dry_P Parameter: Organism Value: A. thaliana
  misc_feature: MA Experiment 20001556 PARAMETER Experiment Name: At_Drought_Soil_Dry_P Parameter: Plant Line Value: WS
  misc_feature: MA Experiment 20001556 PARAMETER Experiment Name: At_Drought_Soil_Dry_P Parameter: Post Timepoint (hr) Value: None
  misc_feature: MA Experiment 20001556 PARAMETER Experiment Name: At_Drought_Soil_Dry_P Parameter: Post-Treatment Value: None
  misc_feature: MA Experiment 20001556 PARAMETER Experiment Name: At_Drought_Soil_Dry_P Parameter: Timepoint (day) Value: 12
  misc_feature: MA Experiment 20001556 PARAMETER Experiment Name: At_Drought_Soil_Dry_P Parameter: Treatment Value: Drought vs. No Drought
  misc_feature: MA Experiment ID: 20001557 Result: Up-regulated in Transcription
  misc_feature: MA Experiment 20001557 PARAMETER Experiment Name: At_Drought_Soil_Dry_P Parameter: Age (day) Value: 27
  misc_feature: MA Experiment 20001557 PARAMETER Experiment Name: At_Drought_Soil_Dry_P Parameter: Organism Value: A. thaliana
  misc_feature: MA Experiment 20001557 PARAMETER Experiment Name: At_Drought_Soil_Dry_P Parameter: Plant Line Value: WS
  misc_feature: MA Experiment 20001557 PARAMETER Experiment Name: At_Drought_Soil_Dry_P Parameter: Post Timepoint (hr) Value: 3
  misc_feature: MA Experiment 20001557 PARAMETER Experiment Name: At_Drought_Soil_Dry_P Parameter: Post-Treatment Value: Re-Water vs. No Drought
  misc_feature: MA Experiment 20001557 PARAMETER Experiment Name: At_Drought_Soil_Dry_P Parameter: Timepoint (day) Value: 13
  misc_feature: MA Experiment 20001557 PARAMETER Experiment Name: At_Drought_Soil_Dry_P Parameter: Treatment Value: Drought vs. No Drought
  misc_feature: MA Experiment ID: 20001558 Result: Up-regulated in Transcription
  misc_feature: MA Experiment 20001558 PARAMETER Experiment Name: At_Drought_Soil_Dry_P Parameter: Age (day) Value: 27
  misc_feature: MA Experiment 20001558 PARAMETER Experiment Name: At_Drought_Soil_Dry_P Parameter: Organism Value: A. thaliana
  misc_feature: MA Experiment 20001558 PARAMETER Experiment Name: At_Drought_Soil_Dry_P Parameter: Plant Line Value: WS
  misc_feature: MA Experiment 20001558 PARAMETER Experiment Name: At_Drought_Soil_Dry_P Parameter: Post Timepoint (hr) Value: 6
  misc_feature: MA Experiment 20001558 PARAMETER Experiment Name: At_Drought_Soil_Dry_P Parameter: Post-Treatment Value: Re-Water vs. No Drought
  misc_feature: MA Experiment 20001558 PARAMETER Experiment Name: At_Drought_Soil_Dry_P Parameter: Timepoint (day) Value: 13
  misc_feature: MA Experiment 20001558 PARAMETER Experiment Name: At_Drought_Soil_Dry_P Parameter: Treatment Value: Drought vs. No Drought
  misc_feature: MA Experiment ID: 20001560 Result: Up-regulated in Transcription
  misc_feature: MA Experiment 20001560 PARAMETER Experiment Name: At_Drought_Soil_Dry_P Parameter: Age (day) Value: 28
  misc_feature: MA Experiment 20001560 PARAMETER Experiment Name: At_Drought_Soil_Dry_P Parameter: Organism Value: A. thaliana
  misc_feature: MA Experiment 20001560 PARAMETER Experiment Name: At_Drought_Soil_Dry_P Parameter: Plant Line Value: WS
  misc_feature: MA Experiment 20001560 PARAMETER Experiment Name: At_Drought_Soil_Dry_P Parameter: Post Timepoint (hr) Value: None
  misc_feature: MA Experiment 20001560 PARAMETER Experiment Name: At_Drought_Soil_Dry_P Parameter: Post-Treatment Value: None
  misc_feature: MA Experiment 20001560 PARAMETER Experiment Name: At_Drought_Soil_Dry_P Parameter: Timepoint (day) Value: 14
  misc_feature: MA Experiment 20001560 PARAMETER Experiment Name: At_Drought_Soil_Dry_P Parameter: Treatment Value: Drought vs. No Drought
  misc_feature: MA Experiment ID: 20001904 Result: Down-regulated in Transcription
  misc_feature: MA Experiment 20001904 PARAMETER Experiment Name: At_Drought_Reproduction_P Parameter: Age (day) Value: 37
  misc_feature: MA Experiment 20001904 PARAMETER Experiment Name: At_Drought_Reproduction_P Parameter: Organism Value: A. thaliana
  misc_feature: MA Experiment 20001904 PARAMETER Experiment Name: At_Drought_Reproduction_P Parameter: Plant Line Value: WS
  misc_feature: MA Experiment 20001904 PARAMETER Experiment Name: At_Drought_Reproduction_P Parameter: Timepoint (day) Value: 7
  misc_feature: MA Experiment 20001904 PARAMETER Experiment Name: At_Drought_Reproduction_P Parameter: Tissue Value: Rosettes
  misc_feature: MA Experiment 20001904 PARAMETER Experiment Name: At_Drought_Reproduction_P Parameter: Treatment Value: Drought vs. No Drought
  misc_feature: MA Experiment ID: 20001906 Result: Down-regulated in Transcription
  misc_feature: MA Experiment 20001906 PARAMETER Experiment Name: At_Drought_Reproduction_P Parameter: Age (day) Value: 35
  misc_feature: MA Experiment 20001906 PARAMETER Experiment Name: At_Drought_Reproduction_P Parameter: Organism Value: A. thaliana
  misc_feature: MA Experiment 20001906 PARAMETER Experiment Name: At_Drought_Reproduction_P Parameter: Plant Line Value: WS
  misc_feature: MA Experiment 20001906 PARAMETER Experiment Name: At_Drought_Reproduction_P Parameter: Timepoint (day) Value: 5
  misc_feature: MA Experiment 20001906 PARAMETER Experiment Name: At_Drought_Reproduction_P Parameter: Tissue Value: Siliques
  misc_feature: MA Experiment 20001906 PARAMETER Experiment Name: At_Drought_Reproduction_P Parameter: Treatment Value: Drought vs. No Drought
  misc_feature: MA Experiment ID: 20001907 Result: Down-regulated in Transcription
  misc_feature: MA Experiment 20001907 PARAMETER Experiment Name: At_Drought_Reproduction_P Parameter: Age (day) Value: 37
  misc_feature: MA Experiment 20001907 PARAMETER Experiment Name: At_Drought_Reproduction_P Parameter: Organism Value: A. thaliana
  misc_feature: MA Experiment 20001907 PARAMETER Experiment Name: At_Drought_Reproduction_P Parameter: Plant Line Value: WS
  misc_feature: MA Experiment 20001907 PARAMETER Experiment Name: At_Drought_Reproduction_P Parameter: Timepoint (day) Value: 7
  misc_feature: MA Experiment 20001907 PARAMETER Experiment Name: At_Drought_Reproduction_P Parameter: Tissue Value: Siliques
  misc_feature: MA Experiment 20001907 PARAMETER Experiment Name: At_Drought_Reproduction_P Parameter: Treatment Value: Drought vs. No Drought
  misc_feature: MA Experiment ID: 20001908 Result: Down-regulated in Transcription
  misc_feature: MA Experiment 20001908 PARAMETER Experiment Name: At_Drought_Reproduction_P Parameter: Age (day) Value: 40
  misc_feature: MA Experiment 20001908 PARAMETER Experiment Name: At_Drought_Reproduction_P Parameter: Organism Value: A. thaliana
  misc_feature: MA Experiment 20001908 PARAMETER Experiment Name: At_Drought_Reproduction_P Parameter: Plant Line Value: WS
  misc_feature: MA Experiment 20001908 PARAMETER Experiment Name: At_Drought_Reproduction_P Parameter: Timepoint (day) Value: 10
  misc_feature: MA Experiment 20001908 PARAMETER Experiment Name: At_Drought_Reproduction_P Parameter: Tissue Value: Siliques
  misc_feature: MA Experiment 20001908 PARAMETER Experiment Name: At_Drought_Reproduction_P Parameter: Treatment Value: Drought vs. No Drought
  misc_feature: MA Experiment ID: 20001911 Result: Down-regulated in Transcription
  misc_feature: MA Experiment 20001911 PARAMETER Experiment Name: At_Drought_Reproduction_P Parameter: Age (day) Value: 40
  misc_feature: MA Experiment 20001911 PARAMETER Experiment Name: At_Drought_Reproduction_P Parameter: Organism Value: A. thaliana
  misc_feature: MA Experiment 20001911 PARAMETER Experiment Name: At_Drought_Reproduction_P Parameter: Plant Line Value: WS
  misc_feature: MA Experiment 20001911 PARAMETER Experiment Name: At_Drought_Reproduction_P Parameter: Timepoint (day) Value: 10
  misc_feature: MA Experiment 20001911 PARAMETER Experiment Name: At_Drought_Reproduction_P Parameter: Tissue Value: Flowers
  misc_feature: MA Experiment 20001911 PARAMETER Experiment Name: At_Drought_Reproduction_P Parameter: Treatment Value: Drought vs. No Drought

SEQ ID NO: 39611 - protein, 276 aa, Arabidopsis thaliana; identical to SEQ ID NO: 39088
  peptide (1)..(276): Ceres Seq. ID no. 13503083
  misc_feature (193)..(274): Pfam Name: Protease inhibitor/seed storage/LTP family Pfam Description: Protease inhibitor/seed storage/LTP family
  misc_feature (193)..(274): Pfam Name: Protease inhibitor/seed storage/LTP family Pfam Description: Protease inhibitor/seed storage/LTP family
  misc_feature (38)..(274): Homolog of NCBI NO: 1709767 NR Description: 36.4 KD PROLINE-RICH PROTEIN
  misc_feature (38)..(274): Homolog of NCBI NO: 19521 NR Description: proline rich protein [Lycopersicon esculentum]
  misc_feature (26)..(274): Homolog of NCBI NO: 7446486 NR Description: hypothetical protein - carrot
  misc_feature (89)..(276): Homolog of NCBI NO: 17154773 NR Description: extensin-like protein [Cucumis sativus]
  misc_feature (43)..(274): Homolog of NCBI NO: 1076501 NR Description: cell wall protein - alfalfa
  misc_feature (38)..(274): Homolog of NCBI NO: 1709767 NR Description: 36.4 KD PROLINE-RICH PROTEIN
  misc_feature (26)..(274): Homolog of NCBI NO: 7446486 NR Description: hypothetical protein - carrot
  misc_feature (43)..(274): Homolog of NCBI NO: 1076501 NR Description: cell wall protein - alfalfa
  misc_feature (49)..(276): Homolog of NCBI NO: 18396941 NR Description: protease inhibitor/seed storage/lipid transfer
  misc_feature (6)..(204): Homolog of NCBI NO: 24417264 NR Description: unknown [Arabidopsis thaliana]
  misc_feature (6)..(248): Homolog of NCBI NO: 18396941 NR Description: protease inhibitor/seed storage/lipid transfer
  misc_feature (45)..(274): Homolog of NCBI NO: 7446482 NR Description: probable cell wall-plasma membrane linker protein
  misc_feature (44)..(274): Homolog of NCBI NO: 7446483 NR Description: probable cell wall protein - garden pea
  misc_feature (89)..(276): Homolog of NCBI NO: 17154773 NR Description: extensin-like protein [Cucumis sativus]
  misc_feature (38)..(274): Homolog of NCBI NO: 19521 NR Description: proline rich protein [Lycopersicon esculentum]
  misc_feature (44)..(274): Homolog of NCBI NO: 7446483 NR Description: probable cell wall protein - garden pea
  misc_feature (45)..(274): Homolog of NCBI NO: 7446482 NR Description: probable cell wall-plasma membrane linker protein
  misc_feature (6)..(248): Homolog of NCBI NO: 18396941 NR Description: protease inhibitor/seed storage/lipid transfer
  misc_feature (6)..(204): Homolog of NCBI NO: 24417264 NR Description: unknown [Arabidopsis thaliana]
  misc_feature (49)..(276): Homolog of NCBI NO: 18396941 NR Description: protease inhibitor/seed storage/lipid transfer

SEQ ID NO: 39612 - protein, 271 aa, Arabidopsis thaliana; identical to SEQ ID NO: 39089
  peptide (1)..(271): Ceres Seq. ID no. 13503084
  misc_feature (188)..(269): Pfam Name: Protease inhibitor/seed storage/LTP family Pfam Description: Protease inhibitor/seed storage/LTP family
  misc_feature (188)..(269): Pfam Name: Protease inhibitor/seed storage/LTP family Pfam Description: Protease inhibitor/seed storage/LTP family
  misc_feature (33)..(269): Homolog of NCBI NO: 1709767 NR Description: 36.4 KD PROLINE-RICH PROTEIN
  misc_feature (33)..(269): Homolog of NCBI NO: 19521 NR Description: proline rich protein [Lycopersicon esculentum]
  misc_feature (21)..(269): Homolog of NCBI NO: 7446486 NR Description: hypothetical protein - carrot
  misc_feature (84)..(271): Homolog of NCBI NO: 17154773 NR Description: extensin-like protein [Cucumis sativus]
  misc_feature (38)..(269): Homolog of NCBI NO: 1076501 NR Description: cell wall protein - alfalfa
  misc_feature (33)..(269): Homolog of NCBI NO: 1709767 NR Description: 36.4 KD PROLINE-RICH PROTEIN
  misc_feature (21)..(269): Homolog of NCBI NO: 7446486 NR Description: hypothetical protein - carrot
  misc_feature (38)..(269): Homolog of NCBI NO: 1076501 NR Description: cell wall protein - alfalfa
  misc_feature (44)..(271): Homolog of NCBI NO: 18396941 NR Description: protease inhibitor/seed storage/lipid transfer
  misc_feature (1)..(199): Homolog of NCBI NO: 24417264 NR Description: unknown [Arabidopsis thaliana]
  misc_feature (1)..(243): Homolog of NCBI NO: 18396941 NR Description: protease inhibitor/seed storage/lipid transfer
  misc_feature (40)..(269): Homolog of NCBI NO: 7446482 NR Description: probable cell wall-plasma membrane linker protein
  misc_feature (39)..(269): Homolog of NCBI NO: 7446483 NR Description: probable cell wall protein - garden pea
  misc_feature (84)..(271): Homolog of NCBI NO: 17154773 NR Description: extensin-like protein [Cucumis sativus]
  misc_feature (33)..(269): Homolog of NCBI NO: 19521 NR Description: proline rich protein [Lycopersicon esculentum]
  misc_feature (39)..(269): Homolog of NCBI NO: 7446483 NR Description: probable cell wall protein - garden pea
  misc_feature (40)..(269): Homolog of NCBI NO: 7446482 NR Description: probable cell wall-plasma membrane linker protein
  misc_feature (1)..(243): Homolog of NCBI NO: 18396941 NR Description: protease inhibitor/seed storage/lipid transfer
  misc_feature (1)..(199): Homolog of NCBI NO: 24417264 NR Description: unknown [Arabidopsis thaliana]
  misc_feature (44)..(271): Homolog of NCBI NO: 18396941 NR Description: protease inhibitor/seed storage/lipid transfer

SEQ ID NO: 39613 - DNA, 885 bp, Arabidopsis thaliana
  misc_feature (1)..(885): Ceres Seq. ID no. 12325727
  misc_feature: MA Experiment ID: 108462 Result: Up-regulated in Transcription
  misc_feature: MA Experiment 108462 PARAMETER Experiment Name: At_Germinating_Seeds_cDNA_P Parameter: Age (day) Value: 2 vs. 0
  misc_feature: MA Experiment 108462 PARAMETER Experiment Name: At_Germinating_Seeds_cDNA_P Parameter: Tissue Value: Germinating Seeds
  misc_feature: MA Experiment ID: 108569 Result: Up-regulated in Transcription
  misc_feature: MA Experiment 108569 PARAMETER Experiment Name: At_0.001%_MeJA__cDNA_P Parameter: Timepoint (hr) Value: 6
  misc_feature: MA Experiment 108569 PARAMETER Experiment Name: At_0.001%_MeJA__cDNA_P Parameter: Tissue Value: Aerial
  misc_feature: MA Experiment 108569 PARAMETER Experiment Name: At_0.001%_MeJA__cDNA_P Parameter: Treatment Value: 0.001% MeJA vs. No Treatment
  misc_feature: MA Experiment ID: 20000173 Result: Down-regulated in Transcription
  misc_feature: MA Experiment 20000173 PARAMETER Experiment Name: At_42deg_Heat_P Parameter: Age (day) Value: 14
  misc_feature: MA Experiment 20000173 PARAMETER Experiment Name: At_42deg_Heat_P Parameter: Organism Value: A. thaliana
  misc_feature: MA Experiment 20000173 PARAMETER Experiment Name: At_42deg_Heat_P Parameter: Plant Line Value: WS
  misc_feature: MA Experiment 20000173 PARAMETER Experiment Name: At_42deg_Heat_P Parameter: Temperature (deg C) Value: 42 vs. 22
  misc_feature: MA Experiment 20000173 PARAMETER Experiment Name: At_42deg_Heat_P Parameter: Timepoint (hr) Value: 6
  misc_feature: MA Experiment 20000173 PARAMETER Experiment Name: At_42deg_Heat_P Parameter: Tissue Value: Aerial
  misc_feature: MA Experiment ID: 20000180 Result: Up-regulated in Transcription
  misc_feature: MA Experiment 20000180 PARAMETER Experiment Name: At_Germinating_Seeds_P Parameter: Age (hr) Value: 24 vs. 0
  misc_feature: MA Experiment 20000180 PARAMETER Experiment Name: At_Germinating_Seeds_P Parameter: Tissue Value: Germinating Seeds
  misc_feature: MA Experiment ID: 20000184 Result: Up-regulated in Transcription
  misc_feature: MA Experiment 20000184 PARAMETER Experiment Name: At_Shoots__P Parameter: Age (day) Value: 7
  misc_feature: MA Experiment 20000184 PARAMETER Experiment Name: At_Shoots__P Parameter: Tissue Value: Shoots vs. Whole Plant
  misc_feature: MA Experiment ID: 20000185 Result: Up-regulated in Transcription
  misc_feature: MA Experiment 20000185 PARAMETER Experiment Name: At_Roots__P Parameter: Age (day) Value: 7 vs. 21
  misc_feature: MA Experiment 20000185 PARAMETER Experiment Name: At_Roots__P Parameter: Organism Value: A. thaliana
  misc_feature: MA Experiment 20000185 PARAMETER Experiment Name: At_Roots__P Parameter: Tissue Value: Roots vs. Whole Plant
  misc_feature: MA Experiment ID: 20000227 Result: Down-regulated in Transcription
  misc_feature: MA Experiment 20000227 PARAMETER Experiment Name: At_Root-Tips-vs-Tops_P Parameter: Tissue Value: Root Tips vs. Root Tops
  misc_feature: MA Experiment ID: 20000439 Result: Up-regulated in Transcription
  misc_feature: MA Experiment 20000439 PARAMETER Experiment Name: At_Roots__P Parameter: Age (day) Value: 14 vs. 21
  misc_feature: MA Experiment 20000439 PARAMETER Experiment Name: At_Roots__P Parameter: Organism Value: A. thaliana
  misc_feature: MA Experiment 20000439 PARAMETER Experiment Name: At_Roots__P Parameter: Tissue Value: Roots vs. Whole Plant
  misc_feature: MA Experiment ID: 20000573 Result: Down-regulated in Transcription
  misc_feature: MA Experiment 20000573 PARAMETER Experiment Name: At_100uM_ABA_Mutants__P Parameter: Organism Value: A. thaliana
  misc_feature: MA Experiment 20000573 PARAMETER Experiment Name: At_100uM_ABA_Mutants__P Parameter: Plant Line Value: CS22 vs. Ler wt
  misc_feature: MA Experiment 20000573 PARAMETER Experiment Name: At_100uM_ABA_Mutants__P Parameter: Timepoint (hr) Value: N/A
  misc_feature: MA Experiment 20000573 PARAMETER Experiment Name: At_100uM_ABA_Mutants__P Parameter: Tissue Value: Whole Plant
  misc_feature: MA Experiment 20000573 PARAMETER Experiment Name: At_100uM_ABA_Mutants__P Parameter: Treatment Value: None
  misc_feature: MA Experiment ID: 20000574 Result: Down-regulated in Transcription
  misc_feature: MA Experiment 20000574 PARAMETER Experiment Name: At_100uM_ABA_Mutants__P Parameter: Organism Value: A. thaliana
  misc_feature: MA Experiment 20000574 PARAMETER Experiment Name: At_100uM_ABA_Mutants__P Parameter: Plant Line Value: CS23 vs. Ler wt
  misc_feature: MA Experiment 20000574 PARAMETER Experiment Name: At_100uM_ABA_Mutants__P Parameter: Timepoint (hr) Value: N/A
  misc_feature: MA Experiment 20000574 PARAMETER Experiment Name: At_100uM_ABA_Mutants__P Parameter: Tissue Value: Whole Plant
  misc_feature: MA Experiment 20000574 PARAMETER Experiment Name: At_100uM_ABA_Mutants__P Parameter: Treatment Value: None
atccaatagttgaaaaacagaaaaagcctctccaatgactttttctcgtagcagctcgattacgttcttcatcgttgctttattcaccgtcttaattaatccggcgatctcttctcgcgccgcgtccttcatcaagctgcctcgctcttccatcgcttcatactgcgagagttggagattagccgctgagaccaacaatgttggaccctggaaggtgattccgtcccaatgcgaaaactatattaaaaactacatcaacggaggccagttcgacaaagactacgatgtagtcgctagttacgccattgactacgctaaaacggtcaaggttggcggagacggcaaggacgcgtgggtctttgacatcgatgagacgcttctctccaatattgagtactacaaggctaatggttacgggtctgaaccgtacgatagtattaaatacaatgaggtggtggaaaaaggaaaagacccaggttatgatgcgagcttgaggctctacaaagctctcaagaaacttggtttcactatcattttactaactggccgagacgaaggtcatagaagtgtcaccgagaaaaatcttcgggatgccggttatttcggttggaaccgactcctcttgaggggtcaaaatgatcaagggaaaacagcaacacaatacaaatcagagcagcgatcacaagttgtaaaagaaggctacacaatccatggtaatactggagatcaatggagtgacttgctaggttttgccgtggcttctcgttctttcaaagtcccaaatcccatgtactatgttgcttgatcaccatctgccattgatatattgcatgataatttatcatttatgtatgaataaggatttatgaatgtatcccataattc

SEQ ID NO: 39614 - protein, 256 aa, Arabidopsis thaliana
  peptide (1)..(256): Ceres Seq. ID no. 12325728
  misc_feature (28)..(256): Pfam Name: HAD superfamily, subfamily IIIB (Acid phosphatase) Pfam Description: HAD superfamily, subfamily IIIB (Acid
  misc_feature (9)..(255): Homolog of NCBI NO: 15241412 NR Description: acid phosphatase; protein id: At5g51260.1
  misc_feature (1)..(255): Homolog of NCBI NO: 15234949 NR Description: acid phosphatase - like protein
  misc_feature (14)..(255): Homolog of NCBI NO: 445113 NR Description: acid phosphatase 1
  misc_feature (14)..(255): Homolog of NCBI NO: 130718 NR Description: Acid phosphatase precursor 1
  misc_feature (1)..(255): Homolog of NCBI NO: 15233504 NR Description: acid phosphatase-like protein
  misc_feature (1)..(256): Homolog of NCBI NO: 15233526 NR Description: acid phosphatase-like protein
MTFSRSSSITFFIVALFTVLINPAISSRAASFIKLPRSSIASYCESWRLAAETNNVGPWKVIPSQCENYIKNYINGGQFDKDYDVVASYAIDYAKTVKVGGDGKDAWVFDIDETLLSNIEYYKANGYGSEPYDSIKYNEVVEKGKDPGYDASLRLYKALKKLGFTIILLTGRDEGHRSVTEKNLRDAGYFGWNRLLLRGQNDQGKTATQYKSEQRSQVVKEGYTIHGNTGDQWSDLLGFAVASRSFKVPNPMYYVA

SEQ ID NO: 39615 - DNA, 1803 bp, Arabidopsis thaliana
  misc_feature (1)..(1803): Ceres Seq. ID no. 13497348
  misc_feature: MA Experiment ID: 108433 Result: Down-regulated in Transcription
  misc_feature: MA Experiment 108433 PARAMETER Experiment Name: At_rhl_Mutant2_cDNA_P Parameter: Age (day) Value: 7
  misc_feature: MA Experiment 108433 PARAMETER Experiment Name: At_rhl_Mutant2_cDNA_P Parameter: Organism Value: A. thaliana
  misc_feature: MA Experiment 108433 PARAMETER Experiment Name: At_rhl_Mutant2_cDNA_P Parameter: Plant Line Value: rhl Mutant vs. wt landsburg
  misc_feature: MA Experiment 108433 PARAMETER Experiment Name: At_rhl_Mutant2_cDNA_P Parameter: Tissue Value: Roots
  misc_feature: MA Experiment ID: 108435 Result: Up-regulated in Transcription
  misc_feature: MA Experiment 108435 PARAMETER Experiment Name: At_stm_Mutants_cDNA_P Parameter: Plant Line Value: wt Landsburg vs stm
  misc_feature: MA Experiment 108435 PARAMETER Experiment Name: At_stm_Mutants_cDNA_P Parameter: Tissue Value: Shoot Apical Meristem Region
  misc_feature: MA Experiment ID: 108461 Result: Up-regulated in Transcription
  misc_feature: MA Experiment 108461 PARAMETER Experiment Name: At_Germinating_Seeds_cDNA_P Parameter: Age (day) Value: 1 vs. 0
  misc_feature: MA Experiment 108461 PARAMETER Experiment Name: At_Germinating_Seeds_cDNA_P Parameter: Tissue Value: Germinating Seeds
  misc_feature: MA Experiment ID: 108462 Result: Up-regulated in Transcription
  misc_feature: MA Experiment 108462 PARAMETER Experiment Name: At_Germinating_Seeds_cDNA_P Parameter: Age (day) Value: 2 vs. 0
  misc_feature: MA Experiment 108462 PARAMETER Experiment Name: At_Germinating_Seeds_cDNA_P Parameter: Tissue Value: Germinating Seeds
  misc_feature: MA Experiment ID: 108463 Result: Up-regulated in Transcription
  misc_feature: MA Experiment 108463 PARAMETER Experiment Name: At_Germinating_Seeds_cDNA_P Parameter: Age (day) Value: 3 vs. 0
  misc_feature: MA Experiment 108463 PARAMETER Experiment Name: At_Germinating_Seeds_cDNA_P Parameter: Tissue Value: Germinating Seeds
  misc_feature: MA Experiment ID: 108464 Result: Up-regulated in Transcription
  misc_feature: MA Experiment 108464 PARAMETER Experiment Name: At_Germinating_Seeds_cDNA_P Parameter: Age (day) Value: 4 vs. 0
  misc_feature: MA Experiment 108464 PARAMETER Experiment Name: At_Germinating_Seeds_cDNA_P Parameter: Tissue Value: Germinating Seeds
  misc_feature: MA Experiment ID: 108569 Result: Up-regulated in Transcription
  misc_feature: MA Experiment 108569 PARAMETER Experiment Name: At_0.001%_MeJA__cDNA_P Parameter: Timepoint (hr) Value: 6
  misc_feature: MA Experiment 108569 PARAMETER Experiment Name: At_0.001%_MeJA__cDNA_P Parameter: Tissue Value: Aerial
  misc_feature: MA Experiment 108569 PARAMETER Experiment Name: At_0.001%_MeJA__cDNA_P Parameter: Treatment Value: 0.001% MeJA vs. No Treatment
  misc_feature: MA Experiment ID: 108576 Result: Down-regulated in Transcription
  misc_feature: MA Experiment 108576 PARAMETER Experiment Name: At_42deg_Heat_cDNA_P Parameter: Temperature (deg C) Value: 42 vs. 22
  misc_feature: MA Experiment 108576 PARAMETER Experiment Name: At_42deg_Heat_cDNA_P Parameter: Timepoint (hr) Value: 1
  misc_feature: MA Experiment 108576 PARAMETER Experiment Name: At_42deg_Heat_cDNA_P Parameter: Tissue Value: Aerial
  misc_feature: MA Experiment ID: 108577 Result: Down-regulated in Transcription
  misc_feature: MA Experiment 108577 PARAMETER Experiment Name: At_42deg_Heat_cDNA_P Parameter: Temperature (deg C) Value: 42 vs. 22
  misc_feature: MA Experiment 108577 PARAMETER Experiment Name: At_42deg_Heat_cDNA_P Parameter: Timepoint (hr) Value: 6
  misc_feature: MA Experiment 108577 PARAMETER Experiment Name: At_42deg_Heat_cDNA_P Parameter: Tissue Value: Aerial
  misc_feature: MA Experiment ID: 108595 Result: Down-regulated in Transcription
  misc_feature: MA Experiment 108595 PARAMETER Experiment Name: At_Ler-pi_Ovule_cDNA_P Parameter: Plant Line Value: null
  misc_feature: MA Experiment ID: 108605 Result: Up-regulated in Transcription
  misc_feature: MA Experiment 108605 PARAMETER Experiment Name: At_100uM_ABA_cDNA_P Parameter: Timepoint (hr) Value: 6
  misc_feature: MA Experiment 108605 PARAMETER Experiment Name: At_100uM_ABA_cDNA_P Parameter: Tissue Value: Aerial
  misc_feature: MA Experiment 108605 PARAMETER Experiment Name: At_100uM_ABA_cDNA_P Parameter: Treatment Value: 100uM ABA vs. No Treatment
  misc_feature: MA Experiment ID: 108668 Result: Down-regulated in Transcription
  misc_feature: MA Experiment 108668 PARAMETER Experiment Name: At_2mM_SA_cDNA_P Parameter: Plant Line Value: WS
  misc_feature: MA Experiment 108668 PARAMETER Experiment Name: At_2mM_SA_cDNA_P Parameter: Timepoint (hr) Value: 6
  misc_feature: MA Experiment 108668 PARAMETER Experiment Name: At_2mM_SA_cDNA_P Parameter: Treatment Value: 2mM SA vs. No Treatment
  misc_feature: MA Experiment ID: 20000090 Result: Down-regulated in Transcription
  misc_feature: MA Experiment ID: 20000111 Result: Down-regulated in Transcription
  misc_feature: MA Experiment 20000111 PARAMETER Experiment Name: At_42deg_Heat_cDNA_P Parameter: Temperature (deg C) Value: 42 vs. 22
  misc_feature: MA Experiment 20000111 PARAMETER Experiment Name: At_42deg_Heat_cDNA_P Parameter: Timepoint (hr) Value: 6
  misc_feature: MA Experiment 20000111 PARAMETER Experiment Name: At_42deg_Heat_cDNA_P Parameter: Tissue Value: Aerial
  misc_feature: MA Experiment ID: 20000112 Result: Down-regulated in Transcription
  misc_feature: MA Experiment 20000112 PARAMETER Experiment Name: At_42deg_Heat_cDNA_P Parameter: Temperature (deg C) Value: 42 vs. 22
  misc_feature: MA Experiment 20000112 PARAMETER Experiment Name: At_42deg_Heat_cDNA_P Parameter: Timepoint (hr) Value: 2
  misc_feature: MA Experiment 20000112 PARAMETER Experiment Name: At_42deg_Heat_cDNA_P Parameter: Tissue Value: Aerial
  misc_feature: MA Experiment ID: 20000113 Result: Down-regulated in Transcription
  misc_feature: MA Experiment 20000113 PARAMETER Experiment Name: At_42deg_Heat_cDNA_P Parameter: Temperature (deg C) Value: 42 vs. 22
  misc_feature: MA Experiment 20000113 PARAMETER Experiment Name: At_42deg_Heat_cDNA_P Parameter: Timepoint (hr) Value: 8
  misc_feature: MA Experiment 20000113 PARAMETER Experiment Name: At_42deg_Heat_cDNA_P Parameter: Tissue Value: Aerial
  misc_feature: MA Experiment ID: 20000180 Result: Up-regulated in Transcription
  misc_feature: MA Experiment 20000180 PARAMETER Experiment Name: At_Germinating_Seeds_P Parameter: Age (hr) Value: 24 vs. 0
  misc_feature: MA Experiment 20000180 PARAMETER Experiment Name: At_Germinating_Seeds_P Parameter: Tissue Value: Germinating Seeds
  misc_feature: MA Experiment ID: 20000182 Result: Down-regulated in Transcription
  misc_feature: MA Experiment 20000182 PARAMETER Experiment Name: At_2mM_SA_P Parameter: Age (day) Value: 14
  misc_feature: MA Experiment 20000182 PARAMETER Experiment Name: At_2mM_SA_P Parameter: Organism Value: A. thaliana
  misc_feature: MA Experiment 20000182 PARAMETER Experiment Name: At_2mM_SA_P Parameter: Plant Line Value: WS
  misc_feature: MA Experiment 20000182 PARAMETER Experiment Name: At_2mM_SA_P Parameter: Timepoint (hr) Value: 6
  misc_feature: MA Experiment 20000182 PARAMETER Experiment Name: At_2mM_SA_P Parameter: Tissue Value: Aerial
  misc_feature: MA Experiment 20000182 PARAMETER Experiment Name: At_2mM_SA_P Parameter: Treatment Value: 2mM SA vs. No Treatment
  misc_feature: MA Experiment ID: 20000185 Result: Down-regulated in Transcription
  misc_feature: MA Experiment 20000185 PARAMETER Experiment Name: At_Roots__P Parameter: Age (day) Value: 7 vs. 21
  misc_feature: MA Experiment 20000185 PARAMETER Experiment Name: At_Roots__P Parameter: Organism Value: A. thaliana
  misc_feature: MA Experiment 20000185 PARAMETER Experiment Name: At_Roots__P Parameter: Tissue Value: Roots vs. Whole Plant
  misc_feature: MA Experiment ID: 20000227 Result: Down-regulated in Transcription
  misc_feature: MA Experiment 20000227 PARAMETER Experiment Name: At_Root-Tips-vs-Tops_P Parameter: Tissue Value: Root Tips vs. Root Tops
  misc_feature: MA Experiment ID: 20000234 Result: Down-regulated in Transcription
  misc_feature: MA Experiment 20000234 PARAMETER Experiment Name: At_Siliques_P Parameter: Age (day) Value: 21
  misc_feature: MA Experiment 20000234 PARAMETER Experiment Name: At_Siliques_P Parameter: Organism Value: A. thaliana
  misc_feature: MA Experiment 20000234 PARAMETER Experiment Name: At_Siliques_P Parameter: Plant Line Value: WS
  misc_feature: MA Experiment 20000234 PARAMETER Experiment Name: At_Siliques_P Parameter: Tissue Value: Less Than 5mm Siliques vs. Whole Plant
  misc_feature: MA Experiment ID: 20000264 Result: Down-regulated in Transcription
  misc_feature: MA Experiment 20000264 PARAMETER Experiment Name: At_Open_Flower_P Parameter: Age (day) Value: 21
  misc_feature: MA Experiment 20000264 PARAMETER Experiment Name: At_Open_Flower_P Parameter: Plant Line Value: WS
  misc_feature: MA Experiment 20000264 PARAMETER Experiment Name: At_Open_Flower_P Parameter: Tissue Value: Open Flower vs. Whole Plant
  misc_feature: MA Experiment ID: 20000286 Result: Down-regulated in Transcription
  misc_feature: MA Experiment 20000286 PARAMETER Experiment Name: At_Open_Flower_P Parameter: Age (day) Value: 21
  misc_feature: MA Experiment 20000286 PARAMETER Experiment Name: At_Open_Flower_P Parameter: Plant Line Value: WS
  misc_feature: MA Experiment 20000286 PARAMETER Experiment Name: At_Open_Flower_P Parameter: Tissue Value: Half Open vs. Whole Plant
  misc_feature: MA Experiment ID: 20000436 Result: Down-regulated in Transcription
  misc_feature: MA Experiment 20000436 PARAMETER Experiment Name: At_Drought_P Parameter: Age (day) Value: 7
  misc_feature: MA Experiment 20000436 PARAMETER Experiment Name: At_Drought_P Parameter: Organism Value: A. thaliana
  misc_feature: MA Experiment 20000436 PARAMETER Experiment Name: At_Drought_P Parameter: Plant Line Value: WS
  misc_feature: MA Experiment 20000436 PARAMETER Experiment Name: At_Drought_P Parameter: Timepoint (hr) Value: 12
  misc_feature: MA Experiment 20000436 PARAMETER Experiment Name: At_Drought_P Parameter: Tissue Value: Whole Plant
  misc_feature: MA Experiment 20000436 PARAMETER Experiment Name: At_Drought_P Parameter: Treatment Value: Drought vs. No Drought
  misc_feature: MA Experiment ID: 20000437 Result: Down-regulated in Transcription
  misc_feature: MA Experiment 20000437 PARAMETER Experiment Name: At_Drought_P Parameter: Age (day) Value: 8
  misc_feature: MA Experiment 20000437 PARAMETER Experiment Name: At_Drought_P Parameter: Organism Value: A. thaliana
  misc_feature: MA Experiment 20000437 PARAMETER Experiment Name: At_Drought_P Parameter: Plant Line Value: WS
  misc_feature: MA Experiment 20000437 PARAMETER Experiment Name: At_Drought_P Parameter: Timepoint (hr) Value: 24
  misc_feature: MA Experiment 20000437 PARAMETER Experiment Name: At_Drought_P Parameter: Tissue Value: Whole Plant
  misc_feature: MA Experiment 20000437 PARAMETER Experiment Name: At_Drought_P Parameter: Treatment Value: Drought vs. No Drought
  misc_feature: MA Experiment ID: 20000439 Result: Down-regulated in Transcription
  misc_feature: MA Experiment 20000439 PARAMETER Experiment Name: At_Roots__P Parameter: Age (day) Value: 14 vs. 21
  misc_feature: MA Experiment 20000439 PARAMETER Experiment Name: At_Roots__P Parameter: Organism Value: A. thaliana
  misc_feature: MA Experiment 20000439 PARAMETER Experiment Name: At_Roots__P Parameter: Tissue Value: Roots vs. Whole Plant
  misc_feature: MA Experiment ID: 20000441 Result: Up-regulated in Transcription
  misc_feature: MA Experiment 20000441 PARAMETER Experiment Name: At_1uM_BR-BRZ__P Parameter: Tissue Value: Shoot Apices
  misc_feature: MA Experiment 20000441 PARAMETER Experiment Name: At_1uM_BR-BRZ__P Parameter: Treatment Value: 1uM BR vs. No Treatment
  misc_feature: MA Experiment ID: 20000794 Result: Down-regulated in Transcription
  misc_feature: MA Experiment 20000794 PARAMETER Experiment Name: At_Petals_P Parameter: Age (day) Value: 23-25 days
  misc_feature: MA Experiment 20000794 PARAMETER Experiment Name: At_Petals_P Parameter: Plant Line Value: WS
  misc_feature: MA Experiment 20000794 PARAMETER Experiment Name: At_Petals_P Parameter: Tissue Value: Petals vs. Whole plant
  misc_feature: MA Experiment ID: 20001451 Result: Down-regulated in Transcription
  misc_feature: MA Experiment 20001451 PARAMETER Experiment Name: At_Far-red-induction_P Parameter: Age (day) Value: 7
  misc_feature: MA Experiment 20001451 PARAMETER Experiment Name: At_Far-red-induction_P Parameter: Light Value: Far-red vs. White
  misc_feature: MA Experiment 20001451 PARAMETER Experiment Name: At_Far-red-induction_P Parameter: Organism Value: A. thaliana
  misc_feature: MA Experiment 20001451 PARAMETER Experiment Name: At_Far-red-induction_P Parameter: Plant Line Value: Columbia
  misc_feature: MA Experiment 20001451 PARAMETER Experiment Name: At_Far-red-induction_P Parameter: Timepoint (hr) Value: 24
  misc_feature: MA Experiment 20001451 PARAMETER Experiment Name: At_Far-red-induction_P Parameter: Tissue Value: Whole Plant
  misc_feature: MA Experiment ID: 20001560 Result: Up-regulated in Transcription
  misc_feature: MA Experiment 20001560 PARAMETER Experiment Name: At_Drought_Soil_Dry_P Parameter: Age (day) Value: 28
  misc_feature: MA Experiment 20001560 PARAMETER Experiment Name: At_Drought_Soil_Dry_P Parameter: Organism Value: A. thaliana
  misc_feature: MA Experiment 20001560 PARAMETER Experiment Name: At_Drought_Soil_Dry_P Parameter: Plant Line Value: WS
  misc_feature: MA Experiment 20001560 PARAMETER Experiment Name: At_Drought_Soil_Dry_P Parameter: Post Timepoint (hr) Value: None
  misc_feature: MA Experiment 20001560 PARAMETER Experiment Name: At_Drought_Soil_Dry_P Parameter: Post-Treatment Value: None
  misc_feature: MA Experiment 20001560 PARAMETER Experiment Name: At_Drought_Soil_Dry_P Parameter: Timepoint (day) Value: 14
  misc_feature: MA Experiment 20001560 PARAMETER Experiment Name: At_Drought_Soil_Dry_P Parameter: Treatment Value: Drought vs. No Drought
  misc_feature: MA Experiment ID: 20001757 Result: Up-regulated in Transcription
  misc_feature: MA Experiment 20001757 PARAMETER Experiment Name: At_50mM_NH4NO3_L-to-H_P Parameter: Timepoint (hr) Value: 6
  misc_feature: MA Experiment 20001757 PARAMETER Experiment Name: At_50mM_NH4NO3_L-to-H_P Parameter: Tissue Value: Leaf
  misc_feature: MA Experiment 20001757 PARAMETER Experiment Name: At_50mM_NH4NO3_L-to-H_P Parameter: Treatment Value: 50mM NH4NO3 vs 100mM Mannitol
  misc_feature: MA Experiment ID: 20001911 Result: Down-regulated in Transcription
  misc_feature: MA Experiment 20001911 PARAMETER Experiment Name: At_Drought_Reproduction_P Parameter: Age (day) Value: 40
  misc_feature: MA Experiment 20001911 PARAMETER Experiment Name: At_Drought_Reproduction_P Parameter: Organism Value: A. thaliana
  misc_feature: MA Experiment 20001911 PARAMETER Experiment Name: At_Drought_Reproduction_P Parameter: Plant Line Value: WS
  misc_feature: MA Experiment 20001911 PARAMETER Experiment Name: At_Drought_Reproduction_P Parameter: Timepoint (day) Value: 10
  misc_feature: MA Experiment 20001911 PARAMETER Experiment Name: At_Drought_Reproduction_P Parameter: Tissue Value: Flowers
  misc_feature: MA Experiment 20001911 PARAMETER Experiment Name: At_Drought_Reproduction_P Parameter: Treatment Value: Drought vs. No Drought
atactcagagacgtgtagcttcactaattccacatactcagagagaaatggcaaccgaaaccgtattagccacggcggtgagcaatgggaaaagcaaaggatgttgcaagtccggtccaggttacgcgacgcctctcgccgccatggccggtccacgggaaaagctcatctatgtcactgccctttactccggaacgggcgagacaaaccggactacttggcaacggtggatgtggatccaagctcacccacattttcaagcgtcattcacagactaaaaatgccatatataggagatgagcttcaccacactggttggaactcttgcagctcttgccatggtgatgcttctgctgatagacgttaccttgtcttaccaggcttaatttctggtcgcatctatgcaatcgacacaaagaccgacccaaaggctccgtctttgtacaaggttgtagagcctaaggagattgctgaaaagacaggattagcatttccacatacatctcattgcctagcttcaggggatatgttggtgtcatgccttggggacaaagaaggaaacgccaaagggaacgggtttcttttgctagactctgacttcaatgtcaaaagcaggtgggacaaaccaggacatggtcctttgtttggttatgatttttggtaccaacctcggttcaagaccatgatcagcacttcttggggtgcacctaaagccttctccaaaggtttcaatctccagcatgttgcggatggcttgtatggaagtcatttgcatatttatcaatggcctgaaggtgaaatgaaacagataattgaccttggaaataccggtctcttacctcttgagatcagattcttgcatgatccttctaaagatacagggtatgttgggagtgctttgtctagtaatatgataaggtttttcaagaacagtgatgacacgtggagccatgaggttgttatatcggttaaaccgttgaaagtagaaaactggatacttccagaaatgccggggcttatcaccgacttcttgatctccctcgatgaccggttcttctactttgtgaactggcttcatggagacattcgtcagtacaacatcgaggaccctaaaaacccggtcttaactggacaaatatgggttggaggcttactacaaaagggtagtccttataaggctgttggagaagatggcaacacttaccaattcgatgttcctcagatcaaggggaagtctctaagagcaggacctcagatgatccaactaagcctagatgggaaaagattgtatgcaacaaactcgctgtttagcgcatgggaccgtcagttttacccggaaatcatggagaaaggctcacacataattcaaatcgatgttgatacagacaaaggtggtctcactctaaaccctgacttctttgtggactttggtgatgaaccagacggtcctgcactagctcacgagatgagatatcccggcggagactgcacttccgatatctggatctgattttggctccctaagagagagtaagctggatttgtggctagattcgtgatcaagacaattaaagttgttcttactcctttgtggcttattccgtgataataaaactttctaattatgttatgttgtgtctctatctttcgagtaaccgaattgaaccgatcaaaaccgggtcgaattatggatcatcaactcaaaaacacgtcagatacagtgtacgtggacacatggaccagatttgttatcttcttcttgttattttgttaatggacaagatctggttaattgtttatgtt

SEQ ID NO: 39616 - protein, 502 aa, Arabidopsis thaliana
  peptide (1)..(502): Ceres Seq. ID no. 15223008
  misc_feature (66)..(502): Pfam Name: 56kDa selenium binding protein (SBP56) Pfam Description: 56kDa selenium binding protein (SBP56)
  misc_feature (94)..(502): Homolog of NCBI NO: 20340239 NR Description: putative selenium-binding protein [Thellungiella
  misc_feature (66)..(502): Homolog of NCBI NO: 15485716 NR Description: selenium binding protein [Lotus japonicus]
  misc_feature (66)..(502): Homolog of NCBI NO: 15485720 NR Description: selenium binding protein [Medicago sativa]
  misc_feature (66)..(409): Homolog of NCBI NO: 7488184 NR Description: probable selenium-binding protein - Arabidopsis
  misc_feature (66)..(502): Homolog of NCBI NO: 15485232 NR Description: selenium binding protein [Arabidopsis thaliana]
  misc_feature (66)..(502): Homolog of NCBI NO: 15236385 NR Description: selenium-binding protein like [Arabidopsis
  misc_feature (66)..(502): Homolog of NCBI NO: 25348077 NR Description: selenium-binding protein like [imported] -
  misc_feature (66)..(502): Homolog of NCBI NO: 22530900 NR Description: selenium-binding protein-like protein
  misc_feature (66)..(502): Homolog of NCBI NO: 13605825 NR Description: AT4g14040/dl3061c [Arabidopsis thaliana]
  misc_feature (66)..(502): Homolog of NCBI NO: 15236386 NR Description: selenium-binding protein like [Arabidopsis
YSETCSFTNSTYSERNGNRNRISHGGEQWEKQRMLQVRSRLRDASRRHGRSTGKAHLCHCPLLRNGRDKPDYLATVDVDPSSPTFSSVIHRLKMPYIGDELHHTGWNSCSSCHGDASADRRYLVLPGLISGRIYAIDTKTDPKAPSLYKVVEPKEIAEKTGLAFPHTSHCLASGDMLVSCLGDKEGNAKGNGFLLLDSDFNVKSRWDKPGHGPLFGYDFWYQPRFKTMISTSWGAPKAFSKGFNLQHVADGLYGSHLHIYQWPEGEMKQIIDLGNTGLLPLEIRFLHDPSKDTGYVGSALSSNMIRFFKNSDDTWSHEVVISVKPLKVENWILPEMPGLITDFLISLDDRFFYFVNWLHGDIRQYNIEDPKNPVLTGQIWVGGLLQKGSPYKAVGEDGNTYQFDVPQIKGKSLRAGPQMIQLSLDGKRLYATNSLFSAWDRQFYPEIMEKGSHIIQIDVDTDKGGLTLNPDFFVDFGDEPDGPALAHEMRYPGGDCTSDIWI

SEQ ID NO: 39617 - protein, 469 aa, Arabidopsis thaliana
  peptide (1)..(469): Ceres Seq. ID no. 15223009
  misc_feature (33)..(469): Pfam Name: 56kDa selenium binding protein (SBP56) Pfam Description: 56kDa selenium binding protein (SBP56)
  misc_feature (61)..(469): Homolog of NCBI NO: 20340239 NR Description: putative selenium-binding protein [Thellungiella
  misc_feature (33)..(469): Homolog of NCBI NO: 15485716 NR Description: selenium binding protein [Lotus japonicus]
  misc_feature (33)..(469): Homolog of NCBI NO: 15485720 NR Description: selenium binding protein [Medicago sativa]
  misc_feature (33)..(376): Homolog of NCBI NO: 7488184 NR Description: probable selenium-binding protein - Arabidopsis
  misc_feature (33)..(469): Homolog of NCBI NO: 15485232 NR Description: selenium binding protein [Arabidopsis thaliana]
  misc_feature (33)..(469): Homolog of NCBI NO: 15236385 NR Description: selenium-binding protein like [Arabidopsis
  misc_feature (33)..(469): Homolog of NCBI NO: 25348077 NR Description: selenium-binding protein like [imported] -
  misc_feature (33)..(469): Homolog of NCBI NO: 22530900 NR Description: selenium-binding protein-like protein
  misc_feature (33)..(469): Homolog of NCBI NO: 13605825 NR Description: AT4g14040/dl3061c [Arabidopsis thaliana]
  misc_feature (33)..(469): Homolog of NCBI NO: 15236386 NR Description: selenium-binding protein like [Arabidopsis
MLQVRSRLRDASRRHGRSTGKAHLCHCPLLRNGRDKPDYLATVDVDPSSPTFSSVIHRLKMPYIGDELHHTGWNSCSSCHGDASADRRYLVLPGLISGRIYAIDTKTDPKAPSLYKVVEPKEIAEKTGLAFPHTSHCLASGDMLVSCLGDKEGNAKGNGFLLLDSDFNVKSRWDKPGHGPLFGYDFWYQPRFKTMISTSWGAPKAFSKGFNLQHVADGLYGSHLHIYQWPEGEMKQIIDLGNTGLLPLEIRFLHDPSKDTGYVGSALSSNMIRFFKNSDDTWSHEVVISVKPLKVENWILPEMPGLITDFLISLDDRFFYFVNWLHGDIRQYNIEDPKNPVLTGQIWVGGLLQKGSPYKAVGEDGNTYQFDVPQIKGKSLRAGPQMIQLSLDGKRLYATNSLFSAWDRQFYPEIMEKGSHIIQIDVDTDKGGLTLNPDFFVDFGDEPDGPALAHEMRYPGGDCTSDIWI

SEQ ID NO: 39618 - protein, 409 aa, Arabidopsis thaliana
  peptide (1)..(409): Ceres Seq. ID no. 15223010
  misc_feature (1)..(409): Pfam Name: 56kDa selenium binding protein (SBP56) Pfam Description: 56kDa selenium binding protein (SBP56)
  misc_feature (1)..(409): Homolog of NCBI NO: 20340239 NR Description: putative selenium-binding protein [Thellungiella
  misc_feature (1)..(409): Homolog of NCBI NO: 15485716 NR Description: selenium binding protein [Lotus japonicus]
  misc_feature (1)..(409): Homolog of NCBI NO: 15485720 NR Description: selenium binding protein [Medicago sativa]
  misc_feature (1)..(316): Homolog of NCBI NO: 7488184 NR Description: probable selenium-binding protein - Arabidopsis
  misc_feature (1)..(409): Homolog of NCBI NO: 15485232 NR Description: selenium binding protein [Arabidopsis thaliana]
  misc_feature (1)..(409): Homolog of NCBI NO: 15236385 NR Description: selenium-binding protein like [Arabidopsis
  misc_feature (1)..(409): Homolog of NCBI NO: 25348077 NR Description: selenium-binding protein like [imported] -
  misc_feature (1)..(409): Homolog of NCBI NO: 22530900 NR Description: selenium-binding protein-like protein
  misc_feature (1)..(409): Homolog of NCBI NO: 13605825 NR Description: AT4g14040/dl3061c [Arabidopsis thaliana]
  misc_feature (1)..(409): Homolog of NCBI NO: 15236386 NR Description: selenium-binding protein like [Arabidopsis
MPYIGDELHHTGWNSCSSCHGDASADRRYLVLPGLISGRIYAIDTKTDPKAPSLYKVVEPKEIAEKTGLAFPHTSHCLASGDMLVSCLGDKEGNAKGNGFLLLDSDFNVKSRWDKPGHGPLFGYDFWYQPRFKTMISTSWGAPKAFSKGFNLQHVADGLYGSHLHIYQWPEGEMKQIIDLGNTGLLPLEIRFLHDPSKDTGYVGSALSSNMIRFFKNSDDTWSHEVVISVKPLKVENWILPEMPGLITDFLISLDDRFFYFVNWLHGDIRQYNIEDPKNPVLTGQIWVGGLLQKGSPYKAVGEDGNTYQFDVPQIKGKSLRAGPQMIQLSLDGKRLYATNSLFSAWDRQFYPEIMEKGSHIIQIDVDTDKGGLTLNPDFFVDFGDEPDGPALAHEMRYPGGDCTSDIWI

SEQ ID NO: 39619 - DNA, 1209 bp, Arabidopsis thaliana
  misc_feature (1)..(1209): Ceres Seq. ID no. 12338936
  misc_feature: MA Experiment ID: 108433 Result: Down-regulated in Transcription
  misc_feature: MA Experiment 108433 PARAMETER Experiment Name: At_rhl_Mutant2_cDNA_P Parameter: Age (day) Value: 7
  misc_feature: MA Experiment 108433 PARAMETER Experiment Name: At_rhl_Mutant2_cDNA_P Parameter: Organism Value: A. thaliana
  misc_feature: MA Experiment 108433 PARAMETER Experiment Name: At_rhl_Mutant2_cDNA_P Parameter: Plant Line Value: rhl Mutant vs. wt landsburg
  misc_feature: MA Experiment 108433 PARAMETER Experiment Name: At_rhl_Mutant2_cDNA_P Parameter: Tissue Value: Roots
  misc_feature: MA Experiment ID: 108434 Result: Up-regulated in Transcription
  misc_feature: MA Experiment 108434 PARAMETER Experiment Name: At_Root_Tips_cDNA_P Parameter: Tissue Value: Root Tips
  misc_feature: MA Experiment ID: 108435 Result: Up-regulated in Transcription
  misc_feature: MA Experiment 108435 PARAMETER Experiment Name: At_stm_Mutants_cDNA_P Parameter: Plant Line Value: wt Landsburg vs stm
  misc_feature: MA Experiment 108435 PARAMETER Experiment Name: At_stm_Mutants_cDNA_P Parameter: Tissue Value: Shoot Apical Meristem Region
  misc_feature: MA Experiment ID: 108461 Result: Up-regulated in Transcription
  misc_feature: MA Experiment 108461 PARAMETER Experiment Name: At_Germinating_Seeds_cDNA_P Parameter: Age (day) Value: 1 vs. 0
  misc_feature: MA Experiment 108461 PARAMETER Experiment Name: At_Germinating_Seeds_cDNA_P Parameter: Tissue Value: Germinating Seeds
  misc_feature: MA Experiment ID: 108462 Result: Up-regulated in Transcription
  misc_feature: MA Experiment 108462 PARAMETER Experiment Name: At_Germinating_Seeds_cDNA_P Parameter: Age (day) Value: 2 vs. 0
  misc_feature: MA Experiment 108462 PARAMETER Experiment Name: At_Germinating_Seeds_cDNA_P Parameter: Tissue Value: Germinating Seeds
  misc_feature: MA Experiment ID: 108463 Result: Up-regulated in Transcription
  misc_feature: MA Experiment 108463 PARAMETER Experiment Name: At_Germinating_Seeds_cDNA_P Parameter: Age (day) Value: 3 vs. 0
  misc_feature: MA Experiment 108463 PARAMETER Experiment Name: At_Germinating_Seeds_cDNA_P Parameter: Tissue Value: Germinating Seeds
  misc_feature: MA Experiment ID: 108464 Result: Up-regulated in Transcription
  misc_feature: MA Experiment 108464 PARAMETER Experiment Name: At_Germinating_Seeds_cDNA_P Parameter: Age (day) Value: 4 vs. 0
  misc_feature: MA Experiment 108464 PARAMETER Experiment Name: At_Germinating_Seeds_cDNA_P Parameter: Tissue Value: Germinating Seeds
  misc_feature: MA Experiment ID: 20000113 Result: Down-regulated in Transcription
  misc_feature: MA Experiment 20000113 PARAMETER Experiment Name: At_42deg_Heat_cDNA_P Parameter: Temperature (deg C) Value: 42 vs. 22
  misc_feature: MA Experiment 20000113 PARAMETER Experiment Name: At_42deg_Heat_cDNA_P Parameter: Timepoint (hr) Value: 8
  misc_feature: MA Experiment 20000113 PARAMETER Experiment Name: At_42deg_Heat_cDNA_P Parameter: Tissue Value: Aerial
  misc_feature: MA Experiment ID: 20000179 Result: Up-regulated in Transcription
  misc_feature: MA Experiment 20000179 PARAMETER Experiment Name: At_Germinating_Seeds_P Parameter: Age (hr) Value: 6 vs. 0
  misc_feature: MA Experiment 20000179 PARAMETER Experiment Name: At_Germinating_Seeds_P Parameter: Tissue Value: Germinating Seeds
  misc_feature: MA Experiment ID: 20000180 Result: Up-regulated in Transcription
  misc_feature: MA Experiment 20000180 PARAMETER Experiment Name: At_Germinating_Seeds_P Parameter: Age (hr) Value: 24 vs. 0
  misc_feature: MA Experiment 20000180 PARAMETER Experiment Name: At_Germinating_Seeds_P Parameter: Tissue Value: Germinating Seeds
  misc_feature: MA Experiment ID: 20000234 Result: Up-regulated in Transcription
  misc_feature: MA Experiment 20000234 PARAMETER Experiment Name: At_Siliques_P Parameter: Age (day) Value: 21
  misc_feature: MA Experiment 20000234 PARAMETER Experiment Name: At_Siliques_P Parameter: Organism Value: A. thaliana
  misc_feature: MA Experiment 20000234 PARAMETER Experiment Name: At_Siliques_P Parameter: Plant Line Value: WS
  misc_feature: MA Experiment 20000234 PARAMETER Experiment Name: At_Siliques_P Parameter: Tissue Value: Less Than 5mm Siliques vs. Whole Plant
  misc_feature: MA Experiment ID: 20000527 Result: Down-regulated in Transcription
  misc_feature: MA Experiment 20000527 PARAMETER Experiment Name: At_10percent_PEG_P Parameter: Age (day) Value: 20
  misc_feature: MA Experiment 20000527 PARAMETER Experiment Name: At_10percent_PEG_P Parameter: Organism Value: A. thaliana
  misc_feature: MA Experiment 20000527 PARAMETER Experiment Name: At_10percent_PEG_P Parameter: Plant Line Value: WS
  misc_feature: MA Experiment 20000527 PARAMETER Experiment Name: At_10percent_PEG_P Parameter: Timepoint (day) Value: 20
  misc_feature: MA Experiment 20000527 PARAMETER Experiment Name: At_10percent_PEG_P Parameter: Tissue Value: Whole Plant
  misc_feature: MA Experiment 20000527 PARAMETER Experiment Name: At_10percent_PEG_P Parameter: Treatment Value: 10percent PEG vs. No Treatment
  misc_feature: MA Experiment ID: 20001451 Result: Down-regulated in Transcription
  misc_feature: MA Experiment 20001451 PARAMETER Experiment Name: At_Far-red-induction_P Parameter: Age (day) Value: 7
  misc_feature: MA Experiment 20001451 PARAMETER Experiment Name: At_Far-red-induction_P Parameter: Light Value: Far-red vs. White
  misc_feature: MA Experiment 20001451 PARAMETER Experiment Name: At_Far-red-induction_P Parameter: Organism Value: A. thaliana
  misc_feature: MA Experiment 20001451 PARAMETER Experiment Name: At_Far-red-induction_P Parameter: Plant Line Value: Columbia
  misc_feature: MA Experiment 20001451 PARAMETER Experiment Name: At_Far-red-induction_P Parameter: Timepoint (hr) Value: 24
  misc_feature: MA Experiment 20001451 PARAMETER Experiment Name: At_Far-red-induction_P Parameter: Tissue Value: Whole Plant
  misc_feature: MA Experiment ID: 20001911 Result: Down-regulated in Transcription
  misc_feature: MA Experiment 20001911 PARAMETER Experiment Name: At_Drought_Reproduction_P Parameter: Age (day) Value: 40
  misc_feature: MA Experiment 20001911 PARAMETER Experiment Name: At_Drought_Reproduction_P Parameter: Organism Value: A. thaliana
  misc_feature: MA Experiment 20001911 PARAMETER Experiment Name: At_Drought_Reproduction_P Parameter: Plant Line Value: WS
  misc_feature: MA Experiment 20001911 PARAMETER Experiment Name: At_Drought_Reproduction_P Parameter: Timepoint (day) Value: 10
  misc_feature: MA Experiment 20001911 PARAMETER Experiment Name: At_Drought_Reproduction_P Parameter: Tissue Value: Flowers
  misc_feature: MA Experiment 20001911 PARAMETER Experiment Name: At_Drought_Reproduction_P Parameter: Treatment Value: Drought vs. No Drought
ttcctctctctttccccaaattgaaaacaaaatctgagattcgcgaaggaagaagaagagttgtcttgagagattgatagagatggacaacaatggagttaaacccgctgtttccgccatggaagcctttgagaagcttgagaaagtaggtgaagggacttatgggaaagtttacagagcaagagagaaagctactgggatgatcgttgctttgaagaagacgcgtctccatgaggatgaagaaggtgttcctcccactactcttcgcgagatctctatcttgcgtatgctcgctcgtgatcctcacatcgttaggttgatggatgttaagcaaggaataaacaaagaaggaaaaactgtactttaccttgttttcgagtatgttgatactgatctcaagaaattcatcagaagctttcgtcaagctggacagaacattccacaaaatactgtcaagtgcttgatgtaccagttatgcaaaggcatggctttttgccatggtcatggagtgttgcacagggatcttaagcctcacaatctcttgatggaccggaagacaatgacgctcaaaatagcagatcttggattagccagagccttcactctcccaatgaaaaagtatacacatgagattctaactctatggtatagagctccggaagttcttcttggagcaacccattactctactggagtggatatgtggtctgttggctgtatttttgctgaactagtgaccaagcaagcaatctttgcgggagactctgagctccaacagctcctccgtatattcaggttgttgggaacaccaaacgaagaagtgtggcctggagtaagcaaactcaaggactggcatgaatacccgcaatggaaaccgttgagtctctccacagctgtgccaaacctcgacgaggctggacttgatctcttatctaaaatgctggagtacgagccagcaaaacgaatctcagcaaagaaagctatggagcatccttacttcgatgatttgcctgacaagtcctctctctgaggctctctttataaactctcaataggatattttgttctatctctgtctttgcttgtctcaagcatttatctgctatcttaggatgattgaagtttcaatattcccttttgattgggtctctattcccaattgtataaccttccaacattttttcaatgaaagaatatatcagtttctct

SEQ ID NO: 39620 - protein, 315 aa, Arabidopsis thaliana
  peptide (1)..(315): Ceres Seq. ID no. 12338938
  misc_feature (16)..(306): Pfam Name: Protein kinase domain Pfam Description: Protein kinase domain
  misc_feature (13)..(309): Homolog of NCBI NO: 7489567 NR Description: protein kinase cdc2 homolog - rice
  misc_feature (7)..(315): Homolog of NCBI NO: 5921447 NR Description: CELL DIVISION CONTROL PROTEIN 2 HOMOLOG D
  misc_feature (1)..(315): Homolog of NCBI NO: 11125685 NR Description: B2-type cyclin dependent kinase [Lycopersicon
  misc_feature (10)..(315): Homolog of NCBI NO: 32187089 NR Description: cyclin-dependent kinase [Populus tremula x
  misc_feature (1)..(315): Homolog of NCBI NO: 7434327 NR Description: probable cdc2-like protein kinase cdc2MsF -
  misc_feature (13)..(315): Homolog of NCBI NO: 21537217 NR Description: putative cell division control protein cdc2
  misc_feature (9)..(315): Homolog of NCBI NO: 14488071 NR Description: At1g76540/F14G6_14 [Arabidopsis thaliana]
  misc_feature (9)..(315): Homolog of NCBI NO: 15223081 NR Description: Cyclin-dependent kinase B2
  misc_feature (13)..(315): Homolog of NCBI NO: 21536682 NR Description: putative cell division control protein cdc2
  misc_feature (1)..(315): Homolog of NCBI NO: 15218072 NR Description: Cyclin-dependent kinase B2
MDNNGVKPAVSAMEAFEKLEKVGEGTYGKVYRAREKATGMIVALKKTRLHEDEEGVPPTTLREISILRMLARDPHIVRLMDVKQGINKEGKTVLYLVFEYVDTDLKKFIRSFRQAGQNIPQNTVKCLMYQLCKGMAFCHGHGVLHRDLKPHNLLMDRKTMTLKIADLGLARAFTLPMKKYTHEILTLWYRAPEVLLGATHYSTGVDMWSVGCIFAELVTKQAIFAGDSELQQLLRIFRLLGTPNEEVWPGVSKLKDWHEYPQWKPLSLSTAVPNLDEAGLDLLSKMLEYEPAKRISAKKAMEHPYFDDLPDKSSL

SEQ ID NO: 39621 - protein, 303 aa, Arabidopsis thaliana
  peptide (1)..(303): Ceres Seq. ID no. 12338939
  misc_feature (4)..(294): Pfam Name: Protein kinase domain Pfam Description: Protein kinase domain
  misc_feature (1)..(297): Homolog of NCBI NO: 7489567 NR Description: protein kinase cdc2 homolog - rice
  misc_feature (1)..(303): Homolog of NCBI NO: 5921447 NR Description: CELL DIVISION CONTROL PROTEIN 2 HOMOLOG D
  misc_feature (1)..(303): Homolog of NCBI NO: 11125685 NR Description: B2-type cyclin dependent kinase [Lycopersicon
  misc_feature (1)..(303): Homolog of NCBI NO: 32187089 NR Description: cyclin-dependent kinase [Populus tremula x
  misc_feature (1)..(303): Homolog of NCBI NO: 7434327 NR Description: probable cdc2-like protein kinase cdc2MsF -
  misc_feature (1)..(303): Homolog of NCBI NO: 21537217 NR Description: putative cell division control protein cdc2
  misc_feature (1)..(303): Homolog of NCBI NO: 14488071 NR Description: At1g76540/F14G6_14 [Arabidopsis thaliana]
  misc_feature (1)..(303): Homolog of NCBI NO: 15223081 NR Description: Cyclin-dependent kinase B2
  misc_feature (1)..(303): Homolog of NCBI NO: 21536682 NR Description: putative cell division control protein cdc2
  misc_feature (1)..(303): Homolog of NCBI NO: 15218072 NR Description: Cyclin-dependent kinase B2
MEAFEKLEKVGEGTYGKVYRAREKATGMIVALKKTRLHEDEEGVPPTTLREISILRMLARDPHIVRLMDVKQGINKEGKTVLYLVFEYVDTDLKKFIRSFRQAGQNIPQNTVKCLMYQLCKGMAFCHGHGVLHRDLKPHNLLMDRKTMTLKIADLGLARAFTLPMKKYTHEILTLWYRAPEVLLGATHYSTGVDMWSVGCIFAELVTKQAIFAGDSELQQLLRIFRLLGTPNEEVWPGVSKLKDWHEYPQWKPLSLSTAVPNLDEAGLDLLSKMLEYEPAKRISAKKAMEHPYFDDLPDKSSL

SEQ ID NO: 39622 - protein, 276 aa, Arabidopsis thaliana
  peptide (1)..(276): Ceres Seq. ID no. 12338940
  misc_feature (1)..(267): Pfam Name: Protein kinase domain Pfam Description: Protein kinase domain
  misc_feature (1)..(270): Homolog of NCBI NO: 7489567 NR Description: protein kinase cdc2 homolog - rice
  misc_feature (1)..(276): Homolog of NCBI NO: 5921447 NR Description: CELL DIVISION CONTROL PROTEIN 2 HOMOLOG D
  misc_feature (1)..(276): Homolog of NCBI NO: 11125685 NR Description: B2-type cyclin dependent kinase [Lycopersicon
  misc_feature (1)..(276): Homolog of NCBI NO: 32187089 NR Description: cyclin-dependent kinase [Populus tremula x
  misc_feature (1)..(276): Homolog of NCBI NO: 7434327 NR Description: probable cdc2-like protein kinase cdc2MsF -
  misc_feature (1)..(276): Homolog of NCBI NO: 21537217 NR Description: putative cell division control protein cdc2
  misc_feature (1)..(276): Homolog of NCBI NO: 14488071 NR Description: At1g76540/F14G6_14 [Arabidopsis thaliana]
  misc_feature (1)..(276): Homolog of NCBI NO: 15223081 NR Description: Cyclin-dependent kinase B2
  misc_feature (1)..(276): Homolog of NCBI NO: 21536682 NR Description: putative cell division control protein cdc2
  misc_feature (1)..(276): Homolog of NCBI NO: 15218072 NR Description: Cyclin-dependent kinase B2
MIVALKKTRLHEDEEGVPPTTLREISILRMLARDPHIVRLMDVKQGINKEGKTVLYLVFEYVDTDLKKFIRSFRQAGQNIPQNTVKCLMYQLCKGMAFCHGHGVLHRDLKPHNLLMDRKTMTLKIADLGLARAFTLPMKKYTHEILTLWYRAPEVLLGATHYSTGVDMWSVGCIFAELVTKQAIFAGDSELQQLLRIFRLLGTPNEEVWPGVSKLKDWHEYPQWKPLSLSTAVPNLDEAGLDLLSKMLEYEPAKRISAKKAMEHPYFDDLPDKSSL

SEQ ID NO: 39623 - DNA, 1132 bp, Arabidopsis thaliana
  misc_feature (1)..(1132): Ceres Seq. ID no. 12338387
  misc_feature: MA Experiment ID: 108434 Result: Up-regulated in Transcription
  misc_feature: MA Experiment 108434 PARAMETER Experiment Name: At_Root_Tips_cDNA_P Parameter: Tissue Value: Root Tips
  misc_feature: MA Experiment ID: 108461 Result: Up-regulated in Transcription
  misc_feature: MA Experiment 108461 PARAMETER Experiment Name: At_Germinating_Seeds_cDNA_P Parameter: Age (day) Value: 1 vs. 0
  misc_feature: MA Experiment 108461 PARAMETER Experiment Name: At_Germinating_Seeds_cDNA_P Parameter: Tissue Value: Germinating Seeds
  misc_feature: MA Experiment ID: 108462 Result: Up-regulated in Transcription
  misc_feature: MA Experiment 108462 PARAMETER Experiment Name: At_Germinating_Seeds_cDNA_P Parameter: Age (day) Value: 2 vs. 0
  misc_feature: MA Experiment 108462 PARAMETER Experiment Name: At_Germinating_Seeds_cDNA_P Parameter: Tissue Value: Germinating Seeds
  misc_feature: MA Experiment ID: 108463 Result: Up-regulated in Transcription
  misc_feature: MA Experiment 108463 PARAMETER Experiment Name: At_Germinating_Seeds_cDNA_P Parameter: Age (day) Value: 3 vs. 0
  misc_feature: MA Experiment 108463 PARAMETER Experiment Name: At_Germinating_Seeds_cDNA_P Parameter: Tissue Value: Germinating Seeds
  misc_feature: MA Experiment ID: 108464 Result: Up-regulated in Transcription
  misc_feature: MA Experiment 108464 PARAMETER Experiment Name: At_Germinating_Seeds_cDNA_P Parameter: Age (day) Value: 4 vs. 0
  misc_feature: MA Experiment 108464 PARAMETER Experiment Name: At_Germinating_Seeds_cDNA_P Parameter: Tissue Value: Germinating Seeds
  misc_feature: MA Experiment ID: 108474 Result: Down-regulated in Transcription
  misc_feature: MA Experiment 108474 PARAMETER Experiment Name: At_Drought_Flowers_cDNA_P Parameter: Timepoint (hr) Value: null
  misc_feature: MA Experiment 108474 PARAMETER Experiment Name: At_Drought_Flowers_cDNA_P Parameter: Treatment Value: Drought vs. No Drought
  misc_feature: MA Experiment ID: 108501 Result: Up-regulated in Transcription
  misc_feature: MA Experiment 108501 PARAMETER Experiment Name: At_ap2_floral_buds_cDNA_P Parameter: Plant Line Value: ap2 (Ler.)
  misc_feature: MA Experiment 108501 PARAMETER Experiment Name: At_ap2_floral_buds_cDNA_P Parameter: Tissue Value: Closed Flower
  misc_feature: MA Experiment ID: 108573 Result: Down-regulated in Transcription
  misc_feature: MA Experiment 108573 PARAMETER Experiment Name: At_Drought_cDNA_P Parameter: Timepoint (hr) Value: 6
  misc_feature: MA Experiment 108573 PARAMETER Experiment Name: At_Drought_cDNA_P Parameter: Tissue Value: Aerial
  misc_feature: MA Experiment 108573 PARAMETER Experiment Name: At_Drought_cDNA_P Parameter: Treatment Value: Drought vs. No Drought
  misc_feature: MA Experiment ID: 108574 Result: Down-regulated in Transcription
  misc_feature: MA Experiment 108574 PARAMETER Experiment Name: At_Wounding__cDNA_P Parameter: Timepoint (hr) Value: 1
  misc_feature: MA Experiment 108574 PARAMETER Experiment Name: At_Wounding__cDNA_P Parameter: Tissue Value: Aerial
  misc_feature: MA Experiment 108574 PARAMETER Experiment Name: At_Wounding__cDNA_P Parameter: Treatment Value: Wounding vs. No Wounding
  misc_feature: MA Experiment ID: 108576 Result: Down-regulated in Transcription
  misc_feature: MA Experiment 108576 PARAMETER Experiment Name: At_42deg_Heat_cDNA_P Parameter: Temperature (deg C) Value: 42 vs. 22
  misc_feature: MA Experiment 108576 PARAMETER Experiment Name: At_42deg_Heat_cDNA_P Parameter: Timepoint (hr) Value: 1
  misc_feature: MA Experiment 108576 PARAMETER Experiment Name: At_42deg_Heat_cDNA_P Parameter: Tissue Value: Aerial
  misc_feature: MA Experiment ID: 108668 Result: Down-regulated in Transcription
  misc_feature: MA Experiment 108668 PARAMETER Experiment Name: At_2mM_SA_cDNA_P Parameter: Plant Line Value: WS
  misc_feature: MA Experiment 108668 PARAMETER Experiment Name: At_2mM_SA_cDNA_P Parameter: Timepoint (hr) Value: 6
  misc_feature: MA Experiment 108668 PARAMETER Experiment Name: At_2mM_SA_cDNA_P Parameter: Treatment Value: 2mM SA vs. No Treatment
  misc_feature: MA Experiment ID: 20000111 Result: Down-regulated in Transcription
  misc_feature: MA Experiment 20000111 PARAMETER Experiment Name: At_42deg_Heat_cDNA_P Parameter: Temperature (deg C) Value: 42 vs. 22
  misc_feature: MA Experiment 20000111 PARAMETER Experiment Name: At_42deg_Heat_cDNA_P Parameter: Timepoint (hr) Value: 6
  misc_feature: MA Experiment 20000111 PARAMETER Experiment Name: At_42deg_Heat_cDNA_P Parameter: Tissue Value: Aerial
  misc_feature: MA Experiment ID: 20000112 Result: Down-regulated in Transcription
  misc_feature: MA Experiment 20000112 PARAMETER Experiment Name: At_42deg_Heat_cDNA_P Parameter: Temperature (deg C) Value: 42 vs. 22
  misc_feature: MA Experiment 20000112 PARAMETER Experiment Name: At_42deg_Heat_cDNA_P Parameter: Timepoint (hr) Value: 2
  misc_feature: MA Experiment 20000112 PARAMETER Experiment Name: At_42deg_Heat_cDNA_P Parameter: Tissue Value: Aerial
  misc_feature: MA Experiment ID: 20000113 Result: Down-regulated in Transcription
  misc_feature: MA Experiment 20000113 PARAMETER Experiment Name: At_42deg_Heat_cDNA_P Parameter: Temperature (deg C) Value: 42 vs. 22
  misc_feature: MA Experiment 20000113 PARAMETER Experiment Name: At_42deg_Heat_cDNA_P Parameter: Timepoint (hr) Value: 8
  misc_feature: MA Experiment 20000113 PARAMETER Experiment Name: At_42deg_Heat_cDNA_P Parameter: Tissue Value: Aerial
  misc_feature: MA Experiment ID: 20000171 Result: Down-regulated in Transcription
  misc_feature: MA Experiment 20000171 PARAMETER Experiment Name: At_42deg_Heat_P Parameter: Age (day) Value: 14
  misc_feature: MA Experiment 20000171 PARAMETER Experiment Name: At_42deg_Heat_P Parameter: Organism Value: A. thaliana
  misc_feature: MA Experiment 20000171 PARAMETER Experiment Name: At_42deg_Heat_P Parameter: Plant Line Value: WS
  misc_feature: MA Experiment 20000171 PARAMETER Experiment Name: At_42deg_Heat_P Parameter: Temperature (deg C) Value: 42 vs. 22
  misc_feature: MA Experiment 20000171 PARAMETER Experiment Name: At_42deg_Heat_P Parameter: Timepoint (hr) Value: 1
  misc_feature: MA Experiment 20000171 PARAMETER Experiment Name: At_42deg_Heat_P Parameter: Tissue Value: Aerial
  misc_feature: MA Experiment ID: 20000173 Result: Down-regulated in Transcription
  misc_feature: MA Experiment 20000173 PARAMETER Experiment Name: At_42deg_Heat_P Parameter: Age (day) Value: 14
  misc_feature: MA Experiment 20000173 PARAMETER Experiment Name: At_42deg_Heat_P Parameter: Organism Value: A. thaliana
  misc_feature: MA Experiment 20000173 PARAMETER Experiment Name: At_42deg_Heat_P Parameter: Plant Line Value: WS
  misc_feature: MA Experiment 20000173 PARAMETER Experiment Name: At_42deg_Heat_P Parameter: Temperature (deg C) Value: 42 vs. 22
  misc_feature: MA Experiment 20000173 PARAMETER Experiment Name: At_42deg_Heat_P Parameter: Timepoint (hr) Value: 6
  misc_feature: MA Experiment 20000173 PARAMETER Experiment Name: At_42deg_Heat_P Parameter: Tissue Value: Aerial
  misc_feature: MA Experiment ID: 20000182 Result: Down-regulated in Transcription
  misc_feature: MA Experiment 20000182 PARAMETER Experiment Name: At_2mM_SA_P Parameter: Age (day) Value: 14
  misc_feature: MA Experiment 20000182 PARAMETER Experiment Name: At_2mM_SA_P Parameter: Organism Value: A. thaliana
  misc_feature: MA Experiment 20000182 PARAMETER Experiment Name: At_2mM_SA_P Parameter: Plant Line Value: WS
  misc_feature: MA Experiment 20000182 PARAMETER Experiment Name: At_2mM_SA_P Parameter: Timepoint (hr) Value: 6
  misc_feature: MA Experiment 20000182 PARAMETER Experiment Name: At_2mM_SA_P Parameter: Tissue Value: Aerial
  misc_feature: MA Experiment 20000182 PARAMETER Experiment Name: At_2mM_SA_P Parameter: Treatment Value: 2mM SA vs. No Treatment
  misc_feature: MA Experiment ID: 20000184 Result: Up-regulated in Transcription
  misc_feature: MA Experiment 20000184 PARAMETER Experiment Name: At_Shoots__P Parameter: Age (day) Value: 7
  misc_feature: MA Experiment 20000184 PARAMETER Experiment Name: At_Shoots__P Parameter: Tissue Value: Shoots vs. Whole Plant
  misc_feature: MA Experiment ID: 20000224 Result: Down-regulated in Transcription
  misc_feature: MA Experiment ID: 20000227 Result: Up-regulated in Transcription
  misc_feature: MA Experiment 20000227 PARAMETER Experiment Name: At_Root-Tips-vs-Tops_P Parameter: Tissue Value: Root Tips vs. Root Tops
  misc_feature: MA Experiment ID: 20000264 Result: Up-regulated in Transcription
  misc_feature: MA Experiment 20000264 PARAMETER Experiment Name: At_Open_Flower_P Parameter: Age (day) Value: 21
  misc_feature: MA Experiment 20000264 PARAMETER Experiment Name: At_Open_Flower_P Parameter: Plant Line Value: WS
  misc_feature: MA Experiment 20000264 PARAMETER Experiment Name: At_Open_Flower_P Parameter: Tissue Value: Open Flower vs. Whole Plant
  misc_feature: MA Experiment ID: 20000265 Result: Up-regulated in Transcription
  misc_feature: MA Experiment 20000265 PARAMETER Experiment Name: At_Open_Flower_P Parameter: Age (day) Value: 21
  misc_feature: MA Experiment 20000265 PARAMETER Experiment Name: At_Open_Flower_P Parameter: Plant Line Value: WS
  misc_feature: MA Experiment 20000265 PARAMETER Experiment Name: At_Open_Flower_P Parameter: Tissue Value: Closed Flower vs. Whole Plant
  misc_feature: MA Experiment ID: 20000286 Result: Up-regulated in Transcription
  misc_feature: MA Experiment 20000286 PARAMETER Experiment Name: At_Open_Flower_P Parameter: Age (day) Value: 21
  misc_feature: MA Experiment 20000286 PARAMETER Experiment Name: At_Open_Flower_P Parameter: Plant Line Value: WS
  misc_feature: MA Experiment 20000286 PARAMETER Experiment Name: At_Open_Flower_P Parameter: Tissue Value: Half Open vs. Whole Plant
  misc_feature: MA Experiment ID: 20000438 Result: Up-regulated in Transcription
  misc_feature: MA Experiment 20000438 PARAMETER Experiment Name: At_Shoots__P Parameter: Age (day) Value: 14
  misc_feature: MA Experiment 20000438 PARAMETER Experiment Name: At_Shoots__P Parameter: Tissue Value: Shoots vs. Whole Plant
  misc_feature: MA Experiment ID: 20000443 Result: Down-regulated in Transcription
  misc_feature: MA Experiment 20000443 PARAMETER Experiment Name: At_1uM_BR-BRZ__P Parameter: Tissue Value: Shoot Apices
  misc_feature: MA Experiment 20000443 PARAMETER Experiment Name: At_1uM_BR-BRZ__P Parameter: Treatment Value: 1uM BRZ vs. No Treatment
  misc_feature: MA Experiment ID: 20000460 Result: Up-regulated in Transcription
  misc_feature: MA Experiment 20000460 PARAMETER Experiment Name: At_10percent_PEG_P Parameter: Age (day) Value: 12
  misc_feature: MA Experiment 20000460 PARAMETER Experiment Name: At_10percent_PEG_P Parameter: Organism Value: A. thaliana
  misc_feature: MA Experiment 20000460 PARAMETER Experiment Name: At_10percent_PEG_P Parameter: Plant Line Value: WS
  misc_feature: MA Experiment 20000460 PARAMETER Experiment Name: At_10percent_PEG_P Parameter: Timepoint (day) Value: 12
  misc_feature: MA Experiment 20000460 PARAMETER Experiment Name: At_10percent_PEG_P Parameter: Tissue Value: Whole Plant
  misc_feature: MA Experiment 20000460 PARAMETER Experiment Name: At_10percent_PEG_P Parameter: Treatment Value: 10percent PEG vs. No Treatment
  misc_feature: MA Experiment ID: 20000527 Result: Up-regulated in Transcription
  misc_feature: MA Experiment 20000527 PARAMETER Experiment Name: At_10percent_PEG_P Parameter: Age (day) Value: 20
  misc_feature: MA Experiment 20000527 PARAMETER Experiment Name: At_10percent_PEG_P Parameter: Organism Value: A. thaliana
  misc_feature: MA Experiment 20000527 PARAMETER Experiment Name: At_10percent_PEG_P Parameter: Plant Line Value: WS
  misc_feature: MA Experiment 20000527 PARAMETER Experiment Name: At_10percent_PEG_P Parameter: Timepoint (day) Value: 20
  misc_feature: MA Experiment 20000527 PARAMETER Experiment Name: At_10percent_PEG_P Parameter: Tissue Value: Whole Plant
  misc_feature: MA Experiment 20000527 PARAMETER Experiment Name: At_10percent_PEG_P Parameter: Treatment Value: 10percent PEG vs. No Treatment
  misc_feature: MA Experiment ID: 20000573 Result: Down-regulated in Transcription
  misc_feature: MA Experiment 20000573 PARAMETER Experiment Name: At_100uM_ABA_Mutants__P Parameter: Organism Value: A. thaliana
  misc_feature: MA Experiment 20000573 PARAMETER Experiment Name: At_100uM_ABA_Mutants__P Parameter: Plant Line Value: CS22 vs. Ler wt
  misc_feature: MA Experiment 20000573 PARAMETER Experiment Name: At_100uM_ABA_Mutants__P Parameter: Timepoint (hr) Value: N/A
  misc_feature: MA Experiment 20000573 PARAMETER Experiment Name: At_100uM_ABA_Mutants__P Parameter: Tissue Value: Whole Plant
  misc_feature: MA Experiment 20000573 PARAMETER Experiment Name: At_100uM_ABA_Mutants__P Parameter: Treatment Value: None
  misc_feature: MA Experiment ID: 20000574 Result: Down-regulated in Transcription
  misc_feature: MA Experiment 20000574 PARAMETER Experiment Name: At_100uM_ABA_Mutants__P Parameter: Organism Value: A. thaliana
  misc_feature: MA Experiment 20000574 PARAMETER Experiment Name: At_100uM_ABA_Mutants__P Parameter: Plant Line Value: CS23 vs. Ler wt
  misc_feature: MA Experiment 20000574 PARAMETER Experiment Name: At_100uM_ABA_Mutants__P Parameter: Timepoint (hr) Value: N/A
  misc_feature: MA Experiment 20000574 PARAMETER Experiment Name: At_100uM_ABA_Mutants__P Parameter: Tissue Value: Whole Plant
  misc_feature: MA Experiment 20000574 PARAMETER Experiment Name: At_100uM_ABA_Mutants__P Parameter: Treatment Value: None
  misc_feature: MA Experiment ID: 20000794 Result: Up-regulated in Transcription
  misc_feature: MA Experiment 20000794 PARAMETER Experiment Name: At_Petals_P Parameter: Age (day) Value: 23-25 days
  misc_feature: MA Experiment 20000794 PARAMETER Experiment Name: At_Petals_P Parameter: Plant Line Value: WS
  misc_feature: MA Experiment 20000794 PARAMETER Experiment Name: At_Petals_P Parameter: Tissue Value: Petals vs. Whole plant
  misc_feature: MA Experiment ID: 20001450 Result: Up-regulated in Transcription
  misc_feature: MA Experiment 20001450 PARAMETER Experiment Name: At_Far-red-induction_P Parameter: Age (day) Value: 7
  misc_feature: MA Experiment 20001450 PARAMETER Experiment Name: At_Far-red-induction_P Parameter: Light Value: Far-red vs. White
  misc_feature: MA Experiment 20001450 PARAMETER Experiment Name: At_Far-red-induction_P Parameter: Organism Value: A. thaliana
  misc_feature: MA Experiment 20001450 PARAMETER Experiment Name: At_Far-red-induction_P Parameter: Plant Line Value: Columbia
  misc_feature: MA Experiment 20001450 PARAMETER Experiment Name: At_Far-red-induction_P Parameter: Timepoint (hr) Value: 8
  misc_feature: MA Experiment 20001450 PARAMETER Experiment Name: At_Far-red-induction_P Parameter: Tissue Value: Whole Plant
  misc_feature: MA Experiment ID: 20001557 Result: Down-regulated in Transcription
  misc_feature: MA Experiment 20001557 PARAMETER Experiment Name: At_Drought_Soil_Dry_P Parameter: Age (day) Value: 27
  misc_feature: MA Experiment 20001557 PARAMETER Experiment Name: At_Drought_Soil_Dry_P Parameter: Organism Value: A. thaliana
  misc_feature: MA Experiment 20001557 PARAMETER Experiment Name: At_Drought_Soil_Dry_P Parameter: Plant Line Value: WS
  misc_feature: MA Experiment 20001557 PARAMETER Experiment Name: At_Drought_Soil_Dry_P Parameter: Post Timepoint (hr) Value: 3
  misc_feature: MA Experiment 20001557 PARAMETER Experiment Name: At_Drought_Soil_Dry_P Parameter: Post-Treatment Value: Re-Water vs. No Drought
  misc_feature: MA Experiment 20001557 PARAMETER Experiment Name: At_Drought_Soil_Dry_P Parameter: Timepoint (day) Value: 13
  misc_feature: MA Experiment 20001557 PARAMETER Experiment Name: At_Drought_Soil_Dry_P Parameter: Treatment Value: Drought vs. No Drought
atcatcatctctttcttcttccaaaagtcataatcatgtcaaagtctctagctggattggcggttttggccgctctttttattgctgttgatgcgtttaagccttctggtttaactaatggccacgctacattctatggaggaagtgacgcttctggaacaatgggtaatttcacactttagtttcttttatgttctgactctaaatctctaattttcttgtttttgcaggtggagcttgtgggtacggagatctttactcggcggggtacgggacaatgacggcagcgttaagcacggctctgttcaacgacggagcttcttgcggagaatgctataggataacgtgtgatcacgcggcggactcacggtggtgcttgaaaggagcttctgtggttattacagccactaacttttgcccaccaaactttgctttgcctaacaacaacggtggttggtgcaatccgccgcttaaacatttcgacatggcacaacccgcttgggaaaagatcggaatttacagaggaggaatcgttcccgtcgttttccaaagagtgagctgttacaagaaaggaggagttagattcagaataaacgggagagactacttcgagctagtgaacattcaaaatgtaggaggagcaggttctattaaatctgtatccatcaaaggatcaaagactggttggttagccatgtctcgtaattggggagctaattggcaatcgaatgcttatctagatggtcaagctctctctttctctattaccactactgatggtgctactagagtcttcctcaatgttgttccttcttcttggtcttttggacagatttattcttccaacgttcagttttaagtttttttttttgttttgtatgaaatatcattggcagtggtcgcgctttgagtctgtttcttttctccctgagcgacccgccctctttgttttttttatcttatggtatgatgggtctgttaatacaaaagacccgatatgatttgagggtatatgattatatgaagtgtattgtatttgaatgtttcagactcgaaaaagattctgtagcaaaaggagttttaacacatttgtacttggttttgtttatatgaagtttgttttagttttttc

SEQ ID NO: 39624 - protein, 193 aa, Arabidopsis thaliana; identical to SEQ ID NO: 28574
  peptide (1)..(193): Ceres Seq. ID no. 12338388
  misc_feature (101)..(178): Pfam Name: Pollen allergen Pfam Description: Pollen allergen
  misc_feature (1)..(193): Homolog of NCBI NO: 15223799 NR Description: expansin, putative
  misc_feature (1)..(193): Homolog of NCBI NO: 21536750 NR Description: Alpha-expansin 11 precursor (At-EXP11) (AtEx11)

SEQ ID NO: 39625 - protein, 124 aa, Arabidopsis thaliana; identical to SEQ ID NO: 28575
  peptide (1)..(124): Ceres Seq. ID no. 12338390
  misc_feature (32)..(109): Pfam Name: Pollen allergen Pfam Description: Pollen allergen
  misc_feature (1)..(124): Homolog of NCBI NO: 15223799 NR Description: expansin, putative
  misc_feature (1)..(124): Homolog of NCBI NO: 21536750 NR Description: Alpha-expansin 11 precursor (At-EXP11) (AtEx11)

SEQ ID NO: 39626 - DNA, 1631 bp, Arabidopsis thaliana
  misc_feature (1)..(1631): Ceres Seq. ID no. 12338356
  misc_feature: MA Experiment ID: 108461 Result: Up-regulated in Transcription
  misc_feature: MA Experiment 108461 PARAMETER Experiment Name: At_Germinating_Seeds_cDNA_P Parameter: Age (day) Value: 1 vs. 0
  misc_feature: MA Experiment 108461 PARAMETER Experiment Name: At_Germinating_Seeds_cDNA_P Parameter: Tissue Value: Germinating Seeds
  misc_feature: MA Experiment ID: 108462 Result: Up-regulated in Transcription
  misc_feature: MA Experiment 108462 PARAMETER Experiment Name: At_Germinating_Seeds_cDNA_P Parameter: Age (day) Value: 2 vs. 0
  misc_feature: MA Experiment 108462 PARAMETER Experiment Name: At_Germinating_Seeds_cDNA_P Parameter: Tissue Value: Germinating Seeds
  misc_feature: MA Experiment ID: 108464 Result: Up-regulated in Transcription
  misc_feature: MA Experiment 108464 PARAMETER Experiment Name: At_Germinating_Seeds_cDNA_P Parameter: Age (day) Value: 4 vs. 0
  misc_feature: MA Experiment 108464 PARAMETER Experiment Name: At_Germinating_Seeds_cDNA_P Parameter: Tissue Value: Germinating Seeds
  misc_feature: MA Experiment ID: 108488 Result: Down-regulated in Transcription
  misc_feature: MA Experiment ID: 108573 Result: Up-regulated in Transcription
  misc_feature: MA Experiment 108573 PARAMETER Experiment Name: At_Drought_cDNA_P Parameter: Timepoint (hr) Value: 6
  misc_feature: MA Experiment 108573 PARAMETER Experiment Name: At_Drought_cDNA_P Parameter: Tissue Value: Aerial
  misc_feature: MA Experiment 108573 PARAMETER Experiment Name: At_Drought_cDNA_P Parameter: Treatment Value: Drought vs. No Drought
  misc_feature: MA Experiment ID: 108595 Result: Down-regulated in Transcription
  misc_feature: MA Experiment 108595 PARAMETER Experiment Name: At_Ler-pi_Ovule_cDNA_P Parameter: Plant Line Value: null
  misc_feature: MA Experiment ID: 20001757 Result: Down-regulated in Transcription
  misc_feature: MA Experiment 20001757 PARAMETER Experiment Name: At_50mM_NH4NO3_L-to-H_P Parameter: Timepoint (hr) Value: 6
  misc_feature: MA Experiment 20001757 PARAMETER Experiment Name: At_50mM_NH4NO3_L-to-H_P Parameter: Tissue Value: Leaf
  misc_feature: MA Experiment 20001757 PARAMETER Experiment Name: At_50mM_NH4NO3_L-to-H_P Parameter: Treatment Value: 50mM NH4NO3 vs 100mM Mannitol
aacgacaacacgacgaagatgaatccttctcacggtggcgacgacaagcaacgaccggcgatgtatccccaagttgatcaatccatacctgataatccttttgcttctacaaatccttacgtcgcttcttcaccttatctatatccttctctatcctctcataatctcggacctaatctcttcccagaccacggagatgcatccaacgaccaatcaccatctgctcctcctcaggcgacggaggaggttctcatccgtgttcccggcgctattctcaaccttatcgacaaatcctacagcgttgaactcgcgtgcggtgatttcaccatcgttcgaattatccaggggcaaaacattgtagcggttctagccaatgttggaaatgagattcaatggccgttgacgaagaacgaggttgcagctaaggttgatggatctcactatttcttttcgattcatccgccaaaggagaaaggtcaaggatctgggtctgattcagatgatgaacaagggcaaaagagtaaatcgaaatcggatgatgagattcttaattacggattgaccattgcttcgaaagggcaagagaatgtattacttgtgcttgatcaggttttacgagactacagttgtttcacagagcagagaatgtctgaaaaagccaaggagactggagaagaggtgctgggaaattcagtggtggcggacacttcgccggaggagcttaagggtgagagaaaggatgttgtggaaggtcaatgtgcggcgtattggacaacacttgcaccgaatgtcgaggattatactcacagtactgctaaaatgatagcttccgggtcaggtaagctgatcagagggatactgtggtgtggggatgtaactgtggagagactcaagaagggaaacgaggttatgaagaataggcttagtcgtgctgagaaggagaaagatgttagccctgagacactgaggagaatcaagagggttaagagagtgacacaaatgacagagaaagttgccactggtgttctttctggtgttgtcaaagtctcgggattcatcactggttcaatggcaaactcaaaagctggaaagaagctttttggtctcttgcctggagagattgttctcgcatccctcgatggatttagcaagatctgtgatgctgttgaagttgctgggaaaaacgtaatgtcgacttcatcaactgtcacaacagaattagtcaatcacaggtacggcacaaaagcagcagaggctactaacgaagggctagacgcagcgggacatgcatttggaacggcatgggttgctttcaagattcgaaaggcatttaaccccaaaaatgtcataaagccttcatcattggccaagtctgtttcggaactaaaggctaagaaaggctccaagtaaacactaaacagccttcaactgttctgtgttcatctaaacttgcatttagtttttcattttggaaaagtatatgaagattgattgatgtaactctatatttagttttctgtgtatattgtgattctatgtaaactatataaacagtttcttccaatcttctcccatttatgggtttgatttgtaacttcttaatgcatcgagaagcagtattagtactctct

SEQ ID NO: 39627 - protein, 469 aa, Arabidopsis thaliana
  peptide (1)..(469): Ceres Seq. ID no. 12338357
  misc_feature (179)..(460): Homolog of NCBI NO: 26450712 NR Description: unknown protein [Arabidopsis thaliana]
  misc_feature (254)..(458): Homolog of NCBI NO: 3551958 NR Description: senescence-associated protein 12 [Hemerocallis
  misc_feature (32)..(163): Homolog of NCBI NO: 18855022 NR Description: putative senescence-associated protein [Oryza
  misc_feature (231)..(464): Homolog of NCBI NO: 18855022 NR Description: putative senescence-associated protein [Oryza
  misc_feature (19)..(463): Homolog of NCBI NO: 7486396 NR Description: hypothetical protein F4B14.250 - Arabidopsis
  misc_feature (19)..(469): Homolog of NCBI NO: 18419759 NR Description: putative protein; protein id: At4g35985.1
  misc_feature (32)..(469): Homolog of NCBI NO: 15320412 NR Description: ERD7 protein [Arabidopsis thaliana]
  misc_feature (15)..(458): Homolog of NCBI NO: 21593641 NR Description: putative senescence-associated protein 12
  misc_feature (15)..(458): Homolog of NCBI NO: 15227905 NR Description: putative senescence-associated protein 12
  misc_feature (7)..(469): Homolog of NCBI NO: 15230434 NR Description: putative protein
NDNTTKMNPSHGGDDKQRPAMYPQVDQSIPDNPFASTNPYVASSPYLYPSLSSHNLGPNLFPDHGDASNDQSPSAPPQATEEVLIRVPGAILNLIDKSYSVELACGDFTIVRIIQGQNIVAVLANVGNEIQWPLTKNEVAAKVDGSHYFFSIHPPKEKGQGSGSDSDDEQGQKSKSKSDDEILNYGLTIASKGQENVLLVLDQVLRDYSCFTEQRMSEKAKETGEEVLGNSVVADTSPEELKGERKDVVEGQCAAYWTTLAPNVEDYTHSTAKMIASGSGKLIRGILWCGDVTVERLKKGNEVMKNRLSRAEKEKDVSPETLRRIKRVKRVTQMTEKVATGVLSGVVKVSGFITGSMANSKAGKKLFGLLPGEIVLASLDGFSKICDAVEVAGKNVMSTSSTVTTELVNHRYGTKAAEATNEGLDAAGHAFGTAWVAFKIRKAFNPKNVIKPSSLAKSVSELKAKKGSK

SEQ ID NO: 39628 - protein, 463 aa, Arabidopsis thaliana
  peptide (1)..(463): Ceres Seq. ID no. 12338358
  misc_feature (173)..(454): Homolog of NCBI NO: 26450712 NR Description: unknown protein [Arabidopsis thaliana]
  misc_feature (248)..(452): Homolog of NCBI NO: 3551958 NR Description: senescence-associated protein 12 [Hemerocallis
  misc_feature (26)..(157): Homolog of NCBI NO: 18855022 NR Description: putative senescence-associated protein [Oryza
  misc_feature (225)..(458): Homolog of NCBI NO: 18855022 NR Description: putative senescence-associated protein [Oryza
  misc_feature (13)..(457): Homolog of NCBI NO: 7486396 NR Description: hypothetical protein F4B14.250 - Arabidopsis
  misc_feature (13)..(463): Homolog of NCBI NO: 18419759 NR Description: putative protein; protein id: At4g35985.1
  misc_feature (26)..(463): Homolog of NCBI NO: 15320412 NR Description: ERD7 protein [Arabidopsis thaliana]
  misc_feature (9)..(452): Homolog of NCBI NO: 21593641 NR Description: putative senescence-associated protein 12
  misc_feature (9)..(452): Homolog of NCBI NO: 15227905 NR Description: putative senescence-associated protein 12
  misc_feature (1)..(463): Homolog of NCBI NO: 15230434 NR Description: putative protein
MNPSHGGDDKQRPAMYPQVDQSIPDNPFASTNPYVASSPYLYPSLSSHNLGPNLFPDHGDASNDQSPSAPPQATEEVLIRVPGAILNLIDKSYSVELACGDFTIVRIIQGQNIVAVLANVGNEIQWPLTKNEVAAKVDGSHYFFSIHPPKEKGQGSGSDSDDEQGQKSKSKSDDEILNYGLTIASKGQENVLLVLDQVLRDYSCFTEQRMSEKAKETGEEVLGNSVVADTSPEELKGERKDVVEGQCAAYWTTLAPNVEDYTHSTAKMIASGSGKLIRGILWCGDVTVERLKKGNEVMKNRLSRAEKEKDVSPETLRRIKRVKRVTQMTEKVATGVLSGVVKVSGFITGSMANSKAGKKLFGLLPGEIVLASLDGFSKICDAVEVAGKNVMSTSSTVTTELVNHRYGTKAAEATNEGLDAAGHAFGTAWVAFKIRKAFNPKNVIKPSSLAKSVSELKAKKGSK

SEQ ID NO: 39629 - protein, 449 aa, Arabidopsis thaliana
  peptide (1)..(449): Ceres Seq. ID no. 12338359
  misc_feature (159)..(440): Homolog of NCBI NO: 26450712 NR Description: unknown protein [Arabidopsis thaliana]
  misc_feature (234)..(438): Homolog of NCBI NO: 3551958 NR Description: senescence-associated protein 12 [Hemerocallis
  misc_feature (12)..(143): Homolog of NCBI NO: 18855022 NR Description: putative senescence-associated protein [Oryza
  misc_feature (211)..(444): Homolog of NCBI NO: 18855022 NR Description: putative senescence-associated protein [Oryza
  misc_feature (1)..(443): Homolog of NCBI NO: 7486396 NR Description: hypothetical protein F4B14.250 - Arabidopsis
  misc_feature (1)..(449): Homolog of NCBI NO: 18419759 NR Description: putative protein; protein id: At4g35985.1
  misc_feature (12)..(449): Homolog of NCBI NO: 15320412 NR Description: ERD7 protein [Arabidopsis thaliana]
  misc_feature (1)..(438): Homolog of NCBI NO: 21593641 NR Description: putative senescence-associated protein 12
  misc_feature (1)..(438): Homolog of NCBI NO: 15227905 NR Description: putative senescence-associated protein 12
  misc_feature (1)..(449): Homolog of NCBI NO: 15230434 NR Description: putative protein
MYPQVDQSIPDNPFASTNPYVASSPYLYPSLSSHNLGPNLFPDHGDASNDQSPSAPPQATEEVLIRVPGAILNLIDKSYSVELACGDFTIVRIIQGQNIVAVLANVGNEIQWPLTKNEVAAKVDGSHYFFSIHPPKEKGQGSGSDSDDEQGQKSKSKSDDEILNYGLTIASKGQENVLLVLDQVLRDYSCFTEQRMSEKAKETGEEVLGNSVVADTSPEELKGERKDVVEGQCAAYWTTLAPNVEDYTHSTAKMIASGSGKLIRGILWCGDVTVERLKKGNEVMKNRLSRAEKEKDVSPETLRRIKRVKRVTQMTEKVATGVLSGVVKVSGFITGSMANSKAGKKLFGLLPGEIVLASLDGFSKICDAVEVAGKNVMSTSSTVTTELVNHRYGTKAAEATNEGLDAAGHAFGTAWVAFKIRKAFNPKNVIKPSSLAKSVSELKAKKGSK

SEQ ID NO: 39630 - DNA, 1110 bp, Arabidopsis thaliana
  misc_feature (1)..(1110): Ceres Seq. ID no. 12579637
  misc_feature: MA Experiment ID: 108434 Result: Down-regulated in Transcription
  misc_feature: MA Experiment 108434 PARAMETER Experiment Name: At_Root_Tips_cDNA_P Parameter: Tissue Value: Root Tips
  misc_feature: MA Experiment ID: 108462 Result: Up-regulated in Transcription
  misc_feature: MA Experiment 108462 PARAMETER Experiment Name: At_Germinating_Seeds_cDNA_P Parameter: Age (day) Value: 2 vs. 0
  misc_feature: MA Experiment 108462 PARAMETER Experiment Name: At_Germinating_Seeds_cDNA_P Parameter: Tissue Value: Germinating Seeds
  misc_feature: MA Experiment ID: 108464 Result: Up-regulated in Transcription
  misc_feature: MA Experiment 108464 PARAMETER Experiment Name: At_Germinating_Seeds_cDNA_P Parameter: Age (day) Value: 4 vs. 0
  misc_feature: MA Experiment 108464 PARAMETER Experiment Name: At_Germinating_Seeds_cDNA_P Parameter: Tissue Value: Germinating Seeds
  misc_feature: MA Experiment ID: 108501 Result: Up-regulated in Transcription
  misc_feature: MA Experiment 108501 PARAMETER Experiment Name: At_ap2_floral_buds_cDNA_P Parameter: Plant Line Value: ap2 (Ler.)
  misc_feature: MA Experiment 108501 PARAMETER Experiment Name: At_ap2_floral_buds_cDNA_P Parameter: Tissue Value: Closed Flower
  misc_feature: MA Experiment ID: 20000306 Result: Up-regulated in Transcription
  misc_feature: MA Experiment 20000306 PARAMETER Experiment Name: At_Germinating_Seeds_Sub_P Parameter: Age (hr) Value: 6 vs. 0
  misc_feature: MA Experiment 20000306 PARAMETER Experiment Name: At_Germinating_Seeds_Sub_P Parameter: Organism Value: A. thaliana
  misc_feature: MA Experiment 20000306 PARAMETER Experiment Name: At_Germinating_Seeds_Sub_P Parameter: Plant Line Value: WS
  misc_feature: MA Experiment 20000306 PARAMETER Experiment Name: At_Germinating_Seeds_Sub_P Parameter: Tissue Value: Germinating Seeds
  misc_feature: MA Experiment ID: 20000307 Result: Up-regulated in Transcription
  misc_feature: MA Experiment 20000307 PARAMETER Experiment Name: At_Germinating_Seeds_Sub_P Parameter: Age (hr) Value: 24 vs. 0
  misc_feature: MA Experiment 20000307 PARAMETER Experiment Name: At_Germinating_Seeds_Sub_P Parameter: Organism Value: A. thaliana
  misc_feature: MA Experiment 20000307 PARAMETER Experiment Name: At_Germinating_Seeds_Sub_P Parameter: Plant Line Value: WS
  misc_feature: MA Experiment 20000307 PARAMETER Experiment Name: At_Germinating_Seeds_Sub_P Parameter: Tissue Value: Germinating Seeds
  misc_feature: MA Experiment ID: 20000314 Result: Up-regulated in Transcription
  misc_feature: MA Experiment 20000314 PARAMETER Experiment Name: At_14day_Shoots-Roots_Sub_P Parameter: Age (day) Value: 14
  misc_feature: MA Experiment 20000314 PARAMETER Experiment Name: At_14day_Shoots-Roots_Sub_P Parameter: Organism Value: A. thaliana
  misc_feature: MA Experiment 20000314 PARAMETER Experiment Name: At_14day_Shoots-Roots_Sub_P Parameter: Plant Line Value: WS
  misc_feature: MA Experiment 20000314 PARAMETER Experiment Name: At_14day_Shoots-Roots_Sub_P Parameter: Tissue Value: Roots vs. Whole Plant
  misc_feature: MA Experiment ID: 20000355 Result: Up-regulated in Transcription
  misc_feature: MA Experiment 20000355 PARAMETER Experiment Name: At_Siliques_Sub_P Parameter: Age (day) Value: 21
  misc_feature: MA Experiment 20000355 PARAMETER Experiment Name: At_Siliques_Sub_P Parameter: Organism Value: A. thaliana
  misc_feature: MA Experiment 20000355 PARAMETER Experiment Name: At_Siliques_Sub_P Parameter: Plant Line Value: WS
  misc_feature: MA Experiment 20000355 PARAMETER Experiment Name: At_Siliques_Sub_P Parameter: Tissue Value: Less Than 5mm Siliques vs. Whole Plant
aaggtatgactcaatcttcacttagttgttgaatttagttctgatctttattagattgtagttctggcttttgtagatatgctatagttactggagggaatagaggaattggatttgagatatgcagacaattagcaaacaaagggattagggttattttgacatctagagatgagaaacaagggcttgaagctgttgagacattgaagaaagagcttgagatttctgatcaaagcattgtctttcatcagcttgatgtctctgatccttctagtgtcacttctcttgctaagtttgtgaaaacccatttcggaaaactcgatatcttgatcaataatgctggggttggtggtgtaatcactgatgttgatgctcttagagctgggacagggaaagaaggtttcaagtgggaggaaactatcactgagacttatgagttagctgaagaatgcataaagattaactattatggaccaaagagaatgtgtgaggcttttattcatcttctgcagttatctaattctccaagaatcgttaatgtatcatccttcatgggtcaagtaaagaatttactaaacgaatgggcaaaagggatcctgagtgacgcagagaatctaacggaggtaagaattgaccaagtgatcaaccaacttctcaatgatctgaaagaagatacggctaagacaaaagattgggctaaagtcatgtcggcttacgttgtttcgaaagccggtttgaatgcttacacgaggatcttagcgaagaaacatcccgagattcgcgttaactcggtttgtcctggatttgtgaagactgatatgaattttaaaactggaattttatctgtggaagaaggagcatcaagtcctgtgaggttagctttgcttccacatcaagaatctccttctggttgtttctttgatcgcaaacaagtttcagagttctgaaatctttgtgtggagatagataagccaaagttttattcatgtaatgagaattattgtttgaaagctaaacagaaagtatcgactattcaataaacagaaacattattaagccttaaaaaaaaaaaaaaaaaaaaaaaaaaaaaaaaaaaaaaaatngttccgc

SEQ ID NO: 39631 - protein, 154 aa, Arabidopsis thaliana
  peptide (1)..(154): Ceres Seq. ID no. 12579638
  misc_feature (1)..(154): Homolog of NCBI NO: 38346774 NR Description: OSJNBa0081C01.25 [Oryza sativa (japonica
  misc_feature (1)..(154): Homolog of NCBI NO: 38346772 NR Description: OSJNBa0081C01.23 [Oryza sativa (japonica
  misc_feature (1)..(152): Homolog of NCBI NO: 38346769 NR Description: OSJNBa0081C01.20 [Oryza sativa (japonica
  misc_feature (1)..(154): Homolog of NCBI NO: 38346767 NR Description: OSJNBa0081C01.18 [Oryza sativa (japonica
  misc_feature (1)..(153): Homolog of NCBI NO: 33146492 NR Description: carbonyl reductase -like protein
  misc_feature (1)..(148): Homolog of NCBI NO: 34559416 NR Description: (-)-isopiperitenone reductase [Mentha x piperita]
  misc_feature (1)..(154): Homolog of NCBI NO: 18378884 NR Description: carbonyl reductase, putative; protein id:
  misc_feature (1)..(154): Homolog of NCBI NO: 25518668 NR Description: hypothetical protein T1N6.22 - Arabidopsis
  misc_feature (1)..(154): Homolog of NCBI NO: 15233062 NR Description: putative protein
  misc_feature (1)..(154): Homolog of NCBI NO: 15224100 NR Description: putative carbonyl reductase; protein id:
MCEAFIHLLQLSNSPRIVNVSSFMGQVKNLLNEWAKGILSDAENLTEVRIDQVINQLLNDLKEDTAKTKDWAKVMSAYVVSKAGLNAYTRILAKKHPEIRVNSVCPGFVKTDMNFKTGILSVEEGASSPVRLALLPHQESPSGCFFDRKQVSEF

SEQ ID NO: 39632 - protein, 131 aa, Arabidopsis thaliana
  peptide (1)..(131): Ceres Seq. ID no. 12579639
  misc_feature (1)..(131): Homolog of NCBI NO: 38346774 NR Description: OSJNBa0081C01.25 [Oryza sativa (japonica
  misc_feature (1)..(131): Homolog of NCBI NO: 38346772 NR Description: OSJNBa0081C01.23 [Oryza sativa (japonica
  misc_feature (1)..(129): Homolog of NCBI NO: 38346769 NR Description: OSJNBa0081C01.20 [Oryza sativa (japonica
  misc_feature (1)..(131): Homolog of NCBI NO: 38346767 NR Description: OSJNBa0081C01.18 [Oryza sativa (japonica
  misc_feature (1)..(130): Homolog of NCBI NO: 33146492 NR Description: carbonyl reductase -like protein
  misc_feature (1)..(125): Homolog of NCBI NO: 34559416 NR Description: (-)-isopiperitenone reductase [Mentha x piperita]
  misc_feature (1)..(131): Homolog of NCBI NO: 18378884 NR Description: carbonyl reductase, putative; protein id:
  misc_feature (1)..(131): Homolog of NCBI NO: 25518668 NR Description: hypothetical protein T1N6.22 - Arabidopsis
  misc_feature (1)..(131): Homolog of NCBI NO: 15233062 NR Description: putative protein
  misc_feature (1)..(131): Homolog of NCBI NO: 15224100 NR Description: putative carbonyl reductase; protein id:
MGQVKNLLNEWAKGILSDAENLTEVRIDQVINQLLNDLKEDTAKTKDWAKVMSAYVVSKAGLNAYTRILAKKHPEIRVNSVCPGFVKTDMNFKTGILSVEEGASSPVRLALLPHQESPSGCFFDRKQVSEF

SEQ ID NO: 39633 - protein, 80 aa, Arabidopsis thaliana
  peptide (1)..(80): Ceres Seq. ID no. 12579640
  misc_feature (1)..(80): Homolog of NCBI NO: 38346774 NR Description: OSJNBa0081C01.25 [Oryza sativa (japonica
  misc_feature (1)..(80): Homolog of NCBI NO: 38346772 NR Description: OSJNBa0081C01.23 [Oryza sativa (japonica
  misc_feature (1)..(78): Homolog of NCBI NO: 38346769 NR Description: OSJNBa0081C01.20 [Oryza sativa (japonica
  misc_feature (1)..(80): Homolog of NCBI NO: 38346767 NR Description: OSJNBa0081C01.18 [Oryza sativa (japonica
  misc_feature (1)..(79): Homolog of NCBI NO: 33146492 NR Description: carbonyl reductase -like protein
  misc_feature (1)..(74): Homolog of NCBI NO: 34559416 NR Description: (-)-isopiperitenone reductase [Mentha x piperita]
  misc_feature (1)..(80): Homolog of NCBI NO: 18378884 NR Description: carbonyl reductase, putative; protein id:
  misc_feature (1)..(80): Homolog of NCBI NO: 25518668 NR Description: hypothetical protein T1N6.22 - Arabidopsis
  misc_feature (1)..(80): Homolog of NCBI NO: 15233062 NR Description: putative protein
  misc_feature (1)..(80): Homolog of NCBI NO: 15224100 NR Description: putative carbonyl reductase; protein id:
MSAYVVSKAGLNAYTRILAKKHPEIRVNSVCPGFVKTDMNFKTGILSVEEGASSPVRLALLPHQESPSGCFFDRKQVSEF

SEQ ID NO: 39634 - DNA, 1610 bp, Arabidopsis thaliana
  misc_feature (1)..(1610): Ceres Seq. ID no. 13580607
  misc_feature: MA Experiment ID: 20000179 Result: Down-regulated in Transcription
  misc_feature: MA Experiment 20000179 PARAMETER Experiment Name: At_Germinating_Seeds_P Parameter: Age (hr) Value: 6 vs. 0
  misc_feature: MA Experiment 20000179 PARAMETER Experiment Name: At_Germinating_Seeds_P Parameter: Tissue Value: Germinating Seeds
  misc_feature: MA Experiment ID: 20000180 Result: Down-regulated in Transcription
  misc_feature: MA Experiment 20000180 PARAMETER Experiment Name: At_Germinating_Seeds_P Parameter: Age (hr) Value: 24 vs. 0
  misc_feature: MA Experiment 20000180 PARAMETER Experiment Name: At_Germinating_Seeds_P Parameter: Tissue Value: Germinating Seeds
  misc_feature: MA Experiment ID: 20000182 Result: Up-regulated in Transcription
  misc_feature: MA Experiment 20000182 PARAMETER Experiment Name: At_2mM_SA_P Parameter: Age (day) Value: 14
  misc_feature: MA Experiment 20000182 PARAMETER Experiment Name: At_2mM_SA_P Parameter: Organism Value: A. thaliana
  misc_feature: MA Experiment 20000182 PARAMETER Experiment Name: At_2mM_SA_P Parameter: Plant Line Value: WS
  misc_feature: MA Experiment 20000182 PARAMETER Experiment Name: At_2mM_SA_P Parameter: Timepoint (hr) Value: 6
  misc_feature: MA Experiment 20000182 PARAMETER Experiment Name: At_2mM_SA_P Parameter: Tissue Value: Aerial
  misc_feature: MA Experiment 20000182 PARAMETER Experiment Name: At_2mM_SA_P Parameter: Treatment Value: 2mM SA vs. No Treatment
  misc_feature: MA Experiment ID: 20000234 Result: Down-regulated in Transcription
  misc_feature: MA Experiment 20000234 PARAMETER Experiment Name: At_Siliques_P Parameter: Age (day) Value: 21
  misc_feature: MA Experiment 20000234 PARAMETER Experiment Name: At_Siliques_P Parameter: Organism Value: A. thaliana
  misc_feature: MA Experiment 20000234 PARAMETER Experiment Name: At_Siliques_P Parameter: Plant Line Value: WS
  misc_feature: MA Experiment 20000234 PARAMETER Experiment Name: At_Siliques_P Parameter: Tissue Value: Less Than 5mm Siliques vs. Whole Plant
  misc_feature: MA Experiment ID: 20000235 Result: Down-regulated in Transcription
  misc_feature: MA Experiment 20000235 PARAMETER Experiment Name: At_Siliques_P Parameter: Age (day) Value: 21
  misc_feature: MA Experiment 20000235 PARAMETER Experiment Name: At_Siliques_P Parameter: Organism Value: A. thaliana
  misc_feature: MA Experiment 20000235 PARAMETER Experiment Name: At_Siliques_P Parameter: Plant Line Value: WS
  misc_feature: MA Experiment 20000235 PARAMETER Experiment Name: At_Siliques_P Parameter: Tissue Value: 5-10mm Siliques vs. Whole Plant
  misc_feature: MA Experiment ID: 20000267 Result: Down-regulated in Transcription
  misc_feature: MA Experiment 20000267 PARAMETER Experiment Name: At_Drought_P Parameter: Age (day) Value: 7
  misc_feature: MA Experiment 20000267 PARAMETER Experiment Name: At_Drought_P Parameter: Organism Value: A. thaliana
  misc_feature: MA Experiment 20000267 PARAMETER Experiment Name: At_Drought_P Parameter: Plant Line Value: WS
  misc_feature: MA Experiment 20000267 PARAMETER Experiment Name: At_Drought_P Parameter: Timepoint (hr) Value: 6
  misc_feature: MA Experiment 20000267 PARAMETER Experiment Name: At_Drought_P Parameter: Tissue Value: Whole Plant
  misc_feature: MA Experiment 20000267 PARAMETER Experiment Name: At_Drought_P Parameter: Treatment Value: Drought vs. No Drought
  misc_feature: MA Experiment ID: 20000308 Result: Down-regulated in Transcription
  misc_feature: MA Experiment 20000308 PARAMETER Experiment Name: At_100mM_NaCl__P Parameter: Age (day) Value: 17
  misc_feature: MA Experiment 20000308 PARAMETER Experiment Name: At_100mM_NaCl__P Parameter: Organism Value: A. thaliana
  misc_feature: MA Experiment 20000308 PARAMETER Experiment Name: At_100mM_NaCl__P Parameter: Plant Line Value: WS
  misc_feature: MA Experiment 20000308 PARAMETER Experiment Name: At_100mM_NaCl__P Parameter: Timepoint (hr) Value: 72
  misc_feature: MA Experiment 20000308 PARAMETER Experiment Name: At_100mM_NaCl__P Parameter: Tissue Value: Whole Plant
  misc_feature: MA Experiment 20000308 PARAMETER Experiment Name: At_100mM_NaCl__P Parameter: Treatment Value: 100mM NaCl vs. No Treatment
  misc_feature: MA Experiment ID: 20000456 Result: Up-regulated in Transcription
  misc_feature: MA Experiment 20000456 PARAMETER Experiment Name: At_100uM_BA_P Parameter: Age (day) Value: 14
  misc_feature: MA Experiment 20000456 PARAMETER Experiment Name: At_100uM_BA_P Parameter: Organism Value: A. thaliana
  misc_feature: MA Experiment 20000456 PARAMETER Experiment Name: At_100uM_BA_P Parameter: Plant Line Value: WS
  misc_feature: MA Experiment 20000456 PARAMETER Experiment Name: At_100uM_BA_P Parameter: Timepoint (hr) Value: 6
  misc_feature: MA Experiment 20000456 PARAMETER Experiment Name: At_100uM_BA_P Parameter: Tissue Value: Aerial
  misc_feature: MA Experiment 20000456 PARAMETER Experiment Name: At_100uM_BA_P Parameter: Treatment Value: 100uM BA vs. No Treatment
  misc_feature: MA Experiment ID: 20000527 Result: Down-regulated in Transcription
  misc_feature: MA Experiment 20000527 PARAMETER Experiment Name: At_10percent_PEG_P Parameter: Age (day) Value: 20
  misc_feature: MA Experiment 20000527 PARAMETER Experiment Name: At_10percent_PEG_P Parameter: Organism Value: A. thaliana
  misc_feature: MA Experiment 20000527 PARAMETER Experiment Name: At_10percent_PEG_P Parameter: Plant Line Value: WS
  misc_feature: MA Experiment 20000527 PARAMETER Experiment Name: At_10percent_PEG_P Parameter: Timepoint (day) Value: 20
  misc_feature: MA Experiment 20000527 PARAMETER Experiment Name: At_10percent_PEG_P Parameter: Tissue Value: Whole Plant
  misc_feature: MA Experiment 20000527 PARAMETER Experiment Name: At_10percent_PEG_P Parameter: Treatment Value: 10percent PEG vs. No Treatment
  misc_feature: MA Experiment ID: 20000709 Result: Up-regulated in Transcription
  misc_feature: MA Experiment 20000709 PARAMETER Experiment Name: At_15mM_NH4NO3_L-to-H_P Parameter: Age (hr) Value: 14
  misc_feature: MA Experiment 20000709 PARAMETER Experiment Name: At_15mM_NH4NO3_L-to-H_P Parameter: Organism Value: A. thaliana
  misc_feature: MA Experiment 20000709 PARAMETER Experiment Name: At_15mM_NH4NO3_L-to-H_P Parameter: Plant Line Value: WS
  misc_feature: MA Experiment 20000709 PARAMETER Experiment Name: At_15mM_NH4NO3_L-to-H_P Parameter: Timepoint (hr) Value: 4
  misc_feature: MA Experiment 20000709 PARAMETER Experiment Name: At_15mM_NH4NO3_L-to-H_P Parameter: Tissue Value: Aerial
  misc_feature: MA Experiment 20000709 PARAMETER Experiment Name: At_15mM_NH4NO3_L-to-H_P Parameter: Treatment Value: 15mM NH4NO3 vs. 30mM Mannitol
  misc_feature: MA Experiment ID: 20000794 Result: Up-regulated in Transcription
  misc_feature: MA Experiment 20000794 PARAMETER Experiment Name: At_Petals_P Parameter: Age (day) Value: 23-25 days
  misc_feature: MA Experiment 20000794 PARAMETER Experiment Name: At_Petals_P Parameter: Plant Line Value: WS
  misc_feature: MA Experiment 20000794 PARAMETER Experiment Name: At_Petals_P Parameter: Tissue Value: Petals vs. Whole plant
  misc_feature: MA Experiment ID: 20001247 Result: Down-regulated in Transcription
  misc_feature: MA Experiment 20001247 PARAMETER Experiment Name: At_Far-red-induction_P Parameter: Age (day) Value: 7
  misc_feature: MA Experiment 20001247 PARAMETER Experiment Name: At_Far-red-induction_P Parameter: Light Value: Far-red vs. White
  misc_feature: MA Experiment 20001247 PARAMETER Experiment Name: At_Far-red-induction_P Parameter: Organism Value: A. thaliana
  misc_feature: MA Experiment 20001247 PARAMETER Experiment Name: At_Far-red-induction_P Parameter: Plant Line Value: Columbia
  misc_feature: MA Experiment 20001247 PARAMETER Experiment Name: At_Far-red-induction_P Parameter: Timepoint (hr) Value: 1
  misc_feature: MA Experiment 20001247 PARAMETER Experiment Name: At_Far-red-induction_P Parameter: Tissue Value: Whole Plant
  misc_feature: MA Experiment ID: 20001248 Result: Down-regulated in Transcription
  misc_feature: MA Experiment 20001248 PARAMETER Experiment Name: At_Far-red-induction_P Parameter: Age (day) Value: 7
  misc_feature: MA Experiment 20001248 PARAMETER Experiment Name: At_Far-red-induction_P Parameter: Light Value: Far-red vs. White
  misc_feature: MA Experiment 20001248 PARAMETER Experiment Name: At_Far-red-induction_P Parameter: Organism Value: A. thaliana
  misc_feature: MA Experiment 20001248 PARAMETER Experiment Name: At_Far-red-induction_P Parameter: Plant Line Value: Columbia
  misc_feature: MA Experiment 20001248 PARAMETER Experiment Name: At_Far-red-induction_P Parameter: Timepoint (hr) Value: 4
  misc_feature: MA Experiment 20001248 PARAMETER Experiment Name: At_Far-red-induction_P Parameter: Tissue Value: Whole Plant
  misc_feature: MA Experiment ID: 20001450 Result: Down-regulated in Transcription
  misc_feature: MA Experiment 20001450 PARAMETER Experiment Name: At_Far-red-induction_P Parameter: Age (day) Value: 7
  misc_feature: MA Experiment 20001450 PARAMETER Experiment Name: At_Far-red-induction_P Parameter: Light Value: Far-red vs. White
  misc_feature: MA Experiment 20001450 PARAMETER Experiment Name: At_Far-red-induction_P Parameter: Organism Value: A. thaliana
  misc_feature: MA Experiment 20001450 PARAMETER Experiment Name: At_Far-red-induction_P Parameter: Plant Line Value: Columbia
  misc_feature: MA Experiment 20001450 PARAMETER Experiment Name: At_Far-red-induction_P Parameter: Timepoint (hr) Value: 8
  misc_feature: MA Experiment 20001450 PARAMETER Experiment Name: At_Far-red-induction_P Parameter: Tissue Value: Whole Plant
  misc_feature: MA Experiment ID: 20001451 Result: Down-regulated in Transcription
  misc_feature: MA Experiment 20001451 PARAMETER Experiment Name: At_Far-red-induction_P Parameter: Age (day) Value: 7
  misc_feature: MA Experiment 20001451 PARAMETER Experiment Name: At_Far-red-induction_P Parameter: Light Value: Far-red vs. White
  misc_feature: MA Experiment 20001451 PARAMETER Experiment Name: At_Far-red-induction_P Parameter: Organism Value: A. thaliana
  misc_feature: MA Experiment 20001451 PARAMETER Experiment Name: At_Far-red-induction_P Parameter: Plant Line Value: Columbia
  misc_feature: MA Experiment 20001451 PARAMETER Experiment Name: At_Far-red-induction_P Parameter: Timepoint (hr) Value: 24
  misc_feature: MA Experiment 20001451 PARAMETER Experiment Name: At_Far-red-induction_P Parameter: Tissue Value: Whole Plant
  misc_feature: MA Experiment ID: 20001557 Result: Up-regulated in Transcription
  misc_feature: MA Experiment 20001557 PARAMETER Experiment Name: At_Drought_Soil_Dry_P Parameter: Age (day) Value: 27
  misc_feature: MA Experiment 20001557 PARAMETER Experiment Name: At_Drought_Soil_Dry_P Parameter: Organism Value: A. thaliana
  misc_feature: MA Experiment 20001557 PARAMETER Experiment Name: At_Drought_Soil_Dry_P Parameter: Plant Line Value: WS
  misc_feature: MA Experiment 20001557 PARAMETER Experiment Name: At_Drought_Soil_Dry_P Parameter: Post Timepoint (hr) Value: 3
  misc_feature: MA Experiment 20001557 PARAMETER Experiment Name: At_Drought_Soil_Dry_P Parameter: Post-Treatment Value: Re-Water vs. No Drought
  misc_feature: MA Experiment 20001557 PARAMETER Experiment Name: At_Drought_Soil_Dry_P Parameter: Timepoint (day) Value: 13
  misc_feature: MA Experiment 20001557 PARAMETER Experiment Name: At_Drought_Soil_Dry_P Parameter: Treatment Value: Drought vs. No Drought
  misc_feature: MA Experiment ID: 20001560 Result: Up-regulated in Transcription
  misc_feature: MA Experiment 20001560 PARAMETER Experiment Name: At_Drought_Soil_Dry_P Parameter: Age (day) Value: 28
  misc_feature: MA Experiment 20001560 PARAMETER Experiment Name: At_Drought_Soil_Dry_P Parameter: Organism Value: A. thaliana
  misc_feature: MA Experiment 20001560 PARAMETER Experiment Name: At_Drought_Soil_Dry_P Parameter: Plant Line Value: WS
  misc_feature: MA Experiment 20001560 PARAMETER Experiment Name: At_Drought_Soil_Dry_P Parameter: Post Timepoint (hr) Value: None
  misc_feature: MA Experiment 20001560 PARAMETER Experiment Name: At_Drought_Soil_Dry_P Parameter: Post-Treatment Value: None
  misc_feature: MA Experiment 20001560 PARAMETER Experiment Name: At_Drought_Soil_Dry_P Parameter: Timepoint (day) Value: 14
  misc_feature: MA Experiment 20001560 PARAMETER Experiment Name: At_Drought_Soil_Dry_P Parameter: Treatment Value: Drought vs. No Drought
  misc_feature: MA Experiment ID: 20001905 Result: Up-regulated in Transcription
  misc_feature: MA Experiment 20001905 PARAMETER Experiment Name: At_Drought_Reproduction_P Parameter: Age (day) Value: 40
  misc_feature: MA Experiment 20001905 PARAMETER Experiment Name: At_Drought_Reproduction_P Parameter: Organism Value: A. thaliana
  misc_feature: MA Experiment 20001905 PARAMETER Experiment Name: At_Drought_Reproduction_P Parameter: Plant Line Value: WS
  misc_feature: MA Experiment 20001905 PARAMETER Experiment Name: At_Drought_Reproduction_P Parameter: Timepoint (day) Value: 10
  misc_feature: MA Experiment 20001905 PARAMETER Experiment Name: At_Drought_Reproduction_P Parameter: Tissue Value: Rosettes
  misc_feature: MA Experiment 20001905 PARAMETER Experiment Name: At_Drought_Reproduction_P Parameter: Treatment Value: Drought vs. No Drought
  misc_feature: MA Experiment ID: 20001908 Result: Up-regulated in Transcription
  misc_feature: MA Experiment 20001908 PARAMETER Experiment Name: At_Drought_Reproduction_P Parameter: Age (day) Value: 40
  misc_feature: MA Experiment 20001908 PARAMETER Experiment Name: At_Drought_Reproduction_P Parameter: Organism Value: A. thaliana
  misc_feature: MA Experiment 20001908 PARAMETER Experiment Name: At_Drought_Reproduction_P Parameter: Plant Line Value: WS
  misc_feature: MA Experiment 20001908 PARAMETER Experiment Name: At_Drought_Reproduction_P Parameter: Timepoint (day) Value: 10
  misc_feature: MA Experiment 20001908 PARAMETER Experiment Name: At_Drought_Reproduction_P Parameter: Tissue Value: Siliques
  misc_feature: MA Experiment 20001908 PARAMETER Experiment Name: At_Drought_Reproduction_P Parameter: Treatment Value: Drought vs. No Drought
agatatatccacaaggagagacacagattcttgtattgatactcacttcagtggagctaagacaagtagaaaaaaaatggcgccaccgcattttctactggtaacgtttccggcgcaaggtcacgtgaacccatctctccgttttgctcgtcggctcatcaaaagaaccggcgcacgtgtcactttcgtcacttgtgtctccgtcttccacaactccatgatcgcaaaccacaacaaagtcgaaaatctctctttccttactttctccgacggtttcgacgatggaggcatttccacctacgaagaccgtcagaaaaggtcggtgaatctcaaggttaacggcgataaggcactatcggatttcatcgaagctactaagaatggtgactctcccgtgacttgcttgatctacacgattcttctcaattgggctccaaaagtagcacgtagatttcaacttccctccgctcttctctggatccaaccggctttggttttcaacatctattacactcatttcatgggaaacaagtccgttttcgagttacctaatctgtcttctctggaaatcagagatcttccatctttcctcacaccttccaacacaaacaaaggcgcatacgatgcggtttcaagaaatgatggagtttctcataaaagaaaccaaaccgaaaattctcatcaacactttcgattcgctggaaccagaggccttaacggctttcccgaatatcgatatggtggcggttggtcctttacttcccacggagattttctcaggaagcaccaacaaatcagttaaagatcaaagtagtagttatacactttggctagactcgaaaacagagtcctctgttatttacgtttcctttggaacaatggttgagttgtccaagaaacagatagaggaactagcgagagcactcatagaagggaaacgaccgtttttgtgggttataactgataaatccaacagagaaacgaaaacagaaggagaagaagagacagagattgagaagatagctggattcagacacgagcttgaagaggttgggatgattgtgtcgtggtgttcgcagatagaggttttaagtcaccgagccgtaggttgttttgtgactcattgtgggtggagctcgacgctggagagtttggttcttggcgttccggttgtggcgtttccgatgtggtcggatcaaccgacgaacgcgaagctactggaagaaagttggaagactggtgtgagggtaagagagaacaaggatggtttggtggagagaggagagatcaggaggtgtttggaagccgtgatggaggagaagtcggtggagttgagggaaaacgcaaagaaatggaagcgtttagcgatggaagcgggtagagaaggaggatcttcggataagaacatggaggcttttgtggaggatatttgtggagaatctcttattcaaaacttgtgtgaagcagaggaggtaaaagtaaagtaaataaaggacaaaagagttggtgtctagaagtggcggagtgttatttgctaatactgtcactttgtaatatcaaattcaattaaaacataaaatttactccatctagataaatatgttttttcg

SEQ ID NO: 39635 - protein, 287 aa, Arabidopsis thaliana
  peptide (1)..(287): Ceres Seq. ID no. 13580608
  misc_feature (1)..(273): Pfam Name: UDP-glucoronosyl and UDP-glucosyl transferase Pfam Description: UDP-glucoronosyl and UDP-glucosyl transferase
  misc_feature (1)..(273): Pfam Name: UDP-glucoronosyl and UDP-glucosyl transferase Pfam Description: UDP-glucoronosyl and UDP-glucosyl transferase
  misc_feature (1)..(273): Pfam Name: UDP-glucoronosyl and UDP-glucosyl transferase Pfam Description: UDP-glucoronosyl and UDP-glucosyl transferase
  misc_feature (1)..(269): Homolog of NCBI NO: 4115559 NR Description: UDP-glucose:anthocysnin 5-O-glucosyltransferase
  misc_feature (3)..(268): Homolog of NCBI NO: 16604440 NR Description: AT4g15550/dl3815c [Arabidopsis thaliana]
  misc_feature (3)..(268): Homolog of NCBI NO: 7433892 NR Description: hypothetical protein - Arabidopsis thaliana
  misc_feature (3)..(269): Homolog of NCBI NO: 6683052 NR Description: anthocyanin 5-O-glucosyltransferase [Petunia x
  misc_feature (3)..(273): Homolog of NCBI NO: 14192682 NR Description: cold-induced glucosyl transferase [Solanum
  misc_feature (1)..(269): Homolog of NCBI NO: 4115559 NR Description: UDP-glucose:anthocysnin 5-O-glucosyltransferase
  misc_feature (3)..(268): Homolog of NCBI NO: 7433892 NR Description: hypothetical protein - Arabidopsis thaliana
  misc_feature (3)..(273): Homolog of NCBI NO: 14192682 NR Description: cold-induced glucosyl transferase [Solanum
  misc_feature (3)..(269): Homolog of NCBI NO: 6683052 NR Description: anthocyanin 5-O-glucosyltransferase [Petunia x
  misc_feature (3)..(268): Homolog of NCBI NO: 7433892 NR Description: hypothetical protein - Arabidopsis thaliana
  misc_feature (3)..(268): Homolog of NCBI NO: 16604440 NR Description: AT4g15550/dl3815c [Arabidopsis thaliana]
  misc_feature (1)..(269): Homolog of NCBI NO: 4115559 NR Description: UDP-glucose:anthocysnin 5-O-glucosyltransferase
  misc_feature (1)..(287): Homolog of NCBI NO: 18390540 NR Description: UDP-glucose transferase(UGT1) [Arabidopsis
  misc_feature (1)..(269): Homolog of NCBI NO: 15220556 NR Description: glycosyltransferase family [Arabidopsis thaliana]
  misc_feature (3)..(268): Homolog of NCBI NO: 18414478 NR Description: UDP-glucose:indole-3-acetate
  misc_feature (3)..(268): Homolog of NCBI NO: 2149127 NR Description: UDP-glucose:indole-3-acetate
  misc_feature (3)..(269): Homolog of NCBI NO: 20146093 NR Description: glucosyltransferase NTGT2 [Nicotiana tabacum]
  misc_feature (1)..(287): Homolog of NCBI NO: 18390540 NR Description: UDP-glucose transferase(UGT1) [Arabidopsis
  misc_feature (1)..(269): Homolog of NCBI NO: 15220556 NR Description: glycosyltransferase family [Arabidopsis thaliana]
  misc_feature (3)..(268): Homolog of NCBI NO: 18414478 NR Description: UDP-glucose:indole-3-acetate
  misc_feature (3)..(268): Homolog of NCBI NO: 2149127 NR Description: UDP-glucose:indole-3-acetate
  misc_feature (3)..(269): Homolog of NCBI NO: 20146093 NR Description: glucosyltransferase NTGT2 [Nicotiana tabacum]
  misc_feature (3)..(273): Homolog of NCBI NO: 14192682 NR Description: cold-induced glucosyl transferase [Solanum
  misc_feature (3)..(269): Homolog of NCBI NO: 6683052 NR Description: anthocyanin 5-O-glucosyltransferase [Petunia x
  misc_feature (3)..(268): Homolog of NCBI NO: 16604440 NR Description: AT4g15550/dl3815c [Arabidopsis thaliana]
  misc_feature (3)..(269): Homolog of NCBI NO: 20146093 NR Description: glucosyltransferase NTGT2 [Nicotiana tabacum]
  misc_feature (3)..(268): Homolog of NCBI NO: 2149127 NR Description: UDP-glucose:indole-3-acetate
  misc_feature (3)..(268): Homolog of NCBI NO: 18414478 NR Description: UDP-glucose:indole-3-acetate
  misc_feature (1)..(269): Homolog of NCBI NO: 15220556 NR Description: glycosyltransferase family [Arabidopsis thaliana]
  misc_feature (1)..(287): Homolog of NCBI NO: 18390540 NR Description: UDP-glucose transferase(UGT1) [Arabidopsis
MRFQEMMEFLIKETKPKILINTFDSLEPEALTAFPNIDMVAVGPLLPTEIFSGSTNKSVKDQSSSYTLWLDSKTESSVIYVSFGTMVELSKKQIEELARALIEGKRPFLWVITDKSNRETKTEGEEETEIEKIAGFRHELEEVGMIVSWCSQIEVLSHRAVGCFVTHCGWSSTLESLVLGVPVVAFPMWSDQPTNAKLLEESWKTGVRVRENKDGLVERGEIRRCLEAVMEEKSVELRENAKKWKRLAMEAGREGGSSDKNMEAFVEDICGESLIQNLCEAEEVKVK

SEQ ID NO: 39636 - protein, 282 aa, Arabidopsis thaliana
  peptide (1)..(282): Ceres Seq. ID no. 13580609
  misc_feature (1)..(268): Pfam Name: UDP-glucoronosyl and UDP-glucosyl transferase Pfam Description: UDP-glucoronosyl and UDP-glucosyl transferase
  misc_feature (1)..(268): Pfam Name: UDP-glucoronosyl and UDP-glucosyl transferase Pfam Description: UDP-glucoronosyl and UDP-glucosyl transferase
  misc_feature (1)..(268): Pfam Name: UDP-glucoronosyl and UDP-glucosyl transferase Pfam Description: UDP-glucoronosyl and UDP-glucosyl transferase
  misc_feature (1)..(264): Homolog of NCBI NO: 4115559 NR Description: UDP-glucose:anthocysnin 5-O-glucosyltransferase
  misc_feature (1)..(263): Homolog of NCBI NO: 16604440 NR Description: AT4g15550/dl3815c [Arabidopsis thaliana]
  misc_feature (1)..(263): Homolog of NCBI NO: 7433892 NR Description: hypothetical protein - Arabidopsis thaliana
  misc_feature (1)..(264): Homolog of NCBI NO: 6683052 NR Description: anthocyanin 5-O-glucosyltransferase [Petunia x
  misc_feature (1)..(268): Homolog of NCBI NO: 14192682 NR Description: cold-induced glucosyl transferase [Solanum
  misc_feature (1)..(264): Homolog of NCBI NO: 4115559 NR Description: UDP-glucose:anthocysnin 5-O-glucosyltransferase
  misc_feature (1)..(263): Homolog of NCBI NO: 7433892 NR Description: hypothetical protein - Arabidopsis thaliana
  misc_feature (1)..(268): Homolog of NCBI NO: 14192682 NR Description: cold-induced glucosyl transferase [Solanum
  misc_feature (1)..(264): Homolog of NCBI NO: 6683052 NR Description: anthocyanin 5-O-glucosyltransferase [Petunia x
  misc_feature (1)..(263): Homolog of NCBI NO: 7433892 NR Description: hypothetical protein - Arabidopsis thaliana
  misc_feature (1)..(263): Homolog of NCBI NO: 16604440 NR Description: AT4g15550/dl3815c [Arabidopsis thaliana]
  misc_feature (1)..(264): Homolog of NCBI NO: 4115559 NR Description: UDP-glucose:anthocysnin 5-O-glucosyltransferase
  misc_feature (1)..(282): Homolog of NCBI NO: 18390540 NR Description: UDP-glucose transferase(UGT1) [Arabidopsis
  misc_feature (1)..(264): Homolog of NCBI NO: 15220556 NR Description: glycosyltransferase family [Arabidopsis thaliana]
  misc_feature (1)..(263): Homolog of NCBI NO: 18414478 NR Description: UDP-glucose:indole-3-acetate
  misc_feature (1)..(263): Homolog of NCBI NO: 2149127 NR Description: UDP-glucose:indole-3-acetate
  misc_feature (1)..(264): Homolog of NCBI NO: 20146093 NR Description: glucosyltransferase NTGT2 [Nicotiana tabacum]
  misc_feature (1)..(282): Homolog of NCBI NO: 18390540 NR Description: UDP-glucose transferase(UGT1) [Arabidopsis
  misc_feature (1)..(264): Homolog of NCBI NO: 15220556 NR Description: glycosyltransferase family [Arabidopsis thaliana]
  misc_feature (1)..(263): Homolog of NCBI NO: 18414478 NR Description: UDP-glucose:indole-3-acetate
  misc_feature (1)..(263): Homolog of NCBI NO: 2149127 NR Description: UDP-glucose:indole-3-acetate
  misc_feature (1)..(264): Homolog of NCBI NO: 20146093 NR Description: glucosyltransferase NTGT2 [Nicotiana tabacum]
  misc_feature (1)..(268): Homolog of NCBI NO: 14192682 NR Description: cold-induced glucosyl transferase [Solanum
  misc_feature (1)..(264): Homolog of NCBI NO: 6683052 NR Description: anthocyanin 5-O-glucosyltransferase [Petunia x
  misc_feature (1)..(263): Homolog of NCBI NO: 16604440 NR Description: AT4g15550/dl3815c [Arabidopsis thaliana]
  misc_feature (1)..(264): Homolog of NCBI NO: 20146093 NR Description: glucosyltransferase NTGT2 [Nicotiana tabacum]
  misc_feature (1)..(263): Homolog of NCBI NO: 2149127 NR Description: UDP-glucose:indole-3-acetate
  misc_feature (1)..(263): Homolog of NCBI NO: 18414478 NR Description: UDP-glucose:indole-3-acetate
  misc_feature (1)..(264): Homolog of NCBI NO: 15220556 NR Description: glycosyltransferase family [Arabidopsis thaliana]
  misc_feature (1)..(282): Homolog of NCBI NO: 18390540 NR Description: UDP-glucose transferase(UGT1) [Arabidopsis
MMEFLIKETKPKILINTFDSLEPEALTAFPNIDMVAVGPLLPTEIFSGSTNKSVKDQSSSYTLWLDSKTESSVIYVSFGTMVELSKKQIEELARALIEGKRPFLWVITDKSNRETKTEGEEETEIEKIAGFRHELEEVGMIVSWCSQIEVLSHRAVGCFVTHCGWSSTLESLVLGVPVVAFPMWSDQPTNAKLLEESWKTGVRVRENKDGLVERGEIRRCLEAVMEEKSVELRENAKKWKRLAMEAGREGGSSDKNMEAFVEDICGESLIQNLCEAEEVKVK

SEQ ID NO: 39637 - protein, 281 aa, Arabidopsis thaliana
  peptide (1)..(281): Ceres Seq. ID no. 13580610
  misc_feature (1)..(267): Pfam Name: UDP-glucoronosyl and UDP-glucosyl transferase Pfam Description: UDP-glucoronosyl and UDP-glucosyl transferase
  misc_feature (1)..(267): Pfam Name: UDP-glucoronosyl and UDP-glucosyl transferase Pfam Description: UDP-glucoronosyl and UDP-glucosyl transferase
  misc_feature (1)..(267): Pfam Name: UDP-glucoronosyl and UDP-glucosyl transferase Pfam Description: UDP-glucoronosyl and UDP-glucosyl transferase
  misc_feature (1)..(263): Homolog of NCBI NO: 4115559 NR Description: UDP-glucose:anthocysnin 5-O-glucosyltransferase
  misc_feature (1)..(262): Homolog of NCBI NO: 16604440 NR Description: AT4g15550/dl3815c [Arabidopsis thaliana]
  misc_feature (1)..(262): Homolog of NCBI NO: 7433892 NR Description: hypothetical protein - Arabidopsis thaliana
  misc_feature (1)..(263): Homolog of NCBI NO: 6683052 NR Description: anthocyanin 5-O-glucosyltransferase [Petunia x
  misc_feature (1)..(267): Homolog of NCBI NO: 14192682 NR Description: cold-induced glucosyl transferase [Solanum
  misc_feature (1)..(263): Homolog of NCBI NO: 4115559 NR Description: UDP-glucose:anthocysnin 5-O-glucosyltransferase
  misc_feature (1)..(262): Homolog of NCBI NO: 7433892 NR Description: hypothetical protein - Arabidopsis thaliana
  misc_feature (1)..(267): Homolog of NCBI NO: 14192682 NR Description: cold-induced glucosyl transferase [Solanum
  misc_feature (1)..(263): Homolog of NCBI NO: 6683052 NR Description: anthocyanin 5-O-glucosyltransferase [Petunia x
  misc_feature (1)..(262): Homolog of NCBI NO: 7433892 NR Description: hypothetical protein - Arabidopsis thaliana
  misc_feature (1)..(262): Homolog of NCBI NO: 16604440 NR Description: AT4g15550/dl3815c [Arabidopsis thaliana]
  misc_feature (1)..(263): Homolog of NCBI NO: 4115559 NR Description: UDP-glucose:anthocysnin 5-O-glucosyltransferase
  misc_feature (1)..(281): Homolog of NCBI NO: 18390540 NR Description: UDP-glucose transferase(UGT1) [Arabidopsis
  misc_feature (1)..(263): Homolog of NCBI NO: 15220556 NR Description: glycosyltransferase family [Arabidopsis thaliana]
  misc_feature (1)..(262): Homolog of NCBI NO: 18414478 NR Description: UDP-glucose:indole-3-acetate
  misc_feature (1)..(262): Homolog of NCBI NO: 2149127 NR Description: UDP-glucose:indole-3-acetate
  misc_feature (1)..(263): Homolog of NCBI NO: 20146093 NR Description: glucosyltransferase NTGT2 [Nicotiana tabacum]
  misc_feature (1)..(281): Homolog of NCBI NO: 18390540 NR Description: UDP-glucose transferase(UGT1) [Arabidopsis
  misc_feature (1)..(263): Homolog of NCBI NO: 15220556 NR Description: glycosyltransferase family [Arabidopsis thaliana]
  misc_feature (1)..(262): Homolog of NCBI NO: 18414478 NR Description: UDP-glucose:indole-3-acetate
  misc_feature (1)..(262): Homolog of NCBI NO: 2149127 NR Description: UDP-glucose:indole-3-acetate
  misc_feature (1)..(263): Homolog of NCBI NO: 20146093 NR Description: glucosyltransferase NTGT2 [Nicotiana tabacum]
  misc_feature (1)..(267): Homolog of NCBI NO: 14192682 NR Description: cold-induced glucosyl transferase [Solanum
  misc_feature (1)..(263): Homolog of NCBI NO: 6683052 NR Description: anthocyanin 5-O-glucosyltransferase [Petunia x
  misc_feature (1)..(262): Homolog of NCBI NO: 16604440 NR Description: AT4g15550/dl3815c [Arabidopsis thaliana]
  misc_feature (1)..(263): Homolog of NCBI NO: 20146093 NR Description: glucosyltransferase NTGT2 [Nicotiana tabacum]
  misc_feature (1)..(262): Homolog of NCBI NO: 2149127 NR Description: UDP-glucose:indole-3-acetate
  misc_feature (1)..(262): Homolog of NCBI NO: 18414478 NR Description: UDP-glucose:indole-3-acetate
  misc_feature (1)..(263): Homolog of NCBI NO: 15220556 NR Description: glycosyltransferase family [Arabidopsis thaliana]
  misc_feature (1)..(281): Homolog of NCBI NO: 18390540 NR Description: UDP-glucose transferase(UGT1) [Arabidopsis
MEFLIKETKPKILINTFDSLEPEALTAFPNIDMVAVGPLLPTEIFSGSTNKSVKDQSSSYTLWLDSKTESSVIYVSFGTMVELSKKQIEELARALIEGKRPFLWVITDKSNRETKTEGEEETEIEKIAGFRHELEEVGMIVSWCSQIEVLSHRAVGCFVTHCGWSSTLESLVLGVPVVAFPMWSDQPTNAKLLEESWKTGVRVRENKDGLVERGEIRRCLEAVMEEKSVELRENAKKWKRLAMEAGREGGSSDKNMEAFVEDICGESLIQNLCEAEEVKVK

SEQ ID NO: 39638 - DNA, 1282 bp, Arabidopsis thaliana; identical to SEQ ID NO: 39477
  misc_feature (1)..(1282): Ceres Seq. ID no. 12488272
  misc_feature: MA Experiment ID: 108433 Result: Down-regulated in Transcription
  misc_feature: MA Experiment 108433 PARAMETER Experiment Name: At_rhl_Mutant2_cDNA_P Parameter: Age (day) Value: 7
  misc_feature: MA Experiment 108433 PARAMETER Experiment Name: At_rhl_Mutant2_cDNA_P Parameter: Organism Value: A. thaliana
  misc_feature: MA Experiment 108433 PARAMETER Experiment Name: At_rhl_Mutant2_cDNA_P Parameter: Plant Line Value: rhl Mutant vs. wt landsburg
  misc_feature: MA Experiment 108433 PARAMETER Experiment Name: At_rhl_Mutant2_cDNA_P Parameter: Tissue Value: Roots
  misc_feature: MA Experiment ID: 108461 Result: Down-regulated in Transcription
  misc_feature: MA Experiment 108461 PARAMETER Experiment Name: At_Germinating_Seeds_cDNA_P Parameter: Age (day) Value: 1 vs. 0
  misc_feature: MA Experiment 108461 PARAMETER Experiment Name: At_Germinating_Seeds_cDNA_P Parameter: Tissue Value: Germinating Seeds
  misc_feature: MA Experiment ID: 108462 Result: Down-regulated in Transcription
  misc_feature: MA Experiment 108462 PARAMETER Experiment Name: At_Germinating_Seeds_cDNA_P Parameter: Age (day) Value: 2 vs. 0
  misc_feature: MA Experiment 108462 PARAMETER Experiment Name: At_Germinating_Seeds_cDNA_P Parameter: Tissue Value: Germinating Seeds
  misc_feature: MA Experiment ID: 108463 Result: Down-regulated in Transcription
  misc_feature: MA Experiment 108463 PARAMETER Experiment Name: At_Germinating_Seeds_cDNA_P Parameter: Age (day) Value: 3 vs. 0
  misc_feature: MA Experiment 108463 PARAMETER Experiment Name: At_Germinating_Seeds_cDNA_P Parameter: Tissue Value: Germinating Seeds
  misc_feature: MA Experiment ID: 108464 Result: Down-regulated in Transcription
  misc_feature: MA Experiment 108464 PARAMETER Experiment Name: At_Germinating_Seeds_cDNA_P Parameter: Age (day) Value: 4 vs. 0
  misc_feature: MA Experiment 108464 PARAMETER Experiment Name: At_Germinating_Seeds_cDNA_P Parameter: Tissue Value: Germinating Seeds
  misc_feature: MA Experiment ID: 108488 Result: Down-regulated in Transcription
  misc_feature: MA Experiment ID: 108573 Result: Up-regulated in Transcription
  misc_feature: MA Experiment 108573 PARAMETER Experiment Name: At_Drought_cDNA_P Parameter: Timepoint (hr) Value: 6
  misc_feature: MA Experiment 108573 PARAMETER Experiment Name: At_Drought_cDNA_P Parameter: Tissue Value: Aerial
  misc_feature: MA Experiment 108573 PARAMETER Experiment Name: At_Drought_cDNA_P Parameter: Treatment Value: Drought vs. No Drought
  misc_feature: MA Experiment ID: 108574 Result: Up-regulated in Transcription
  misc_feature: MA Experiment 108574 PARAMETER Experiment Name: At_Wounding__cDNA_P Parameter: Timepoint (hr) Value: 1
  misc_feature: MA Experiment 108574 PARAMETER Experiment Name: At_Wounding__cDNA_P Parameter: Tissue Value: Aerial
  misc_feature: MA Experiment 108574 PARAMETER Experiment Name: At_Wounding__cDNA_P Parameter: Treatment Value: Wounding vs. No Wounding
  misc_feature: MA Experiment ID: 108577 Result: Up-regulated in Transcription
  misc_feature: MA Experiment 108577 PARAMETER Experiment Name: At_42deg_Heat_cDNA_P Parameter: Temperature (deg C) Value: 42 vs. 22
  misc_feature: MA Experiment 108577 PARAMETER Experiment Name: At_42deg_Heat_cDNA_P Parameter: Timepoint (hr) Value: 6
  misc_feature: MA Experiment 108577 PARAMETER Experiment Name: At_42deg_Heat_cDNA_P Parameter: Tissue Value: Aerial
  misc_feature: MA Experiment ID: 108579 Result: Up-regulated in Transcription
  misc_feature: MA Experiment 108579 PARAMETER Experiment Name: At_4deg_Cold_cDNA_P Parameter: Temperature (deg C) Value: 4 vs. 22
  misc_feature: MA Experiment 108579 PARAMETER Experiment Name: At_4deg_Cold_cDNA_P Parameter: Timepoint (hr) Value: 6
  misc_feature: MA Experiment 108579 PARAMETER Experiment Name: At_4deg_Cold_cDNA_P Parameter: Tissue Value: Aerial
  misc_feature: MA Experiment ID: 108585 Result: Up-regulated in Transcription
  misc_feature: MA Experiment 108585 PARAMETER Experiment Name: At_5mM_NaNP_cDNA_P Parameter: Timepoint (hr) Value: 6
  misc_feature: MA Experiment 108585 PARAMETER Experiment Name: At_5mM_NaNP_cDNA_P Parameter: Tissue Value: Aerial
  misc_feature: MA Experiment 108585 PARAMETER Experiment Name: At_5mM_NaNP_cDNA_P Parameter: Treatment Value: null
  misc_feature: MA Experiment ID: 108595 Result: Up-regulated in Transcription
  misc_feature: MA Experiment 108595 PARAMETER Experiment Name: At_Ler-pi_Ovule_cDNA_P Parameter: Plant Line Value: null
  misc_feature: MA Experiment ID: 108668 Result: Up-regulated in Transcription
  misc_feature: MA Experiment 108668 PARAMETER Experiment Name: At_2mM_SA_cDNA_P Parameter: Plant Line Value: WS
  misc_feature: MA Experiment 108668 PARAMETER Experiment Name: At_2mM_SA_cDNA_P Parameter: Timepoint (hr) Value: 6
  misc_feature: MA Experiment 108668 PARAMETER Experiment Name: At_2mM_SA_cDNA_P Parameter: Treatment Value: 2mM SA vs. No Treatment
  misc_feature: MA Experiment ID: 20000111 Result: Up-regulated in Transcription
  misc_feature: MA Experiment 20000111 PARAMETER Experiment Name: At_42deg_Heat_cDNA_P Parameter: Temperature (deg C) Value: 42 vs. 22
  misc_feature: MA Experiment 20000111 PARAMETER Experiment Name: At_42deg_Heat_cDNA_P Parameter: Timepoint (hr) Value: 6
  misc_feature: MA Experiment 20000111 PARAMETER Experiment Name: At_42deg_Heat_cDNA_P Parameter: Tissue Value: Aerial
  misc_feature: MA Experiment ID: 20000112 Result: Up-regulated in Transcription
  misc_feature: MA Experiment 20000112 PARAMETER Experiment Name: At_42deg_Heat_cDNA_P Parameter: Temperature (deg C) Value: 42 vs. 22
  misc_feature: MA Experiment 20000112 PARAMETER Experiment Name: At_42deg_Heat_cDNA_P Parameter: Timepoint (hr) Value: 2
  misc_feature: MA Experiment 20000112 PARAMETER Experiment Name: At_42deg_Heat_cDNA_P Parameter: Tissue Value: Aerial
  misc_feature: MA Experiment ID: 20000113 Result: Up-regulated in Transcription
  misc_feature: MA Experiment 20000113 PARAMETER Experiment Name: At_42deg_Heat_cDNA_P Parameter: Temperature (deg C) Value: 42 vs. 22
  misc_feature: MA Experiment 20000113 PARAMETER Experiment Name: At_42deg_Heat_cDNA_P Parameter: Timepoint (hr) Value: 8
  misc_feature: MA Experiment 20000113 PARAMETER Experiment Name: At_42deg_Heat_cDNA_P Parameter: Tissue Value: Aerial
  misc_feature: MA Experiment ID: 20000173 Result: Up-regulated in Transcription
  misc_feature: MA Experiment 20000173 PARAMETER Experiment Name: At_42deg_Heat_P Parameter: Age (day) Value: 14
  misc_feature: MA Experiment 20000173 PARAMETER Experiment Name: At_42deg_Heat_P Parameter: Organism Value: A. thaliana
  misc_feature: MA Experiment 20000173 PARAMETER Experiment Name: At_42deg_Heat_P Parameter: Plant Line Value: WS
  misc_feature: MA Experiment 20000173 PARAMETER Experiment Name: At_42deg_Heat_P Parameter: Temperature (deg C) Value: 42 vs. 22
  misc_feature: MA Experiment 20000173 PARAMETER Experiment Name: At_42deg_Heat_P Parameter: Timepoint (hr) Value: 6
  misc_feature: MA Experiment 20000173 PARAMETER Experiment Name: At_42deg_Heat_P Parameter: Tissue Value: Aerial
  misc_feature: MA Experiment ID: 20000180 Result: Down-regulated in Transcription
  misc_feature: MA Experiment 20000180 PARAMETER Experiment Name: At_Germinating_Seeds_P Parameter: Age (hr) Value: 24 vs. 0
  misc_feature: MA Experiment 20000180 PARAMETER Experiment Name: At_Germinating_Seeds_P Parameter: Tissue Value: Germinating Seeds
  misc_feature: MA Experiment ID: 20000182 Result: Up-regulated in Transcription
  misc_feature: MA Experiment 20000182 PARAMETER Experiment Name: At_2mM_SA_P Parameter: Age (day) Value: 14
  misc_feature: MA Experiment 20000182 PARAMETER Experiment Name: At_2mM_SA_P Parameter: Organism Value: A. thaliana
  misc_feature: MA Experiment 20000182 PARAMETER Experiment Name: At_2mM_SA_P Parameter: Plant Line Value: WS
  misc_feature: MA Experiment 20000182 PARAMETER Experiment Name: At_2mM_SA_P Parameter: Timepoint (hr) Value: 6
  misc_feature: MA Experiment 20000182 PARAMETER Experiment Name: At_2mM_SA_P Parameter: Tissue Value: Aerial
  misc_feature: MA Experiment 20000182 PARAMETER Experiment Name: At_2mM_SA_P Parameter: Treatment Value: 2mM SA vs. No Treatment
  misc_feature: MA Experiment ID: 20000495 Result: Down-regulated in Transcription
  misc_feature: MA Experiment 20000495 PARAMETER Experiment Name: At_Guard_Cells_P Parameter: Harvest Date Value: 8/2/2002
  misc_feature: MA Experiment 20000495 PARAMETER Experiment Name: At_Guard_Cells_P Parameter: Organism Value: A. thaliana
  misc_feature: MA Experiment 20000495 PARAMETER Experiment Name: At_Guard_Cells_P Parameter: Tissue Value: Guard Cells vs. Leaves
  misc_feature: MA Experiment ID: 20001906 Result: Up-regulated in Transcription
  misc_feature: MA Experiment 20001906 PARAMETER Experiment Name: At_Drought_Reproduction_P Parameter: Age (day) Value: 35
  misc_feature: MA Experiment 20001906 PARAMETER Experiment Name: At_Drought_Reproduction_P Parameter: Organism Value: A. thaliana
  misc_feature: MA Experiment 20001906 PARAMETER Experiment Name: At_Drought_Reproduction_P Parameter: Plant Line Value: WS
  misc_feature: MA Experiment 20001906 PARAMETER Experiment Name: At_Drought_Reproduction_P Parameter: Timepoint (day) Value: 5
  misc_feature: MA Experiment 20001906 PARAMETER Experiment Name: At_Drought_Reproduction_P Parameter: Tissue Value: Siliques
  misc_feature: MA Experiment 20001906 PARAMETER Experiment Name: At_Drought_Reproduction_P Parameter: Treatment Value: Drought vs. No Drought
  misc_feature: MA Experiment ID: 20001908 Result: Up-regulated in Transcription
  misc_feature: MA Experiment 20001908 PARAMETER Experiment Name: At_Drought_Reproduction_P Parameter: Age (day) Value: 40
  misc_feature: MA Experiment 20001908 PARAMETER Experiment Name: At_Drought_Reproduction_P Parameter: Organism Value: A. thaliana
  misc_feature: MA Experiment 20001908 PARAMETER Experiment Name: At_Drought_Reproduction_P Parameter: Plant Line Value: WS
  misc_feature: MA Experiment 20001908 PARAMETER Experiment Name: At_Drought_Reproduction_P Parameter: Timepoint (day) Value: 10
  misc_feature: MA Experiment 20001908 PARAMETER Experiment Name: At_Drought_Reproduction_P Parameter: Tissue Value: Siliques
  misc_feature: MA Experiment 20001908 PARAMETER Experiment Name: At_Drought_Reproduction_P Parameter: Treatment Value: Drought vs. No Drought
  misc_feature: MA Experiment ID: 20001911 Result: Up-regulated in Transcription
  misc_feature: MA Experiment 20001911 PARAMETER Experiment Name: At_Drought_Reproduction_P Parameter: Age (day) Value: 40
  misc_feature: MA Experiment 20001911 PARAMETER Experiment Name: At_Drought_Reproduction_P Parameter: Organism Value: A. thaliana
  misc_feature: MA Experiment 20001911 PARAMETER Experiment Name: At_Drought_Reproduction_P Parameter: Plant Line Value: WS
  misc_feature: MA Experiment 20001911 PARAMETER Experiment Name: At_Drought_Reproduction_P Parameter: Timepoint (day) Value: 10
  misc_feature: MA Experiment 20001911 PARAMETER Experiment Name: At_Drought_Reproduction_P Parameter: Tissue Value: Flowers
  misc_feature: MA Experiment 20001911 PARAMETER Experiment Name: At_Drought_Reproduction_P Parameter: Treatment Value: Drought vs. No Drought

SEQ ID NO: 39639 - protein, 106 aa, Arabidopsis thaliana; identical to SEQ ID NO: 39478
  peptide (1)..(106): Ceres Seq. ID no. 12488273
  misc_feature (1)..(104): Pfam Name: Rubber elongation factor protein (REF) Pfam Description: Rubber elongation factor protein (REF)
  misc_feature (1)..(104): Pfam Name: Rubber elongation factor protein (REF) Pfam Description: Rubber elongation factor protein (REF)
  misc_feature (32)..(104): Homolog of NCBI NO: 15214302 NR Description: Stress-related protein (PvSRP)
  misc_feature (1)..(106): Homolog of NCBI NO: 33332330 NR Description: rubber synthesis protein [Parthenium argentatum]
  misc_feature (6)..(94): Homolog of NCBI NO: 15227131 NR Description: unknown protein; protein id: At2g47780.1
  misc_feature (1)..(96): Homolog of NCBI NO: 14423933 NR Description: Small rubber particle protein (SRPP) (22 kDa particle protein) (22 kDa RPP) (Latex allergen Hev b 3) (27 kDa
  misc_feature (1)..(92): Homolog of NCBI NO: 15214353 NR Description: Hypothetical protein from PAC P0001A07
  misc_feature (32)..(104): Homolog of NCBI NO: 15214302 NR Description: Stress-related protein (PvSRP)
  misc_feature (6)..(94): Homolog of NCBI NO: 15227131 NR Description: unknown protein; protein id: At2g47780.1
  misc_feature (1)..(92): Homolog of NCBI NO: 15214353 NR Description: Hypothetical protein from PAC P0001A07
  misc_feature (1)..(104): Homolog of NCBI NO: 15230002 NR Description: stress related protein, putative
  misc_feature (1)..(94): Homolog of NCBI NO: 15214303 NR Description: Stress-related protein
  misc_feature (1)..(94): Homolog of NCBI NO: 22831130 NR Description: putative stress-related protein
  misc_feature (1)..(94): Homolog of NCBI NO: 29367349 NR Description: stress-related protein-like protein
  misc_feature (1)..(94): Homolog of NCBI NO: 37622210 NR Description: small rubber particle protein [Hevea brasiliensis]
  misc_feature (1)..(96): Homolog of NCBI NO: 14423933 NR Description: Small rubber particle protein (SRPP) (22 kDa particle protein) (22 kDa RPP) (Latex allergen Hev b 3) (27 kDa
  misc_feature (1)..(106): Homolog of NCBI NO: 33332330 NR Description: rubber synthesis protein [Parthenium argentatum]
  misc_feature (1)..(94): Homolog of NCBI NO: 37622210 NR Description: small rubber particle protein [Hevea brasiliensis]
  misc_feature (1)..(94): Homolog of NCBI NO: 29367349 NR Description: stress-related protein-like protein
  misc_feature (1)..(94): Homolog of NCBI NO: 22831130 NR Description: putative stress-related protein
  misc_feature (1)..(94): Homolog of NCBI NO: 15214303 NR Description: Stress-related protein
  misc_feature (1)..(104): Homolog of NCBI NO: 15230002 NR Description: stress related protein, putative

SEQ ID NO: 39640 - protein, 92 aa, Arabidopsis thaliana; identical to SEQ ID NO: 39479
  peptide (1)..(92): Ceres Seq. ID no. 12488274
  misc_feature (13)..(90): Pfam Name: Rubber elongation factor protein (REF) Pfam Description: Rubber elongation factor protein (REF)
  misc_feature (13)..(90): Pfam Name: Rubber elongation factor protein (REF) Pfam Description: Rubber elongation factor protein (REF)
  misc_feature (17)..(90): Homolog of NCBI NO: 38122474 NR Description: rubber elongation factor [Hevea brasiliensis]
  misc_feature (37)..(90): Homolog of NCBI NO: 15214302 NR Description: Stress-related protein (PvSRP)
  misc_feature (8)..(90): Homolog of NCBI NO: 33332330 NR Description: rubber synthesis protein [Parthenium argentatum]
  misc_feature (8)..(90): Homolog of NCBI NO: 15227131 NR Description: unknown protein; protein id: At2g47780.1
  misc_feature (14)..(90): Homolog of NCBI NO: 14423933 NR Description: Small rubber particle protein (SRPP) (22 kDa particle protein) (22 kDa RPP) (Latex allergen Hev b 3) (27 kDa
  misc_feature (17)..(90): Homolog of NCBI NO: 38122474 NR Description: rubber elongation factor [Hevea brasiliensis]
  misc_feature (8)..(90): Homolog of NCBI NO: 33332330 NR Description: rubber synthesis protein [Parthenium argentatum]
  misc_feature (14)..(90): Homolog of NCBI NO: 14423933 NR Description: Small rubber particle protein (SRPP) (22 kDa particle protein) (22 kDa RPP) (Latex allergen Hev b 3) (27 kDa
  misc_feature (1)..(90): Homolog of NCBI NO: 15230002 NR Description: stress related protein, putative
  misc_feature (1)..(91): Homolog of NCBI NO: 15214303 NR Description: Stress-related protein
  misc_feature (1)..(90): Homolog of NCBI NO: 22831130 NR Description: putative stress-related protein
  misc_feature (1)..(90): Homolog of NCBI NO: 29367349 NR Description: stress-related protein-like protein
  misc_feature (18)..(90): Homolog of NCBI NO: 15214353 NR Description: Hypothetical protein from PAC P0001A07
  misc_feature (8)..(90): Homolog of NCBI NO: 15227131 NR Description: unknown protein; protein id: At2g47780.1
  misc_feature (37)..(90): Homolog of NCBI NO: 15214302 NR Description: Stress-related protein (PvSRP)
  misc_feature (18)..(90): Homolog of NCBI NO: 15214353 NR Description: Hypothetical protein from PAC P0001A07
  misc_feature (1)..(90): Homolog of NCBI NO: 29367349 NR Description: stress-related protein-like protein
  misc_feature (1)..(90): Homolog of NCBI NO: 22831130 NR Description: putative stress-related protein
  misc_feature (1)..(91): Homolog of NCBI NO: 15214303 NR Description: Stress-related protein
  misc_feature (1)..(90): Homolog of NCBI NO: 15230002 NR Description: stress related protein, putative

SEQ ID NO: 39641 - protein, 89 aa, Arabidopsis thaliana; identical to SEQ ID NO: 39480
  peptide (1)..(89): Ceres Seq. ID no. 12488275
  misc_feature (29)..(74): Homolog of NCBI NO: 15214302 NR Description: Stress-related protein (PvSRP)
  misc_feature (17)..(80): Homolog of NCBI NO: 33332330 NR Description: rubber synthesis protein [Parthenium argentatum]
  misc_feature (29)..(81): Homolog of NCBI NO: 15227131 NR Description: unknown protein; protein id: At2g47780.1
  misc_feature (29)..(76): Homolog of NCBI NO: 14423933 NR Description: Small rubber particle protein (SRPP) (22 kDa particle protein) (22 kDa RPP) (Latex allergen Hev b 3) (27 kDa
  misc_feature (30)..(88): Homolog of NCBI NO: 15214353 NR Description: Hypothetical protein from PAC P0001A07
  misc_feature (29)..(83): Homolog of NCBI NO: 37622210 NR Description: small rubber particle protein [Hevea brasiliensis]
  misc_feature (17)..(82): Homolog of NCBI NO: 29367349 NR Description: stress-related protein-like protein
  misc_feature (17)..(82): Homolog of NCBI NO: 22831130 NR Description: putative stress-related protein
  misc_feature (17)..(78): Homolog of NCBI NO: 15214303 NR Description: Stress-related protein
  misc_feature (29)..(89): Homolog of NCBI NO: 15230002 NR Description: stress related protein, putative
  misc_feature (29)..(74): Homolog of NCBI NO: 15214302 NR Description: Stress-related protein (PvSRP)
  misc_feature (17)..(80): Homolog of NCBI NO: 33332330 NR Description: rubber synthesis protein [Parthenium argentatum]
  misc_feature (29)..(81): Homolog of NCBI NO: 15227131 NR Description: unknown protein; protein id: At2g47780.1
  misc_feature (29)..(76): Homolog of NCBI NO: 14423933 NR Description: Small rubber particle protein (SRPP) (22 kDa particle protein) (22 kDa RPP) (Latex allergen Hev b 3) (27 kDa
  misc_feature (30)..(88): Homolog of NCBI NO: 15214353 NR Description: Hypothetical protein from PAC P0001A07
  misc_feature (29)..(83): Homolog of NCBI NO: 37622210 NR Description: small rubber particle protein [Hevea brasiliensis]
  misc_feature (17)..(82): Homolog of NCBI NO: 29367349 NR Description: stress-related protein-like protein
  misc_feature (17)..(82): Homolog of NCBI NO: 22831130 NR Description: putative stress-related protein
  misc_feature (17)..(78): Homolog of NCBI NO: 15214303 NR Description: Stress-related protein
  misc_feature (29)..(89): Homolog of NCBI NO: 15230002 NR Description: stress related protein, putative

SEQ ID NO: 39642 - DNA, 2407 bp, Arabidopsis thaliana
  misc_feature (1)..(2407): Ceres Seq. ID no. 13491702
  misc_feature: MA Experiment ID: 108573 Result: Up-regulated in Transcription
  misc_feature: MA Experiment 108573 PARAMETER Experiment Name: At_Drought_cDNA_P Parameter: Timepoint (hr) Value: 6
  misc_feature: MA Experiment 108573 PARAMETER Experiment Name: At_Drought_cDNA_P Parameter: Tissue Value: Aerial
  misc_feature: MA Experiment 108573 PARAMETER Experiment Name: At_Drought_cDNA_P Parameter: Treatment Value: Drought vs. No Drought
  misc_feature: MA Experiment ID: 108579 Result: Up-regulated in Transcription
  misc_feature: MA Experiment 108579 PARAMETER Experiment Name: At_4deg_Cold_cDNA_P Parameter: Temperature (deg C) Value: 4 vs. 22
  misc_feature: MA Experiment 108579 PARAMETER Experiment Name: At_4deg_Cold_cDNA_P Parameter: Timepoint (hr) Value: 6
  misc_feature: MA Experiment 108579 PARAMETER Experiment Name: At_4deg_Cold_cDNA_P Parameter: Tissue Value: Aerial
  misc_feature: MA Experiment ID: 20000112 Result: Down-regulated in Transcription
  misc_feature: MA Experiment 20000112 PARAMETER Experiment Name: At_42deg_Heat_cDNA_P Parameter: Temperature (deg C) Value: 42 vs. 22
  misc_feature: MA Experiment 20000112 PARAMETER Experiment Name: At_42deg_Heat_cDNA_P Parameter: Timepoint (hr) Value: 2
  misc_feature: MA Experiment 20000112 PARAMETER Experiment Name: At_42deg_Heat_cDNA_P Parameter: Tissue Value: Aerial
  misc_feature: MA Experiment ID: 20000144 Result: Down-regulated in Transcription
  misc_feature: MA Experiment 20000144 PARAMETER Experiment Name: At_42deg_Heat_cDNA_P Parameter: Temperature (deg C) Value: 42 vs. 22
  misc_feature: MA Experiment 20000144 PARAMETER Experiment Name: At_42deg_Heat_cDNA_P Parameter: Timepoint (hr) Value: 1
  misc_feature: MA Experiment 20000144 PARAMETER Experiment Name: At_42deg_Heat_cDNA_P Parameter: Tissue Value: Aerial
  misc_feature: MA Experiment ID: 20000171 Result: Down-regulated in Transcription
  misc_feature: MA Experiment 20000171 PARAMETER Experiment Name: At_42deg_Heat_P Parameter: Age (day) Value: 14
  misc_feature: MA Experiment 20000171 PARAMETER Experiment Name: At_42deg_Heat_P Parameter: Organism Value: A. thaliana
  misc_feature: MA Experiment 20000171 PARAMETER Experiment Name: At_42deg_Heat_P Parameter: Plant Line Value: WS
  misc_feature: MA Experiment 20000171 PARAMETER Experiment Name: At_42deg_Heat_P Parameter: Temperature (deg C) Value: 42 vs. 22
  misc_feature: MA Experiment 20000171 PARAMETER Experiment Name: At_42deg_Heat_P Parameter: Timepoint (hr) Value: 1
  misc_feature: MA Experiment 20000171 PARAMETER Experiment Name: At_42deg_Heat_P Parameter: Tissue Value: Aerial
  misc_feature: MA Experiment ID: 20000173 Result: Down-regulated in Transcription
  misc_feature: MA Experiment 20000173 PARAMETER Experiment Name: At_42deg_Heat_P Parameter: Age (day) Value: 14
  misc_feature: MA Experiment 20000173 PARAMETER Experiment Name: At_42deg_Heat_P Parameter: Organism Value: A. thaliana
  misc_feature: MA Experiment 20000173 PARAMETER Experiment Name: At_42deg_Heat_P Parameter: Plant Line Value: WS
  misc_feature: MA Experiment 20000173 PARAMETER Experiment Name: At_42deg_Heat_P Parameter: Temperature (deg C) Value: 42 vs. 22
  misc_feature: MA Experiment 20000173 PARAMETER Experiment Name: At_42deg_Heat_P Parameter: Timepoint (hr) Value: 6
  misc_feature: MA Experiment 20000173 PARAMETER Experiment Name: At_42deg_Heat_P Parameter: Tissue Value: Aerial
  misc_feature: MA Experiment ID: 20000185 Result: Up-regulated in Transcription
  misc_feature: MA Experiment 20000185 PARAMETER Experiment Name: At_Roots__P Parameter: Age (day) Value: 7 vs. 21
  misc_feature: MA Experiment 20000185 PARAMETER Experiment Name: At_Roots__P Parameter: Organism Value: A. thaliana
  misc_feature: MA Experiment 20000185 PARAMETER Experiment Name: At_Roots__P Parameter: Tissue Value: Roots vs. Whole Plant
  misc_feature: MA Experiment ID: 20000438 Result: Up-regulated in Transcription
  misc_feature: MA Experiment 20000438 PARAMETER Experiment Name: At_Shoots__P Parameter: Age (day) Value: 14
  misc_feature: MA Experiment 20000438 PARAMETER Experiment Name: At_Shoots__P Parameter: Tissue Value: Shoots vs. Whole Plant
  misc_feature: MA Experiment ID: 20000439 Result: Up-regulated in Transcription
  misc_feature: MA Experiment 20000439 PARAMETER Experiment Name: At_Roots__P Parameter: Age (day) Value: 14 vs. 21
  misc_feature: MA Experiment 20000439 PARAMETER Experiment Name: At_Roots__P Parameter: Organism Value: A. thaliana
  misc_feature: MA Experiment 20000439 PARAMETER Experiment Name: At_Roots__P Parameter: Tissue Value: Roots vs. Whole Plant
  misc_feature: MA Experiment ID: 20001247 Result: Up-regulated in Transcription
  misc_feature: MA Experiment 20001247 PARAMETER Experiment Name: At_Far-red-induction_P Parameter: Age (day) Value: 7
  misc_feature: MA Experiment 20001247 PARAMETER Experiment Name: At_Far-red-induction_P Parameter: Light Value: Far-red vs. White
  misc_feature: MA Experiment 20001247 PARAMETER Experiment Name: At_Far-red-induction_P Parameter: Organism Value: A. thaliana
  misc_feature: MA Experiment 20001247 PARAMETER Experiment Name: At_Far-red-induction_P Parameter: Plant Line Value: Columbia
  misc_feature: MA Experiment 20001247 PARAMETER Experiment Name: At_Far-red-induction_P Parameter: Timepoint (hr) Value: 1
  misc_feature: MA Experiment 20001247 PARAMETER Experiment Name: At_Far-red-induction_P Parameter: Tissue Value: Whole Plant
  misc_feature: MA Experiment ID: 20001905 Result: Up-regulated in Transcription
  misc_feature: MA Experiment 20001905 PARAMETER Experiment Name: At_Drought_Reproduction_P Parameter: Age (day) Value: 40
  misc_feature: MA Experiment 20001905 PARAMETER Experiment Name: At_Drought_Reproduction_P Parameter: Organism Value: A. thaliana
  misc_feature: MA Experiment 20001905 PARAMETER Experiment Name: At_Drought_Reproduction_P Parameter: Plant Line Value: WS
  misc_feature: MA Experiment 20001905 PARAMETER Experiment Name: At_Drought_Reproduction_P Parameter: Timepoint (day) Value: 10
  misc_feature: MA Experiment 20001905 PARAMETER Experiment Name: At_Drought_Reproduction_P Parameter: Tissue Value: Rosettes
  misc_feature: MA Experiment 20001905 PARAMETER Experiment Name: At_Drought_Reproduction_P Parameter: Treatment Value: Drought vs. No Drought
cttctgtctcatctggttttcgagagagatagagaaagtgagacaaggttaaggaggaagaagatgactgagaatcgggtggttttggctctgcttatactctgcattgttgggtttgagccaagtttcatccatggagctacggattcatcagatacttcggcgttaaacatcatgttcagctccatgaattctccaggacagctctcacaatggacagcatcaggaggtgatccttgtggccaaaactggaaaggcataacttgctctggctctcgagttacacaaataaagttaccaagtcttggactttctggatcacttggattcatgcttgataaattgacttctgttactgagtttgatatgagcaacaataaccttggaggcgatttgccttatcagcttcctccaaacttggagcgattgaatcttgctaataaccagttcactggatctgctcaatattccatttctatgatggctcctcttaagtacctcaaccttgctcacaaccagttgaagcagctagctattgacttcacaaaactcacctctctctctatattggacctctcttccaatgcttttatagggtctctcccaaacacttgtagctctcttacgagtgcaaaatcaatttatcttcagaacaatcagttctcaggcaccattgatattctagccacccttcctctcgaaaatctgaatattgcaaacaatcggttcacaggctggatccctgattctttgaaaggcattaacttgcaaaaagatggcaatttattaaattccgggcctgcacctccaccacctcctggtacaccaccgatcagtaaatcatcacctactccgaaatccgggaaccgtggaaaccgttccaatggtgattccagcaatagcaaagactccagcaaatcagggcttggagctggtggagtagcaggaatagtcatttctttgatagttgtaacagcagtcatagctttcttcttgatcaagagaaaaagatcaaagcggtcatcatccacggacattgaaaagactgataataacattaaccaacccattatactagcgtccaatgactttcatcaagagaataagtctgtacagaatccaccattggttgagacaaagaaactggatacgtcattgtcgatgaatctacgtcctccaccatctgagcgacataagtcgtttgatgacgatgattcaacaatgagaaaacctattgttgcaaagaaagctgctgttgttgttccttcaaatgtgaacacatatacggtttcagatcttcaagtagctaccaacagtttcagcgtagataatcttctcggtgaaggaacatttggaagagtatacagagctcagtttgaagatggaaaggtacttgctgtgaagaaaatcgactcatctgcgcttcccacggatactgctgatgattttaccgaaattgtatcgaaaatagcgcatttggatcacgaaaatgtcacaaagcttgatggttactgttctgaacacgggcaacacttggtggtctatgagttccatagaaacggctcattgcatgactttttacatcttgcagaagaggaaagcaaaccgttgatatggaatccccgtgtcaagatcgctcttggcactgcacgtgcattggagtacttgcatgaagtttgctcaccatctatagtccacaagaacattaaatcagcaaatattttacttgactcagagctgaatccacacctctcagactcaggtctcgctagcttccttcccactgcaaacgagctactaaaccaaaacgatgaaggatacagcgcaccagaaacttcaatgtcaggccaatactctttgaagagcgatgtttacagttttggagtagtgatgctcgagcttttaaccggaagaaaaccattcgacagcacaaggtcaagatcggaacaatcattggtaagatgggcaacacctcagcttcacgacattgatgctttgggcaaaatggttgatccagctctcaaagggctatacccggttaaatccctctcccgatttgcagatgttatcgccctttgcgtccagccggagccagagtttagaccacccatgtctgaagtggtgcaagcattggttgtattggtgcagagagctaacatgagcaagagaactgttggagtcggctccggtagctccggcgtcaatgattacatgtaaattctttacctgatgagaaccaacaaaaaaaaacataaaaatttgccctttttctcttgtctgctcggaatctggatgggacgacaacaagtgacaaccgaggacagacaaaacaaaacaaaatcctttttttctttcggtttcataaaactgatgatgagagaataacaacaacaacaacccttcacgc

SEQ ID NO: 39643 - protein, 738 aa, Arabidopsis thaliana
  peptide (1)..(738): Ceres Seq. ID no. 13491703
  misc_feature (19)..(283): Homolog of NCBI NO: 18399502 NR Description: LRR receptor protein kinase -related [Arabidopsis
  misc_feature (425)..(717): Homolog of NCBI NO: 18399502 NR Description: LRR receptor protein kinase -related [Arabidopsis
  misc_feature (63)..(715): Homolog of NCBI NO: 18399852 NR Description: leucine-rich repeat transmembrane protein kinase,
  misc_feature (124)..(720): Homolog of NCBI NO: 30017524 NR Description: putative leucine-rich repeat transmembrane
  misc_feature (42)..(722): Homolog of NCBI NO: 34906746 NR Description: similar to leucine-rich repeat transmembrane
  misc_feature (26)..(736): Homolog of NCBI NO: 7489784 NR Description: leucine-rich repeat transmembrane protein kinase
  misc_feature (49)..(723): Homolog of NCBI NO: 7489783 NR Description: leucine-rich repeat transmembrane protein kinase
  misc_feature (35)..(736): Homolog of NCBI NO: 15217283 NR Description: Putative leucine-rich repeat transmembrane
  misc_feature (29)..(736): Homolog of NCBI NO: 29367551 NR Description: putative leucine-rich repeat transmembrane
  misc_feature (22)..(738): Homolog of NCBI NO: 15220928 NR Description: leucine-rich repeat transmembrane protein kinase
LLSHLVFERDRESETRLRRKKMTENRVVLALLILCIVGFEPSFIHGATDSSDTSALNIMFSSMNSPGQLSQWTASGGDPCGQNWKGITCSGSRVTQIKLPSLGLSGSLGFMLDKLTSVTEFDMSNNNLGGDLPYQLPPNLERLNLANNQFTGSAQYSISMMAPLKYLNLAHNQLKQLAIDFTKLTSLSILDLSSNAFIGSLPNTCSSLTSAKSIYLQNNQFSGTIDILATLPLENLNIANNRFTGWIPDSLKGINLQKDGNLLNSGPAPPPPPGTPPISKSSPTPKSGNRGNRSNGDSSNSKDSSKSGLGAGGVAGIVISLIVVTAVIAFFLIKRKRSKRSSSTDIEKTDNNINQPIILASNDFHQENKSVQNPPLVETKKLDTSLSMNLRPPPSERHKSFDDDDSTMRKPIVAKKAAVVVPSNVNTYTVSDLQVATNSFSVDNLLGEGTFGRVYRAQFEDGKVLAVKKIDSSALPTDTADDFTEIVSKIAHLDHENVTKLDGYCSEHGQHLVVYEFHRNGSLHDFLHLAEEESKPLIWNPRVKIALGTARALEYLHEVCSPSIVHKNIKSANILLDSELNPHLSDSGLASFLPTANELLNQNDEGYSAPETSMSGQYSLKSDVYSFGVVMLELLTGRKPFDSTRSRSEQSLVRWATPQLHDIDALGKMVDPALKGLYPVKSLSRFADVIALCVQPEPEFRPPMSEVVQALVVLVQRANMSKRTVGVGSGSSGVNDYM

SEQ ID NO: 39644 - protein, 717 aa, Arabidopsis thaliana
  peptide (1)..(717): Ceres Seq. ID no. 13491704
  misc_feature (1)..(262): Homolog of NCBI NO: 18399502 NR Description: LRR receptor protein kinase -related [Arabidopsis
  misc_feature (404)..(696): Homolog of NCBI NO: 18399502 NR Description: LRR receptor protein kinase -related [Arabidopsis
  misc_feature (42)..(694): Homolog of NCBI NO: 18399852 NR Description: leucine-rich repeat transmembrane protein kinase,
  misc_feature (103)..(699): Homolog of NCBI NO: 30017524 NR Description: putative leucine-rich repeat transmembrane
  misc_feature (21)..(701): Homolog of NCBI NO: 34906746 NR Description: similar to leucine-rich repeat transmembrane
  misc_feature (5)..(715): Homolog of NCBI NO: 7489784 NR Description: leucine-rich repeat transmembrane protein kinase
  misc_feature (28)..(702): Homolog of NCBI NO: 7489783 NR Description: leucine-rich repeat transmembrane protein kinase
  misc_feature (14)..(715): Homolog of NCBI NO: 15217283 NR Description: Putative leucine-rich repeat transmembrane
  misc_feature (8)..(715): Homolog of NCBI NO: 29367551 NR Description: putative leucine-rich repeat transmembrane
  misc_feature (1)..(717): Homolog of NCBI NO: 15220928 NR Description: leucine-rich repeat transmembrane protein kinase
MTENRVVLALLILCIVGFEPSFIHGATDSSDTSALNIMFSSMNSPGQLSQWTASGGDPCGQNWKGITCSGSRVTQIKLPSLGLSGSLGFMLDKLTSVTEFDMSNNNLGGDLPYQLPPNLERLNLANNQFTGSAQYSISMMAPLKYLNLAHNQLKQLAIDFTKLTSLSILDLSSNAFIGSLPNTCSSLTSAKSIYLQNNQFSGTIDILATLPLENLNIANNRFTGWIPDSLKGINLQKDGNLLNSGPAPPPPPGTPPISKSSPTPKSGNRGNRSNGDSSNSKDSSKSGLGAGGVAGIVISLIVVTAVIAFFLIKRKRSKRSSSTDIEKTDNNINQPIILASNDFHQENKSVQNPPLVETKKLDTSLSMNLRPPPSERHKSFDDDDSTMRKPIVAKKAAVVVPSNVNTYTVSDLQVATNSFSVDNLLGEGTFGRVYRAQFEDGKVLAVKKIDSSALPTDTADDFTEIVSKIAHLDHENVTKLDGYCSEHGQHLVVYEFHRNGSLHDFLHLAEEESKPLIWNPRVKIALGTARALEYLHEVCSPSIVHKNIKSANILLDSELNPHLSDSGLASFLPTANELLNQNDEGYSAPETSMSGQYSLKSDVYSFGVVMLELLTGRKPFDSTRSRSEQSLVRWATPQLHDIDALGKMVDPALKGLYPVKSLSRFADVIALCVQPEPEFRPPMSEVVQALVVLVQRANMSKRTVGVGSGSSGVNDYM

SEQ ID NO: 39645 - protein, 680 aa, Arabidopsis thaliana
  peptide (1)..(680): Ceres Seq. ID no. 13491705
  misc_feature (1)..(225): Homolog of NCBI NO: 18399502 NR Description: LRR receptor protein kinase -related [Arabidopsis
  misc_feature (367)..(659): Homolog of NCBI NO: 18399502 NR Description: LRR receptor protein kinase -related [Arabidopsis
  misc_feature (5)..(657): Homolog of NCBI NO: 18399852 NR Description: leucine-rich repeat transmembrane protein kinase,
  misc_feature (66)..(662): Homolog of NCBI NO: 30017524 NR Description: putative leucine-rich repeat transmembrane
  misc_feature (1)..(664): Homolog of NCBI NO: 34906746 NR Description: similar to leucine-rich repeat transmembrane
  misc_feature (1)..(678): Homolog of NCBI NO: 7489784 NR Description: leucine-rich repeat transmembrane protein kinase
  misc_feature (1)..(665): Homolog of NCBI NO: 7489783 NR Description: leucine-rich repeat transmembrane protein kinase
  misc_feature (1)..(678): Homolog of NCBI NO: 15217283 NR Description: Putative leucine-rich repeat transmembrane
  misc_feature (1)..(678): Homolog of NCBI NO: 29367551 NR Description: putative leucine-rich repeat transmembrane
  misc_feature (1)..(680): Homolog of NCBI NO: 15220928 NR Description: leucine-rich repeat transmembrane protein kinase
MFSSMNSPGQLSQWTASGGDPCGQNWKGITCSGSRVTQIKLPSLGLSGSLGFMLDKLTSVTEFDMSNNNLGGDLPYQLPPNLERLNLANNQFTGSAQYSISMMAPLKYLNLAHNQLKQLAIDFTKLTSLSILDLSSNAFIGSLPNTCSSLTSAKSIYLQNNQFSGTIDILATLPLENLNIANNRFTGWIPDSLKGINLQKDGNLLNSGPAPPPPPGTPPISKSSPTPKSGNRGNRSNGDSSNSKDSSKSGLGAGGVAGIVISLIVVTAVIAFFLIKRKRSKRSSSTDIEKTDNNINQPIILASNDFHQENKSVQNPPLVETKKLDTSLSMNLRPPPSERHKSFDDDDSTMRKPIVAKKAAVVVPSNVNTYTVSDLQVATNSFSVDNLLGEGTFGRVYRAQFEDGKVLAVKKIDSSALPTDTADDFTEIVSKIAHLDHENVTKLDGYCSEHGQHLVVYEFHRNGSLHDFLHLAEEESKPLIWNPRVKIALGTARALEYLHEVCSPSIVHKNIKSANILLDSELNPHLSDSGLASFLPTANELLNQNDEGYSAPETSMSGQYSLKSDVYSFGVVMLELLTGRKPFDSTRSRSEQSLVRWATPQLHDIDALGKMVDPALKGLYPVKSLSRFADVIALCVQPEPEFRPPMSEVVQALVVLVQRANMSKRTVGVGSGSSGVNDYM

SEQ ID NO: 39646 - DNA, 2101 bp, Arabidopsis thaliana
  misc_feature (1)..(2101): Ceres Seq. ID no. 12326823
  misc_feature: MA Experiment ID: 108561 Result: Up-regulated in Transcription
  misc_feature: MA Experiment 108561 PARAMETER Experiment Name: At_100uM_ABA_cDNA_P Parameter: Timepoint (hr) Value: 6
  misc_feature: MA Experiment 108561 PARAMETER Experiment Name: At_100uM_ABA_cDNA_P Parameter: Tissue Value: Aerial
  misc_feature: MA Experiment 108561 PARAMETER Experiment Name: At_100uM_ABA_cDNA_P Parameter: Treatment Value: 100uM ABA vs. No Treatment
  misc_feature: MA Experiment ID: 108572 Result: Down-regulated in Transcription
  misc_feature: MA Experiment 108572 PARAMETER Experiment Name: At_Drought_cDNA_P Parameter: Timepoint (hr) Value: 1
  misc_feature: MA Experiment 108572 PARAMETER Experiment Name: At_Drought_cDNA_P Parameter: Tissue Value: Aerial
  misc_feature: MA Experiment 108572 PARAMETER Experiment Name: At_Drought_cDNA_P Parameter: Treatment Value: Drought vs. No Drought
  misc_feature: MA Experiment ID: 108576 Result: Down-regulated in Transcription
  misc_feature: MA Experiment 108576 PARAMETER Experiment Name: At_42deg_Heat_cDNA_P Parameter: Temperature (deg C) Value: 42 vs. 22
  misc_feature: MA Experiment 108576 PARAMETER Experiment Name: At_42deg_Heat_cDNA_P Parameter: Timepoint (hr) Value: 1
  misc_feature: MA Experiment 108576 PARAMETER Experiment Name: At_42deg_Heat_cDNA_P Parameter: Tissue Value: Aerial
  misc_feature: MA Experiment ID: 108579 Result: Down-regulated in Transcription
  misc_feature: MA Experiment 108579 PARAMETER Experiment Name: At_4deg_Cold_cDNA_P Parameter: Temperature (deg C) Value: 4 vs. 22
  misc_feature: MA Experiment 108579 PARAMETER Experiment Name: At_4deg_Cold_cDNA_P Parameter: Timepoint (hr) Value: 6
  misc_feature: MA Experiment 108579 PARAMETER Experiment Name: At_4deg_Cold_cDNA_P Parameter: Tissue Value: Aerial
  misc_feature: MA Experiment ID: 108595 Result: Down-regulated in Transcription
  misc_feature: MA Experiment 108595 PARAMETER Experiment Name: At_Ler-pi_Ovule_cDNA_P Parameter: Plant Line Value: null
attttctctcaattcctcgcagctgaagctatttggcatatacttgtcttcgcttttcgtagctctttcgcgcataataataactgaggttgttgtttaatcaagaagagtgtgcaaaaattggaaggccagggaatgcagaaacatgtatttgaaagctgaactcaattgctctacaccaccctctcagatcctttgtccctttgggcccttgttctccctcatcccttatgtggacacccattttctaaacccctgcttccacaacttccagccttcctctcacaatgctagaaaaaacgccacttggaagcatgatctttgcgaagacggttgatccgacactaacagcctcctcctgagttcctcctctaccctttatgttgtctgcgttttagtatattctagggtggtctttttatttagtggtattagtagtgctctaagctaaccagttagtcaatggagaagaaaggatctgtgttgatgctccgttatgaggttgggaagtttctcggtcaaggtacctttgctaaggtataccatgctaggcatttgaaaactggtgatagtgtagcgattaaggtcatcgacaaagaaagaatcctcaaagttggcatgaccgagcagattaagcgagagatctctgccatgagactcttgaggcatcccaacatcgttgagctccatgaagtcatggccaccaaatctaaaatctacttcgtcatggaacatgttaagggtggtgagctcttcaacaaagtgtcaactgggaagctgagagaagacgttgcgagaaagtactttcagcagcttgtacgcgctgttgacttctgtcacagccgtggagtatgccacagggacctgaagccggagaatctcttgttggatgagcatgggaatcttaagatctctgattttggtctcagcgctctttctgactctagaaggcaagacgggttgctgcatactacatgcgggacccctacatattgtgcaccggaggtgataagcaggaacgggtatgatgggtttaaagcggatgtgtggtcctgtggagtgatattgttcgtcttgctcgctggatatcttcctttccgtgattccaatctgatggagctgtataagaagataggcaaagctgaagtcaagttccccaactggcttgctccgggggcaaagagattgctcaagaggatcttggatcctaaccccaacacaagggtatcaactgagaaaataatgaagagctcttggttccgtaaaggcctacaagaggaggtgaaagaatcagttgaggaagagacagaagtggacgcagaggcagagggaaacgcaagtgcagagaaggaaaagaagcggtgtatcaacctgaacgcgtttgagatcatatctctgtccacggggtttgatctctcgggactgttcgagaagggagaggagaaggaggagatgaggtttacatcaaacagagaggcatctgagataacagagaagctggtggagattgggaaggaccttaagatgaaagtgaggaagaaggaacacgaatggagggtgaaaatgtcggctgaggctacagtggtggaagcggaagtgtttgagattgcgccgagctatcacatggtggtgctaaagaagagcggtggagatactgctgagtataagagagtcatgaaggagagtataagaccggctttgatcgactttgtattagcttggcactgaaacatattctatcctttttatgtgtcttcttcttttagaatgtttttcttgttttgttttgccaatgtgtttagtttatgtattttctcttgagtctcatcttaagacgtgtttcgtatttttctaggtgtcagtgtaacaatagtaatatgtgaggaccaattatatagtttgagacaaaataagtagatttctttatcagataaaataaaataaattgagccttaatgaaataagccaatagaccgacaacggttttaggaagcattatactactattttgtagttatttcgtattattgtagtcttttggatgatcctttttgtgtattaacaaagtcaaaacaaatttataatttaccttacggtacag

SEQ ID NO: 39647 - protein, 421 aa, Arabidopsis thaliana
  peptide (1)..(421): Ceres Seq. ID no. 12326824
  misc_feature (12)..(266): Pfam Name: Protein kinase domain Pfam Description: Protein kinase domain
  misc_feature (1)..(421): Homolog of NCBI NO: 34903780 NR Description: unnamed protein product [Oryza sativa (japonica
  misc_feature (303)..(420): Homolog of NCBI NO: 18424099 NR Description: serine/threonine protein kinase
  misc_feature (1)..(290): Homolog of NCBI NO: 18424099 NR Description: serine/threonine protein kinase
  misc_feature (1)..(420): Homolog of NCBI NO: 15240687 NR Description: serine threonine protein kinase-like protein
  misc_feature (1)..(420): Homolog of NCBI NO: 9280636 NR Description: CBL-interacting protein kinase 2 [Arabidopsis
  misc_feature (1)..(420): Homolog of NCBI NO: 8777339 NR Description: serine/threonine protein kinase [Arabidopsis
  misc_feature (1)..(420): Homolog of NCBI NO: 23428550 NR Description: Serine/threonine Kinase [Persea americana]
  misc_feature (2)..(420): Homolog of NCBI NO: 33146431 NR Description: putative Serine/threonine Kinase
  misc_feature (1)..(421): Homolog of NCBI NO: 15241066 NR Description: serine/threonine protein kinase ATPK10
  misc_feature (1)..(421): Homolog of NCBI NO: 1777312 NR Description: novel serine/threonine protein kinase
MEKKGSVLMLRYEVGKFLGQGTFAKVYHARHLKTGDSVAIKVIDKERILKVGMTEQIKREISAMRLLRHPNIVELHEVMATKSKIYFVMEHVKGGELFNKVSTGKLREDVARKYFQQLVRAVDFCHSRGVCHRDLKPENLLLDEHGNLKISDFGLSALSDSRRQDGLLHTTCGTPTYCAPEVISRNGYDGFKADVWSCGVILFVLLAGYLPFRDSNLMELYKKIGKAEVKFPNWLAPGAKRLLKRILDPNPNTRVSTEKIMKSSWFRKGLQEEVKESVEEETEVDAEAEGNASAEKEKKRCINLNAFEIISLSTGFDLSGLFEKGEEKEEMRFTSNREASEITEKLVEIGKDLKMKVRKKEHEWRVKMSAEATVVEAEVFEIAPSYHMVVLKKSGGDTAEYKRVMKESIRPALIDFVLAWH

SEQ ID NO: 39648 - protein, 413 aa, Arabidopsis thaliana
  peptide (1)..(413): Ceres Seq. ID no. 12326825
  misc_feature (4)..(258): Pfam Name: Protein kinase domain Pfam Description: Protein kinase domain
  misc_feature (1)..(413): Homolog of NCBI NO: 34903780 NR Description: unnamed protein product [Oryza sativa (japonica
  misc_feature (295)..(412): Homolog of NCBI NO: 18424099 NR Description: serine/threonine protein kinase
  misc_feature (1)..(282): Homolog of NCBI NO: 18424099 NR Description: serine/threonine protein kinase
  misc_feature (1)..(412): Homolog of NCBI NO: 15240687 NR Description: serine threonine protein kinase-like protein
  misc_feature (1)..(412): Homolog of NCBI NO: 9280636 NR Description: CBL-interacting protein kinase 2 [Arabidopsis
  misc_feature (1)..(412): Homolog of NCBI NO: 8777339 NR Description: serine/threonine protein kinase [Arabidopsis
  misc_feature (1)..(412): Homolog of NCBI NO: 23428550 NR Description: Serine/threonine Kinase [Persea americana]
  misc_feature (1)..(412): Homolog of NCBI NO: 33146431 NR Description: putative Serine/threonine Kinase
  misc_feature (1)..(413): Homolog of NCBI NO: 15241066 NR Description: serine/threonine protein kinase ATPK10
  misc_feature (1)..(413): Homolog of NCBI NO: 1777312 NR Description: novel serine/threonine protein kinase
MLRYEVGKFLGQGTFAKVYHARHLKTGDSVAIKVIDKERILKVGMTEQIKREISAMRLLRHPNIVELHEVMATKSKIYFVMEHVKGGELFNKVSTGKLREDVARKYFQQLVRAVDFCHSRGVCHRDLKPENLLLDEHGNLKISDFGLSALSDSRRQDGLLHTTCGTPTYCAPEVISRNGYDGFKADVWSCGVILFVLLAGYLPFRDSNLMELYKKIGKAEVKFPNWLAPGAKRLLKRILDPNPNTRVSTEKIMKSSWFRKGLQEEVKESVEEETEVDAEAEGNASAEKEKKRCINLNAFEIISLSTGFDLSGLFEKGEEKEEMRFTSNREASEITEKLVEIGKDLKMKVRKKEHEWRVKMSAEATVVEAEVFEIAPSYHMVVLKKSGGDTAEYKRVMKESIRPALIDFVLAWH

SEQ ID NO: 39649 - protein, 369 aa, Arabidopsis thaliana
  peptide (1)..(369): Ceres Seq. ID no. 12326826
  misc_feature (1)..(214): Pfam Name: Protein kinase domain Pfam Description: Protein kinase domain
  misc_feature (1)..(369): Homolog of NCBI NO: 34903780 NR Description: unnamed protein product [Oryza sativa (japonica
  misc_feature (251)..(368): Homolog of NCBI NO: 18424099 NR Description: serine/threonine protein kinase
  misc_feature (1)..(238): Homolog of NCBI NO: 18424099 NR Description: serine/threonine protein kinase
  misc_feature (1)..(368): Homolog of NCBI NO: 15240687 NR Description: serine threonine protein kinase-like protein
  misc_feature (1)..(368): Homolog of NCBI NO: 9280636 NR Description: CBL-interacting protein kinase 2 [Arabidopsis
  misc_feature (1)..(368): Homolog of NCBI NO: 8777339 NR Description: serine/threonine protein kinase [Arabidopsis
  misc_feature (1)..(368): Homolog of NCBI NO: 23428550 NR Description: Serine/threonine Kinase [Persea americana]
  misc_feature (1)..(368): Homolog of NCBI NO: 33146431 NR Description: putative Serine/threonine Kinase
  misc_feature (1)..(369): Homolog of NCBI NO: 15241066 NR Description: serine/threonine protein kinase ATPK10
  misc_feature (1)..(369): Homolog of NCBI NO: 1777312 NR Description: novel serine/threonine protein kinase
MTEQIKREISAMRLLRHPNIVELHEVMATKSKIYFVMEHVKGGELFNKVSTGKLREDVARKYFQQLVRAVDFCHSRGVCHRDLKPENLLLDEHGNLKISDFGLSALSDSRRQDGLLHTTCGTPTYCAPEVISRNGYDGFKADVWSCGVILFVLLAGYLPFRDSNLMELYKKIGKAEVKFPNWLAPGAKRLLKRILDPNPNTRVSTEKIMKSSWFRKGLQEEVKESVEEETEVDAEAEGNASAEKEKKRCINLNAFEIISLSTGFDLSGLFEKGEEKEEMRFTSNREASEITEKLVEIGKDLKMKVRKKEHEWRVKMSAEATVVEAEVFEIAPSYHMVVLKKSGGDTAEYKRVMKESIRPALIDFVLAWH

SEQ ID NO: 39650 - DNA, 1336 bp, Arabidopsis thaliana
  misc_feature (1)..(1336): Ceres Seq. ID no. 13488801
  misc_feature: MA Experiment ID: 108434 Result: Up-regulated in Transcription
  misc_feature: MA Experiment 108434 PARAMETER Experiment Name: At_Root_Tips_cDNA_P Parameter: Tissue Value: Root Tips
  misc_feature: MA Experiment ID: 108469 Result: Up-regulated in Transcription
  misc_feature: MA Experiment ID: 108488 Result: Down-regulated in Transcription
  misc_feature: MA Experiment ID: 108573 Result: Up-regulated in Transcription
  misc_feature: MA Experiment 108573 PARAMETER Experiment Name: At_Drought_cDNA_P Parameter: Timepoint (hr) Value: 6
  misc_feature: MA Experiment 108573 PARAMETER Experiment Name: At_Drought_cDNA_P Parameter: Tissue Value: Aerial
  misc_feature: MA Experiment 108573 PARAMETER Experiment Name: At_Drought_cDNA_P Parameter: Treatment Value: Drought vs. No Drought
  misc_feature: MA Experiment ID: 108585 Result: Up-regulated in Transcription
  misc_feature: MA Experiment 108585 PARAMETER Experiment Name: At_5mM_NaNP_cDNA_P Parameter: Timepoint (hr) Value: 6
  misc_feature: MA Experiment 108585 PARAMETER Experiment Name: At_5mM_NaNP_cDNA_P Parameter: Tissue Value: Aerial
  misc_feature: MA Experiment 108585 PARAMETER Experiment Name: At_5mM_NaNP_cDNA_P Parameter: Treatment Value: null
  misc_feature: MA Experiment ID: 108595 Result: Down-regulated in Transcription
  misc_feature: MA Experiment 108595 PARAMETER Experiment Name: At_Ler-pi_Ovule_cDNA_P Parameter: Plant Line Value: null
  misc_feature: MA Experiment ID: 108668 Result: Up-regulated in Transcription
  misc_feature: MA Experiment 108668 PARAMETER Experiment Name: At_2mM_SA_cDNA_P Parameter: Plant Line Value: WS
  misc_feature: MA Experiment 108668 PARAMETER Experiment Name: At_2mM_SA_cDNA_P Parameter: Timepoint (hr) Value: 6
  misc_feature: MA Experiment 108668 PARAMETER Experiment Name: At_2mM_SA_cDNA_P Parameter: Treatment Value: 2mM SA vs. No Treatment
  misc_feature: MA Experiment ID: 20000182 Result: Up-regulated in Transcription
  misc_feature: MA Experiment 20000182 PARAMETER Experiment Name: At_2mM_SA_P Parameter: Age (day) Value: 14
  misc_feature: MA Experiment 20000182 PARAMETER Experiment Name: At_2mM_SA_P Parameter: Organism Value: A. thaliana
  misc_feature: MA Experiment 20000182 PARAMETER Experiment Name: At_2mM_SA_P Parameter: Plant Line Value: WS
  misc_feature: MA Experiment 20000182 PARAMETER Experiment Name: At_2mM_SA_P Parameter: Timepoint (hr) Value: 6
  misc_feature: MA Experiment 20000182 PARAMETER Experiment Name: At_2mM_SA_P Parameter: Tissue Value: Aerial
  misc_feature: MA Experiment 20000182 PARAMETER Experiment Name: At_2mM_SA_P Parameter: Treatment Value: 2mM SA vs. No Treatment
  misc_feature: MA Experiment ID: 20000184 Result: Down-regulated in Transcription
  misc_feature: MA Experiment 20000184 PARAMETER Experiment Name: At_Shoots__P Parameter: Age (day) Value: 7
  misc_feature: MA Experiment 20000184 PARAMETER Experiment Name: At_Shoots__P Parameter: Tissue Value: Shoots vs. Whole Plant
  misc_feature: MA Experiment ID: 20000214 Result: Down-regulated in Transcription
  misc_feature: MA Experiment 20000214 PARAMETER Experiment Name: At_4deg_Cold_P Parameter: Timepoint (hr) Value: 6
  misc_feature: MA Experiment ID: 20000227 Result: Up-regulated in Transcription
  misc_feature: MA Experiment 20000227 PARAMETER Experiment Name: At_Root-Tips-vs-Tops_P Parameter: Tissue Value: Root Tips vs. Root Tops
  misc_feature: MA Experiment ID: 20000234 Result: Down-regulated in Transcription
  misc_feature: MA Experiment 20000234 PARAMETER Experiment Name: At_Siliques_P Parameter: Age (day) Value: 21
  misc_feature: MA Experiment 20000234 PARAMETER Experiment Name: At_Siliques_P Parameter: Organism Value: A. thaliana
  misc_feature: MA Experiment 20000234 PARAMETER Experiment Name: At_Siliques_P Parameter: Plant Line Value: WS
  misc_feature: MA Experiment 20000234 PARAMETER Experiment Name: At_Siliques_P Parameter: Tissue Value: Less Than 5mm Siliques vs. Whole Plant
  misc_feature: MA Experiment ID: 20000235 Result: Down-regulated in Transcription
  misc_feature: MA Experiment 20000235 PARAMETER Experiment Name: At_Siliques_P Parameter: Age (day) Value: 21
  misc_feature: MA Experiment 20000235 PARAMETER Experiment Name: At_Siliques_P Parameter: Organism Value: A. thaliana
  misc_feature: MA Experiment 20000235 PARAMETER Experiment Name: At_Siliques_P Parameter: Plant Line Value: WS
  misc_feature: MA Experiment 20000235 PARAMETER Experiment Name: At_Siliques_P Parameter: Tissue Value: 5-10mm Siliques vs. Whole Plant
  misc_feature: MA Experiment ID: 20000437 Result: Up-regulated in Transcription
  misc_feature: MA Experiment 20000437 PARAMETER Experiment Name: At_Drought_P Parameter: Age (day) Value: 8
  misc_feature: MA Experiment 20000437 PARAMETER Experiment Name: At_Drought_P Parameter: Organism Value: A. thaliana
  misc_feature: MA Experiment 20000437 PARAMETER Experiment Name: At_Drought_P Parameter: Plant Line Value: WS
  misc_feature: MA Experiment 20000437 PARAMETER Experiment Name: At_Drought_P Parameter: Timepoint (hr) Value: 24
  misc_feature: MA Experiment 20000437 PARAMETER Experiment Name: At_Drought_P Parameter: Tissue Value: Whole Plant
  misc_feature: MA Experiment 20000437 PARAMETER Experiment Name: At_Drought_P Parameter: Treatment Value: Drought vs. No Drought
  misc_feature: MA Experiment ID: 20001248 Result: Up-regulated in Transcription
  misc_feature: MA Experiment 20001248 PARAMETER Experiment Name: At_Far-red-induction_P Parameter: Age (day) Value: 7
  misc_feature: MA Experiment 20001248 PARAMETER Experiment Name: At_Far-red-induction_P Parameter: Light Value: Far-red vs. White
  misc_feature: MA Experiment 20001248 PARAMETER Experiment Name: At_Far-red-induction_P Parameter: Organism Value: A. thaliana
  misc_feature: MA Experiment 20001248 PARAMETER Experiment Name: At_Far-red-induction_P Parameter: Plant Line Value: Columbia
  misc_feature: MA Experiment 20001248 PARAMETER Experiment Name: At_Far-red-induction_P Parameter: Timepoint (hr) Value: 4
  misc_feature: MA Experiment 20001248 PARAMETER Experiment Name: At_Far-red-induction_P Parameter: Tissue Value: Whole Plant
  misc_feature: MA Experiment ID: 20001450 Result: Up-regulated in Transcription
  misc_feature: MA Experiment 20001450 PARAMETER Experiment Name: At_Far-red-induction_P Parameter: Age (day) Value: 7
  misc_feature: MA Experiment 20001450 PARAMETER Experiment Name: At_Far-red-induction_P Parameter: Light Value: Far-red vs. White
  misc_feature: MA Experiment 20001450 PARAMETER Experiment Name: At_Far-red-induction_P Parameter: Organism Value: A. thaliana
  misc_feature: MA Experiment 20001450 PARAMETER Experiment Name: At_Far-red-induction_P Parameter: Plant Line Value: Columbia
  misc_feature: MA Experiment 20001450 PARAMETER Experiment Name: At_Far-red-induction_P Parameter: Timepoint (hr) Value: 8
  misc_feature: MA Experiment 20001450 PARAMETER Experiment Name: At_Far-red-induction_P Parameter: Tissue Value: Whole Plant
  misc_feature: MA Experiment ID: 20001451 Result: Up-regulated in Transcription
  misc_feature: MA Experiment 20001451 PARAMETER Experiment Name: At_Far-red-induction_P Parameter: Age (day) Value: 7
  misc_feature: MA Experiment 20001451 PARAMETER Experiment Name: At_Far-red-induction_P Parameter: Light Value: Far-red vs. White
  misc_feature: MA Experiment 20001451 PARAMETER Experiment Name: At_Far-red-induction_P Parameter: Organism Value: A. thaliana
  misc_feature: MA Experiment 20001451 PARAMETER Experiment Name: At_Far-red-induction_P Parameter: Plant Line Value: Columbia
  misc_feature: MA Experiment 20001451 PARAMETER Experiment Name: At_Far-red-induction_P Parameter: Timepoint (hr) Value: 24
  misc_feature: MA Experiment 20001451 PARAMETER Experiment Name: At_Far-red-induction_P Parameter: Tissue Value: Whole Plant
ctcagctaaagagagaaagagaagcaccatttttctttctcgtcgtgtcatcgttttctcagattcctgaataatcattcccttccgattccaaaatccccaaacctcatccactcctccatctcccggattcggattcccagaatcatgcccatggagaacgacaatggcccacacgttggcaacgtcgtcgtcaccgctgagcaagcgaccaagattaacgagactgatggacggttgccggagaatcggcagaccggtgttgtctctgacaccggaagtggtagcgagagaggagagcaaggggttggagagtcggcagttgctgtggcggtgccggtggaggagagcggatcgatttcggtgggagagctacctgctccccgatcttcctctgctagagttccgtttactaatctaagccaaattgatgcggatcttgctcttgctcgcacactccaagaacaggagcgggcgtatatgatgttgaccatgaatagtgaaatcagtgactatgggagctgggaaactggaagctatgtatacgatgaggatgagtttgatgaccccgagaatgaggatgaggatgatgatgaagatgaatatgaaacagatgatgatcctcaggaagatgggcttgatgtcaatgtgcacgccaatgaagatgatcaagaagatgacggtaactctgacattgaagaagttgcttatacagatgatgaggcctatgctagagctcttcaagaagctgaagaaagggatatggctgctagattgtctgccttatctgggttagcaaaccgggtggttgaagatctagaggatgagagtcatacttctcaggatgcctgggatgagatggatcctgatgagctttcatatgaggagttgcttgcacttggcgacattgtgggaaccgaaagtagaggattgtctgctgatacaattgcatctttgccttcaaaaagatataaagaaggagacaatcagaacggaaccaatgagtcatgtgttatatgtcgtttagactatgaggatgacgaagacctgatactgctcccatgcaaacattcttaccactcggagtgcataaacaactggttgaagataaacaaggtttgccccgtatgcagtgcagaagtttcaacttcgacctctggacaaagctgatgaggcaaaggaagaaagattcagaaagaatcataagctaagaacttcaaaaccttagctgcctgtttgtacacttcttataaacaaaataacatcatcagatttccttggatcctttaaaaaatctcaaagattggaacattctcaagcgtttttagtttttgcc

SEQ ID NO: 39651 - protein, 340 aa, Arabidopsis thaliana
  peptide (1)..(340): Ceres Seq. ID no. 13488802
  misc_feature (288)..(328): Pfam Name: Zinc finger, C3HC4 type (RING finger) Pfam Description: Zinc finger, C3HC4 type (RING finger)
  misc_feature (238)..(331): Homolog of NCBI NO: 8777490 NR Description: RING-finger protein (C-terminal)-like
  misc_feature (238)..(331): Homolog of NCBI NO: 18400621 NR Description: zinc finger (C3HC4-type RING finger) protein
  misc_feature (230)..(328): Homolog of NCBI NO: 11358785 NR Description: RING-H2 finger protein RHG1a
  misc_feature (160)..(332): Homolog of NCBI NO: 34898016 NR Description: ESTs C26000(C11448),AU082130(C11448) correspond a region of the predicted gene.~Similar to mRNA for zinc-finger
  misc_feature (191)..(332): Homolog of NCBI NO: 38567912 NR Description: OSJNBa0088I22.8 [Oryza sativa (japonica
  misc_feature (172)..(335): Homolog of NCBI NO: 15232746 NR Description: zinc-finger protein-related protein [Arabidopsis
  misc_feature (225)..(332): Homolog of NCBI NO: 22331928 NR Description: zinc finger (C3HC4-type RING finger) protein
  misc_feature (117)..(340): Homolog of NCBI NO: 10334499 NR Description: hypothetical protein [Cicer arietinum]
  misc_feature (1)..(340): Homolog of NCBI NO: 21536693 NR Description: unknown [Arabidopsis thaliana]
  misc_feature (1)..(340): Homolog of NCBI NO: 18402411 NR Description: zinc finger (C3HC4-type RING finger) protein
MPMENDNGPHVGNVVVTAEQATKINETDGRLPENRQTGVVSDTGSGSERGEQGVGESAVAVAVPVEESGSISVGELPAPRSSSARVPFTNLSQIDADLALARTLQEQERAYMMLTMNSEISDYGSWETGSYVYDEDEFDDPENEDEDDDEDEYETDDDPQEDGLDVNVHANEDDQEDDGNSDIEEVAYTDDEAYARALQEAEERDMAARLSALSGLANRVVEDLEDESHTSQDAWDEMDPDELSYEELLALGDIVGTESRGLSADTIASLPSKRYKEGDNQNGTNESCVICRLDYEDDEDLILLPCKHSYHSECINNWLKINKVCPVCSAEVSTSTSGQS

SEQ ID NO: 39652 - protein, 338 aa, Arabidopsis thaliana
  peptide (1)..(338): Ceres Seq. ID no. 13488803
  misc_feature (286)..(326): Pfam Name: Zinc finger, C3HC4 type (RING finger) Pfam Description: Zinc finger, C3HC4 type (RING finger)
  misc_feature (236)..(329): Homolog of NCBI NO: 8777490 NR Description: RING-finger protein (C-terminal)-like
  misc_feature (236)..(329): Homolog of NCBI NO: 18400621 NR Description: zinc finger (C3HC4-type RING finger) protein
  misc_feature (228)..(326): Homolog of NCBI NO: 11358785 NR Description: RING-H2 finger protein RHG1a
  misc_feature (158)..(330): Homolog of NCBI NO: 34898016 NR Description: ESTs C26000(C11448),AU082130(C11448) correspond a region of the predicted gene.~Similar to mRNA for zinc-finger
  misc_feature (189)..(330): Homolog of NCBI NO: 38567912 NR Description: OSJNBa0088I22.8 [Oryza sativa (japonica
  misc_feature (170)..(333): Homolog of NCBI NO: 15232746 NR Description: zinc-finger protein-related protein [Arabidopsis
  misc_feature (223)..(330): Homolog of NCBI NO: 22331928 NR Description: zinc finger (C3HC4-type RING finger) protein
  misc_feature (115)..(338): Homolog of NCBI NO: 10334499 NR Description: hypothetical protein [Cicer arietinum]
  misc_feature (1)..(338): Homolog of NCBI NO: 21536693 NR Description: unknown [Arabidopsis thaliana]
  misc_feature (1)..(338): Homolog of NCBI NO: 18402411 NR Description: zinc finger (C3HC4-type RING finger) protein
MENDNGPHVGNVVVTAEQATKINETDGRLPENRQTGVVSDTGSGSERGEQGVGESAVAVAVPVEESGSISVGELPAPRSSSARVPFTNLSQIDADLALARTLQEQERAYMMLTMNSEISDYGSWETGSYVYDEDEFDDPENEDEDDDEDEYETDDDPQEDGLDVNVHANEDDQEDDGNSDIEEVAYTDDEAYARALQEAEERDMAARLSALSGLANRVVEDLEDESHTSQDAWDEMDPDELSYEELLALGDIVGTESRGLSADTIASLPSKRYKEGDNQNGTNESCVICRLDYEDDEDLILLPCKHSYHSECINNWLKINKVCPVCSAEVSTSTSGQS

SEQ ID NO: 39653 - protein, 229 aa, Arabidopsis thaliana
  peptide (1)..(229): Ceres Seq. ID no. 13488804
  misc_feature (177)..(217): Pfam Name: Zinc finger, C3HC4 type (RING finger) Pfam Description: Zinc finger, C3HC4 type (RING finger)
  misc_feature (127)..(220): Homolog of NCBI NO: 8777490 NR Description: RING-finger protein (C-terminal)-like
  misc_feature (127)..(220): Homolog of NCBI NO: 18400621 NR Description: zinc finger (C3HC4-type RING finger) protein
  misc_feature (119)..(217): Homolog of NCBI NO: 11358785 NR Description: RING-H2 finger protein RHG1a
  misc_feature (49)..(221): Homolog of NCBI NO: 34898016 NR Description: ESTs C26000(C11448),AU082130(C11448) correspond a region of the predicted gene.~Similar to mRNA for zinc-finger
  misc_feature (80)..(221): Homolog of NCBI NO: 38567912 NR Description: OSJNBa0088I22.8 [Oryza sativa (japonica
  misc_feature (61)..(224): Homolog of NCBI NO: 15232746 NR Description: zinc-finger protein-related protein [Arabidopsis
  misc_feature (114)..(221): Homolog of NCBI NO: 22331928 NR Description: zinc finger (C3HC4-type RING finger) protein
  misc_feature (6)..(229): Homolog of NCBI NO: 10334499 NR Description: hypothetical protein [Cicer arietinum]
  misc_feature (1)..(229): Homolog of NCBI NO: 21536693 NR Description: unknown [Arabidopsis thaliana]
  misc_feature (1)..(229): Homolog of NCBI NO: 18402411 NR Description: zinc finger (C3HC4-type RING finger) protein
MMLTMNSEISDYGSWETGSYVYDEDEFDDPENEDEDDDEDEYETDDDPQEDGLDVNVHANEDDQEDDGNSDIEEVAYTDDEAYARALQEAEERDMAARLSALSGLANRVVEDLEDESHTSQDAWDEMDPDELSYEELLALGDIVGTESRGLSADTIASLPSKRYKEGDNQNGTNESCVICRLDYEDDEDLILLPCKHSYHSECINNWLKINKVCPVCSAEVSTSTSGQS

SEQ ID NO: 39654 - DNA, 1613 bp, Arabidopsis thaliana
  misc_feature (1)..(1613): Ceres Seq. ID no. 13489349
  misc_feature: MA Experiment ID: 108461 Result: Up-regulated in Transcription
  misc_feature: MA Experiment 108461 PARAMETER Experiment Name: At_Germinating_Seeds_cDNA_P Parameter: Age (day) Value: 1 vs. 0
  misc_feature: MA Experiment 108461 PARAMETER Experiment Name: At_Germinating_Seeds_cDNA_P Parameter: Tissue Value: Germinating Seeds
  misc_feature: MA Experiment ID: 108462 Result: Up-regulated in Transcription
  misc_feature: MA Experiment 108462 PARAMETER Experiment Name: At_Germinating_Seeds_cDNA_P Parameter: Age (day) Value: 2 vs. 0
  misc_feature: MA Experiment 108462 PARAMETER Experiment Name: At_Germinating_Seeds_cDNA_P Parameter: Tissue Value: Germinating Seeds
  misc_feature: MA Experiment ID: 108463 Result: Up-regulated in Transcription
  misc_feature: MA Experiment 108463 PARAMETER Experiment Name: At_Germinating_Seeds_cDNA_P Parameter: Age (day) Value: 3 vs. 0
  misc_feature: MA Experiment 108463 PARAMETER Experiment Name: At_Germinating_Seeds_cDNA_P Parameter: Tissue Value: Germinating Seeds
  misc_feature: MA Experiment ID: 108464 Result: Up-regulated in Transcription
  misc_feature: MA Experiment 108464 PARAMETER Experiment Name: At_Germinating_Seeds_cDNA_P Parameter: Age (day) Value: 4 vs. 0
  misc_feature: MA Experiment 108464 PARAMETER Experiment Name: At_Germinating_Seeds_cDNA_P Parameter: Tissue Value: Germinating Seeds
  misc_feature: MA Experiment ID: 108576 Result: Down-regulated in Transcription
  misc_feature: MA Experiment 108576 PARAMETER Experiment Name: At_42deg_Heat_cDNA_P Parameter: Temperature (deg C) Value: 42 vs. 22
  misc_feature: MA Experiment 108576 PARAMETER Experiment Name: At_42deg_Heat_cDNA_P Parameter: Timepoint (hr) Value: 1
  misc_feature: MA Experiment 108576 PARAMETER Experiment Name: At_42deg_Heat_cDNA_P Parameter: Tissue Value: Aerial
  misc_feature: MA Experiment ID: 108577 Result: Down-regulated in Transcription
  misc_feature: MA Experiment 108577 PARAMETER Experiment Name: At_42deg_Heat_cDNA_P Parameter: Temperature (deg C) Value: 42 vs. 22
  misc_feature: MA Experiment 108577 PARAMETER Experiment Name: At_42deg_Heat_cDNA_P Parameter: Timepoint (hr) Value: 6
  misc_feature: MA Experiment 108577 PARAMETER Experiment Name: At_42deg_Heat_cDNA_P Parameter: Tissue Value: Aerial
  misc_feature: MA Experiment ID: 108579 Result: Down-regulated in Transcription
  misc_feature: MA Experiment 108579 PARAMETER Experiment Name: At_4deg_Cold_cDNA_P Parameter: Temperature (deg C) Value: 4 vs. 22
  misc_feature: MA Experiment 108579 PARAMETER Experiment Name: At_4deg_Cold_cDNA_P Parameter: Timepoint (hr) Value: 6
  misc_feature: MA Experiment 108579 PARAMETER Experiment Name: At_4deg_Cold_cDNA_P Parameter: Tissue Value: Aerial
  misc_feature: MA Experiment ID: 108595 Result: Down-regulated in Transcription
  misc_feature: MA Experiment 108595 PARAMETER Experiment Name: At_Ler-pi_Ovule_cDNA_P Parameter: Plant Line Value: null
  misc_feature: MA Experiment ID: 108668 Result: Down-regulated in Transcription
  misc_feature: MA Experiment 108668 PARAMETER Experiment Name: At_2mM_SA_cDNA_P Parameter: Plant Line Value: WS
  misc_feature: MA Experiment 108668 PARAMETER Experiment Name: At_2mM_SA_cDNA_P Parameter: Timepoint (hr) Value: 6
  misc_feature: MA Experiment 108668 PARAMETER Experiment Name: At_2mM_SA_cDNA_P Parameter: Treatment Value: 2mM SA vs. No Treatment
  misc_feature: MA Experiment ID: 20000113 Result: Down-regulated in Transcription
  misc_feature: MA Experiment 20000113 PARAMETER Experiment Name: At_42deg_Heat_cDNA_P Parameter: Temperature (deg C) Value: 42 vs. 22
  misc_feature: MA Experiment 20000113 PARAMETER Experiment Name: At_42deg_Heat_cDNA_P Parameter: Timepoint (hr) Value: 8
  misc_feature: MA Experiment 20000113 PARAMETER Experiment Name: At_42deg_Heat_cDNA_P Parameter: Tissue Value: Aerial
  misc_feature: MA Experiment ID: 20000173 Result: Down-regulated in Transcription
  misc_feature: MA Experiment 20000173 PARAMETER Experiment Name: At_42deg_Heat_P Parameter: Age (day) Value: 14
  misc_feature: MA Experiment 20000173 PARAMETER Experiment Name: At_42deg_Heat_P Parameter: Organism Value: A. thaliana
  misc_feature: MA Experiment 20000173 PARAMETER Experiment Name: At_42deg_Heat_P Parameter: Plant Line Value: WS
  misc_feature: MA Experiment 20000173 PARAMETER Experiment Name: At_42deg_Heat_P Parameter: Temperature (deg C) Value: 42 vs. 22
  misc_feature: MA Experiment 20000173 PARAMETER Experiment Name: At_42deg_Heat_P Parameter: Timepoint (hr) Value: 6
  misc_feature: MA Experiment 20000173 PARAMETER Experiment Name: At_42deg_Heat_P Parameter: Tissue Value: Aerial
  misc_feature: MA Experiment ID: 20000185 Result: Down-regulated in Transcription
  misc_feature: MA Experiment 20000185 PARAMETER Experiment Name: At_Roots__P Parameter: Age (day) Value: 7 vs. 21
  misc_feature: MA Experiment 20000185 PARAMETER Experiment Name: At_Roots__P Parameter: Organism Value: A. thaliana
  misc_feature: MA Experiment 20000185 PARAMETER Experiment Name: At_Roots__P Parameter: Tissue Value: Roots vs. Whole Plant
  misc_feature: MA Experiment ID: 20000234 Result: Down-regulated in Transcription
  misc_feature: MA Experiment 20000234 PARAMETER Experiment Name: At_Siliques_P Parameter: Age (day) Value: 21
  misc_feature: MA Experiment 20000234 PARAMETER Experiment Name: At_Siliques_P Parameter: Organism Value: A. thaliana
  misc_feature: MA Experiment 20000234 PARAMETER Experiment Name: At_Siliques_P Parameter: Plant Line Value: WS
  misc_feature: MA Experiment 20000234 PARAMETER Experiment Name: At_Siliques_P Parameter: Tissue Value: Less Than 5mm Siliques vs. Whole Plant
  misc_feature: MA Experiment ID: 20000264 Result: Down-regulated in Transcription
  misc_feature: MA Experiment 20000264 PARAMETER Experiment Name: At_Open_Flower_P Parameter: Age (day) Value: 21
  misc_feature: MA Experiment 20000264 PARAMETER Experiment Name: At_Open_Flower_P Parameter: Plant Line Value: WS
  misc_feature: MA Experiment 20000264 PARAMETER Experiment Name: At_Open_Flower_P Parameter: Tissue Value: Open Flower vs. Whole Plant
  misc_feature: MA Experiment ID: 20000439 Result: Down-regulated in Transcription
  misc_feature: MA Experiment 20000439 PARAMETER Experiment Name: At_Roots__P Parameter: Age (day) Value: 14 vs. 21
  misc_feature: MA Experiment 20000439 PARAMETER Experiment Name: At_Roots__P Parameter: Organism Value: A. thaliana
  misc_feature: MA Experiment 20000439 PARAMETER Experiment Name: At_Roots__P Parameter: Tissue Value: Roots vs. Whole Plant
aaagaaagaatcgtaacagacggatcacaaacagtcacagatccgagccctgttttgagtttacgagaagaatattaaaattctcatctttaaccattttatccgatcatgaatgtgagagacgagggaaaaactacggcggagaaacacggcggaggagaggagaataaatcaccggagaacaaatggcgatttaattctcctctagctcaagtgagcttaatgggattcgtttgtttctgttgtccaggaatgttcaacgctctctccggcatgggaggcggtggtcaagtagatccaaccgctgctaacaacgctaacaccgccgtttacaccgctttcaccgttttcggccttttaggcggcgggttttacaacgtcctcggtccacggctcacgttagccgctggatgttcgacttacgtactctacgccggatctttcctctactacaaccatcaccaccaccaagccttcgcgatagtcgccggagctttactcggttgcggcgcgggacttctctgggccggagaaggagctgtgatgacgtcataccctccgccgcatcggaaaggcacttacatagcgttgttctggagtatcttcaatctcggcggcgttatcggtggattaatcccgtttatcctcaactaccaacgtagctccgccgcatcggtcaacgactcgacgtacatagcgttcatgtgtttcatgttcgccggcgttcttctctctttcggtatcctcccggcgacctccgtgatccgtaacgacggatctagatgctctgccgtgaaatactcccgtccgtcaactgaagcagccgccgtgctacggctattcctcgatcggaaaatgctcctcatcgtccccgcggcttgggctagcaatttcttctacagctatcaattcaacaatgtgaatggactcctctttaacttaagaaccagaggattcaacaatgtcttctactggggagctcaaatggctggatccatcgccattggttacgtgatggacttcagcttcaaaagccggcgagctagaggattcaccggaatatcactagtcgcggtaatcggaaccattatatgggcgggcgggttagcgaatcagcacggttactcgttggacaaactaccggaaaagaaacttgattttaaagattccgggatagagtttgcgggaccattcgtgttatatatgagctatggattgttagatgcaatgtatcagagtatggtttattggttgataggagcattggctgatgattcgcagactttgagtagatatagtggattctacaaaggagtgcagagtgcaggagctgcagtggcttggcaagtggatactcgtaaggttccgttaatgtcacagcttattgttaattggtcacttactactgtaagttatcctttacttgttcttcttgtgtatttttatgttaaaaatgataatgatgatgatagtaatgataaggtttagaagatagtagtttattagaacattgagtaagttaactgttttttaatacgatgacgttctgttatgaatgtaacagttacatagagaaacaaagatttgaggctctgaaatgcctttattctttt

SEQ ID NO: 39655 - protein, 459 aa, Arabidopsis thaliana
  peptide (1)..(459): Ceres Seq. ID no. 13489350
  misc_feature (59)..(180): Pfam Name: Eukaryotic protein of unknown function (DUF895) Pfam Description: Eukaryotic protein of unknown function (DUF895)
  misc_feature (42)..(427): Homolog of NCBI NO: 19114809 NR Description: hypothetical protein [Schizosaccharomyces pombe]
  misc_feature (5)..(431): Homolog of NCBI NO: 40740559 NR Description: hypothetical protein AN8127.2 [Aspergillus
  misc_feature (29)..(431): Homolog of NCBI NO: 19115917 NR Description: hypothetical protein [Schizosaccharomyces pombe]
  misc_feature (27)..(431): Homolog of NCBI NO: 32419955 NR Description: hypothetical protein [Neurospora crassa]
  misc_feature (27)..(454): Homolog of NCBI NO: 38110995 NR Description: hypothetical protein MG06605.4 [Magnaporthe
  misc_feature (29)..(452): Homolog of NCBI NO: 40745401 NR Description: hypothetical protein AN1427.2 [Aspergillus
  misc_feature (330)..(456): Homolog of NCBI NO: 38346872 NR Description: OSJNBb0004G23.4 [Oryza sativa (japonica
  misc_feature (18)..(266): Homolog of NCBI NO: 38346872 NR Description: OSJNBb0004G23.4 [Oryza sativa (japonica
  misc_feature (1)..(459): Homolog of NCBI NO: 21536696 NR Description: unknown [Arabidopsis thaliana]
  misc_feature (1)..(459): Homolog of NCBI NO: 18394560 NR Description: expressed protein [Arabidopsis thaliana]
MNVRDEGKTTAEKHGGGEENKSPENKWRFNSPLAQVSLMGFVCFCCPGMFNALSGMGGGGQVDPTAANNANTAVYTAFTVFGLLGGGFYNVLGPRLTLAAGCSTYVLYAGSFLYYNHHHHQAFAIVAGALLGCGAGLLWAGEGAVMTSYPPPHRKGTYIALFWSIFNLGGVIGGLIPFILNYQRSSAASVNDSTYIAFMCFMFAGVLLSFGILPATSVIRNDGSRCSAVKYSRPSTEAAAVLRLFLDRKMLLIVPAAWASNFFYSYQFNNVNGLLFNLRTRGFNNVFYWGAQMAGSIAIGYVMDFSFKSRRARGFTGISLVAVIGTIIWAGGLANQHGYSLDKLPEKKLDFKDSGIEFAGPFVLYMSYGLLDAMYQSMVYWLIGALADDSQTLSRYSGFYKGVQSAGAAVAWQVDTRKVPLMSQLIVNWSLTTVSYPLLVLLVYFYVKNDNDDDSNDKV

SEQ ID NO: 39656 - protein, 421 aa, Arabidopsis thaliana
  peptide (1)..(421): Ceres Seq. ID no. 13489351
  misc_feature (21)..(142): Pfam Name: Eukaryotic protein of unknown function (DUF895) Pfam Description: Eukaryotic protein of unknown function (DUF895)
  misc_feature (4)..(389): Homolog of NCBI NO: 19114809 NR Description: hypothetical protein [Schizosaccharomyces pombe]
  misc_feature (1)..(393): Homolog of NCBI NO: 40740559 NR Description: hypothetical protein AN8127.2 [Aspergillus
  misc_feature (1)..(393): Homolog of NCBI NO: 19115917 NR Description: hypothetical protein [Schizosaccharomyces pombe]
  misc_feature (1)..(393): Homolog of NCBI NO: 32419955 NR Description: hypothetical protein [Neurospora crassa]
  misc_feature (1)..(416): Homolog of NCBI NO: 38110995 NR Description: hypothetical protein MG06605.4 [Magnaporthe
  misc_feature (1)..(414): Homolog of NCBI NO: 40745401 NR Description: hypothetical protein AN1427.2 [Aspergillus
  misc_feature (292)..(418): Homolog of NCBI NO: 38346872 NR Description: OSJNBb0004G23.4 [Oryza sativa (japonica
  misc_feature (1)..(228): Homolog of NCBI NO: 38346872 NR Description: OSJNBb0004G23.4 [Oryza sativa (japonica
  misc_feature (1)..(421): Homolog of NCBI NO: 21536696 NR Description: unknown [Arabidopsis thaliana]
  misc_feature (1)..(421): Homolog of NCBI NO: 18394560 NR Description: expressed protein [Arabidopsis thaliana]
MGFVCFCCPGMFNALSGMGGGGQVDPTAANNANTAVYTAFTVFGLLGGGFYNVLGPRLTLAAGCSTYVLYAGSFLYYNHHHHQAFAIVAGALLGCGAGLLWAGEGAVMTSYPPPHRKGTYIALFWSIFNLGGVIGGLIPFILNYQRSSAASVNDSTYIAFMCFMFAGVLLSFGILPATSVIRNDGSRCSAVKYSRPSTEAAAVLRLFLDRKMLLIVPAAWASNFFYSYQFNNVNGLLFNLRTRGFNNVFYWGAQMAGSIAIGYVMDFSFKSRRARGFTGISLVAVIGTIIWAGGLANQHGYSLDKLPEKKLDFKDSGIEFAGPFVLYMSYGLLDAMYQSMVYWLIGALADDSQTLSRYSGFYKGVQSAGAAVAWQVDTRKVPLMSQLIVNWSLTTVSYPLLVLLVYFYVKNDNDDDSNDKV

SEQ ID NO: 39657 - protein, 411 aa, Arabidopsis thaliana
  peptide (1)..(411): Ceres Seq. ID no. 13489352
  misc_feature (11)..(132): Pfam Name: Eukaryotic protein of unknown function (DUF895) Pfam Description: Eukaryotic protein of unknown function (DUF895)
  misc_feature (1)..(379): Homolog of NCBI NO: 19114809 NR Description: hypothetical protein [Schizosaccharomyces pombe]
  misc_feature (1)..(383): Homolog of NCBI NO: 40740559 NR Description: hypothetical protein AN8127.2 [Aspergillus
  misc_feature (1)..(383): Homolog of NCBI NO: 19115917 NR Description: hypothetical protein [Schizosaccharomyces pombe]
  misc_feature (1)..(383): Homolog of NCBI NO: 32419955 NR Description: hypothetical protein [Neurospora crassa]
  misc_feature (1)..(406): Homolog of NCBI NO: 38110995 NR Description: hypothetical protein MG06605.4 [Magnaporthe
  misc_feature (1)..(404): Homolog of NCBI NO: 40745401 NR Description: hypothetical protein AN1427.2 [Aspergillus
  misc_feature (282)..(408): Homolog of NCBI NO: 38346872 NR Description: OSJNBb0004G23.4 [Oryza sativa (japonica
  misc_feature (1)..(218): Homolog of NCBI NO: 38346872 NR Description: OSJNBb0004G23.4 [Oryza sativa (japonica
  misc_feature (1)..(411): Homolog of NCBI NO: 21536696 NR Description: unknown [Arabidopsis thaliana]
  misc_feature (1)..(411): Homolog of NCBI NO: 18394560 NR Description: expressed protein [Arabidopsis thaliana]
MFNALSGMGGGGQVDPTAANNANTAVYTAFTVFGLLGGGFYNVLGPRLTLAAGCSTYVLYAGSFLYYNHHHHQAFAIVAGALLGCGAGLLWAGEGAVMTSYPPPHRKGTYIALFWSIFNLGGVIGGLIPFILNYQRSSAASVNDSTYIAFMCFMFAGVLLSFGILPATSVIRNDGSRCSAVKYSRPSTEAAAVLRLFLDRKMLLIVPAAWASNFFYSYQFNNVNGLLFNLRTRGFNNVFYWGAQMAGSIAIGYVMDFSFKSRRARGFTGISLVAVIGTIIWAGGLANQHGYSLDKLPEKKLDFKDSGIEFAGPFVLYMSYGLLDAMYQSMVYWLIGALADDSQTLSRYSGFYKGVQSAGAAVAWQVDTRKVPLMSQLIVNWSLTTVSYPLLVLLVYFYVKNDNDDDSNDKV

SEQ ID NO: 39658 - DNA, 2222 bp, Arabidopsis thaliana
  misc_feature (1)..(2222): Ceres Seq. ID no. 12371005
  misc_feature: MA Experiment ID: 108434 Result: Up-regulated in Transcription
  misc_feature: MA Experiment 108434 PARAMETER Experiment Name: At_Root_Tips_cDNA_P Parameter: Tissue Value: Root Tips
  misc_feature: MA Experiment ID: 108461 Result: Up-regulated in Transcription
  misc_feature: MA Experiment 108461 PARAMETER Experiment Name: At_Germinating_Seeds_cDNA_P Parameter: Age (day) Value: 1 vs. 0
  misc_feature: MA Experiment 108461 PARAMETER Experiment Name: At_Germinating_Seeds_cDNA_P Parameter: Tissue Value: Germinating Seeds
  misc_feature: MA Experiment ID: 108462 Result: Up-regulated in Transcription
  misc_feature: MA Experiment 108462 PARAMETER Experiment Name: At_Germinating_Seeds_cDNA_P Parameter: Age (day) Value: 2 vs. 0
  misc_feature: MA Experiment 108462 PARAMETER Experiment Name: At_Germinating_Seeds_cDNA_P Parameter: Tissue Value: Germinating Seeds
  misc_feature: MA Experiment ID: 108463 Result: Up-regulated in Transcription
  misc_feature: MA Experiment 108463 PARAMETER Experiment Name: At_Germinating_Seeds_cDNA_P Parameter: Age (day) Value: 3 vs. 0
  misc_feature: MA Experiment 108463 PARAMETER Experiment Name: At_Germinating_Seeds_cDNA_P Parameter: Tissue Value: Germinating Seeds
  misc_feature: MA Experiment ID: 108464 Result: Up-regulated in Transcription
  misc_feature: MA Experiment 108464 PARAMETER Experiment Name: At_Germinating_Seeds_cDNA_P Parameter: Age (day) Value: 4 vs. 0
  misc_feature: MA Experiment 108464 PARAMETER Experiment Name: At_Germinating_Seeds_cDNA_P Parameter: Tissue Value: Germinating Seeds
  misc_feature: MA Experiment ID: 108488 Result: Up-regulated in Transcription
  misc_feature: MA Experiment ID: 108576 Result: Down-regulated in Transcription
  misc_feature: MA Experiment 108576 PARAMETER Experiment Name: At_42deg_Heat_cDNA_P Parameter: Temperature (deg C) Value: 42 vs. 22
  misc_feature: MA Experiment 108576 PARAMETER Experiment Name: At_42deg_Heat_cDNA_P Parameter: Timepoint (hr) Value: 1
  misc_feature: MA Experiment 108576 PARAMETER Experiment Name: At_42deg_Heat_cDNA_P Parameter: Tissue Value: Aerial
  misc_feature: MA Experiment ID: 108577 Result: Down-regulated in Transcription
  misc_feature: MA Experiment 108577 PARAMETER Experiment Name: At_42deg_Heat_cDNA_P Parameter: Temperature (deg C) Value: 42 vs. 22
  misc_feature: MA Experiment 108577 PARAMETER Experiment Name: At_42deg_Heat_cDNA_P Parameter: Timepoint (hr) Value: 6
  misc_feature: MA Experiment 108577 PARAMETER Experiment Name: At_42deg_Heat_cDNA_P Parameter: Tissue Value: Aerial
  misc_feature: MA Experiment ID: 108579 Result: Up-regulated in Transcription
  misc_feature: MA Experiment 108579 PARAMETER Experiment Name: At_4deg_Cold_cDNA_P Parameter: Temperature (deg C) Value: 4 vs. 22
  misc_feature: MA Experiment 108579 PARAMETER Experiment Name: At_4deg_Cold_cDNA_P Parameter: Timepoint (hr) Value: 6
  misc_feature: MA Experiment 108579 PARAMETER Experiment Name: At_4deg_Cold_cDNA_P Parameter: Tissue Value: Aerial
  misc_feature: MA Experiment ID: 108595 Result: Down-regulated in Transcription
  misc_feature: MA Experiment 108595 PARAMETER Experiment Name: At_Ler-pi_Ovule_cDNA_P Parameter: Plant Line Value: null
  misc_feature: MA Experiment ID: 108607 Result: Down-regulated in Transcription
  misc_feature: MA Experiment 108607 PARAMETER Experiment Name: At_100uM_ABA_cDNA_P Parameter: Timepoint (hr) Value: 4
  misc_feature: MA Experiment 108607 PARAMETER Experiment Name: At_100uM_ABA_cDNA_P Parameter: Tissue Value: Aerial
  misc_feature: MA Experiment 108607 PARAMETER Experiment Name: At_100uM_ABA_cDNA_P Parameter: Treatment Value: 100uM ABA vs. No Treatment
  misc_feature: MA Experiment ID: 108668 Result: Down-regulated in Transcription
  misc_feature: MA Experiment 108668 PARAMETER Experiment Name: At_2mM_SA_cDNA_P Parameter: Plant Line Value: WS
  misc_feature: MA Experiment 108668 PARAMETER Experiment Name: At_2mM_SA_cDNA_P Parameter: Timepoint (hr) Value: 6
  misc_feature: MA Experiment 108668 PARAMETER Experiment Name: At_2mM_SA_cDNA_P Parameter: Treatment Value: 2mM SA vs. No Treatment
  misc_feature: MA Experiment ID: 20000070 Result: Down-regulated in Transcription
  misc_feature: MA Experiment 20000070 PARAMETER Experiment Name: At_100uM_ABA_Mutants_cDNA_P Parameter: Plant Line Value: CS24
  misc_feature: MA Experiment 20000070 PARAMETER Experiment Name: At_100uM_ABA_Mutants_cDNA_P Parameter: Timepoint (hr) Value: 6
  misc_feature: MA Experiment 20000070 PARAMETER Experiment Name: At_100uM_ABA_Mutants_cDNA_P Parameter: Tissue Value: Aerial
  misc_feature: MA Experiment 20000070 PARAMETER Experiment Name: At_100uM_ABA_Mutants_cDNA_P Parameter: Treatment Value: 100uM ABA vs. No Treatment
  misc_feature: MA Experiment ID: 20000087 Result: Down-regulated in Transcription
  misc_feature: MA Experiment 20000087 PARAMETER Experiment Name: At_100uM_ABA_Mutants_cDNA_P Parameter: Plant Line Value: WS
  misc_feature: MA Experiment 20000087 PARAMETER Experiment Name: At_100uM_ABA_Mutants_cDNA_P Parameter: Timepoint (hr) Value: 6
  misc_feature: MA Experiment 20000087 PARAMETER Experiment Name: At_100uM_ABA_Mutants_cDNA_P Parameter: Tissue Value: Aerial
  misc_feature: MA Experiment 20000087 PARAMETER Experiment Name: At_100uM_ABA_Mutants_cDNA_P Parameter: Treatment Value: 100uM ABA vs. No Treatment
  misc_feature: MA Experiment ID: 20000117 Result: Down-regulated in Transcription
  misc_feature: MA Experiment 20000117 PARAMETER Experiment Name: At_100uM_ABA_Mutants_cDNA_P Parameter: Plant Line Value: Columbia
  misc_feature: MA Experiment 20000117 PARAMETER Experiment Name: At_100uM_ABA_Mutants_cDNA_P Parameter: Timepoint (hr) Value: 6
  misc_feature: MA Experiment 20000117 PARAMETER Experiment Name: At_100uM_ABA_Mutants_cDNA_P Parameter: Tissue Value: Aerial
  misc_feature: MA Experiment 20000117 PARAMETER Experiment Name: At_100uM_ABA_Mutants_cDNA_P Parameter: Treatment Value: 100uM ABA vs. No Treatment
  misc_feature: MA Experiment ID: 20000179 Result: Up-regulated in Transcription
  misc_feature: MA Experiment 20000179 PARAMETER Experiment Name: At_Germinating_Seeds_P Parameter: Age (hr) Value: 6 vs. 0
  misc_feature: MA Experiment 20000179 PARAMETER Experiment Name: At_Germinating_Seeds_P Parameter: Tissue Value: Germinating Seeds
  misc_feature: MA Experiment ID: 20000180 Result: Up-regulated in Transcription
  misc_feature: MA Experiment 20000180 PARAMETER Experiment Name: At_Germinating_Seeds_P Parameter: Age (hr) Value: 24 vs. 0
  misc_feature: MA Experiment 20000180 PARAMETER Experiment Name: At_Germinating_Seeds_P Parameter: Tissue Value: Germinating Seeds
  misc_feature: MA Experiment ID: 20000182 Result: Down-regulated in Transcription
  misc_feature: MA Experiment 20000182 PARAMETER Experiment Name: At_2mM_SA_P Parameter: Age (day) Value: 14
  misc_feature: MA Experiment 20000182 PARAMETER Experiment Name: At_2mM_SA_P Parameter: Organism Value: A. thaliana
  misc_feature: MA Experiment 20000182 PARAMETER Experiment Name: At_2mM_SA_P Parameter: Plant Line Value: WS
  misc_feature: MA Experiment 20000182 PARAMETER Experiment Name: At_2mM_SA_P Parameter: Timepoint (hr) Value: 6
  misc_feature: MA Experiment 20000182 PARAMETER Experiment Name: At_2mM_SA_P Parameter: Tissue Value: Aerial
  misc_feature: MA Experiment 20000182 PARAMETER Experiment Name: At_2mM_SA_P Parameter: Treatment Value: 2mM SA vs. No Treatment
  misc_feature: MA Experiment ID: 20000227 Result: Up-regulated in Transcription
  misc_feature: MA Experiment 20000227 PARAMETER Experiment Name: At_Root-Tips-vs-Tops_P Parameter: Tissue Value: Root Tips vs. Root Tops
  misc_feature: MA Experiment ID: 20000437 Result: Down-regulated in Transcription
  misc_feature: MA Experiment 20000437 PARAMETER Experiment Name: At_Drought_P Parameter: Age (day) Value: 8
  misc_feature: MA Experiment 20000437 PARAMETER Experiment Name: At_Drought_P Parameter: Organism Value: A. thaliana
  misc_feature: MA Experiment 20000437 PARAMETER Experiment Name: At_Drought_P Parameter: Plant Line Value: WS
  misc_feature: MA Experiment 20000437 PARAMETER Experiment Name: At_Drought_P Parameter: Timepoint (hr) Value: 24
  misc_feature: MA Experiment 20000437 PARAMETER Experiment Name: At_Drought_P Parameter: Tissue Value: Whole Plant
  misc_feature: MA Experiment 20000437 PARAMETER Experiment Name: At_Drought_P Parameter: Treatment Value: Drought vs. No Drought
  misc_feature: MA Experiment ID: 20000496 Result: Up-regulated in Transcription
  misc_feature: MA Experiment 20000496 PARAMETER Experiment Name: At_Guard_Cells_P Parameter: Harvest Date Value: 7/19/2002
  misc_feature: MA Experiment 20000496 PARAMETER Experiment Name: At_Guard_Cells_P Parameter: Organism Value: Canola
  misc_feature: MA Experiment 20000496 PARAMETER Experiment Name: At_Guard_Cells_P Parameter: Tissue Value: Guard Cells vs. Leaves
  misc_feature: MA Experiment ID: 20000794 Result: Down-regulated in Transcription
  misc_feature: MA Experiment 20000794 PARAMETER Experiment Name: At_Petals_P Parameter: Age (day) Value: 23-25 days
  misc_feature: MA Experiment 20000794 PARAMETER Experiment Name: At_Petals_P Parameter: Plant Line Value: WS
  misc_feature: MA Experiment 20000794 PARAMETER Experiment Name: At_Petals_P Parameter: Tissue Value: Petals vs. Whole plant
  misc_feature: MA Experiment ID: 20001247 Result: Up-regulated in Transcription
  misc_feature: MA Experiment 20001247 PARAMETER Experiment Name: At_Far-red-induction_P Parameter: Age (day) Value: 7
  misc_feature: MA Experiment 20001247 PARAMETER Experiment Name: At_Far-red-induction_P Parameter: Light Value: Far-red vs. White
  misc_feature: MA Experiment 20001247 PARAMETER Experiment Name: At_Far-red-induction_P Parameter: Organism Value: A. thaliana
  misc_feature: MA Experiment 20001247 PARAMETER Experiment Name: At_Far-red-induction_P Parameter: Plant Line Value: Columbia
  misc_feature: MA Experiment 20001247 PARAMETER Experiment Name: At_Far-red-induction_P Parameter: Timepoint (hr) Value: 1
  misc_feature: MA Experiment 20001247 PARAMETER Experiment Name: At_Far-red-induction_P Parameter: Tissue Value: Whole Plant
  misc_feature: MA Experiment ID: 20001248 Result: Up-regulated in Transcription
  misc_feature: MA Experiment 20001248 PARAMETER Experiment Name: At_Far-red-induction_P Parameter: Age (day) Value: 7
  misc_feature: MA Experiment 20001248 PARAMETER Experiment Name: At_Far-red-induction_P Parameter: Light Value: Far-red vs. White
  misc_feature: MA Experiment 20001248 PARAMETER Experiment Name: At_Far-red-induction_P Parameter: Organism Value: A. thaliana
  misc_feature: MA Experiment 20001248 PARAMETER Experiment Name: At_Far-red-induction_P Parameter: Plant Line Value: Columbia
  misc_feature: MA Experiment 20001248 PARAMETER Experiment Name: At_Far-red-induction_P Parameter: Timepoint (hr) Value: 4
  misc_feature: MA Experiment 20001248 PARAMETER Experiment Name: At_Far-red-induction_P Parameter: Tissue Value: Whole Plant
  misc_feature: MA Experiment ID: 20001557 Result: Up-regulated in Transcription
  misc_feature: MA Experiment 20001557 PARAMETER Experiment Name: At_Drought_Soil_Dry_P Parameter: Age (day) Value: 27
  misc_feature: MA Experiment 20001557 PARAMETER Experiment Name: At_Drought_Soil_Dry_P Parameter: Organism Value: A. thaliana
  misc_feature: MA Experiment 20001557 PARAMETER Experiment Name: At_Drought_Soil_Dry_P Parameter: Plant Line Value: WS
  misc_feature: MA Experiment 20001557 PARAMETER Experiment Name: At_Drought_Soil_Dry_P Parameter: Post Timepoint (hr) Value: 3
  misc_feature: MA Experiment 20001557 PARAMETER Experiment Name: At_Drought_Soil_Dry_P Parameter: Post-Treatment Value: Re-Water vs. No Drought
  misc_feature: MA Experiment 20001557 PARAMETER Experiment Name: At_Drought_Soil_Dry_P Parameter: Timepoint (day) Value: 13
  misc_feature: MA Experiment 20001557 PARAMETER Experiment Name: At_Drought_Soil_Dry_P Parameter: Treatment Value: Drought vs. No Drought
  misc_feature: MA Experiment ID: 20001558 Result: Up-regulated in Transcription
  misc_feature: MA Experiment 20001558 PARAMETER Experiment Name: At_Drought_Soil_Dry_P Parameter: Age (day) Value: 27
  misc_feature: MA Experiment 20001558 PARAMETER Experiment Name: At_Drought_Soil_Dry_P Parameter: Organism Value: A. thaliana
  misc_feature: MA Experiment 20001558 PARAMETER Experiment Name: At_Drought_Soil_Dry_P Parameter: Plant Line Value: WS
  misc_feature: MA Experiment 20001558 PARAMETER Experiment Name: At_Drought_Soil_Dry_P Parameter: Post Timepoint (hr) Value: 6
  misc_feature: MA Experiment 20001558 PARAMETER Experiment Name: At_Drought_Soil_Dry_P Parameter: Post-Treatment Value: Re-Water vs. No Drought
  misc_feature: MA Experiment 20001558 PARAMETER Experiment Name: At_Drought_Soil_Dry_P Parameter: Timepoint (day) Value: 13
  misc_feature: MA Experiment 20001558 PARAMETER Experiment Name: At_Drought_Soil_Dry_P Parameter: Treatment Value: Drought vs. No Drought
  misc_feature: MA Experiment ID: 20001560 Result: Up-regulated in Transcription
  misc_feature: MA Experiment 20001560 PARAMETER Experiment Name: At_Drought_Soil_Dry_P Parameter: Age (day) Value: 28
  misc_feature: MA Experiment 20001560 PARAMETER Experiment Name: At_Drought_Soil_Dry_P Parameter: Organism Value: A. thaliana
  misc_feature: MA Experiment 20001560 PARAMETER Experiment Name: At_Drought_Soil_Dry_P Parameter: Plant Line Value: WS
  misc_feature: MA Experiment 20001560 PARAMETER Experiment Name: At_Drought_Soil_Dry_P Parameter: Post Timepoint (hr) Value: None
  misc_feature: MA Experiment 20001560 PARAMETER Experiment Name: At_Drought_Soil_Dry_P Parameter: Post-Treatment Value: None
  misc_feature: MA Experiment 20001560 PARAMETER Experiment Name: At_Drought_Soil_Dry_P Parameter: Timepoint (day) Value: 14
  misc_feature: MA Experiment 20001560 PARAMETER Experiment Name: At_Drought_Soil_Dry_P Parameter: Treatment Value: Drought vs. No Drought
  misc_feature: MA Experiment ID: 20001904 Result: Down-regulated in Transcription
  misc_feature: MA Experiment 20001904 PARAMETER Experiment Name: At_Drought_Reproduction_P Parameter: Age (day) Value: 37
  misc_feature: MA Experiment 20001904 PARAMETER Experiment Name: At_Drought_Reproduction_P Parameter: Organism Value: A. thaliana
  misc_feature: MA Experiment 20001904 PARAMETER Experiment Name: At_Drought_Reproduction_P Parameter: Plant Line Value: WS
  misc_feature: MA Experiment 20001904 PARAMETER Experiment Name: At_Drought_Reproduction_P Parameter: Timepoint (day) Value: 7
  misc_feature: MA Experiment 20001904 PARAMETER Experiment Name: At_Drought_Reproduction_P Parameter: Tissue Value: Rosettes
  misc_feature: MA Experiment 20001904 PARAMETER Experiment Name: At_Drought_Reproduction_P Parameter: Treatment Value: Drought vs. No Drought
  misc_feature: MA Experiment ID: 20001905 Result: Down-regulated in Transcription
  misc_feature: MA Experiment 20001905 PARAMETER Experiment Name: At_Drought_Reproduction_P Parameter: Age (day) Value: 40
  misc_feature: MA Experiment 20001905 PARAMETER Experiment Name: At_Drought_Reproduction_P Parameter: Organism Value: A. thaliana
  misc_feature: MA Experiment 20001905 PARAMETER Experiment Name: At_Drought_Reproduction_P Parameter: Plant Line Value: WS
  misc_feature: MA Experiment 20001905 PARAMETER Experiment Name: At_Drought_Reproduction_P Parameter: Timepoint (day) Value: 10
  misc_feature: MA Experiment 20001905 PARAMETER Experiment Name: At_Drought_Reproduction_P Parameter: Tissue Value: Rosettes
  misc_feature: MA Experiment 20001905 PARAMETER Experiment Name: At_Drought_Reproduction_P Parameter: Treatment Value: Drought vs. No Drought
  misc_feature: MA Experiment ID: 20001906 Result: Down-regulated in Transcription
  misc_feature: MA Experiment 20001906 PARAMETER Experiment Name: At_Drought_Reproduction_P Parameter: Age (day) Value: 35
  misc_feature: MA Experiment 20001906 PARAMETER Experiment Name: At_Drought_Reproduction_P Parameter: Organism Value: A. thaliana
  misc_feature: MA Experiment 20001906 PARAMETER Experiment Name: At_Drought_Reproduction_P Parameter: Plant Line Value: WS
  misc_feature: MA Experiment 20001906 PARAMETER Experiment Name: At_Drought_Reproduction_P Parameter: Timepoint (day) Value: 5
  misc_feature: MA Experiment 20001906 PARAMETER Experiment Name: At_Drought_Reproduction_P Parameter: Tissue Value: Siliques
  misc_feature: MA Experiment 20001906 PARAMETER Experiment Name: At_Drought_Reproduction_P Parameter: Treatment Value: Drought vs. No Drought
  misc_feature: MA Experiment ID: 20001911 Result: Down-regulated in Transcription
  misc_feature: MA Experiment 20001911 PARAMETER Experiment Name: At_Drought_Reproduction_P Parameter: Age (day) Value: 40
  misc_feature: MA Experiment 20001911 PARAMETER Experiment Name: At_Drought_Reproduction_P Parameter: Organism Value: A. thaliana
  misc_feature: MA Experiment 20001911 PARAMETER Experiment Name: At_Drought_Reproduction_P Parameter: Plant Line Value: WS
  misc_feature: MA Experiment 20001911 PARAMETER Experiment Name: At_Drought_Reproduction_P Parameter: Timepoint (day) Value: 10
  misc_feature: MA Experiment 20001911 PARAMETER Experiment Name: At_Drought_Reproduction_P Parameter: Tissue Value: Flowers
  misc_feature: MA Experiment 20001911 PARAMETER Experiment Name: At_Drought_Reproduction_P Parameter: Treatment Value: Drought vs. No Drought
aaaaagaaaaatcgttactttaaagccaaaaagaagaatacacaaacttcattcactctctcccattctcggatctctctcagtgcacagtggttgtcactcttctcctttggtcgaaactctttcttggaaagagcattttgttatcaagactctgaagagctcttttgggaggatagtaaggttggatgatgagagggagatctgatggaggcctaaagaagcggcttattgcttcggtctgtgtcgtggctctattcgtctgtttcttgtttatgtactatggttcctctagccaaggtgcatcagcattggaatatggaagatctttgagaaaactcggatcgtcttatttgagtggagatgatgataatggtgataccaaacaggatgattctgtggctaatgcagaagacagtcttgttgtcgccaaaagttttcctgtttgtgatgaccggcactcggaaatcatcccttgcttagataggaatttcatctaccaaatgaggttgaagcttgatctctctttaatggaacattatgaacggcattgtcctcctcccgaaagacggtttaattgtttgattcctccaccatctggatacaaggttcctattaagtggcctaagagtagagatgaagtgtggaaagcaaacatacctcacactcaccttgcaaaagagaagtctgatcagaactggatggttgagaaaggcgagaaaatttcttttcccggtggaggcactcatttccattgcggtgctgataaatacattgcatcgatcgcaaatatgcttaacttttcgaacgatgtattgaatgacgaagggagattaagaacggttcttgatgtcggatgcggagttgcgagttttggagcttaccttctcgcgtctgatataatgacaatgtcactagcccctaatgatgttcatcagaaccaaatccagtttgcgttagaaagaggaatccctgcttatcttggtgttttaggtaccaaaaggcttccttacccgagcagatcattcgagtttgctcattgttctcgatgtaggattgattggcttcaaagagacggacttcttcttcttgagctcgatcgggtactaagaccgggaggttatttcgcgtattcgtctcctgaagcttacgcacaagatgaagagaatttgaaaatctggaaggagatgagtgctcttgttgaaagaatgtgttggagaattgccgttaaaagaaaccaaactgtggtttggcagaaaccgttgagtaatgactgttacttggagagagagcccgggacacagcctcctctctgtcgctcagatgctgatcctgatgcggttgcgggtgtttcaatggaagcttgcatcactccttactccaagcatgaccataaaaccaagggaagtgggttagctccttggccagctaggttgacttcttctcctccccgtcttgcggatttcggttattcaaccgacatgtttgagaaggacacggaactttggaaacaacaagtggacagttactggaatctgatgtcatcgaaagtcaaatcaaacactgtgaggaacataatggacatgaaagctcacatgggttctttcgcagctgctcttaaagacaaagatgtgtgggtgatgaacgttgtctctcccgacggtcccaacactctaaaactgatctacgaccgtggtttaatcggaacaaatcataactggtgtgaggctttctctacatatcctcgaacatacgatctgttgcacgcgtggtctatattttcagacattaaaagcaaaggatgcagtgcagaggatctactaatcgagatggatcggattcttagacctacgggattcgttatcatcagagataagcagagtgttgttgagtcaatcaagaagtatttgcaggctttgcattgggagactgtggcatcagagaaggtaaatacaagttcagaactcgaccaagacagtgaagatggtgagaacaatgtcgttttcattgtccagaagaaactttggctcaccagtgaaagccttagggacagcgagtaaaaaacatatcaaaagcaaagagagagaaattgttttatcccacaaagtttttatatagttttattttgatttttgtagttgatttgtacgacataaagcattattatataaaatactaaaattattcattgtttcttactttcttgaaatattctttaattt

SEQ ID NO: 39659 - protein, 623 aa, Arabidopsis thaliana
  peptide (1)..(623): Ceres Seq. ID no. 12371006
  misc_feature (93)..(399): Pfam Name: Putative methyltransferase Pfam Description: Putative methyltransferase
  misc_feature (58)..(585): Homolog of NCBI NO: 15239326 NR Description: ankyrin-like protein; protein id: At5g06050.1
  misc_feature (82)..(581): Homolog of NCBI NO: 18405149 NR Description: expressed protein
  misc_feature (2)..(141): Homolog of NCBI NO: 25406781 NR Description: hypothetical protein [imported] - Arabidopsis
  misc_feature (86)..(613): Homolog of NCBI NO: 11357548 NR Description: hypothetical protein F18O22.220 - Arabidopsis
  misc_feature (14)..(613): Homolog of NCBI NO: 22326809 NR Description: putative protein
  misc_feature (21)..(623): Homolog of NCBI NO: 7488052 NR Description: probable ankyrin - Arabidopsis thaliana
  misc_feature (2)..(623): Homolog of NCBI NO: 22331280 NR Description: expressed protein; protein id: At3g23300.1
  misc_feature (2)..(623): Homolog of NCBI NO: 18414198 NR Description: ankyrin like protein
  misc_feature (401)..(623): Homolog of NCBI NO: 25406781 NR Description: hypothetical protein [imported] - Arabidopsis
  misc_feature (59)..(399): Homolog of NCBI NO: 25406781 NR Description: hypothetical protein [imported] - Arabidopsis
MMRGRSDGGLKKRLIASVCVVALFVCFLFMYYGSSSQGASALEYGRSLRKLGSSYLSGDDDNGDTKQDDSVANAEDSLVVAKSFPVCDDRHSEIIPCLDRNFIYQMRLKLDLSLMEHYERHCPPPERRFNCLIPPPSGYKVPIKWPKSRDEVWKANIPHTHLAKEKSDQNWMVEKGEKISFPGGGTHFHCGADKYIASIANMLNFSNDVLNDEGRLRTVLDVGCGVASFGAYLLASDIMTMSLAPNDVHQNQIQFALERGIPAYLGVLGTKRLPYPSRSFEFAHCSRCRIDWLQRDGLLLLELDRVLRPGGYFAYSSPEAYAQDEENLKIWKEMSALVERMCWRIAVKRNQTVVWQKPLSNDCYLEREPGTQPPLCRSDADPDAVAGVSMEACITPYSKHDHKTKGSGLAPWPARLTSSPPRLADFGYSTDMFEKDTELWKQQVDSYWNLMSSKVKSNTVRNIMDMKAHMGSFAAALKDKDVWVMNVVSPDGPNTLKLIYDRGLIGTNHNWCEAFSTYPRTYDLLHAWSIFSDIKSKGCSAEDLLIEMDRILRPTGFVIIRDKQSVVESIKKYLQALHWETVASEKVNTSSELDQDSEDGENNVVFIVQKKLWLTSESLRDSE

SEQ ID NO: 39660 - protein, 622 aa, Arabidopsis thaliana
  peptide (1)..(622): Ceres Seq. ID no. 12371007
  misc_feature (92)..(398): Pfam Name: Putative methyltransferase Pfam Description: Putative methyltransferase
  misc_feature (57)..(584): Homolog of NCBI NO: 15239326 NR Description: ankyrin-like protein; protein id: At5g06050.1
  misc_feature (81)..(580): Homolog of NCBI NO: 18405149 NR Description: expressed protein
  misc_feature (1)..(140): Homolog of NCBI NO: 25406781 NR Description: hypothetical protein [imported] - Arabidopsis
  misc_feature (85)..(612): Homolog of NCBI NO: 11357548 NR Description: hypothetical protein F18O22.220 - Arabidopsis
  misc_feature (13)..(612): Homolog of NCBI NO: 22326809 NR Description: putative protein
  misc_feature (20)..(622): Homolog of NCBI NO: 7488052 NR Description: probable ankyrin - Arabidopsis thaliana
  misc_feature (1)..(622): Homolog of NCBI NO: 22331280 NR Description: expressed protein; protein id: At3g23300.1
  misc_feature (1)..(622): Homolog of NCBI NO: 18414198 NR Description: ankyrin like protein
  misc_feature (400)..(622): Homolog of NCBI NO: 25406781 NR Description: hypothetical protein [imported] - Arabidopsis
  misc_feature (58)..(398): Homolog of NCBI NO: 25406781 NR Description: hypothetical protein [imported] - Arabidopsis
MRGRSDGGLKKRLIASVCVVALFVCFLFMYYGSSSQGASALEYGRSLRKLGSSYLSGDDDNGDTKQDDSVANAEDSLVVAKSFPVCDDRHSEIIPCLDRNFIYQMRLKLDLSLMEHYERHCPPPERRFNCLIPPPSGYKVPIKWPKSRDEVWKANIPHTHLAKEKSDQNWMVEKGEKISFPGGGTHFHCGADKYIASIANMLNFSNDVLNDEGRLRTVLDVGCGVASFGAYLLASDIMTMSLAPNDVHQNQIQFALERGIPAYLGVLGTKRLPYPSRSFEFAHCSRCRIDWLQRDGLLLLELDRVLRPGGYFAYSSPEAYAQDEENLKIWKEMSALVERMCWRIAVKRNQTVVWQKPLSNDCYLEREPGTQPPLCRSDADPDAVAGVSMEACITPYSKHDHKTKGSGLAPWPARLTSSPPRLADFGYSTDMFEKDTELWKQQVDSYWNLMSSKVKSNTVRNIMDMKAHMGSFAAALKDKDVWVMNVVSPDGPNTLKLIYDRGLIGTNHNWCEAFSTYPRTYDLLHAWSIFSDIKSKGCSAEDLLIEMDRILRPTGFVIIRDKQSVVESIKKYLQALHWETVASEKVNTSSELDQDSEDGENNVVFIVQKKLWLTSESLRDSE

SEQ ID NO: 39661 - protein, 594 aa, Arabidopsis thaliana
  peptide (1)..(594): Ceres Seq. ID no. 12371008
  misc_feature (64)..(370): Pfam Name: Putative methyltransferase Pfam Description: Putative methyltransferase
  misc_feature (29)..(556): Homolog of NCBI NO: 15239326 NR Description: ankyrin-like protein; protein id: At5g06050.1
  misc_feature (53)..(552): Homolog of NCBI NO: 18405149 NR Description: expressed protein
  misc_feature (1)..(112): Homolog of NCBI NO: 25406781 NR Description: hypothetical protein [imported] - Arabidopsis
  misc_feature (57)..(584): Homolog of NCBI NO: 11357548 NR Description: hypothetical protein F18O22.220 - Arabidopsis
  misc_feature (1)..(584): Homolog of NCBI NO: 22326809 NR Description: putative protein
  misc_feature (1)..(594): Homolog of NCBI NO: 7488052 NR Description: probable ankyrin - Arabidopsis thaliana
  misc_feature (1)..(594): Homolog of NCBI NO: 22331280 NR Description: expressed protein; protein id: At3g23300.1
  misc_feature (1)..(594): Homolog of NCBI NO: 18414198 NR Description: ankyrin like protein
  misc_feature (372)..(594): Homolog of NCBI NO: 25406781 NR Description: hypothetical protein [imported] - Arabidopsis
  misc_feature (30)..(370): Homolog of NCBI NO: 25406781 NR Description: hypothetical protein [imported] - Arabidopsis
MYYGSSSQGASALEYGRSLRKLGSSYLSGDDDNGDTKQDDSVANAEDSLVVAKSFPVCDDRHSEIIPCLDRNFIYQMRLKLDLSLMEHYERHCPPPERRFNCLIPPPSGYKVPIKWPKSRDEVWKANIPHTHLAKEKSDQNWMVEKGEKISFPGGGTHFHCGADKYIASIANMLNFSNDVLNDEGRLRTVLDVGCGVASFGAYLLASDIMTMSLAPNDVHQNQIQFALERGIPAYLGVLGTKRLPYPSRSFEFAHCSRCRIDWLQRDGLLLLELDRVLRPGGYFAYSSPEAYAQDEENLKIWKEMSALVERMCWRIAVKRNQTVVWQKPLSNDCYLEREPGTQPPLCRSDADPDAVAGVSMEACITPYSKHDHKTKGSGLAPWPARLTSSPPRLADFGYSTDMFEKDTELWKQQVDSYWNLMSSKVKSNTVRNIMDMKAHMGSFAAALKDKDVWVMNVVSPDGPNTLKLIYDRGLIGTNHNWCEAFSTYPRTYDLLHAWSIFSDIKSKGCSAEDLLIEMDRILRPTGFVIIRDKQSVVESIKKYLQALHWETVASEKVNTSSELDQDSEDGENNVVFIVQKKLWLTSESLRDSE

SEQ ID NO: 39662 - DNA, 1239 bp, Arabidopsis thaliana
  misc_feature (1)..(1239): Ceres Seq. ID no. 12422128
  misc_feature: MA Experiment ID: 108488 Result: Down-regulated in Transcription
  misc_feature: MA Experiment ID: 108489 Result: Up-regulated in Transcription
  misc_feature: MA Experiment ID: 108572 Result: Up-regulated in Transcription
  misc_feature: MA Experiment 108572 PARAMETER Experiment Name: At_Drought_cDNA_P Parameter: Timepoint (hr) Value: 1
  misc_feature: MA Experiment 108572 PARAMETER Experiment Name: At_Drought_cDNA_P Parameter: Tissue Value: Aerial
  misc_feature: MA Experiment 108572 PARAMETER Experiment Name: At_Drought_cDNA_P Parameter: Treatment Value: Drought vs. No Drought
  misc_feature: MA Experiment ID: 108573 Result: Up-regulated in Transcription
  misc_feature: MA Experiment 108573 PARAMETER Experiment Name: At_Drought_cDNA_P Parameter: Timepoint (hr) Value: 6
  misc_feature: MA Experiment 108573 PARAMETER Experiment Name: At_Drought_cDNA_P Parameter: Tissue Value: Aerial
  misc_feature: MA Experiment 108573 PARAMETER Experiment Name: At_Drought_cDNA_P Parameter: Treatment Value: Drought vs. No Drought
  misc_feature: MA Experiment ID: 108594 Result: Down-regulated in Transcription
  misc_feature: MA Experiment 108594 PARAMETER Experiment Name: At_Ler-rhl_Root_cDNA_P Parameter: Plant Line Value: null
  misc_feature: MA Experiment ID: 20000069 Result: Down-regulated in Transcription
  misc_feature: MA Experiment 20000069 PARAMETER Experiment Name: At_100uM_ABA_Mutants_cDNA_P Parameter: Plant Line Value: CS23
  misc_feature: MA Experiment 20000069 PARAMETER Experiment Name: At_100uM_ABA_Mutants_cDNA_P Parameter: Timepoint (hr) Value: 6
  misc_feature: MA Experiment 20000069 PARAMETER Experiment Name: At_100uM_ABA_Mutants_cDNA_P Parameter: Tissue Value: Aerial
  misc_feature: MA Experiment 20000069 PARAMETER Experiment Name: At_100uM_ABA_Mutants_cDNA_P Parameter: Treatment Value: 100uM ABA vs. No Treatment
  misc_feature: MA Experiment ID: 20000089 Result: Down-regulated in Transcription
  misc_feature: MA Experiment ID: 20000111 Result: Up-regulated in Transcription
  misc_feature: MA Experiment 20000111 PARAMETER Experiment Name: At_42deg_Heat_cDNA_P Parameter: Temperature (deg C) Value: 42 vs. 22
  misc_feature: MA Experiment 20000111 PARAMETER Experiment Name: At_42deg_Heat_cDNA_P Parameter: Timepoint (hr) Value: 6
  misc_feature: MA Experiment 20000111 PARAMETER Experiment Name: At_42deg_Heat_cDNA_P Parameter: Tissue Value: Aerial
  misc_feature: MA Experiment ID: 20000113 Result: Up-regulated in Transcription
  misc_feature: MA Experiment 20000113 PARAMETER Experiment Name: At_42deg_Heat_cDNA_P Parameter: Temperature (deg C) Value: 42 vs. 22
  misc_feature: MA Experiment 20000113 PARAMETER Experiment Name: At_42deg_Heat_cDNA_P Parameter: Timepoint (hr) Value: 8
  misc_feature: MA Experiment 20000113 PARAMETER Experiment Name: At_42deg_Heat_cDNA_P Parameter: Tissue Value: Aerial
  misc_feature: MA Experiment ID: 20000213 Result: Down-regulated in Transcription
  misc_feature: MA Experiment 20000213 PARAMETER Experiment Name: At_4deg_Cold_P Parameter: Timepoint (hr) Value: 2
  misc_feature: MA Experiment ID: 20001560 Result: Down-regulated in Transcription
  misc_feature: MA Experiment 20001560 PARAMETER Experiment Name: At_Drought_Soil_Dry_P Parameter: Age (day) Value: 28
  misc_feature: MA Experiment 20001560 PARAMETER Experiment Name: At_Drought_Soil_Dry_P Parameter: Organism Value: A. thaliana
  misc_feature: MA Experiment 20001560 PARAMETER Experiment Name: At_Drought_Soil_Dry_P Parameter: Plant Line Value: WS
  misc_feature: MA Experiment 20001560 PARAMETER Experiment Name: At_Drought_Soil_Dry_P Parameter: Post Timepoint (hr) Value: None
  misc_feature: MA Experiment 20001560 PARAMETER Experiment Name: At_Drought_Soil_Dry_P Parameter: Post-Treatment Value: None
  misc_feature: MA Experiment 20001560 PARAMETER Experiment Name: At_Drought_Soil_Dry_P Parameter: Timepoint (day) Value: 14
  misc_feature: MA Experiment 20001560 PARAMETER Experiment Name: At_Drought_Soil_Dry_P Parameter: Treatment Value: Drought vs. No Drought
  misc_feature: MA Experiment ID: 20001905 Result: Up-regulated in Transcription
  misc_feature: MA Experiment 20001905 PARAMETER Experiment Name: At_Drought_Reproduction_P Parameter: Age (day) Value: 40
  misc_feature: MA Experiment 20001905 PARAMETER Experiment Name: At_Drought_Reproduction_P Parameter: Organism Value: A. thaliana
  misc_feature: MA Experiment 20001905 PARAMETER Experiment Name: At_Drought_Reproduction_P Parameter: Plant Line Value: WS
  misc_feature: MA Experiment 20001905 PARAMETER Experiment Name: At_Drought_Reproduction_P Parameter: Timepoint (day) Value: 10
  misc_feature: MA Experiment 20001905 PARAMETER Experiment Name: At_Drought_Reproduction_P Parameter: Tissue Value: Rosettes
  misc_feature: MA Experiment 20001905 PARAMETER Experiment Name: At_Drought_Reproduction_P Parameter: Treatment Value: Drought vs. No Drought
tgagtaatagtgagcaaaatgcaagagctagtgtgaacaagaatggattaagagacttgaggaacaaatctggttctgatgttcttccatctaattcaactccgacaagaaaaagtaacatctttagaaagaaaacctctgatggtgagagcagctcttcgagtagagggaataagacggaaggatcagtggttgggggaaagaatattagttcccctcaggggaatggcatcaccatgtctgaacctaggaggaacagaaacttaccaagtgttagggacaacagtgttgtttcaagtagtactaggagatcaactggttattatggtagaacaggacgtgctggagcggttgcaacactacaagcacctcggcctccaacaagagctgatctcaatccttctagatcggcagaagcttcgcgtagtcctttaaatagttacagtaggccaatcagtagtaatggcaggttacgtagcctgatgatgcctggtagcccctcagaagccggcctttctcgctctttgatgaaccgtgatacttacagacggtataacatgaatggagttgcagaggtattgttggccctggaaaggattgagcaagacgaagagcttacatacgagcaattggctgttttagagaccaatctgttcttaaatggtatgagcagcttccacgatcagcatagagatatgaggcttgacattgacaacatgtcgtatgaggaactgttagcattagaggagaaaatgggtacagtgagcactgctctaagcgaagaagcgcttctgaaaagcctcaagtcaagtatttaccgtccaaacgatgaatccgacgacatttgcctgaacaaagatgatgatgtcaagtgcagcatttgccaggaagagtatgttgatggagatgaagtagggactttgccttgccaacataaataccacgtgagctgcgcgcaacaatggctacggatgaagaattggtgtcctatatgtaaaacctctgcagaatctcagccacatccattttcatgatgatgggattgcagagacatttaccaaagtgtttgtgtctacttccactaccttgctctctattatttgtacataaaaggttttcttttttacttacacacaattgggaacaaatagaaaataagatcaggtggacaaattattgttttcaccttgtattggttcgtaatttcaacaatatttggtttaattccatatatagttt

SEQ ID NO: 39663 - protein, 343 aa, Arabidopsis thaliana
  peptide (1)..(343): Ceres Seq. ID no. 12422129
  misc_feature (291)..(331): Pfam Name: Zinc finger, C3HC4 type (RING finger) Pfam Description: Zinc finger, C3HC4 type (RING finger)
  misc_feature (48)..(335): Homolog of NCBI NO: 38345496 NR Description: OSJNBa0010D21.9 [Oryza sativa (japonica
  misc_feature (6)..(334): Homolog of NCBI NO: 15239131 NR Description: putative protein
  misc_feature (133)..(339): Homolog of NCBI NO: 15226553 NR Description: putative RING zinc finger protein; protein id:
  misc_feature (133)..(337): Homolog of NCBI NO: 15235211 NR Description: putative protein; protein id: At4g34040.1
  misc_feature (25)..(337): Homolog of NCBI NO: 18417809 NR Description: putative protein
  misc_feature (25)..(337): Homolog of NCBI NO: 7486381 NR Description: hypothetical protein F3L17.20 - Arabidopsis
  misc_feature (2)..(338): Homolog of NCBI NO: 22326712 NR Description: Pspzf zinc finger protein - like
  misc_feature (2)..(338): Homolog of NCBI NO: 20466428 NR Description: Pspzf zinc finger protein-like [Arabidopsis
  misc_feature (2)..(338): Homolog of NCBI NO: 10129643 NR Description: Pspzf zinc finger protein-like [Arabidopsis
  misc_feature (1)..(343): Homolog of NCBI NO: 30689641 NR Description: RING finger-related protein [Arabidopsis
SNSEQNARASVNKNGLRDLRNKSGSDVLPSNSTPTRKSNIFRKKTSDGESSSSSRGNKTEGSVVGGKNISSPQGNGITMSEPRRNRNLPSVRDNSVVSSSTRRSTGYYGRTGRAGAVATLQAPRPPTRADLNPSRSAEASRSPLNSYSRPISSNGRLRSLMMPGSPSEAGLSRSLMNRDTYRRYNMNGVAEVLLALERIEQDEELTYEQLAVLETNLFLNGMSSFHDQHRDMRLDIDNMSYEELLALEEKMGTVSTALSEEALLKSLKSSIYRPNDESDDICLNKDDDVKCSICQEEYVDGDEVGTLPCQHKYHVSCAQQWLRMKNWCPICKTSAESQPHPFS

SEQ ID NO: 39664 - protein, 265 aa, Arabidopsis thaliana
  peptide (1)..(265): Ceres Seq. ID no. 12422130
  misc_feature (213)..(253): Pfam Name: Zinc finger, C3HC4 type (RING finger) Pfam Description: Zinc finger, C3HC4 type (RING finger)
  misc_feature (1)..(257): Homolog of NCBI NO: 38345496 NR Description: OSJNBa0010D21.9 [Oryza sativa (japonica
  misc_feature (1)..(256): Homolog of NCBI NO: 15239131 NR Description: putative protein
  misc_feature (55)..(261): Homolog of NCBI NO: 15226553 NR Description: putative RING zinc finger protein; protein id:
  misc_feature (55)..(259): Homolog of NCBI NO: 15235211 NR Description: putative protein; protein id: At4g34040.1
  misc_feature (1)..(259): Homolog of NCBI NO: 18417809 NR Description: putative protein
  misc_feature (1)..(259): Homolog of NCBI NO: 7486381 NR Description: hypothetical protein F3L17.20 - Arabidopsis
  misc_feature (1)..(260): Homolog of NCBI NO: 20466428 NR Description: Pspzf zinc finger protein-like [Arabidopsis
  misc_feature (1)..(260): Homolog of NCBI NO: 22326712 NR Description: Pspzf zinc finger protein - like
  misc_feature (1)..(260): Homolog of NCBI NO: 10129643 NR Description: Pspzf zinc finger protein-like [Arabidopsis
  misc_feature (1)..(265): Homolog of NCBI NO: 30689641 NR Description: RING finger-related protein [Arabidopsis
MSEPRRNRNLPSVRDNSVVSSSTRRSTGYYGRTGRAGAVATLQAPRPPTRADLNPSRSAEASRSPLNSYSRPISSNGRLRSLMMPGSPSEAGLSRSLMNRDTYRRYNMNGVAEVLLALERIEQDEELTYEQLAVLETNLFLNGMSSFHDQHRDMRLDIDNMSYEELLALEEKMGTVSTALSEEALLKSLKSSIYRPNDESDDICLNKDDDVKCSICQEEYVDGDEVGTLPCQHKYHVSCAQQWLRMKNWCPICKTSAESQPHPFS

SEQ ID NO: 39665 - protein, 183 aa, Arabidopsis thaliana
  peptide (1)..(183): Ceres Seq. ID no. 12422131
  misc_feature (131)..(171): Pfam Name: Zinc finger, C3HC4 type (RING finger) Pfam Description: Zinc finger, C3HC4 type (RING finger)
  misc_feature (1)..(175): Homolog of NCBI NO: 38345496 NR Description: OSJNBa0010D21.9 [Oryza sativa (japonica
  misc_feature (1)..(174): Homolog of NCBI NO: 15239131 NR Description: putative protein
  misc_feature (1)..(179): Homolog of NCBI NO: 15226553 NR Description: putative RING zinc finger protein; protein id:
  misc_feature (1)..(177): Homolog of NCBI NO: 15235211 NR Description: putative protein; protein id: At4g34040.1
  misc_feature (1)..(177): Homolog of NCBI NO: 18417809 NR Description: putative protein
  misc_feature (1)..(177): Homolog of NCBI NO: 7486381 NR Description: hypothetical protein F3L17.20 - Arabidopsis
  misc_feature (1)..(178): Homolog of NCBI NO: 22326712 NR Description: Pspzf zinc finger protein - like
  misc_feature (1)..(178): Homolog of NCBI NO: 20466428 NR Description: Pspzf zinc finger protein-like [Arabidopsis
  misc_feature (1)..(178): Homolog of NCBI NO: 10129643 NR Description: Pspzf zinc finger protein-like [Arabidopsis
  misc_feature (1)..(183): Homolog of NCBI NO: 30689641 NR Description: RING finger-related protein [Arabidopsis
MMPGSPSEAGLSRSLMNRDTYRRYNMNGVAEVLLALERIEQDEELTYEQLAVLETNLFLNGMSSFHDQHRDMRLDIDNMSYEELLALEEKMGTVSTALSEEALLKSLKSSIYRPNDESDDICLNKDDDVKCSICQEEYVDGDEVGTLPCQHKYHVSCAQQWLRMKNWCPICKTSAESQPHPFS

SEQ ID NO: 39666 - DNA, 1484 bp, Arabidopsis thaliana
  misc_feature (1)..(1484): Ceres Seq. ID no. 12328944
  misc_feature: MA Experiment ID: 108434 Result: Up-regulated in Transcription
  misc_feature: MA Experiment 108434 PARAMETER Experiment Name: At_Root_Tips_cDNA_P Parameter: Tissue Value: Root Tips
  misc_feature: MA Experiment ID: 108576 Result: Up-regulated in Transcription
  misc_feature: MA Experiment 108576 PARAMETER Experiment Name: At_42deg_Heat_cDNA_P Parameter: Temperature (deg C) Value: 42 vs. 22
  misc_feature: MA Experiment 108576 PARAMETER Experiment Name: At_42deg_Heat_cDNA_P Parameter: Timepoint (hr) Value: 1
  misc_feature: MA Experiment 108576 PARAMETER Experiment Name: At_42deg_Heat_cDNA_P Parameter: Tissue Value: Aerial
  misc_feature: MA Experiment ID: 20000112 Result: Up-regulated in Transcription
  misc_feature: MA Experiment 20000112 PARAMETER Experiment Name: At_42deg_Heat_cDNA_P Parameter: Temperature (deg C) Value: 42 vs. 22
  misc_feature: MA Experiment 20000112 PARAMETER Experiment Name: At_42deg_Heat_cDNA_P Parameter: Timepoint (hr) Value: 2
  misc_feature: MA Experiment 20000112 PARAMETER Experiment Name: At_42deg_Heat_cDNA_P Parameter: Tissue Value: Aerial
  misc_feature: MA Experiment ID: 20000144 Result: Up-regulated in Transcription
  misc_feature: MA Experiment 20000144 PARAMETER Experiment Name: At_42deg_Heat_cDNA_P Parameter: Temperature (deg C) Value: 42 vs. 22
  misc_feature: MA Experiment 20000144 PARAMETER Experiment Name: At_42deg_Heat_cDNA_P Parameter: Timepoint (hr) Value: 1
  misc_feature: MA Experiment 20000144 PARAMETER Experiment Name: At_42deg_Heat_cDNA_P Parameter: Tissue Value: Aerial
attttttcatcacttatcagcgatttgacgagaagagccttttggtttctgcgaatcatccaaaatccgccatggaagcaactacaagaatcttgagtacttcttctgctctcaatcgtcttcttcttctcagtaagctcaatctaaaatcagatccccgtaatatcaattccacaaatcagctactacacaatgccgttacccgaaaatcctctatctccgccgctcgtatacggtgctcttcgctccctgcgaatgcgaatctcttcagatcactcttcttcctaacgtcaacgtttcgtctcgagaacaccgccgttcacgctaatccattccgatccgaacctaacgacggcgtcgccgtctggaacagagctccacggatcgtgaacggaggtggaaacgcggcgatattcggcgggaacgaggggaaagagacgacggtggttctccttggttggctaggagcgaaagctaaacatctaaggagatacgttgagtggtacaactccaggggaattaacgccgttactttcactgttgacgttagggatttgctccggttagatcttggtcggcggcttgaacgaaggatagctgaatttgggaatgaattggttaattgggtatcggagaaagaagatgatggtagagagaaatgcttggtgtttcacagcttcagtaacactggttggcttgtatatggtgccttgctagagagcttcattggtagacaagatttagtagaaaggattgagggttgtatcattgactcgggaggagcagatcctcttgatactaagatttgggcagcggggtttaccgcagctatactgaagaagcgtagctccaccataaccacagaaccaaacagtcccataaaagaagaggatgcttcaacaccacaaaagaaggaacctttaggaatcgaaaacataatgctatcatctctggagaaactcttccccatcttcttaaaccacccagacgtcaatacgaggctaacaaaaatcattcaaaaactatatgagaaccatcctccatgtcctcagctctatctttacagctccggggacaaagttgttccatctcattccgttgagctccgcatccgagaacaacagaagattggaagaaagatacattctttcaatttcaagtcctctcctcacgtggatcattaccggaactttcctgacttgtattcctcacagcttcaaaacttcttgcaagaatgcttcacaccaacaaaacaacaagctctgtgactttggaacatctttttttgcagaatatttgtagccttggtttgtttgtttgttttctcctcaaaagttgtttattattgatgatagaacaagataatccgaaggagacagaaactccaaactgtgtcgacgagctactgagcagagatagtttctgaaactcttagattgttgttgctagtttggcttcatatgtgaaacttgaccgatgctcgg

SEQ ID NO: 39667 - protein, 421 aa, Arabidopsis thaliana
  peptide (1)..(421): Ceres Seq. ID no. 12328945
  misc_feature (144)..(412): Pfam Name: Eukaryotic protein of unknown function (DUF829) Pfam Description: Eukaryotic protein of unknown function (DUF829)
  misc_feature (349)..(421): Homolog of NCBI NO: 19528521 NR Description: RE54285p [Drosophila melanogaster]
  misc_feature (97)..(258): Homolog of NCBI NO: 19528521 NR Description: RE54285p [Drosophila melanogaster]
  misc_feature (335)..(412): Homolog of NCBI NO: 40555886 NR Description: Hypothetical protein FLJ22353 [Homo sapiens]
  misc_feature (139)..(285): Homolog of NCBI NO: 40555886 NR Description: Hypothetical protein FLJ22353 [Homo sapiens]
  misc_feature (312)..(412): Homolog of NCBI NO: 13375774 NR Description: hypothetical protein FLJ22353 [Homo sapiens]
  misc_feature (139)..(285): Homolog of NCBI NO: 13375774 NR Description: hypothetical protein FLJ22353 [Homo sapiens]
  misc_feature (126)..(409): Homolog of NCBI NO: 18402437 NR Description: expressed protein
  misc_feature (2)..(268): Homolog of NCBI NO: 25411844 NR Description: probable integral membrane protein
  misc_feature (24)..(421): Homolog of NCBI NO: 18398681 NR Description: Expressed protein
  misc_feature (24)..(421): Homolog of NCBI NO: 21536700 NR Description: unknown [Arabidopsis thaliana]
FFITYQRFDEKSLLVSANHPKSAMEATTRILSTSSALNRLLLLSKLNLKSDPRNINSTNQLLHNAVTRKSSISAARIRCSSLPANANLFRSLFFLTSTFRLENTAVHANPFRSEPNDGVAVWNRAPRIVNGGGNAAIFGGNEGKETTVVLLGWLGAKAKHLRRYVEWYNSRGINAVTFTVDVRDLLRLDLGRRLERRIAEFGNELVNWVSEKEDDGREKCLVFHSFSNTGWLVYGALLESFIGRQDLVERIEGCIIDSGGADPLDTKIWAAGFTAAILKKRSSTITTEPNSPIKEEDASTPQKKEPLGIENIMLSSLEKLFPIFLNHPDVNTRLTKIIQKLYENHPPCPQLYLYSSGDKVVPSHSVELRIREQQKIGRKIHSFNFKSSPHVDHYRNFPDLYSSQLQNFLQECFTPTKQQAL

SEQ ID NO: 39668 - protein, 398 aa, Arabidopsis thaliana
  peptide (1)..(398): Ceres Seq. ID no. 12328946
  misc_feature (121)..(389): Pfam Name: Eukaryotic protein of unknown function (DUF829) Pfam Description: Eukaryotic protein of unknown function (DUF829)
  misc_feature (326)..(398): Homolog of NCBI NO: 19528521 NR Description: RE54285p [Drosophila melanogaster]
  misc_feature (74)..(235): Homolog of NCBI NO: 19528521 NR Description: RE54285p [Drosophila melanogaster]
  misc_feature (312)..(389): Homolog of NCBI NO: 40555886 NR Description: Hypothetical protein FLJ22353 [Homo sapiens]
  misc_feature (116)..(262): Homolog of NCBI NO: 40555886 NR Description: Hypothetical protein FLJ22353 [Homo sapiens]
  misc_feature (289)..(389): Homolog of NCBI NO: 13375774 NR Description: hypothetical protein FLJ22353 [Homo sapiens]
  misc_feature (116)..(262): Homolog of NCBI NO: 13375774 NR Description: hypothetical protein FLJ22353 [Homo sapiens]
  misc_feature (103)..(386): Homolog of NCBI NO: 18402437 NR Description: expressed protein
  misc_feature (1)..(245): Homolog of NCBI NO: 25411844 NR Description: probable integral membrane protein
  misc_feature (1)..(398): Homolog of NCBI NO: 18398681 NR Description: Expressed protein
  misc_feature (1)..(398): Homolog of NCBI NO: 21536700 NR Description: unknown [Arabidopsis thaliana]
MEATTRILSTSSALNRLLLLSKLNLKSDPRNINSTNQLLHNAVTRKSSISAARIRCSSLPANANLFRSLFFLTSTFRLENTAVHANPFRSEPNDGVAVWNRAPRIVNGGGNAAIFGGNEGKETTVVLLGWLGAKAKHLRRYVEWYNSRGINAVTFTVDVRDLLRLDLGRRLERRIAEFGNELVNWVSEKEDDGREKCLVFHSFSNTGWLVYGALLESFIGRQDLVERIEGCIIDSGGADPLDTKIWAAGFTAAILKKRSSTITTEPNSPIKEEDASTPQKKEPLGIENIMLSSLEKLFPIFLNHPDVNTRLTKIIQKLYENHPPCPQLYLYSSGDKVVPSHSVELRIREQQKIGRKIHSFNFKSSPHVDHYRNFPDLYSSQLQNFLQECFTPTKQQAL

SEQ ID NO: 39669 - DNA, 1411 bp, Arabidopsis thaliana
  misc_feature (1)..(1411): Ceres Seq. ID no. 12336219
  misc_feature: MA Experiment ID: 108434 Result: Up-regulated in Transcription
  misc_feature: MA Experiment 108434 PARAMETER Experiment Name: At_Root_Tips_cDNA_P Parameter: Tissue Value: Root Tips
  misc_feature: MA Experiment ID: 20000179 Result: Up-regulated in Transcription
  misc_feature: MA Experiment 20000179 PARAMETER Experiment Name: At_Germinating_Seeds_P Parameter: Age (hr) Value: 6 vs. 0
  misc_feature: MA Experiment 20000179 PARAMETER Experiment Name: At_Germinating_Seeds_P Parameter: Tissue Value: Germinating Seeds
aaaaaatatttatgttgggtcaggcttaaaccagagagagactgtgtgtggtcgagccatttgaccaaaagcaaaaacttaaaactggtttcagatctgaagtaaaagggttttgcttcggattctccggcgtcgtttaaatgatctctgacccatcttccttggcttaataattctggtccctccttttatctctttttactgttgatttatctgaatatgccacgctctttcttccacatgtttattctctcttcctttcttcaacacaagcgtctggactaaggaaagccaacaacaaaatctggtttcaagacggttggcaggagtttgtcaaccgtttctccattcggattggtttcagatacaaagttacagtctacattttcaatttatcctccacactctgagatcaaccaccattctagtagtgaagctcttatgcaaatggattccgcacagaatcagttcaacaaacgtgctcgattgtttgaagatcctgaactcaaagatgctaaggtcatttatccatcgaaccctgaatctactgaaccagtgaataaaggttatggcggttctacagccatccaaagctttttcaaagaatctaaagctgaagaaacgcccaaggtacttaagaagagaggaaggaagaagaagaatcctaatcccgaggaagtaaactcttcaactcccggtggagatgactcagagaaccgctcaaagttctacgagagtgcttctgctagaaagagaactgtaactgcagaggaaagagagagagccgtcaatgcagccaaaacattcgaaccaacaaatccttactttagagttgttctgcgaccatcatatctatacagaggttgcatcatgtacttgccatctgggtttgctgagaaatacctaagtgggatatctggtttcatcaagctccagctcggtgagaaacaatggccagtgaggtgcctctacaaagcagggagagctaagtttagccaaggatggtatgagttcacactcgagaacaatataggcgaaggagatgtatgtgtgtttgagctactcagaactcgggatttcgttctcgaagtcaccgcctttcgtgtcaatgagtatgtgtgaccaaaaaagatttccctttcatcagcgatcttgcaggtagctttccaaagttaaaattttatgtaggggtctcttaaccattctctctcttgcattggttgtctctgttctagtagtgttttgagtgaaatttcaggttcctatgtttggatgtggataagtatttgacgattataataacctctgagtgggaaactctttgtttgagtggtagctaggttcaaaagtagagttgtatatacttttatcttcatcaggataattatgtttatttgaattgttgattatt

SEQ ID NO: 39670 - protein, 226 aa, Arabidopsis thaliana
  peptide (1)..(226): Ceres Seq. ID no. 12336220
  misc_feature (128)..(225): Pfam Name: B3 DNA binding domain Pfam Description: B3 DNA binding domain
  misc_feature (97)..(224): Homolog of NCBI NO: 34910734 NR Description: P0022F10.13 [Oryza sativa (japonica
  misc_feature (3)..(226): Homolog of NCBI NO: 9280316 NR Description: gb|AAD43153.1~gene_id:K13E13.10~similar to
  misc_feature (1)..(226): Homolog of NCBI NO: 33943517 NR Description: reduced vernalization response 1 [Brassica rapa]
  misc_feature (1)..(226): Homolog of NCBI NO: 40806799 NR Description: reduced vernalization response 1 [Brassica rapa]
  misc_feature (1)..(226): Homolog of NCBI NO: 30685150 NR Description: transcriptional factor B3 family [Arabidopsis
  misc_feature (1)..(226): Homolog of NCBI NO: 14596161 NR Description: Unknown protein [Arabidopsis thaliana]
  misc_feature (1)..(226): Homolog of NCBI NO: 18402653 NR Description: expressed protein
MQMDSAQNQFNKRARLFEDPELKDAKVIYPSNPESTEPVNKGYGGSTAIQSFFKESKAEETPKVLKKRGRKKKNPNPEEVNSSTPGGDDSENRSKFYESASARKRTVTAEERERAVNAAKTFEPTNPYFRVVLRPSYLYRGCIMYLPSGFAEKYLSGISGFIKLQLGEKQWPVRCLYKAGRAKFSQGWYEFTLENNIGEGDVCVFELLRTRDFVLEVTAFRVNEYV

SEQ ID NO: 39671 - protein, 224 aa, Arabidopsis thaliana
  peptide (1)..(224): Ceres Seq. ID no. 12336221
  misc_feature (126)..(223): Pfam Name: B3 DNA binding domain Pfam Description: B3 DNA binding domain
  misc_feature (95)..(222): Homolog of NCBI NO: 34910734 NR Description: P0022F10.13 [Oryza sativa (japonica
  misc_feature (1)..(224): Homolog of NCBI NO: 9280316 NR Description: gb|AAD43153.1~gene_id:K13E13.10~similar to
  misc_feature (1)..(224): Homolog of NCBI NO: 33943517 NR Description: reduced vernalization response 1 [Brassica rapa]
  misc_feature (1)..(224): Homolog of NCBI NO: 40806799 NR Description: reduced vernalization response 1 [Brassica rapa]
  misc_feature (1)..(224): Homolog of NCBI NO: 30685150 NR Description: transcriptional factor B3 family [Arabidopsis
  misc_feature (1)..(224): Homolog of NCBI NO: 14596161 NR Description: Unknown protein [Arabidopsis thaliana]
  misc_feature (1)..(224): Homolog of NCBI NO: 18402653 NR Description: expressed protein
MDSAQNQFNKRARLFEDPELKDAKVIYPSNPESTEPVNKGYGGSTAIQSFFKESKAEETPKVLKKRGRKKKNPNPEEVNSSTPGGDDSENRSKFYESASARKRTVTAEERERAVNAAKTFEPTNPYFRVVLRPSYLYRGCIMYLPSGFAEKYLSGISGFIKLQLGEKQWPVRCLYKAGRAKFSQGWYEFTLENNIGEGDVCVFELLRTRDFVLEVTAFRVNEYV

SEQ ID NO: 39672 - DNA, 680 bp, Arabidopsis thaliana
  misc_feature (1)..(680): Ceres Seq. ID no. 12326513
  misc_feature: MA Experiment ID: 20000071 Result: Down-regulated in Transcription
  misc_feature: MA Experiment 20000071 PARAMETER Experiment Name: At_100uM_ABA_Mutants_cDNA_P Parameter: Plant Line Value: CS8104
  misc_feature: MA Experiment 20000071 PARAMETER Experiment Name: At_100uM_ABA_Mutants_cDNA_P Parameter: Timepoint (hr) Value: 6
  misc_feature: MA Experiment 20000071 PARAMETER Experiment Name: At_100uM_ABA_Mutants_cDNA_P Parameter: Tissue Value: Aerial
  misc_feature: MA Experiment 20000071 PARAMETER Experiment Name: At_100uM_ABA_Mutants_cDNA_P Parameter: Treatment Value: 100uM ABA vs. No Treatment
  misc_feature: MA Experiment ID: 20000437 Result: Down-regulated in Transcription
  misc_feature: MA Experiment 20000437 PARAMETER Experiment Name: At_Drought_P Parameter: Age (day) Value: 8
  misc_feature: MA Experiment 20000437 PARAMETER Experiment Name: At_Drought_P Parameter: Organism Value: A. thaliana
  misc_feature: MA Experiment 20000437 PARAMETER Experiment Name: At_Drought_P Parameter: Plant Line Value: WS
  misc_feature: MA Experiment 20000437 PARAMETER Experiment Name: At_Drought_P Parameter: Timepoint (hr) Value: 24
  misc_feature: MA Experiment 20000437 PARAMETER Experiment Name: At_Drought_P Parameter: Tissue Value: Whole Plant
  misc_feature: MA Experiment 20000437 PARAMETER Experiment Name: At_Drought_P Parameter: Treatment Value: Drought vs. No Drought
  misc_feature: MA Experiment ID: 20001557 Result: Up-regulated in Transcription
  misc_feature: MA Experiment 20001557 PARAMETER Experiment Name: At_Drought_Soil_Dry_P Parameter: Age (day) Value: 27
  misc_feature: MA Experiment 20001557 PARAMETER Experiment Name: At_Drought_Soil_Dry_P Parameter: Organism Value: A. thaliana
  misc_feature: MA Experiment 20001557 PARAMETER Experiment Name: At_Drought_Soil_Dry_P Parameter: Plant Line Value: WS
  misc_feature: MA Experiment 20001557 PARAMETER Experiment Name: At_Drought_Soil_Dry_P Parameter: Post Timepoint (hr) Value: 3
  misc_feature: MA Experiment 20001557 PARAMETER Experiment Name: At_Drought_Soil_Dry_P Parameter: Post-Treatment Value: Re-Water vs. No Drought
  misc_feature: MA Experiment 20001557 PARAMETER Experiment Name: At_Drought_Soil_Dry_P Parameter: Timepoint (day) Value: 13
  misc_feature: MA Experiment 20001557 PARAMETER Experiment Name: At_Drought_Soil_Dry_P Parameter: Treatment Value: Drought vs. No Drought
  misc_feature: MA Experiment ID: 20001558 Result: Up-regulated in Transcription
  misc_feature: MA Experiment 20001558 PARAMETER Experiment Name: At_Drought_Soil_Dry_P Parameter: Age (day) Value: 27
  misc_feature: MA Experiment 20001558 PARAMETER Experiment Name: At_Drought_Soil_Dry_P Parameter: Organism Value: A. thaliana
  misc_feature: MA Experiment 20001558 PARAMETER Experiment Name: At_Drought_Soil_Dry_P Parameter: Plant Line Value: WS
  misc_feature: MA Experiment 20001558 PARAMETER Experiment Name: At_Drought_Soil_Dry_P Parameter: Post Timepoint (hr) Value: 6
  misc_feature: MA Experiment 20001558 PARAMETER Experiment Name: At_Drought_Soil_Dry_P Parameter: Post-Treatment Value: Re-Water vs. No Drought
  misc_feature: MA Experiment 20001558 PARAMETER Experiment Name: At_Drought_Soil_Dry_P Parameter: Timepoint (day) Value: 13
  misc_feature: MA Experiment 20001558 PARAMETER Experiment Name: At_Drought_Soil_Dry_P Parameter: Treatment Value: Drought vs. No Drought
aggaagggtttatagattaggtttttaagtcgcacctctctctctcactgccgcatcttttcttagggttcttgtttcgctatctcttaaacacaaacagctctgtccgaataatctctcttcaagtacctctttttcctgattctgtatatcgccatgaattactgatttccctctctataaacccatcaaagtaaaccaatttctcctgtgacttgtacctaactcgatcttaccagactggtgatggcgtctttgaaccctttcgatcttctaggagatgatgctgaggatccaagccagctcgctgtggctttgtctcagaaagtcgagaaagctgctgctgctgttcagcctcctaaggccgctaagttcccaaccaagccggctcctccttctcaagcagtgagggagtcgaggaatgctcctcaaggaggtcgtggtgggactggtggaggaggaaaccaaaggtatgcaaaagaagctgcagctccggcgattggagacacagctcagttcccttcgttgggctagtaaagacccctggtccttcagcctcgctatctctgtctttcgtttctctttggttgaattttgttagttttataattttttgttacactttctgaaggtcttttctgcgaaactattacgttttttaagttatgaaaaaaattatt

SEQ ID NO: 39673 - protein, 95 aa, Arabidopsis thaliana
  peptide (1)..(95): Ceres Seq. ID no. 12326514
  misc_feature (1)..(75): Homolog of NCBI NO: 39725276 NR Description: salt tolerance protein 1 [Beta vulgaris]
  misc_feature (1)..(78): Homolog of NCBI NO: 6492266 NR Description: nuclear RNA binding protein A [Spinacia oleracea]
  misc_feature (1)..(93): Homolog of NCBI NO: 7488863 NR Description: probable transcription factor - fava bean
  misc_feature (1)..(78): Homolog of NCBI NO: 39725278 NR Description: salt tolerance protein 2 [Beta vulgaris]
  misc_feature (1)..(75): Homolog of NCBI NO: 21537052 NR Description: nuclear antigen homolog [Arabidopsis thaliana]
  misc_feature (1)..(70): Homolog of NCBI NO: 15235894 NR Description: nuclear antigen homolog
  misc_feature (1)..(84): Homolog of NCBI NO: 21593013 NR Description: nuclear RNA binding protein A-like protein
  misc_feature (1)..(84): Homolog of NCBI NO: 15236552 NR Description: nuclear RNA binding protein A-like protein
  misc_feature (1)..(75): Homolog of NCBI NO: 21553991 NR Description: nuclear RNA binding protein A-like protein
  misc_feature (1)..(75): Homolog of NCBI NO: 15238039 NR Description: putative protein
MASLNPFDLLGDDAEDPSQLAVALSQKVEKAAAAVQPPKAAKFPTKPAPPSQAVRESRNAPQGGRGGTGGGGNQRYAKEAAAPAIGDTAQFPSLG

SEQ ID NO: 39674 - protein, 59 aa, Arabidopsis thaliana
  peptide (1)..(59): Ceres Seq. ID no. 12326515
MLLKEVVVGLVEEETKGMQKKLQLRRLETQLSSLRWASKDPWSFSLAISVFRFSLVEFC

SEQ ID NO: 39675 - DNA, 1293 bp, Arabidopsis thaliana
  misc_feature (1)..(1293): Ceres Seq. ID no. 13488711
  misc_feature: MA Experiment ID: 108461 Result: Up-regulated in Transcription
  misc_feature: MA Experiment 108461 PARAMETER Experiment Name: At_Germinating_Seeds_cDNA_P Parameter: Age (day) Value: 1 vs. 0
  misc_feature: MA Experiment 108461 PARAMETER Experiment Name: At_Germinating_Seeds_cDNA_P Parameter: Tissue Value: Germinating Seeds
  misc_feature: MA Experiment ID: 108462 Result: Up-regulated in Transcription
  misc_feature: MA Experiment 108462 PARAMETER Experiment Name: At_Germinating_Seeds_cDNA_P Parameter: Age (day) Value: 2 vs. 0
  misc_feature: MA Experiment 108462 PARAMETER Experiment Name: At_Germinating_Seeds_cDNA_P Parameter: Tissue Value: Germinating Seeds
  misc_feature: MA Experiment ID: 108463 Result: Up-regulated in Transcription
  misc_feature: MA Experiment 108463 PARAMETER Experiment Name: At_Germinating_Seeds_cDNA_P Parameter: Age (day) Value: 3 vs. 0
  misc_feature: MA Experiment 108463 PARAMETER Experiment Name: At_Germinating_Seeds_cDNA_P Parameter: Tissue Value: Germinating Seeds
  misc_feature: MA Experiment ID: 108573 Result: Up-regulated in Transcription
  misc_feature: MA Experiment 108573 PARAMETER Experiment Name: At_Drought_cDNA_P Parameter: Timepoint (hr) Value: 6
  misc_feature: MA Experiment 108573 PARAMETER Experiment Name: At_Drought_cDNA_P Parameter: Tissue Value: Aerial
  misc_feature: MA Experiment 108573 PARAMETER Experiment Name: At_Drought_cDNA_P Parameter: Treatment Value: Drought vs. No Drought
  misc_feature: MA Experiment ID: 20000224 Result: Up-regulated in Transcription
  misc_feature: MA Experiment ID: 20000227 Result: Up-regulated in Transcription
  misc_feature: MA Experiment 20000227 PARAMETER Experiment Name: At_Root-Tips-vs-Tops_P Parameter: Tissue Value: Root Tips vs. Root Tops
  misc_feature: MA Experiment ID: 20000265 Result: Up-regulated in Transcription
  misc_feature: MA Experiment 20000265 PARAMETER Experiment Name: At_Open_Flower_P Parameter: Age (day) Value: 21
  misc_feature: MA Experiment 20000265 PARAMETER Experiment Name: At_Open_Flower_P Parameter: Plant Line Value: WS
  misc_feature: MA Experiment 20000265 PARAMETER Experiment Name: At_Open_Flower_P Parameter: Tissue Value: Closed Flower vs. Whole Plant
ggaaccaattggttctgatttcagatttcgaatttttttaatttgaatccaaatggagaaagcagagaacgagaataagccatcggctgtatctgacgtcggagcatgggctatgaacgtaacgagctccgttgggatcatcatggctaataaacaactaatgtcatcatctggattaggcttcagcttcgcgacaactctcacgggatttcactttgctcttactgctctcgttggtatggtgtcgaatgcgactggtttatcagcatctaagcatgttcctctttgggagcttctttggttctcactcgttgctaatatctcaatcgctgctatgaattttagtcttatgttgaactctgttggcttctaccagatatcgaaattgagcatgattccagttgtttgtgtgatggaatgggttctacatagtaagcattactcgagagaagtgaaggcatctgtcatggttgttgttgtaggagttgggatttgtactgttactgatgtcaaagttaatgccaaaggtttcatttgtgcttgcactgccgttttctccacttctctccagcagatctcaataggttcactgcagaagaaatactcgatcggatcattcgagttgctgagtaagacagctccaatccaagccatttcactcctcatctttggtccatttgttgactatttcttgagtggcagattcatttcgacttacaagatgacttatagcgcaatgttatgcattcttctctcctgcgcattggcggttttctgcaacataagccaatatctctgcatcggaagattctctgctacctcattccaagttcttggccacatgaaaacagtctgtgtcttaacattaggatggcttatctttgattcggagatgacattcaagaacatagcagggatggtcttagccgtggtgggaatggtgatatacagttgggcagtcgagttagagaaacagagaaagtcgaaagtgataccgcatggtaaacacagtatgacagaagatgagattaaacttctcaaagaaggtatagaacatatggatttgaaagacatggagcttggaaataataaagcataaatatagctctattcaagagaaacgttttttggttatatttttggttactcatttcccccatcatgtactcttttcttttgccctttttttcgttctttgtctcaaagaacctttttagcctcttattgatgagctctcctctgcagagcacattcttttttctatagaaatatatgattcctctacttctttgc

SEQ ID NO: 39676 - protein, 348 aa, Arabidopsis thaliana
  peptide (1)..(348): Ceres Seq. ID no. 13488712
  misc_feature (1)..(315): Homolog of NCBI NO: 18399097 NR Description: transporter-related [Arabidopsis thaliana]
  misc_feature (1)..(337): Homolog of NCBI NO: 15234794 NR Description: transporter-related [Arabidopsis thaliana]
  misc_feature (12)..(318): Homolog of NCBI NO: 30313364 NR Description: putative transmembrane protein [Oryza sativa]
  misc_feature (5)..(48): Homolog of NCBI NO: 33146838 NR Description: transporter-related-like [Oryza sativa (japonica
  misc_feature (43)..(348): Homolog of NCBI NO: 33146838 NR Description: transporter-related-like [Oryza sativa (japonica
  misc_feature (4)..(347): Homolog of NCBI NO: 15238957 NR Description: transporter-related [Arabidopsis thaliana]
  misc_feature (37)..(348): Homolog of NCBI NO: 26450366 NR Description: unknown protein [Arabidopsis thaliana]
  misc_feature (1)..(347): Homolog of NCBI NO: 18411172 NR Description: transporter-related [Arabidopsis thaliana]
  misc_feature (1)..(348): Homolog of NCBI NO: 18394949 NR Description: transporter-related [Arabidopsis thaliana]
  misc_feature (1)..(348): Homolog of NCBI NO: 21536703 NR Description: unknown [Arabidopsis thaliana]
MEKAENENKPSAVSDVGAWAMNVTSSVGIIMANKQLMSSSGLGFSFATTLTGFHFALTALVGMVSNATGLSASKHVPLWELLWFSLVANISIAAMNFSLMLNSVGFYQISKLSMIPVVCVMEWVLHSKHYSREVKASVMVVVVGVGICTVTDVKVNAKGFICACTAVFSTSLQQISIGSLQKKYSIGSFELLSKTAPIQAISLLIFGPFVDYFLSGRFISTYKMTYSAMLCILLSCALAVFCNISQYLCIGRFSATSFQVLGHMKTVCVLTLGWLIFDSEMTFKNIAGMVLAVVGMVIYSWAVELEKQRKSKVIPHGKHSMTEDEIKLLKEGIEHMDLKDMELGNNKA

SEQ ID NO: 39677 - protein, 328 aa, Arabidopsis thaliana
  peptide (1)..(328): Ceres Seq. ID no. 13488713
  misc_feature (1)..(295): Homolog of NCBI NO: 18399097 NR Description: transporter-related [Arabidopsis thaliana]
  misc_feature (1)..(317): Homolog of NCBI NO: 15234794 NR Description: transporter-related [Arabidopsis thaliana]
  misc_feature (1)..(298): Homolog of NCBI NO: 30313364 NR Description: putative transmembrane protein [Oryza sativa]
  misc_feature (1)..(28): Homolog of NCBI NO: 33146838 NR Description: transporter-related-like [Oryza sativa (japonica
  misc_feature (23)..(328): Homolog of NCBI NO: 33146838 NR Description: transporter-related-like [Oryza sativa (japonica
  misc_feature (1)..(327): Homolog of NCBI NO: 15238957 NR Description: transporter-related [Arabidopsis thaliana]
  misc_feature (17)..(328): Homolog of NCBI NO: 26450366 NR Description: unknown protein [Arabidopsis thaliana]
  misc_feature (1)..(327): Homolog of NCBI NO: 18411172 NR Description: transporter-related [Arabidopsis thaliana]
  misc_feature (1)..(328): Homolog of NCBI NO: 18394949 NR Description: transporter-related [Arabidopsis thaliana]
  misc_feature (1)..(328): Homolog of NCBI NO: 21536703 NR Description: unknown [Arabidopsis thaliana]
MNVTSSVGIIMANKQLMSSSGLGFSFATTLTGFHFALTALVGMVSNATGLSASKHVPLWELLWFSLVANISIAAMNFSLMLNSVGFYQISKLSMIPVVCVMEWVLHSKHYSREVKASVMVVVVGVGICTVTDVKVNAKGFICACTAVFSTSLQQISIGSLQKKYSIGSFELLSKTAPIQAISLLIFGPFVDYFLSGRFISTYKMTYSAMLCILLSCALAVFCNISQYLCIGRFSATSFQVLGHMKTVCVLTLGWLIFDSEMTFKNIAGMVLAVVGMVIYSWAVELEKQRKSKVIPHGKHSMTEDEIKLLKEGIEHMDLKDMELGNNKA

SEQ ID NO: 39678 - protein, 318 aa, Arabidopsis thaliana
  peptide (1)..(318): Ceres Seq. ID no. 13488714
  misc_feature (1)..(285): Homolog of NCBI NO: 18399097 NR Description: transporter-related [Arabidopsis thaliana]
  misc_feature (1)..(307): Homolog of NCBI NO: 15234794 NR Description: transporter-related [Arabidopsis thaliana]
  misc_feature (1)..(288): Homolog of NCBI NO: 30313364 NR Description: putative transmembrane protein [Oryza sativa]
  misc_feature (1)..(18): Homolog of NCBI NO: 33146838 NR Description: transporter-related-like [Oryza sativa (japonica
  misc_feature (13)..(318): Homolog of NCBI NO: 33146838 NR Description: transporter-related-like [Oryza sativa (japonica
  misc_feature (1)..(317): Homolog of NCBI NO: 15238957 NR Description: transporter-related [Arabidopsis thaliana]
  misc_feature (7)..(318): Homolog of NCBI NO: 26450366 NR Description: unknown protein [Arabidopsis thaliana]
  misc_feature (1)..(317): Homolog of NCBI NO: 18411172 NR Description: transporter-related [Arabidopsis thaliana]
  misc_feature (1)..(318): Homolog of NCBI NO: 18394949 NR Description: transporter-related [Arabidopsis thaliana]
  misc_feature (1)..(318): Homolog of NCBI NO: 21536703 NR Description: unknown [Arabidopsis thaliana]
MANKQLMSSSGLGFSFATTLTGFHFALTALVGMVSNATGLSASKHVPLWELLWFSLVANISIAAMNFSLMLNSVGFYQISKLSMIPVVCVMEWVLHSKHYSREVKASVMVVVVGVGICTVTDVKVNAKGFICACTAVFSTSLQQISIGSLQKKYSIGSFELLSKTAPIQAISLLIFGPFVDYFLSGRFISTYKMTYSAMLCILLSCALAVFCNISQYLCIGRFSATSFQVLGHMKTVCVLTLGWLIFDSEMTFKNIAGMVLAVVGMVIYSWAVELEKQRKSKVIPHGKHSMTEDEIKLLKEGIEHMDLKDMELGNNKA

SEQ ID NO: 39679 - DNA, 1413 bp, Arabidopsis thaliana
  misc_feature (1)..(1413): Ceres Seq. ID no. 12371224
  misc_feature: MA Experiment ID: 108434 Result: Down-regulated in Transcription
  misc_feature: MA Experiment 108434 PARAMETER Experiment Name: At_Root_Tips_cDNA_P Parameter: Tissue Value: Root Tips
  misc_feature: MA Experiment ID: 108461 Result: Up-regulated in Transcription
  misc_feature: MA Experiment 108461 PARAMETER Experiment Name: At_Germinating_Seeds_cDNA_P Parameter: Age (day) Value: 1 vs. 0
  misc_feature: MA Experiment 108461 PARAMETER Experiment Name: At_Germinating_Seeds_cDNA_P Parameter: Tissue Value: Germinating Seeds
  misc_feature: MA Experiment ID: 108462 Result: Up-regulated in Transcription
  misc_feature: MA Experiment 108462 PARAMETER Experiment Name: At_Germinating_Seeds_cDNA_P Parameter: Age (day) Value: 2 vs. 0
  misc_feature: MA Experiment 108462 PARAMETER Experiment Name: At_Germinating_Seeds_cDNA_P Parameter: Tissue Value: Germinating Seeds
  misc_feature: MA Experiment ID: 108463 Result: Up-regulated in Transcription
  misc_feature: MA Experiment 108463 PARAMETER Experiment Name: At_Germinating_Seeds_cDNA_P Parameter: Age (day) Value: 3 vs. 0
  misc_feature: MA Experiment 108463 PARAMETER Experiment Name: At_Germinating_Seeds_cDNA_P Parameter: Tissue Value: Germinating Seeds
  misc_feature: MA Experiment ID: 108464 Result: Up-regulated in Transcription
  misc_feature: MA Experiment 108464 PARAMETER Experiment Name: At_Germinating_Seeds_cDNA_P Parameter: Age (day) Value: 4 vs. 0
  misc_feature: MA Experiment 108464 PARAMETER Experiment Name: At_Germinating_Seeds_cDNA_P Parameter: Tissue Value: Germinating Seeds
  misc_feature: MA Experiment ID: 108572 Result: Up-regulated in Transcription
  misc_feature: MA Experiment 108572 PARAMETER Experiment Name: At_Drought_cDNA_P Parameter: Timepoint (hr) Value: 1
  misc_feature: MA Experiment 108572 PARAMETER Experiment Name: At_Drought_cDNA_P Parameter: Tissue Value: Aerial
  misc_feature: MA Experiment 108572 PARAMETER Experiment Name: At_Drought_cDNA_P Parameter: Treatment Value: Drought vs. No Drought
  misc_feature: MA Experiment ID: 108595 Result: Up-regulated in Transcription
  misc_feature: MA Experiment 108595 PARAMETER Experiment Name: At_Ler-pi_Ovule_cDNA_P Parameter: Plant Line Value: null
  misc_feature: MA Experiment ID: 108607 Result: Up-regulated in Transcription
  misc_feature: MA Experiment 108607 PARAMETER Experiment Name: At_100uM_ABA_cDNA_P Parameter: Timepoint (hr) Value: 4
  misc_feature: MA Experiment 108607 PARAMETER Experiment Name: At_100uM_ABA_cDNA_P Parameter: Tissue Value: Aerial
  misc_feature: MA Experiment 108607 PARAMETER Experiment Name: At_100uM_ABA_cDNA_P Parameter: Treatment Value: 100uM ABA vs. No Treatment
  misc_feature: MA Experiment ID: 20000070 Result: Up-regulated in Transcription
  misc_feature: MA Experiment 20000070 PARAMETER Experiment Name: At_100uM_ABA_Mutants_cDNA_P Parameter: Plant Line Value: CS24
  misc_feature: MA Experiment 20000070 PARAMETER Experiment Name: At_100uM_ABA_Mutants_cDNA_P Parameter: Timepoint (hr) Value: 6
  misc_feature: MA Experiment 20000070 PARAMETER Experiment Name: At_100uM_ABA_Mutants_cDNA_P Parameter: Tissue Value: Aerial
  misc_feature: MA Experiment 20000070 PARAMETER Experiment Name: At_100uM_ABA_Mutants_cDNA_P Parameter: Treatment Value: 100uM ABA vs. No Treatment
  misc_feature: MA Experiment ID: 20000071 Result: Up-regulated in Transcription
  misc_feature: MA Experiment 20000071 PARAMETER Experiment Name: At_100uM_ABA_Mutants_cDNA_P Parameter: Plant Line Value: CS8104
  misc_feature: MA Experiment 20000071 PARAMETER Experiment Name: At_100uM_ABA_Mutants_cDNA_P Parameter: Timepoint (hr) Value: 6
  misc_feature: MA Experiment 20000071 PARAMETER Experiment Name: At_100uM_ABA_Mutants_cDNA_P Parameter: Tissue Value: Aerial
  misc_feature: MA Experiment 20000071 PARAMETER Experiment Name: At_100uM_ABA_Mutants_cDNA_P Parameter: Treatment Value: 100uM ABA vs. No Treatment
  misc_feature: MA Experiment ID: 20000184 Result: Up-regulated in Transcription
  misc_feature: MA Experiment 20000184 PARAMETER Experiment Name: At_Shoots__P Parameter: Age (day) Value: 7
  misc_feature: MA Experiment 20000184 PARAMETER Experiment Name: At_Shoots__P Parameter: Tissue Value: Shoots vs. Whole Plant
  misc_feature: MA Experiment ID: 20000185 Result: Up-regulated in Transcription
  misc_feature: MA Experiment 20000185 PARAMETER Experiment Name: At_Roots__P Parameter: Age (day) Value: 7 vs. 21
  misc_feature: MA Experiment 20000185 PARAMETER Experiment Name: At_Roots__P Parameter: Organism Value: A. thaliana
  misc_feature: MA Experiment 20000185 PARAMETER Experiment Name: At_Roots__P Parameter: Tissue Value: Roots vs. Whole Plant
  misc_feature: MA Experiment ID: 20000439 Result: Up-regulated in Transcription
  misc_feature: MA Experiment 20000439 PARAMETER Experiment Name: At_Roots__P Parameter: Age (day) Value: 14 vs. 21
  misc_feature: MA Experiment 20000439 PARAMETER Experiment Name: At_Roots__P Parameter: Organism Value: A. thaliana
  misc_feature: MA Experiment 20000439 PARAMETER Experiment Name: At_Roots__P Parameter: Tissue Value: Roots vs. Whole Plant
  misc_feature: MA Experiment ID: 20001451 Result: Up-regulated in Transcription
  misc_feature: MA Experiment 20001451 PARAMETER Experiment Name: At_Far-red-induction_P Parameter: Age (day) Value: 7
  misc_feature: MA Experiment 20001451 PARAMETER Experiment Name: At_Far-red-induction_P Parameter: Light Value: Far-red vs. White
  misc_feature: MA Experiment 20001451 PARAMETER Experiment Name: At_Far-red-induction_P Parameter: Organism Value: A. thaliana
  misc_feature: MA Experiment 20001451 PARAMETER Experiment Name: At_Far-red-induction_P Parameter: Plant Line Value: Columbia
  misc_feature: MA Experiment 20001451 PARAMETER Experiment Name: At_Far-red-induction_P Parameter: Timepoint (hr) Value: 24
  misc_feature: MA Experiment 20001451 PARAMETER Experiment Name: At_Far-red-induction_P Parameter: Tissue Value: Whole Plant
aagtgatatgatactctcaagaaacctacccacctaaaaagagagaaaaacaaaacaaaagaatagtaaggcactaaacactaaaactaccacttctcttgtatcgccgacaaagctttgttcagtggcaaagatgatgaatcatttgcttttggctcttttccttgttggaaccatcgccttaccagatagaggaactcaacaattgaccaacgatggcctcaccggcgcgaggcgagagatactctctttcttagaccaaagacttgcagtggtgtacccagtgatccagagattcaagtcactcatcactctcgacccttataacgtgaccaagacatggattggttcagacatctgcagttatagaggcttccactgtgacaatcctcctcacaacaaaaccgcagttactgttgcttccatcgatttcaatggctttcagctctctgctccatccatcgaaggatttatcgatcaattcgctgacctagctctgtttcatgttaactcaaacaattttggaggtacggtgccttccaagatagtcaacctccggtatctctatgaactcgacatcagcaacaatagattcaccggtcagtttccgacagctgttgttggaatgtccggtttgacgtttattgacattcggttcaactctttctctggttcaatcccaccacaaatcctcggtcagaacctcgaagttctcttcatcaatgacaacggcttcactgcgagcctcccggagatacctggtgatggtacaacacacattctcttcttgactttagcaaacaacaagttcaacggtcctctcccaagaagcatcttaagatcaatgtcaactttaaccgaagtactcttcctcaataacgattttacgggttgtatccctcacgagatcgggttcctcaccggagcatcagtgatcgatatcggtggaaacaagctcacgggtcctttgccgctttccctaatgtgtttagagaaagtagagcagctcaactttgctgggaatctattgtttggtgccgtcccggaggcagtatgcatgctgctccgggacaatcttgtcaacttgtcgttgtcggataactatttcacgcacgtagggccttggtgtaggggtttacttgaaaaaggtgttcttgacgttggtaacaattgcattcctttcttcccaggacaaagatcgatgcaagaatgtgcggagttctttgtaaaacctaagaagtactactgtcctcacatgtggttccatagttttttctcttgtagatattctcacatatcttcttcctcttctagtgctttcatgcccatggtggctccctctccttaatgttcatcatcataaacgtgtttgatcacttttattgtaaggaaaaataatcggattatgtttcg

SEQ ID NO: 39680 - protein, 404 aa, Arabidopsis thaliana
  peptide (1)..(404): Ceres Seq. ID no. 12371225
  misc_feature (8)..(367): Homolog of NCBI NO: 15235186 NR Description: extensin-like protein; protein id: At4g33970.1
  misc_feature (38)..(367): Homolog of NCBI NO: 15233976 NR Description: extensin-like protein; protein id: At4g18670.1
  misc_feature (5)..(367): Homolog of NCBI NO: 34906174 NR Description: putative extensin-like protein
  misc_feature (38)..(367): Homolog of NCBI NO: 15235668 NR Description: extensin-like protein; protein id: At4g13340.1
  misc_feature (38)..(404): Homolog of NCBI NO: 15230120 NR Description: disease resistance protein, putative; protein id:
  misc_feature (38)..(374): Homolog of NCBI NO: 15222811 NR Description: unknown protein; protein id: At1g49750.1
  misc_feature (38)..(381): Homolog of NCBI NO: 15230349 NR Description: unknown protein; protein id: At3g19320.1
  misc_feature (40)..(394): Homolog of NCBI NO: 32490271 NR Description: OSJNBb0116K07.13 [Oryza sativa (japonica
  misc_feature (18)..(373): Homolog of NCBI NO: 32488397 NR Description: OSJNBa0043A12.27 [Oryza sativa (japonica
  misc_feature (1)..(404): Homolog of NCBI NO: 30680322 NR Description: extensin-related protein [Arabidopsis thaliana]
MMNHLLLALFLVGTIALPDRGTQQLTNDGLTGARREILSFLDQRLAVVYPVIQRFKSLITLDPYNVTKTWIGSDICSYRGFHCDNPPHNKTAVTVASIDFNGFQLSAPSIEGFIDQFADLALFHVNSNNFGGTVPSKIVNLRYLYELDISNNRFTGQFPTAVVGMSGLTFIDIRFNSFSGSIPPQILGQNLEVLFINDNGFTASLPEIPGDGTTHILFLTLANNKFNGPLPRSILRSMSTLTEVLFLNNDFTGCIPHEIGFLTGASVIDIGGNKLTGPLPLSLMCLEKVEQLNFAGNLLFGAVPEAVCMLLRDNLVNLSLSDNYFTHVGPWCRGLLEKGVLDVGNNCIPFFPGQRSMQECAEFFVKPKKYYCPHMWFHSFFSCRYSHISSSSSSAFMPMVAPSP

SEQ ID NO: 39681 - protein, 403 aa, Arabidopsis thaliana
  peptide (1)..(403): Ceres Seq. ID no. 12371226
  misc_feature (7)..(366): Homolog of NCBI NO: 15235186 NR Description: extensin-like protein; protein id: At4g33970.1
  misc_feature (37)..(366): Homolog of NCBI NO: 15233976 NR Description: extensin-like protein; protein id: At4g18670.1
  misc_feature (4)..(366): Homolog of NCBI NO: 34906174 NR Description: putative extensin-like protein
  misc_feature (37)..(366): Homolog of NCBI NO: 15235668 NR Description: extensin-like protein; protein id: At4g13340.1
  misc_feature (37)..(403): Homolog of NCBI NO: 15230120 NR Description: disease resistance protein, putative; protein id:
  misc_feature (37)..(373): Homolog of NCBI NO: 15222811 NR Description: unknown protein; protein id: At1g49750.1
  misc_feature (37)..(380): Homolog of NCBI NO: 15230349 NR Description: unknown protein; protein id: At3g19320.1
  misc_feature (39)..(393): Homolog of NCBI NO: 32490271 NR Description: OSJNBb0116K07.13 [Oryza sativa (japonica
  misc_feature (17)..(372): Homolog of NCBI NO: 32488397 NR Description: OSJNBa0043A12.27 [Oryza sativa (japonica
  misc_feature (1)..(403): Homolog of NCBI NO: 30680322 NR Description: extensin-related protein [Arabidopsis thaliana]
MNHLLLALFLVGTIALPDRGTQQLTNDGLTGARREILSFLDQRLAVVYPVIQRFKSLITLDPYNVTKTWIGSDICSYRGFHCDNPPHNKTAVTVASIDFNGFQLSAPSIEGFIDQFADLALFHVNSNNFGGTVPSKIVNLRYLYELDISNNRFTGQFPTAVVGMSGLTFIDIRFNSFSGSIPPQILGQNLEVLFINDNGFTASLPEIPGDGTTHILFLTLANNKFNGPLPRSILRSMSTLTEVLFLNNDFTGCIPHEIGFLTGASVIDIGGNKLTGPLPLSLMCLEKVEQLNFAGNLLFGAVPEAVCMLLRDNLVNLSLSDNYFTHVGPWCRGLLEKGVLDVGNNCIPFFPGQRSMQECAEFFVKPKKYYCPHMWFHSFFSCRYSHISSSSSSAFMPMVAPSP

SEQ ID NO: 39682 - protein, 240 aa, Arabidopsis thaliana
  peptide (1)..(240): Ceres Seq. ID no. 12371227
  misc_feature (1)..(203): Homolog of NCBI NO: 15235186 NR Description: extensin-like protein; protein id: At4g33970.1
  misc_feature (1)..(203): Homolog of NCBI NO: 15233976 NR Description: extensin-like protein; protein id: At4g18670.1
  misc_feature (1)..(203): Homolog of NCBI NO: 34906174 NR Description: putative extensin-like protein
  misc_feature (1)..(203): Homolog of NCBI NO: 15235668 NR Description: extensin-like protein; protein id: At4g13340.1
  misc_feature (1)..(240): Homolog of NCBI NO: 15230120 NR Description: disease resistance protein, putative; protein id:
  misc_feature (1)..(210): Homolog of NCBI NO: 15222811 NR Description: unknown protein; protein id: At1g49750.1
  misc_feature (1)..(217): Homolog of NCBI NO: 15230349 NR Description: unknown protein; protein id: At3g19320.1
  misc_feature (1)..(230): Homolog of NCBI NO: 32490271 NR Description: OSJNBb0116K07.13 [Oryza sativa (japonica
  misc_feature (1)..(209): Homolog of NCBI NO: 32488397 NR Description: OSJNBa0043A12.27 [Oryza sativa (japonica
  misc_feature (1)..(240): Homolog of NCBI NO: 30680322 NR Description: extensin-related protein [Arabidopsis thaliana]
MSGLTFIDIRFNSFSGSIPPQILGQNLEVLFINDNGFTASLPEIPGDGTTHILFLTLANNKFNGPLPRSILRSMSTLTEVLFLNNDFTGCIPHEIGFLTGASVIDIGGNKLTGPLPLSLMCLEKVEQLNFAGNLLFGAVPEAVCMLLRDNLVNLSLSDNYFTHVGPWCRGLLEKGVLDVGNNCIPFFPGQRSMQECAEFFVKPKKYYCPHMWFHSFFSCRYSHISSSSSSAFMPMVAPSP

SEQ ID NO: 39683 - DNA, 1304 bp, Arabidopsis thaliana
  misc_feature (1)..(1304): Ceres Seq. ID no. 13612513
  misc_feature: MA Experiment ID: 20000439 Result: Up-regulated in Transcription
  misc_feature: MA Experiment 20000439 PARAMETER Experiment Name: At_Roots__P Parameter: Age (day) Value: 14 vs. 21
  misc_feature: MA Experiment 20000439 PARAMETER Experiment Name: At_Roots__P Parameter: Organism Value: A. thaliana
  misc_feature: MA Experiment 20000439 PARAMETER Experiment Name: At_Roots__P Parameter: Tissue Value: Roots vs. Whole Plant
  misc_feature: MA Experiment ID: 20001451 Result: Up-regulated in Transcription
  misc_feature: MA Experiment 20001451 PARAMETER Experiment Name: At_Far-red-induction_P Parameter: Age (day) Value: 7
  misc_feature: MA Experiment 20001451 PARAMETER Experiment Name: At_Far-red-induction_P Parameter: Light Value: Far-red vs. White
  misc_feature: MA Experiment 20001451 PARAMETER Experiment Name: At_Far-red-induction_P Parameter: Organism Value: A. thaliana
  misc_feature: MA Experiment 20001451 PARAMETER Experiment Name: At_Far-red-induction_P Parameter: Plant Line Value: Columbia
  misc_feature: MA Experiment 20001451 PARAMETER Experiment Name: At_Far-red-induction_P Parameter: Timepoint (hr) Value: 24
  misc_feature: MA Experiment 20001451 PARAMETER Experiment Name: At_Far-red-induction_P Parameter: Tissue Value: Whole Plant
atcgggcaaggccttatagagattacacaacacagatagattacacactgagaaacagagaatggtagctgaggccttgcccaaatgccctgaagctccactcgtacttggactccaacccgcagctcttatcgataacgtcgctcctgttgattggtctttactcgatcaaattcccggtgatcgcggtggctccattgccgtgcaaaaggatgagttagagcacatgctaaaagagcttgatgcacatatcagtgtggctccattaaagaagatggctggaggaagtgtgaccaatacagttcgaggcttgagtgttgggttcggtgtagccactgggattattggtgcttatggagacgatgaacaaggccaattgtttgttagcaatatgggttttagtggtgtgagtatctcaaggctcaggaagaagaaaggttccactgctcagtgtgtttgcttggttgatgactctggtaatcgaacaatgcgaccatgtctctcgagtgctgtgaagattcaggcagatgaattaagcaaagaagatttcacaggctctaagtggttggttcttagatatgctgttcttaatttacaagtaattcaagcagccattcgatttgccaagcaagaaggtctttctgtttccttggatttagctagttttgagatggtcaggaattctaaatcagagcttcgacagcttctggagtctggtaacatagatctttgctttgctaacgaggacgaagcagcagagctccttaggggtgagcaagaagcgggtccggaggcagctcttgagttcctaggcagacattgcagatgggctgtggtaactttagggtcgaaagggtgcattgcaaaacatgataaagaggtggtacatatatcagccataggagagacagtagcaactgatgccacaggagccggtgacctattcgcaagcgggtttctgtacggactaataaagggattgtctttggaagaatgttgcaaagtgggatcatgcagtggtggatctgtcatccgtgctctcggtggagaagtaaccccagaaaactggcaatggatgcacaaacagttgcagttgaagggcttacctgttcctgacatccacaactgatgatatcaccatcagattgtagaatttcaaacaatttcgttgaagggccggttctgattcaagcagctcttagcattatgttgttcacagagattctcacagcatttacttcaatacacattgtgttgttttcaatctttttttgtgaaaaataaaaatgcgtttgtcagggttt

SEQ ID NO: 39684 - protein, 355 aa, Arabidopsis thaliana
  peptide (1)..(355): Ceres Seq. ID no. 13612514
  misc_feature (42)..(335): Pfam Name: pfkB family carbohydrate kinase Pfam Description: pfkB family carbohydrate kinase
  misc_feature (22)..(331): Homolog of NCBI NO: 32477470 NR Description: predicted ribokinase family sugar kinase
  misc_feature (22)..(334): Homolog of NCBI NO: 23124151 NR Description: hypothetical protein [Nostoc punctiforme]
  misc_feature (22)..(328): Homolog of NCBI NO: 33239956 NR Description: Sugar kinase, ribokinase family
  misc_feature (22)..(334): Homolog of NCBI NO: 23110293 NR Description: hypothetical protein [Novosphingobium
  misc_feature (66)..(328): Homolog of NCBI NO: 17988062 NR Description: FRUCTOKINASE [Brucella melitensis]
  misc_feature (22)..(328): Homolog of NCBI NO: 15963924 NR Description: PUTATIVE SUGAR KINASE PROTEIN [Sinorhizobium
  misc_feature (15)..(336): Homolog of NCBI NO: 29348208 NR Description: putative PfkB family carbohydrate kinase
  misc_feature (13)..(355): Homolog of NCBI NO: 34894090 NR Description: P0005A05.10 [Oryza sativa (japonica
  misc_feature (1)..(355): Homolog of NCBI NO: 39579184 NR Description: putative ribokinase [Triticum turgidum subsp.
  misc_feature (1)..(355): Homolog of NCBI NO: 15223593 NR Description: ribokinase, putative [Arabidopsis thaliana]
MVAEALPKCPEAPLVLGLQPAALIDNVAPVDWSLLDQIPGDRGGSIAVQKDELEHMLKELDAHISVAPLKKMAGGSVTNTVRGLSVGFGVATGIIGAYGDDEQGQLFVSNMGFSGVSISRLRKKKGSTAQCVCLVDDSGNRTMRPCLSSAVKIQADELSKEDFTGSKWLVLRYAVLNLQVIQAAIRFAKQEGLSVSLDLASFEMVRNSKSELRQLLESGNIDLCFANEDEAAELLRGEQEAGPEAALEFLGRHCRWAVVTLGSKGCIAKHDKEVVHISAIGETVATDATGAGDLFASGFLYGLIKGLSLEECCKVGSCSGGSVIRALGGEVTPENWQWMHKQLQLKGLPVPDIHN

SEQ ID NO: 39685 - protein, 300 aa, Arabidopsis thaliana
  peptide (1)..(300): Ceres Seq. ID no. 13612515
  misc_feature (1)..(280): Pfam Name: pfkB family carbohydrate kinase Pfam Description: pfkB family carbohydrate kinase
  misc_feature (1)..(276): Homolog of NCBI NO: 32477470 NR Description: predicted ribokinase family sugar kinase
  misc_feature (1)..(279): Homolog of NCBI NO: 23124151 NR Description: hypothetical protein [Nostoc punctiforme]
  misc_feature (1)..(273): Homolog of NCBI NO: 33239956 NR Description: Sugar kinase, ribokinase family
  misc_feature (1)..(279): Homolog of NCBI NO: 23110293 NR Description: hypothetical protein [Novosphingobium
  misc_feature (11)..(273): Homolog of NCBI NO: 17988062 NR Description: FRUCTOKINASE [Brucella melitensis]
  misc_feature (1)..(273): Homolog of NCBI NO: 15963924 NR Description: PUTATIVE SUGAR KINASE PROTEIN [Sinorhizobium
  misc_feature (1)..(281): Homolog of NCBI NO: 29348208 NR Description: putative PfkB family carbohydrate kinase
  misc_feature (1)..(300): Homolog of NCBI NO: 34894090 NR Description: P0005A05.10 [Oryza sativa (japonica
  misc_feature (1)..(300): Homolog of NCBI NO: 39579184 NR Description: putative ribokinase [Triticum turgidum subsp.
  misc_feature (1)..(300): Homolog of NCBI NO: 15223593 NR Description: ribokinase, putative [Arabidopsis thaliana]
MLKELDAHISVAPLKKMAGGSVTNTVRGLSVGFGVATGIIGAYGDDEQGQLFVSNMGFSGVSISRLRKKKGSTAQCVCLVDDSGNRTMRPCLSSAVKIQADELSKEDFTGSKWLVLRYAVLNLQVIQAAIRFAKQEGLSVSLDLASFEMVRNSKSELRQLLESGNIDLCFANEDEAAELLRGEQEAGPEAALEFLGRHCRWAVVTLGSKGCIAKHDKEVVHISAIGETVATDATGAGDLFASGFLYGLIKGLSLEECCKVGSCSGGSVIRALGGEVTPENWQWMHKQLQLKGLPVPDIHN

SEQ ID NO: 39686 - protein, 284 aa, Arabidopsis thaliana
  peptide (1)..(284): Ceres Seq. ID no. 13612516
  misc_feature (1)..(264): Pfam Name: pfkB family carbohydrate kinase Pfam Description: pfkB family carbohydrate kinase
  misc_feature (1)..(260): Homolog of NCBI NO: 32477470 NR Description: predicted ribokinase family sugar kinase
  misc_feature (1)..(263): Homolog of NCBI NO: 23124151 NR Description: hypothetical protein [Nostoc punctiforme]
  misc_feature (1)..(257): Homolog of NCBI NO: 33239956 NR Description: Sugar kinase, ribokinase family
  misc_feature (1)..(263): Homolog of NCBI NO: 23110293 NR Description: hypothetical protein [Novosphingobium
  misc_feature (1)..(257): Homolog of NCBI NO: 17988062 NR Description: FRUCTOKINASE [Brucella melitensis]
  misc_feature (1)..(257): Homolog of NCBI NO: 15963924 NR Description: PUTATIVE SUGAR KINASE PROTEIN [Sinorhizobium
  misc_feature (1)..(265): Homolog of NCBI NO: 29348208 NR Description: putative PfkB family carbohydrate kinase
  misc_feature (1)..(284): Homolog of NCBI NO: 34894090 NR Description: P0005A05.10 [Oryza sativa (japonica
  misc_feature (1)..(284): Homolog of NCBI NO: 39579184 NR Description: putative ribokinase [Triticum turgidum subsp.
  misc_feature (1)..(284): Homolog of NCBI NO: 15223593 NR Description: ribokinase, putative [Arabidopsis thaliana]
MAGGSVTNTVRGLSVGFGVATGIIGAYGDDEQGQLFVSNMGFSGVSISRLRKKKGSTAQCVCLVDDSGNRTMRPCLSSAVKIQADELSKEDFTGSKWLVLRYAVLNLQVIQAAIRFAKQEGLSVSLDLASFEMVRNSKSELRQLLESGNIDLCFANEDEAAELLRGEQEAGPEAALEFLGRHCRWAVVTLGSKGCIAKHDKEVVHISAIGETVATDATGAGDLFASGFLYGLIKGLSLEECCKVGSCSGGSVIRALGGEVTPENWQWMHKQLQLKGLPVPDIHN

SEQ ID NO: 39687 - DNA, 1434 bp, Arabidopsis thaliana
  misc_feature (1)..(1434): Ceres Seq. ID no. 12328179
  misc_feature: MA Experiment ID: 108434 Result: Down-regulated in Transcription
  misc_feature: MA Experiment 108434 PARAMETER Experiment Name: At_Root_Tips_cDNA_P Parameter: Tissue Value: Root Tips
  misc_feature: MA Experiment ID: 108461 Result: Up-regulated in Transcription
  misc_feature: MA Experiment 108461 PARAMETER Experiment Name: At_Germinating_Seeds_cDNA_P Parameter: Age (day) Value: 1 vs. 0
  misc_feature: MA Experiment 108461 PARAMETER Experiment Name: At_Germinating_Seeds_cDNA_P Parameter: Tissue Value: Germinating Seeds
  misc_feature: MA Experiment ID: 108462 Result: Up-regulated in Transcription
  misc_feature: MA Experiment 108462 PARAMETER Experiment Name: At_Germinating_Seeds_cDNA_P Parameter: Age (day) Value: 2 vs. 0
  misc_feature: MA Experiment 108462 PARAMETER Experiment Name: At_Germinating_Seeds_cDNA_P Parameter: Tissue Value: Germinating Seeds
  misc_feature: MA Experiment ID: 108463 Result: Up-regulated in Transcription
  misc_feature: MA Experiment 108463 PARAMETER Experiment Name: At_Germinating_Seeds_cDNA_P Parameter: Age (day) Value: 3 vs. 0
  misc_feature: MA Experiment 108463 PARAMETER Experiment Name: At_Germinating_Seeds_cDNA_P Parameter: Tissue Value: Germinating Seeds
  misc_feature: MA Experiment ID: 108464 Result: Up-regulated in Transcription
  misc_feature: MA Experiment 108464 PARAMETER Experiment Name: At_Germinating_Seeds_cDNA_P Parameter: Age (day) Value: 4 vs. 0
  misc_feature: MA Experiment 108464 PARAMETER Experiment Name: At_Germinating_Seeds_cDNA_P Parameter: Tissue Value: Germinating Seeds
  misc_feature: MA Experiment ID: 108488 Result: Down-regulated in Transcription
  misc_feature: MA Experiment ID: 108579 Result: Up-regulated in Transcription
  misc_feature: MA Experiment 108579 PARAMETER Experiment Name: At_4deg_Cold_cDNA_P Parameter: Temperature (deg C) Value: 4 vs. 22
  misc_feature: MA Experiment 108579 PARAMETER Experiment Name: At_4deg_Cold_cDNA_P Parameter: Timepoint (hr) Value: 6
  misc_feature: MA Experiment 108579 PARAMETER Experiment Name: At_4deg_Cold_cDNA_P Parameter: Tissue Value: Aerial
  misc_feature: MA Experiment ID: 20000069 Result: Down-regulated in Transcription
  misc_feature: MA Experiment 20000069 PARAMETER Experiment Name: At_100uM_ABA_Mutants_cDNA_P Parameter: Plant Line Value: CS23
  misc_feature: MA Experiment 20000069 PARAMETER Experiment Name: At_100uM_ABA_Mutants_cDNA_P Parameter: Timepoint (hr) Value: 6
  misc_feature: MA Experiment 20000069 PARAMETER Experiment Name: At_100uM_ABA_Mutants_cDNA_P Parameter: Tissue Value: Aerial
  misc_feature: MA Experiment 20000069 PARAMETER Experiment Name: At_100uM_ABA_Mutants_cDNA_P Parameter: Treatment Value: 100uM ABA vs. No Treatment
  misc_feature: MA Experiment ID: 20000071 Result: Down-regulated in Transcription
  misc_feature: MA Experiment 20000071 PARAMETER Experiment Name: At_100uM_ABA_Mutants_cDNA_P Parameter: Plant Line Value: CS8104
  misc_feature: MA Experiment 20000071 PARAMETER Experiment Name: At_100uM_ABA_Mutants_cDNA_P Parameter: Timepoint (hr) Value: 6
  misc_feature: MA Experiment 20000071 PARAMETER Experiment Name: At_100uM_ABA_Mutants_cDNA_P Parameter: Tissue Value: Aerial
  misc_feature: MA Experiment 20000071 PARAMETER Experiment Name: At_100uM_ABA_Mutants_cDNA_P Parameter: Treatment Value: 100uM ABA vs. No Treatment
  misc_feature: MA Experiment ID: 20000072 Result: Down-regulated in Transcription
  misc_feature: MA Experiment 20000072 PARAMETER Experiment Name: At_100uM_ABA_Mutants_cDNA_P Parameter: Plant Line Value: CS8105
  misc_feature: MA Experiment 20000072 PARAMETER Experiment Name: At_100uM_ABA_Mutants_cDNA_P Parameter: Timepoint (hr) Value: 6
  misc_feature: MA Experiment 20000072 PARAMETER Experiment Name: At_100uM_ABA_Mutants_cDNA_P Parameter: Tissue Value: Aerial
  misc_feature: MA Experiment 20000072 PARAMETER Experiment Name: At_100uM_ABA_Mutants_cDNA_P Parameter: Treatment Value: 100uM ABA vs. No Treatment
  misc_feature: MA Experiment ID: 20000086 Result: Down-regulated in Transcription
  misc_feature: MA Experiment 20000086 PARAMETER Experiment Name: At_100uM_ABA_Mutants_cDNA_P Parameter: Plant Line Value: CS22
  misc_feature: MA Experiment 20000086 PARAMETER Experiment Name: At_100uM_ABA_Mutants_cDNA_P Parameter: Timepoint (hr) Value: 6
  misc_feature: MA Experiment 20000086 PARAMETER Experiment Name: At_100uM_ABA_Mutants_cDNA_P Parameter: Tissue Value: Aerial
  misc_feature: MA Experiment 20000086 PARAMETER Experiment Name: At_100uM_ABA_Mutants_cDNA_P Parameter: Treatment Value: 100uM ABA vs. No Treatment
  misc_feature: MA Experiment ID: 20000087 Result: Down-regulated in Transcription
  misc_feature: MA Experiment 20000087 PARAMETER Experiment Name: At_100uM_ABA_Mutants_cDNA_P Parameter: Plant Line Value: WS
  misc_feature: MA Experiment 20000087 PARAMETER Experiment Name: At_100uM_ABA_Mutants_cDNA_P Parameter: Timepoint (hr) Value: 6
  misc_feature: MA Experiment 20000087 PARAMETER Experiment Name: At_100uM_ABA_Mutants_cDNA_P Parameter: Tissue Value: Aerial
  misc_feature: MA Experiment 20000087 PARAMETER Experiment Name: At_100uM_ABA_Mutants_cDNA_P Parameter: Treatment Value: 100uM ABA vs. No Treatment
  misc_feature: MA Experiment ID: 20000089 Result: Down-regulated in Transcription
  misc_feature: MA Experiment ID: 20000090 Result: Down-regulated in Transcription
  misc_feature: MA Experiment ID: 20000179 Result: Up-regulated in Transcription
  misc_feature: MA Experiment 20000179 PARAMETER Experiment Name: At_Germinating_Seeds_P Parameter: Age (hr) Value: 6 vs. 0
  misc_feature: MA Experiment 20000179 PARAMETER Experiment Name: At_Germinating_Seeds_P Parameter: Tissue Value: Germinating Seeds
  misc_feature: MA Experiment ID: 20000180 Result: Up-regulated in Transcription
  misc_feature: MA Experiment 20000180 PARAMETER Experiment Name: At_Germinating_Seeds_P Parameter: Age (hr) Value: 24 vs. 0
  misc_feature: MA Experiment 20000180 PARAMETER Experiment Name: At_Germinating_Seeds_P Parameter: Tissue Value: Germinating Seeds
  misc_feature: MA Experiment ID: 20000794 Result: Up-regulated in Transcription
  misc_feature: MA Experiment 20000794 PARAMETER Experiment Name: At_Petals_P Parameter: Age (day) Value: 23-25 days
  misc_feature: MA Experiment 20000794 PARAMETER Experiment Name: At_Petals_P Parameter: Plant Line Value: WS
  misc_feature: MA Experiment 20000794 PARAMETER Experiment Name: At_Petals_P Parameter: Tissue Value: Petals vs. Whole plant
  misc_feature: MA Experiment ID: 20001248 Result: Down-regulated in Transcription
  misc_feature: MA Experiment 20001248 PARAMETER Experiment Name: At_Far-red-induction_P Parameter: Age (day) Value: 7
  misc_feature: MA Experiment 20001248 PARAMETER Experiment Name: At_Far-red-induction_P Parameter: Light Value: Far-red vs. White
  misc_feature: MA Experiment 20001248 PARAMETER Experiment Name: At_Far-red-induction_P Parameter: Organism Value: A. thaliana
  misc_feature: MA Experiment 20001248 PARAMETER Experiment Name: At_Far-red-induction_P Parameter: Plant Line Value: Columbia
  misc_feature: MA Experiment 20001248 PARAMETER Experiment Name: At_Far-red-induction_P Parameter: Timepoint (hr) Value: 4
  misc_feature: MA Experiment 20001248 PARAMETER Experiment Name: At_Far-red-induction_P Parameter: Tissue Value: Whole Plant
  misc_feature: MA Experiment ID: 20001757 Result: Down-regulated in Transcription
  misc_feature: MA Experiment 20001757 PARAMETER Experiment Name: At_50mM_NH4NO3_L-to-H_P Parameter: Timepoint (hr) Value: 6
  misc_feature: MA Experiment 20001757 PARAMETER Experiment Name: At_50mM_NH4NO3_L-to-H_P Parameter: Tissue Value: Leaf
  misc_feature: MA Experiment 20001757 PARAMETER Experiment Name: At_50mM_NH4NO3_L-to-H_P Parameter: Treatment Value: 50mM NH4NO3 vs 100mM Mannitol
tttctttcttcttcttccgtttcttttgcctctttcttttgtcttcttccttctatttttttgtggctttaaatttattgggttttgttgttcttcttcttctatagccgtttcatcttcacaatagcatcttcttctttttttccctgtcaagatcctgaatcatcggatctagaaggaaactagagtttgtgaaatcagattaaatcttgtgagaaatctctgaaaaagctgcaggtttctatacttctgttagtactctaattcaaccgagaaagtcgaatacatacacacattcataacacttttgaggaagatgttaagtggaaacaatggaaacactgcaccaccggttttcatgaacgagaaccagttgcaataccagacaaacctacgatcgaatcagcttcacttgctcggaaacatgggaggtggatgcactgttgatccagtaaactactttgctaacgataacctcgttccaatgatccgccctaacaaaagaggaagggaagccgaaagcattagtaacaacatccaaagacaacagcagaagcttcaaatgtctttgaactataattataacaacactagtgttcgagaagaagtgcctaaagagaatctagtctcaactggtctgagactatcttatgacgacgatgaacacaattcttcagtgacttctgctagtggtagcattttagctgcttctccaatctttcagtcactcgatgatagtcttcggattgatctccatagacaaaaagatgagtttgaccagttcatcaagatccaggcagctcaaatggcgaaaggtgtgagggatatgaaacagagacacatcgcgtcttttctcacaacattagagaaaggagtgagcaagaagcttcaagagaaagatcacgagatcaatgatatgaacaagaagaataaagagcttgtggagcggataaagcaagtggcaatggaagctcagaattggcactacagagcaaagtacaatgagtctgtggttaatgtcttaaaggcaaatctccaacaagcaatgtcacacaacaacagtgtgatagctgctgcagatcaaggcaaagaaggttttggagacagcgaaatagatgatgcagcttcatcatacattgatccaaacaacaacaacaacatggggattcatcagaggatgagatgcaaaatgtgcaacgtcaaggaagtatcggtgttgatagtgccatgtcggcacttgagtttgtgtaaagaatgtgatgtattcactaagatttgtcctgtatgcaagtctttgaaaagttcttgcgtccaagtcttcttttcttgatttgtgaccaaatggaacagaaggaaaaagagaatccattatataagtctttcatactcttttttaaaaaatattttgttatataaatttatttgtatcggtgt

SEQ ID NO: 39688 - protein, 337 aa, Arabidopsis thaliana
  peptide (1)..(337): Ceres Seq. ID no. 12328180
  misc_feature (290)..(324): Pfam Name: Zinc finger, C3HC4 type (RING finger) Pfam Description: Zinc finger, C3HC4 type (RING finger)
  misc_feature (18)..(335): Homolog of NCBI NO: 40807658 NR Description: S-RNase-binding protein [Solanum chacoense]
  misc_feature (77)..(335): Homolog of NCBI NO: 34902144 NR Description: unknown protein [Oryza sativa (japonica
  misc_feature (75)..(335): Homolog of NCBI NO: 6760451 NR Description: S-ribonuclease binding protein SBP1 [Petunia x
  misc_feature (75)..(335): Homolog of NCBI NO: 15220096 NR Description: S-ribonuclease binding protein SBP1, putative
  misc_feature (13)..(336): Homolog of NCBI NO: 25404279 NR Description: hypothetical protein F8A5.13 [imported] -
  misc_feature (1)..(336): Homolog of NCBI NO: 15219772 NR Description: unknown protein; protein id: At1g60610.1
  misc_feature (1)..(160): Homolog of NCBI NO: 6573749 NR Description: F20B24.9 [Arabidopsis thaliana]
  misc_feature (156)..(337): Homolog of NCBI NO: 6573749 NR Description: F20B24.9 [Arabidopsis thaliana]
  misc_feature (1)..(337): Homolog of NCBI NO: 15220181 NR Description: S-ribonuclease binding protein SBP1, putative
  misc_feature (1)..(337): Homolog of NCBI NO: 21536706 NR Description: S-ribonuclease binding protein SBP1, putative
MLSGNNGNTAPPVFMNENQLQYQTNLRSNQLHLLGNMGGGCTVDPVNYFANDNLVPMIRPNKRGREAESISNNIQRQQQKLQMSLNYNYNNTSVREEVPKENLVSTGLRLSYDDDEHNSSVTSASGSILAASPIFQSLDDSLRIDLHRQKDEFDQFIKIQAAQMAKGVRDMKQRHIASFLTTLEKGVSKKLQEKDHEINDMNKKNKELVERIKQVAMEAQNWHYRAKYNESVVNVLKANLQQAMSHNNSVIAAADQGKEGFGDSEIDDAASSYIDPNNNNNMGIHQRMRCKMCNVKEVSVLIVPCRHLSLCKECDVFTKICPVCKSLKSSCVQVFFS

SEQ ID NO: 39689 - protein, 323 aa, Arabidopsis thaliana
  peptide (1)..(323): Ceres Seq. ID no. 12328181
  misc_feature (276)..(310): Pfam Name: Zinc finger, C3HC4 type (RING finger) Pfam Description: Zinc finger, C3HC4 type (RING finger)
  misc_feature (4)..(321): Homolog of NCBI NO: 40807658 NR Description: S-RNase-binding protein [Solanum chacoense]
  misc_feature (63)..(321): Homolog of NCBI NO: 34902144 NR Description: unknown protein [Oryza sativa (japonica
  misc_feature (61)..(321): Homolog of NCBI NO: 6760451 NR Description: S-ribonuclease binding protein SBP1 [Petunia x
  misc_feature (61)..(321): Homolog of NCBI NO: 15220096 NR Description: S-ribonuclease binding protein SBP1, putative
  misc_feature (1)..(322): Homolog of NCBI NO: 25404279 NR Description: hypothetical protein F8A5.13 [imported] -
  misc_feature (1)..(322): Homolog of NCBI NO: 15219772 NR Description: unknown protein; protein id: At1g60610.1
  misc_feature (1)..(146): Homolog of NCBI NO: 6573749 NR Description: F20B24.9 [Arabidopsis thaliana]
  misc_feature (142)..(323): Homolog of NCBI NO: 6573749 NR Description: F20B24.9 [Arabidopsis thaliana]
  misc_feature (1)..(323): Homolog of NCBI NO: 15220181 NR Description: S-ribonuclease binding protein SBP1, putative
  misc_feature (1)..(323): Homolog of NCBI NO: 21536706 NR Description: S-ribonuclease binding protein SBP1, putative
MNENQLQYQTNLRSNQLHLLGNMGGGCTVDPVNYFANDNLVPMIRPNKRGREAESISNNIQRQQQKLQMSLNYNYNNTSVREEVPKENLVSTGLRLSYDDDEHNSSVTSASGSILAASPIFQSLDDSLRIDLHRQKDEFDQFIKIQAAQMAKGVRDMKQRHIASFLTTLEKGVSKKLQEKDHEINDMNKKNKELVERIKQVAMEAQNWHYRAKYNESVVNVLKANLQQAMSHNNSVIAAADQGKEGFGDSEIDDAASSYIDPNNNNNMGIHQRMRCKMCNVKEVSVLIVPCRHLSLCKECDVFTKICPVCKSLKSSCVQVFFS

SEQ ID NO: 39690 - protein, 301 aa, Arabidopsis thaliana
  peptide (1)..(301): Ceres Seq. ID no. 12328182
  misc_feature (254)..(288): Pfam Name: Zinc finger, C3HC4 type (RING finger) Pfam Description: Zinc finger, C3HC4 type (RING finger)
  misc_feature (1)..(299): Homolog of NCBI NO: 40807658 NR Description: S-RNase-binding protein [Solanum chacoense]
  misc_feature (41)..(299): Homolog of NCBI NO: 34902144 NR Description: unknown protein [Oryza sativa (japonica
  misc_feature (39)..(299): Homolog of NCBI NO: 6760451 NR Description: S-ribonuclease binding protein SBP1 [Petunia x
  misc_feature (39)..(299): Homolog of NCBI NO: 15220096 NR Description: S-ribonuclease binding protein SBP1, putative
  misc_feature (1)..(300): Homolog of NCBI NO: 25404279 NR Description: hypothetical protein F8A5.13 [imported] -
  misc_feature (1)..(300): Homolog of NCBI NO: 15219772 NR Description: unknown protein; protein id: At1g60610.1
  misc_feature (1)..(124): Homolog of NCBI NO: 6573749 NR Description: F20B24.9 [Arabidopsis thaliana]
  misc_feature (120)..(301): Homolog of NCBI NO: 6573749 NR Description: F20B24.9 [Arabidopsis thaliana]
  misc_feature (1)..(301): Homolog of NCBI NO: 15220181 NR Description: S-ribonuclease binding protein SBP1, putative
  misc_feature (1)..(301): Homolog of NCBI NO: 21536706 NR Description: S-ribonuclease binding protein SBP1, putative
MGGGCTVDPVNYFANDNLVPMIRPNKRGREAESISNNIQRQQQKLQMSLNYNYNNTSVREEVPKENLVSTGLRLSYDDDEHNSSVTSASGSILAASPIFQSLDDSLRIDLHRQKDEFDQFIKIQAAQMAKGVRDMKQRHIASFLTTLEKGVSKKLQEKDHEINDMNKKNKELVERIKQVAMEAQNWHYRAKYNESVVNVLKANLQQAMSHNNSVIAAADQGKEGFGDSEIDDAASSYIDPNNNNNMGIHQRMRCKMCNVKEVSVLIVPCRHLSLCKECDVFTKICPVCKSLKSSCVQVFFS

SEQ ID NO: 39691 - DNA, 444 bp, Arabidopsis thaliana
  misc_feature (1)..(444): Ceres Seq. ID no. 12580204
  misc_feature: MA Experiment ID: 108569 Result: Up-regulated in Transcription
  misc_feature: MA Experiment 108569 PARAMETER Experiment Name: At_0.001%_MeJA__cDNA_P Parameter: Timepoint (hr) Value: 6
  misc_feature: MA Experiment 108569 PARAMETER Experiment Name: At_0.001%_MeJA__cDNA_P Parameter: Tissue Value: Aerial
  misc_feature: MA Experiment 108569 PARAMETER Experiment Name: At_0.001%_MeJA__cDNA_P Parameter: Treatment Value: 0.001% MeJA vs. No Treatment
  misc_feature: MA Experiment ID: 108573 Result: Up-regulated in Transcription
  misc_feature: MA Experiment 108573 PARAMETER Experiment Name: At_Drought_cDNA_P Parameter: Timepoint (hr) Value: 6
  misc_feature: MA Experiment 108573 PARAMETER Experiment Name: At_Drought_cDNA_P Parameter: Tissue Value: Aerial
  misc_feature: MA Experiment 108573 PARAMETER Experiment Name: At_Drought_cDNA_P Parameter: Treatment Value: Drought vs. No Drought
  misc_feature: MA Experiment ID: 108594 Result: Down-regulated in Transcription
  misc_feature: MA Experiment 108594 PARAMETER Experiment Name: At_Ler-rhl_Root_cDNA_P Parameter: Plant Line Value: null
  misc_feature: MA Experiment ID: 108595 Result: Down-regulated in Transcription
  misc_feature: MA Experiment 108595 PARAMETER Experiment Name: At_Ler-pi_Ovule_cDNA_P Parameter: Plant Line Value: null
  misc_feature: MA Experiment ID: 20000087 Result: Down-regulated in Transcription
  misc_feature: MA Experiment 20000087 PARAMETER Experiment Name: At_100uM_ABA_Mutants_cDNA_P Parameter: Plant Line Value: WS
  misc_feature: MA Experiment 20000087 PARAMETER Experiment Name: At_100uM_ABA_Mutants_cDNA_P Parameter: Timepoint (hr) Value: 6
  misc_feature: MA Experiment 20000087 PARAMETER Experiment Name: At_100uM_ABA_Mutants_cDNA_P Parameter: Tissue Value: Aerial
  misc_feature: MA Experiment 20000087 PARAMETER Experiment Name: At_100uM_ABA_Mutants_cDNA_P Parameter: Treatment Value: 100uM ABA vs. No Treatment
actctctctatctctctttctctctatctctctctatctctctcatttcttcctgcgtcaatggcgactcaaggtcaggttatcacttgcaaagctgcggtggcttacgagccgaacaagcctctggtcatcgaagatgtgcaagtggctccacctcaagctggtgaggttcggatcaagatcctctacactgctctttgtcacaccgacgcttacacttggagcggcaaggatcctgaaggtctctttccttgtattctaggtcatgaggctgctgggattgttgagagtgttggtgaaggagtaactgaagttcaagctggagatcatgttatcccttgttatcaagctgagtgtcgtgaatgcaagttttgcaaatctgggaagactaacctttgtggcaaggtgagatctgctactggtgttactccttcaccgtctccc

SEQ ID NO: 39692 - protein, 148 aa, Arabidopsis thaliana
  peptide (1)..(148): Ceres Seq. ID no. 12580205
  misc_feature (21)..(141): Homolog of NCBI NO: 16565909 NR Description: formaldehyde dehydrogenase [Pichia angusta]
  misc_feature (22)..(144): Homolog of NCBI NO: 17737895 NR Description: Formaldehyde dehydrogenase CG6598-PA [Drosophila
  misc_feature (22)..(141): Homolog of NCBI NO: 40742628 NR Description: hypothetical protein AN7632.2 [Aspergillus
  misc_feature (21)..(141): Homolog of NCBI NO: 37783433 NR Description: GSNO reductase [Cryptococcus neoformans var.
  misc_feature (22)..(142): Homolog of NCBI NO: 3121727 NR Description: ALCOHOL DEHYDROGENASE CLASS III
  misc_feature (22)..(142): Homolog of NCBI NO: 3023271 NR Description: ALCOHOL DEHYDROGENASE CLASS III
  misc_feature (23)..(142): Homolog of NCBI NO: 6225010 NR Description: ALCOHOL DEHYDROGENASE CLASS III
  misc_feature (21)..(142): Homolog of NCBI NO: 1498024 NR Description: glutathione-dependent formaldehyde dehydrogenase
  misc_feature (21)..(142): Homolog of NCBI NO: 15240054 NR Description: alcohol dehydrogenase (EC 1.1.1.1) class III
  misc_feature (21)..(142): Homolog of NCBI NO: 2129562 NR Description: alcohol dehydrogenase (EC 1.1.1.1) class III -
TLSISLSLYLSLSLSFLPASMATQGQVITCKAAVAYEPNKPLVIEDVQVAPPQAGEVRIKILYTALCHTDAYTWSGKDPEGLFPCILGHEAAGIVESVGEGVTEVQAGDHVIPCYQAECRECKFCKSGKTNLCGKVRSATGVTPSPSP

SEQ ID NO: 39693 - protein, 128 aa, Arabidopsis thaliana
  peptide (1)..(128): Ceres Seq. ID no. 12580206
  misc_feature (1)..(121): Homolog of NCBI NO: 16565909 NR Description: formaldehyde dehydrogenase [Pichia angusta]
  misc_feature (2)..(124): Homolog of NCBI NO: 17737895 NR Description: Formaldehyde dehydrogenase CG6598-PA [Drosophila
  misc_feature (2)..(121): Homolog of NCBI NO: 40742628 NR Description: hypothetical protein AN7632.2 [Aspergillus
  misc_feature (1)..(121): Homolog of NCBI NO: 37783433 NR Description: GSNO reductase [Cryptococcus neoformans var.
  misc_feature (2)..(122): Homolog of NCBI NO: 3121727 NR Description: ALCOHOL DEHYDROGENASE CLASS III
  misc_feature (2)..(122): Homolog of NCBI NO: 3023271 NR Description: ALCOHOL DEHYDROGENASE CLASS III
  misc_feature (3)..(122): Homolog of NCBI NO: 6225010 NR Description: ALCOHOL DEHYDROGENASE CLASS III
  misc_feature (1)..(122): Homolog of NCBI NO: 1498024 NR Description: glutathione-dependent formaldehyde dehydrogenase
  misc_feature (1)..(122): Homolog of NCBI NO: 15240054 NR Description: alcohol dehydrogenase (EC 1.1.1.1) class III
  misc_feature (1)..(122): Homolog of NCBI NO: 2129562 NR Description: alcohol dehydrogenase (EC 1.1.1.1) class III -
MATQGQVITCKAAVAYEPNKPLVIEDVQVAPPQAGEVRIKILYTALCHTDAYTWSGKDPEGLFPCILGHEAAGIVESVGEGVTEVQAGDHVIPCYQAECRECKFCKSGKTNLCGKVRSATGVTPSPSP

SEQ ID NO: 39694 - protein, 86 aa, Arabidopsis thaliana
  peptide (1)..(86): Ceres Seq. ID no. 12580207
LSLSLFLSISLYLSHFFLRQWRLKVRLSLAKLRWLTSRTSLWSSKMCKWLHLKLVRFGSRSSTLLFVTPTLTLGAARILKVSFLVF

SEQ ID NO: 39695 - DNA, 1271 bp, Arabidopsis thaliana
  misc_feature (1)..(1271): Ceres Seq. ID no. 12327725
  misc_feature: MA Experiment ID: 108434 Result: Up-regulated in Transcription
  misc_feature: MA Experiment 108434 PARAMETER Experiment Name: At_Root_Tips_cDNA_P Parameter: Tissue Value: Root Tips
  misc_feature: MA Experiment ID: 108462 Result: Down-regulated in Transcription
  misc_feature: MA Experiment 108462 PARAMETER Experiment Name: At_Germinating_Seeds_cDNA_P Parameter: Age (day) Value: 2 vs. 0
  misc_feature: MA Experiment 108462 PARAMETER Experiment Name: At_Germinating_Seeds_cDNA_P Parameter: Tissue Value: Germinating Seeds
  misc_feature: MA Experiment ID: 108463 Result: Down-regulated in Transcription
  misc_feature: MA Experiment 108463 PARAMETER Experiment Name: At_Germinating_Seeds_cDNA_P Parameter: Age (day) Value: 3 vs. 0
  misc_feature: MA Experiment 108463 PARAMETER Experiment Name: At_Germinating_Seeds_cDNA_P Parameter: Tissue Value: Germinating Seeds
  misc_feature: MA Experiment ID: 108464 Result: Down-regulated in Transcription
  misc_feature: MA Experiment 108464 PARAMETER Experiment Name: At_Germinating_Seeds_cDNA_P Parameter: Age (day) Value: 4 vs. 0
  misc_feature: MA Experiment 108464 PARAMETER Experiment Name: At_Germinating_Seeds_cDNA_P Parameter: Tissue Value: Germinating Seeds
  misc_feature: MA Experiment ID: 108595 Result: Down-regulated in Transcription
  misc_feature: MA Experiment 108595 PARAMETER Experiment Name: At_Ler-pi_Ovule_cDNA_P Parameter: Plant Line Value: null
  misc_feature: MA Experiment ID: 108607 Result: Down-regulated in Transcription
  misc_feature: MA Experiment 108607 PARAMETER Experiment Name: At_100uM_ABA_cDNA_P Parameter: Timepoint (hr) Value: 4
  misc_feature: MA Experiment 108607 PARAMETER Experiment Name: At_100uM_ABA_cDNA_P Parameter: Tissue Value: Aerial
  misc_feature: MA Experiment 108607 PARAMETER Experiment Name: At_100uM_ABA_cDNA_P Parameter: Treatment Value: 100uM ABA vs. No Treatment
  misc_feature: MA Experiment ID: 20000086 Result: Down-regulated in Transcription
  misc_feature: MA Experiment 20000086 PARAMETER Experiment Name: At_100uM_ABA_Mutants_cDNA_P Parameter: Plant Line Value: CS22
  misc_feature: MA Experiment 20000086 PARAMETER Experiment Name: At_100uM_ABA_Mutants_cDNA_P Parameter: Timepoint (hr) Value: 6
  misc_feature: MA Experiment 20000086 PARAMETER Experiment Name: At_100uM_ABA_Mutants_cDNA_P Parameter: Tissue Value: Aerial
  misc_feature: MA Experiment 20000086 PARAMETER Experiment Name: At_100uM_ABA_Mutants_cDNA_P Parameter: Treatment Value: 100uM ABA vs. No Treatment
  misc_feature: MA Experiment ID: 20000111 Result: Up-regulated in Transcription
  misc_feature: MA Experiment 20000111 PARAMETER Experiment Name: At_42deg_Heat_cDNA_P Parameter: Temperature (deg C) Value: 42 vs. 22
  misc_feature: MA Experiment 20000111 PARAMETER Experiment Name: At_42deg_Heat_cDNA_P Parameter: Timepoint (hr) Value: 6
  misc_feature: MA Experiment 20000111 PARAMETER Experiment Name: At_42deg_Heat_cDNA_P Parameter: Tissue Value: Aerial
  misc_feature: MA Experiment ID: 20000112 Result: Up-regulated in Transcription
  misc_feature: MA Experiment 20000112 PARAMETER Experiment Name: At_42deg_Heat_cDNA_P Parameter: Temperature (deg C) Value: 42 vs. 22
  misc_feature: MA Experiment 20000112 PARAMETER Experiment Name: At_42deg_Heat_cDNA_P Parameter: Timepoint (hr) Value: 2
  misc_feature: MA Experiment 20000112 PARAMETER Experiment Name: At_42deg_Heat_cDNA_P Parameter: Tissue Value: Aerial
  misc_feature: MA Experiment ID: 20000113 Result: Up-regulated in Transcription
  misc_feature: MA Experiment 20000113 PARAMETER Experiment Name: At_42deg_Heat_cDNA_P Parameter: Temperature (deg C) Value: 42 vs. 22
  misc_feature: MA Experiment 20000113 PARAMETER Experiment Name: At_42deg_Heat_cDNA_P Parameter: Timepoint (hr) Value: 8
  misc_feature: MA Experiment 20000113 PARAMETER Experiment Name: At_42deg_Heat_cDNA_P Parameter: Tissue Value: Aerial
  misc_feature: MA Experiment ID: 20000437 Result: Down-regulated in Transcription
  misc_feature: MA Experiment 20000437 PARAMETER Experiment Name: At_Drought_P Parameter: Age (day) Value: 8
  misc_feature: MA Experiment 20000437 PARAMETER Experiment Name: At_Drought_P Parameter: Organism Value: A. thaliana
  misc_feature: MA Experiment 20000437 PARAMETER Experiment Name: At_Drought_P Parameter: Plant Line Value: WS
  misc_feature: MA Experiment 20000437 PARAMETER Experiment Name: At_Drought_P Parameter: Timepoint (hr) Value: 24
  misc_feature: MA Experiment 20000437 PARAMETER Experiment Name: At_Drought_P Parameter: Tissue Value: Whole Plant
  misc_feature: MA Experiment 20000437 PARAMETER Experiment Name: At_Drought_P Parameter: Treatment Value: Drought vs. No Drought
  misc_feature: MA Experiment ID: 20000439 Result: Down-regulated in Transcription
  misc_feature: MA Experiment 20000439 PARAMETER Experiment Name: At_Roots__P Parameter: Age (day) Value: 14 vs. 21
  misc_feature: MA Experiment 20000439 PARAMETER Experiment Name: At_Roots__P Parameter: Organism Value: A. thaliana
  misc_feature: MA Experiment 20000439 PARAMETER Experiment Name: At_Roots__P Parameter: Tissue Value: Roots vs. Whole Plant
agaaccgtttgccctctctctctctatcttccttatctctctccgccactctccttctctttctccgaactcttcgatggccggtctactcaaaacgccgtctttacatctcacaccaactcttcttcatgctccttctgtaccctttaagcccttttgcgtatctttcgccggaggaagaaacgttagcgtctcactctctcgccgagcttctctccggtctgtctctagcggctatcctctccgcttactaaacctcgtaccctttgcttcgggagaagctgagacgacggagacggaggtggaatcgaacgaacccgaagttcaggagacggatggtgctgttgatgtcgagaatgaaaatgccagtgctgaggagggtgaagctgaggaagaagaagcagctgttatcacagcgttgctgaaatcctataaagaagctttagcagacaacaacgaggggaagattgctgagatagaagcatctttaaagtccatagaagatgaaaaatttctgcttgcggataaagtagcgtctttatccaatgagttatcggtggagagggatcggcttataagaatcagtgcagatttcgacaacttcaggaagaggactgagagggaaaggctaaaccttgtttcaaatgctcaaggagaggttgtagagaatcttttggctgttttggataatttcgagagagctaaatcccaaattaaggtggagactgagggagaagagaaagtcactaatagctatcagagcatatacaaacagtttgtagaaattctgggatcacttggtgttatccatgtggagacagtcggcaagcagtttgatccaatgctacatgaggcaataatgagagaagactctgcggaatacgaagagggtatagtactagaagaatacaggaaaggtttcttgctaggtgaaaggcttttacgtccttcaatggtgaaagtatcagctggacctggaccagaaaagccccttgaagctgaaggagaagaagccacagcacaaggaagcgcagaagaagaatcatcttcatcttgaaattgaagatgatcaagactcagcagttttgtgtgcgtgtgtgtgagagagatacagagataaaagagggagaggtctgttttaccattattgttgttattgttattgatacgttatatcatttctacagagtctagaagtaatatagatcgacatttttaatgaattcttaagtattcaatccgaaagggaatgccataattgatttttttcc

SEQ ID NO: 39696 - protein, 351 aa, Arabidopsis thaliana
  peptide (1)..(351): Ceres Seq. ID no. 12327726
  misc_feature (161)..(323): Pfam Name: GrpE Pfam Description: GrpE
  misc_feature (119)..(343): Homolog of NCBI NO: 17229937 NR Description: heat shock protein [Nostoc sp. PCC 7120]
  misc_feature (90)..(325): Homolog of NCBI NO: 22298857 NR Description: heat shock protein [Thermosynechococcus elongatus
  misc_feature (91)..(332): Homolog of NCBI NO: 23041352 NR Description: hypothetical protein [Trichodesmium erythraeum
  misc_feature (118)..(327): Homolog of NCBI NO: 15384279 NR Description: co-chaperone CGE1 precursor isoform b
  misc_feature (120)..(327): Homolog of NCBI NO: 15384277 NR Description: co-chaperone CGE1 precursor isoform a
  misc_feature (122)..(338): Homolog of NCBI NO: 32488078 NR Description: OSJNBa0084A10.6 [Oryza sativa (japonica
  misc_feature (128)..(339): Homolog of NCBI NO: 21593629 NR Description: putative heat shock protein [Arabidopsis thaliana]
  misc_feature (128)..(339): Homolog of NCBI NO: 18400095 NR Description: putative heat shock protein
  misc_feature (26)..(351): Homolog of NCBI NO: 18418410 NR Description: chloroplast GrpE protein
  misc_feature (26)..(351): Homolog of NCBI NO: 30686476 NR Description: chloroplast GrpE protein [Arabidopsis thaliana]
EPFALSLSIFLISLRHSPSLSPNSSMAGLLKTPSLHLTPTLLHAPSVPFKPFCVSFAGGRNVSVSLSRRASLRSVSSGYPLRLLNLVPFASGEAETTETEVESNEPEVQETDGAVDVENENASAEEGEAEEEEAAVITALLKSYKEALADNNEGKIAEIEASLKSIEDEKFLLADKVASLSNELSVERDRLIRISADFDNFRKRTERERLNLVSNAQGEVVENLLAVLDNFERAKSQIKVETEGEEKVTNSYQSIYKQFVEILGSLGVIHVETVGKQFDPMLHEAIMREDSAEYEEGIVLEEYRKGFLLGERLLRPSMVKVSAGPGPEKPLEAEGEEATAQGSAEEESSSS

SEQ ID NO: 39697 - protein, 326 aa, Arabidopsis thaliana
  peptide (1)..(326): Ceres Seq. ID no. 12327727
  misc_feature (136)..(298): Pfam Name: GrpE Pfam Description: GrpE
  misc_feature (94)..(318): Homolog of NCBI NO: 17229937 NR Description: heat shock protein [Nostoc sp. PCC 7120]
  misc_feature (65)..(300): Homolog of NCBI NO: 22298857 NR Description: heat shock protein [Thermosynechococcus elongatus
  misc_feature (66)..(307): Homolog of NCBI NO: 23041352 NR Description: hypothetical protein [Trichodesmium erythraeum
  misc_feature (93)..(302): Homolog of NCBI NO: 15384279 NR Description: co-chaperone CGE1 precursor isoform b
  misc_feature (95)..(302): Homolog of NCBI NO: 15384277 NR Description: co-chaperone CGE1 precursor isoform a
  misc_feature (97)..(313): Homolog of NCBI NO: 32488078 NR Description: OSJNBa0084A10.6 [Oryza sativa (japonica
  misc_feature (103)..(314): Homolog of NCBI NO: 21593629 NR Description: putative heat shock protein [Arabidopsis thaliana]
  misc_feature (103)..(314): Homolog of NCBI NO: 18400095 NR Description: putative heat shock protein
  misc_feature (1)..(326): Homolog of NCBI NO: 18418410 NR Description: chloroplast GrpE protein
  misc_feature (1)..(326): Homolog of NCBI NO: 30686476 NR Description: chloroplast GrpE protein [Arabidopsis thaliana]
MAGLLKTPSLHLTPTLLHAPSVPFKPFCVSFAGGRNVSVSLSRRASLRSVSSGYPLRLLNLVPFASGEAETTETEVESNEPEVQETDGAVDVENENASAEEGEAEEEEAAVITALLKSYKEALADNNEGKIAEIEASLKSIEDEKFLLADKVASLSNELSVERDRLIRISADFDNFRKRTERERLNLVSNAQGEVVENLLAVLDNFERAKSQIKVETEGEEKVTNSYQSIYKQFVEILGSLGVIHVETVGKQFDPMLHEAIMREDSAEYEEGIVLEEYRKGFLLGERLLRPSMVKVSAGPGPEKPLEAEGEEATAQGSAEEESSSS

SEQ ID NO: 39698 - DNA, 1529 bp, Arabidopsis thaliana
  misc_feature (1)..(1529): Ceres Seq. ID no. 13488876
  misc_feature: MA Experiment ID: 108577 Result: Down-regulated in Transcription
  misc_feature: MA Experiment 108577 PARAMETER Experiment Name: At_42deg_Heat_cDNA_P Parameter: Temperature (deg C) Value: 42 vs. 22
  misc_feature: MA Experiment 108577 PARAMETER Experiment Name: At_42deg_Heat_cDNA_P Parameter: Timepoint (hr) Value: 6
  misc_feature: MA Experiment 108577 PARAMETER Experiment Name: At_42deg_Heat_cDNA_P Parameter: Tissue Value: Aerial
  misc_feature: MA Experiment ID: 108595 Result: Down-regulated in Transcription
  misc_feature: MA Experiment 108595 PARAMETER Experiment Name: At_Ler-pi_Ovule_cDNA_P Parameter: Plant Line Value: null
  misc_feature: MA Experiment ID: 20000327 Result: Down-regulated in Transcription
  misc_feature: MA Experiment 20000327 PARAMETER Experiment Name: At_42deg_Heat_Sub_P Parameter: Age (day) Value: 14
  misc_feature: MA Experiment 20000327 PARAMETER Experiment Name: At_42deg_Heat_Sub_P Parameter: Organism Value: A. thaliana
  misc_feature: MA Experiment 20000327 PARAMETER Experiment Name: At_42deg_Heat_Sub_P Parameter: Plant Line Value: WS
  misc_feature: MA Experiment 20000327 PARAMETER Experiment Name: At_42deg_Heat_Sub_P Parameter: Temperature (deg C) Value: 42 vs. 22
  misc_feature: MA Experiment 20000327 PARAMETER Experiment Name: At_42deg_Heat_Sub_P Parameter: Timepoint (hr) Value: 1
  misc_feature: MA Experiment 20000327 PARAMETER Experiment Name: At_42deg_Heat_Sub_P Parameter: Tissue Value: Aerial
  misc_feature: MA Experiment ID: 20000328 Result: Down-regulated in Transcription
  misc_feature: MA Experiment 20000328 PARAMETER Experiment Name: At_42deg_Heat_Sub_P Parameter: Age (day) Value: 14
  misc_feature: MA Experiment 20000328 PARAMETER Experiment Name: At_42deg_Heat_Sub_P Parameter: Organism Value: A. thaliana
  misc_feature: MA Experiment 20000328 PARAMETER Experiment Name: At_42deg_Heat_Sub_P Parameter: Plant Line Value: WS
  misc_feature: MA Experiment 20000328 PARAMETER Experiment Name: At_42deg_Heat_Sub_P Parameter: Temperature (deg C) Value: 42 vs. 22
  misc_feature: MA Experiment 20000328 PARAMETER Experiment Name: At_42deg_Heat_Sub_P Parameter: Timepoint (hr) Value: 6
  misc_feature: MA Experiment 20000328 PARAMETER Experiment Name: At_42deg_Heat_Sub_P Parameter: Tissue Value: Aerial
aaaataggcctctccaccaaatctctctctctttctctctgtcacactctttatcactctctgctctcacagatcggagaatctcctctgagagctctaatctctcagctttcttcaccggcgtctccggatctaataatcctgtaaggcctctactgcagaaaaaagattgaatttttacaatttggggtgactcaattttgttgactagagtgtttggagatatttctaactaaatgggaacaatgcaccgcagtggtgctcctcgaagaacgaatgaaaatgcaaaggttattattactactattttggggatagtgtttgggacttttattggtatcacattaccttcactttcgtttaagattaacttaccctcgcgccttatatcatctcttgatgtagccatatctggtgacaaatcccctgaagatttcggttcaagaaagtttcctgagatatatgttccaactaacccgcgtggtgcagaactactacctccaggaatcgttgtggcgaaaactgatttttacttgcgtagattatggggagaacctaatgaagatttgaagaagaagccaaaatatcttgtgacatttacagttggatttgagcagaggaaccatattaatggagttgttaagaagttttctgaagatttccaaattttgctcttccattatgatggccggacaactgaatgggaccaatttgagtggtcgaagagcgcgattcatattagtacaagaaagcaaacaaaatggtggtacgcgaagaggtttttgcatcctgatgttgtgtcagcttatgagtacatatttatatgggatgaagatcttggagtggagcatttcaatgcggataagtacattgagttagttaagaagcatggtttagagatttctcaaccaggcttagagcctaacaatggactcacatgggaaatgacaaagaggagaggtgaccgggaagtccataaagatacaaaagagaaaccaggatggtgtaaagacccacatttacctccatgtgccgcgtttgttgaaataatggcgcctgtattttctcgagaagcatggcgatgtgtgtggcatatgattcagaatgatctggttcatggatggggtctcgactttgcgcttagaagatgcgttgaacctgctcatgagaagattggtgttgtggattcgcaatggataatacataaagtgataccttcacttggaagtcaaggaaagacagagaatgggaaagctccatgacaaggagtgagagatagatgcaaaatggaatggacaatgtttcagaaccgattggctgatgctgataaagagtatcttgggaagatggtgaaagattagatttgtttttcttttttctttctatataattaatatattaaaaaaacttttacttttgtatatcaaatattttacactaaattaggttttcataggacatgtgtgaagccctttttattgatattgtgtaagatttatacattttgattgagctttattatgttgttt

SEQ ID NO: 39699 - protein, 341 aa, Arabidopsis thaliana
  peptide (1)..(341): Ceres Seq. ID no. 13488877
  misc_feature (74)..(248): Pfam Name: Protein of unknown function (DUF707) Pfam Description: Protein of unknown function (DUF707)
  misc_feature (74)..(341): Homolog of NCBI NO: 14719314 NR Description: putative protein [Oryza sativa]
  misc_feature (1)..(62): Homolog of NCBI NO: 18408876 NR Description: F12A21.2 [Arabidopsis thaliana]
  misc_feature (74)..(341): Homolog of NCBI NO: 18408876 NR Description: F12A21.2 [Arabidopsis thaliana]
  misc_feature (7)..(43): Homolog of NCBI NO: 25407018 NR Description: protein T6D22.12 [imported] - Arabidopsis
  misc_feature (74)..(341): Homolog of NCBI NO: 25407018 NR Description: protein T6D22.12 [imported] - Arabidopsis
  misc_feature (1)..(341): Homolog of NCBI NO: 18390845 NR Description: storage protein -related [Arabidopsis thaliana]
  misc_feature (1)..(341): Homolog of NCBI NO: 20466346 NR Description: unknown protein [Arabidopsis thaliana]
  misc_feature (268)..(341): Homolog of NCBI NO: 20197601 NR Description: unknown protein [Arabidopsis thaliana]
  misc_feature (1)..(248): Homolog of NCBI NO: 20197601 NR Description: unknown protein [Arabidopsis thaliana]
  misc_feature (1)..(341): Homolog of NCBI NO: 30683843 NR Description: expressed protein [Arabidopsis thaliana]
MGTMHRSGAPRRTNENAKVIITTILGIVFGTFIGITLPSLSFKINLPSRLISSLDVAISGDKSPEDFGSRKFPEIYVPTNPRGAELLPPGIVVAKTDFYLRRLWGEPNEDLKKKPKYLVTFTVGFEQRNHINGVVKKFSEDFQILLFHYDGRTTEWDQFEWSKSAIHISTRKQTKWWYAKRFLHPDVVSAYEYIFIWDEDLGVEHFNADKYIELVKKHGLEISQPGLEPNNGLTWEMTKRRGDREVHKDTKEKPGWCKDPHLPPCAAFVEIMAPVFSREAWRCVWHMIQNDLVHGWGLDFALRRCVEPAHEKIGVVDSQWIIHKVIPSLGSQGKTENGKAP

SEQ ID NO: 39700 - protein, 338 aa, Arabidopsis thaliana
  peptide (1)..(338): Ceres Seq. ID no. 13488878
  misc_feature (71)..(245): Pfam Name: Protein of unknown function (DUF707) Pfam Description: Protein of unknown function (DUF707)
  misc_feature (71)..(338): Homolog of NCBI NO: 14719314 NR Description: putative protein [Oryza sativa]
  misc_feature (1)..(59): Homolog of NCBI NO: 18408876 NR Description: F12A21.2 [Arabidopsis thaliana]
  misc_feature (71)..(338): Homolog of NCBI NO: 18408876 NR Description: F12A21.2 [Arabidopsis thaliana]
  misc_feature (4)..(40): Homolog of NCBI NO: 25407018 NR Description: protein T6D22.12 [imported] - Arabidopsis
  misc_feature (71)..(338): Homolog of NCBI NO: 25407018 NR Description: protein T6D22.12 [imported] - Arabidopsis
  misc_feature (1)..(338): Homolog of NCBI NO: 18390845 NR Description: storage protein -related [Arabidopsis thaliana]
  misc_feature (1)..(338): Homolog of NCBI NO: 20466346 NR Description: unknown protein [Arabidopsis thaliana]
  misc_feature (265)..(338): Homolog of NCBI NO: 20197601 NR Description: unknown protein [Arabidopsis thaliana]
  misc_feature (1)..(245): Homolog of NCBI NO: 20197601 NR Description: unknown protein [Arabidopsis thaliana]
  misc_feature (1)..(338): Homolog of NCBI NO: 30683843 NR Description: expressed protein [Arabidopsis thaliana]
MHRSGAPRRTNENAKVIITTILGIVFGTFIGITLPSLSFKINLPSRLISSLDVAISGDKSPEDFGSRKFPEIYVPTNPRGAELLPPGIVVAKTDFYLRRLWGEPNEDLKKKPKYLVTFTVGFEQRNHINGVVKKFSEDFQILLFHYDGRTTEWDQFEWSKSAIHISTRKQTKWWYAKRFLHPDVVSAYEYIFIWDEDLGVEHFNADKYIELVKKHGLEISQPGLEPNNGLTWEMTKRRGDREVHKDTKEKPGWCKDPHLPPCAAFVEIMAPVFSREAWRCVWHMIQNDLVHGWGLDFALRRCVEPAHEKIGVVDSQWIIHKVIPSLGSQGKTENGKAP

SEQ ID NO: 39701 - DNA, 1196 bp, Arabidopsis thaliana
  misc_feature (1)..(1196): Ceres Seq. ID no. 12331367
  misc_feature: MA Experiment ID: 108464 Result: Up-regulated in Transcription
  misc_feature: MA Experiment 108464 PARAMETER Experiment Name: At_Germinating_Seeds_cDNA_P Parameter: Age (day) Value: 4 vs. 0
  misc_feature: MA Experiment 108464 PARAMETER Experiment Name: At_Germinating_Seeds_cDNA_P Parameter: Tissue Value: Germinating Seeds
  misc_feature: MA Experiment ID: 108573 Result: Up-regulated in Transcription
  misc_feature: MA Experiment 108573 PARAMETER Experiment Name: At_Drought_cDNA_P Parameter: Timepoint (hr) Value: 6
  misc_feature: MA Experiment 108573 PARAMETER Experiment Name: At_Drought_cDNA_P Parameter: Tissue Value: Aerial
  misc_feature: MA Experiment 108573 PARAMETER Experiment Name: At_Drought_cDNA_P Parameter: Treatment Value: Drought vs. No Drought
  misc_feature: MA Experiment ID: 108585 Result: Up-regulated in Transcription
  misc_feature: MA Experiment 108585 PARAMETER Experiment Name: At_5mM_NaNP_cDNA_P Parameter: Timepoint (hr) Value: 6
  misc_feature: MA Experiment 108585 PARAMETER Experiment Name: At_5mM_NaNP_cDNA_P Parameter: Tissue Value: Aerial
  misc_feature: MA Experiment 108585 PARAMETER Experiment Name: At_5mM_NaNP_cDNA_P Parameter: Treatment Value: null
  misc_feature: MA Experiment ID: 20000069 Result: Down-regulated in Transcription
  misc_feature: MA Experiment 20000069 PARAMETER Experiment Name: At_100uM_ABA_Mutants_cDNA_P Parameter: Plant Line Value: CS23
  misc_feature: MA Experiment 20000069 PARAMETER Experiment Name: At_100uM_ABA_Mutants_cDNA_P Parameter: Timepoint (hr) Value: 6
  misc_feature: MA Experiment 20000069 PARAMETER Experiment Name: At_100uM_ABA_Mutants_cDNA_P Parameter: Tissue Value: Aerial
  misc_feature: MA Experiment 20000069 PARAMETER Experiment Name: At_100uM_ABA_Mutants_cDNA_P Parameter: Treatment Value: 100uM ABA vs. No Treatment
  misc_feature: MA Experiment ID: 20000070 Result: Down-regulated in Transcription
  misc_feature: MA Experiment 20000070 PARAMETER Experiment Name: At_100uM_ABA_Mutants_cDNA_P Parameter: Plant Line Value: CS24
  misc_feature: MA Experiment 20000070 PARAMETER Experiment Name: At_100uM_ABA_Mutants_cDNA_P Parameter: Timepoint (hr) Value: 6
  misc_feature: MA Experiment 20000070 PARAMETER Experiment Name: At_100uM_ABA_Mutants_cDNA_P Parameter: Tissue Value: Aerial
  misc_feature: MA Experiment 20000070 PARAMETER Experiment Name: At_100uM_ABA_Mutants_cDNA_P Parameter: Treatment Value: 100uM ABA vs. No Treatment
  misc_feature: MA Experiment ID: 20000072 Result: Down-regulated in Transcription
  misc_feature: MA Experiment 20000072 PARAMETER Experiment Name: At_100uM_ABA_Mutants_cDNA_P Parameter: Plant Line Value: CS8105
  misc_feature: MA Experiment 20000072 PARAMETER Experiment Name: At_100uM_ABA_Mutants_cDNA_P Parameter: Timepoint (hr) Value: 6
  misc_feature: MA Experiment 20000072 PARAMETER Experiment Name: At_100uM_ABA_Mutants_cDNA_P Parameter: Tissue Value: Aerial
  misc_feature: MA Experiment 20000072 PARAMETER Experiment Name: At_100uM_ABA_Mutants_cDNA_P Parameter: Treatment Value: 100uM ABA vs. No Treatment
  misc_feature: MA Experiment ID: 20000086 Result: Down-regulated in Transcription
  misc_feature: MA Experiment 20000086 PARAMETER Experiment Name: At_100uM_ABA_Mutants_cDNA_P Parameter: Plant Line Value: CS22
  misc_feature: MA Experiment 20000086 PARAMETER Experiment Name: At_100uM_ABA_Mutants_cDNA_P Parameter: Timepoint (hr) Value: 6
  misc_feature: MA Experiment 20000086 PARAMETER Experiment Name: At_100uM_ABA_Mutants_cDNA_P Parameter: Tissue Value: Aerial
  misc_feature: MA Experiment 20000086 PARAMETER Experiment Name: At_100uM_ABA_Mutants_cDNA_P Parameter: Treatment Value: 100uM ABA vs. No Treatment
  misc_feature: MA Experiment ID: 20000087 Result: Down-regulated in Transcription
  misc_feature: MA Experiment 20000087 PARAMETER Experiment Name: At_100uM_ABA_Mutants_cDNA_P Parameter: Plant Line Value: WS
  misc_feature: MA Experiment 20000087 PARAMETER Experiment Name: At_100uM_ABA_Mutants_cDNA_P Parameter: Timepoint (hr) Value: 6
  misc_feature: MA Experiment 20000087 PARAMETER Experiment Name: At_100uM_ABA_Mutants_cDNA_P Parameter: Tissue Value: Aerial
  misc_feature: MA Experiment 20000087 PARAMETER Experiment Name: At_100uM_ABA_Mutants_cDNA_P Parameter: Treatment Value: 100uM ABA vs. No Treatment
  misc_feature: MA Experiment ID: 20000088 Result: Down-regulated in Transcription
  misc_feature: MA Experiment 20000088 PARAMETER Experiment Name: At_100uM_ABA_Mutants_cDNA_P Parameter: Plant Line Value: Landsberg
  misc_feature: MA Experiment 20000088 PARAMETER Experiment Name: At_100uM_ABA_Mutants_cDNA_P Parameter: Timepoint (hr) Value: 6
  misc_feature: MA Experiment 20000088 PARAMETER Experiment Name: At_100uM_ABA_Mutants_cDNA_P Parameter: Tissue Value: Aerial
  misc_feature: MA Experiment 20000088 PARAMETER Experiment Name: At_100uM_ABA_Mutants_cDNA_P Parameter: Treatment Value: 100uM ABA vs. No Treatment
  misc_feature: MA Experiment ID: 20000090 Result: Down-regulated in Transcription
  misc_feature: MA Experiment ID: 20000111 Result: Up-regulated in Transcription
  misc_feature: MA Experiment 20000111 PARAMETER Experiment Name: At_42deg_Heat_cDNA_P Parameter: Temperature (deg C) Value: 42 vs. 22
  misc_feature: MA Experiment 20000111 PARAMETER Experiment Name: At_42deg_Heat_cDNA_P Parameter: Timepoint (hr) Value: 6
  misc_feature: MA Experiment 20000111 PARAMETER Experiment Name: At_42deg_Heat_cDNA_P Parameter: Tissue Value: Aerial
  misc_feature: MA Experiment ID: 20000113 Result: Up-regulated in Transcription
  misc_feature: MA Experiment 20000113 PARAMETER Experiment Name: At_42deg_Heat_cDNA_P Parameter: Temperature (deg C) Value: 42 vs. 22
  misc_feature: MA Experiment 20000113 PARAMETER Experiment Name: At_42deg_Heat_cDNA_P Parameter: Timepoint (hr) Value: 8
  misc_feature: MA Experiment 20000113 PARAMETER Experiment Name: At_42deg_Heat_cDNA_P Parameter: Tissue Value: Aerial
  misc_feature: MA Experiment ID: 20000117 Result: Down-regulated in Transcription
  misc_feature: MA Experiment 20000117 PARAMETER Experiment Name: At_100uM_ABA_Mutants_cDNA_P Parameter: Plant Line Value: Columbia
  misc_feature: MA Experiment 20000117 PARAMETER Experiment Name: At_100uM_ABA_Mutants_cDNA_P Parameter: Timepoint (hr) Value: 6
  misc_feature: MA Experiment 20000117 PARAMETER Experiment Name: At_100uM_ABA_Mutants_cDNA_P Parameter: Tissue Value: Aerial
  misc_feature: MA Experiment 20000117 PARAMETER Experiment Name: At_100uM_ABA_Mutants_cDNA_P Parameter: Treatment Value: 100uM ABA vs. No Treatment
  misc_feature: MA Experiment ID: 20000184 Result: Up-regulated in Transcription
  misc_feature: MA Experiment 20000184 PARAMETER Experiment Name: At_Shoots__P Parameter: Age (day) Value: 7
  misc_feature: MA Experiment 20000184 PARAMETER Experiment Name: At_Shoots__P Parameter: Tissue Value: Shoots vs. Whole Plant
  misc_feature: MA Experiment ID: 20001905 Result: Down-regulated in Transcription
  misc_feature: MA Experiment 20001905 PARAMETER Experiment Name: At_Drought_Reproduction_P Parameter: Age (day) Value: 40
  misc_feature: MA Experiment 20001905 PARAMETER Experiment Name: At_Drought_Reproduction_P Parameter: Organism Value: A. thaliana
  misc_feature: MA Experiment 20001905 PARAMETER Experiment Name: At_Drought_Reproduction_P Parameter: Plant Line Value: WS
  misc_feature: MA Experiment 20001905 PARAMETER Experiment Name: At_Drought_Reproduction_P Parameter: Timepoint (day) Value: 10
  misc_feature: MA Experiment 20001905 PARAMETER Experiment Name: At_Drought_Reproduction_P Parameter: Tissue Value: Rosettes
  misc_feature: MA Experiment 20001905 PARAMETER Experiment Name: At_Drought_Reproduction_P Parameter: Treatment Value: Drought vs. No Drought
atgttttaattttgtttccatcatcttccaaccttgagtttcggtcactataaaaagccaccactctctctgcttctctgcaacacataacccactcacagaaaaacctagaaagctctagagagaaagagagagagagatggaaggtaaagaagaagatgttagagtcggagctaacaagtttccggagaggcaaccgatcggaacttcggctcagagtgacaaggactacaaagagccaccacctgcgccgttgttcgagcccggcgagctagcttcatggtccttctggagagctgggattgctgagtttatagctacgtttttgttcctgtacatcactgttttgactgttatgggtgtgaagaggtcaccgaacatgtgtgcttccgtcggaatccaaggtatcgcttgggctttcggtggtatgatcttcgctctcgtctactgcaccgctggtatctccggtggacacatcaacccagcggttacgttcggtttgttcttagctaggaagctttcgctcacacgagctgtgtactacatagtgatgcagtgcttaggagctatctgtggagctggtgtggtcaaggggttccagccaaagcaataccaggctttgggaggtggagccaacaccatagctcatggctacaccaaaggaagtggtcttggagctgagattattggaacctttgtccttgtttacaccgtcttctctgccactgatgccaagagaaacgctcgtgactctcatgttcctattctagcaccgctccctatcggattcgctgtgttcttggttcacttagcaaccatccccattactggaactggaatcaacccagcaagaagtcttggagctgcaatcatcttcaacaaggacaacgcttgggatgaccactgggtcttttgggttggaccattcattggtgctgcacttgctgctctctaccacgttatagtcatcagagccatcccattcaagtccagaagctaaagctgattgagttctatttaaaatctggcttttgttcttagtttgctttcttttgtgaatctactacctgtgtgtaacgtgtgtatctgttgtcctcttctttgcctaatggagacttatgtaaaacaaagacatgccccagaaacatctgttatctttcttctccattttatcagaggatttctataattggccc

SEQ ID NO: 39702 - protein, 286 aa, Arabidopsis thaliana
  peptide (1)..(286): Ceres Seq. ID no. 12331368
  misc_feature (44)..(273): Pfam Name: Major intrinsic protein Pfam Description: Major intrinsic protein
  misc_feature (1)..(286): Homolog of NCBI NO: 15233109 NR Description: plasma membrane intrinsic protein 1a
  misc_feature (1)..(286): Homolog of NCBI NO: 21536709 NR Description: aquaporin (plasma membrane intrinsic protein 1B)
  misc_feature (1)..(286): Homolog of NCBI NO: 2199574 NR Description: aquaporin [Brassica rapa]
  misc_feature (1)..(286): Homolog of NCBI NO: 1199503 NR Description: transmembrane channel protein [Brassica oleracea]
  misc_feature (1)..(286): Homolog of NCBI NO: 7209556 NR Description: plasma membrane aquaporin 1b [Raphanus sativus]
  misc_feature (1)..(286): Homolog of NCBI NO: 1199804 NR Description: transmembrane channel protein [Brassica oleracea]
  misc_feature (1)..(286): Homolog of NCBI NO: 4467357 NR Description: PIP1b protein [Arabidopsis thaliana]
  misc_feature (1)..(286): Homolog of NCBI NO: 10799095 NR Description: aquaporin PIP1b2 [Brassica oleracea]
  misc_feature (1)..(286): Homolog of NCBI NO: 10799093 NR Description: aquaporin PIP1b1 [Brassica oleracea]
  misc_feature (1)..(286): Homolog of NCBI NO: 15225913 NR Description: aquaporin (plasma membrane intrinsic protein 1B)
MEGKEEDVRVGANKFPERQPIGTSAQSDKDYKEPPPAPLFEPGELASWSFWRAGIAEFIATFLFLYITVLTVMGVKRSPNMCASVGIQGIAWAFGGMIFALVYCTAGISGGHINPAVTFGLFLARKLSLTRAVYYIVMQCLGAICGAGVVKGFQPKQYQALGGGANTIAHGYTKGSGLGAEIIGTFVLVYTVFSATDAKRNARDSHVPILAPLPIGFAVFLVHLATIPITGTGINPARSLGAAIIFNKDNAWDDHWVFWVGPFIGAALAALYHVIVIRAIPFKSRS

SEQ ID NO: 39703 - protein, 214 aa, Arabidopsis thaliana
  peptide (1)..(214): Ceres Seq. ID no. 12331369
  misc_feature (1)..(201): Pfam Name: Major intrinsic protein Pfam Description: Major intrinsic protein
  misc_feature (1)..(214): Homolog of NCBI NO: 15233109 NR Description: plasma membrane intrinsic protein 1a
  misc_feature (1)..(214): Homolog of NCBI NO: 21536709 NR Description: aquaporin (plasma membrane intrinsic protein 1B)
  misc_feature (1)..(214): Homolog of NCBI NO: 2199574 NR Description: aquaporin [Brassica rapa]
  misc_feature (1)..(214): Homolog of NCBI NO: 1199503 NR Description: transmembrane channel protein [Brassica oleracea]
  misc_feature (1)..(214): Homolog of NCBI NO: 7209556 NR Description: plasma membrane aquaporin 1b [Raphanus sativus]
  misc_feature (1)..(214): Homolog of NCBI NO: 1199804 NR Description: transmembrane channel protein [Brassica oleracea]
  misc_feature (1)..(214): Homolog of NCBI NO: 4467357 NR Description: PIP1b protein [Arabidopsis thaliana]
  misc_feature (1)..(214): Homolog of NCBI NO: 10799095 NR Description: aquaporin PIP1b2 [Brassica oleracea]
  misc_feature (1)..(214): Homolog of NCBI NO: 10799093 NR Description: aquaporin PIP1b1 [Brassica oleracea]
  misc_feature (1)..(214): Homolog of NCBI NO: 15225913 NR Description: aquaporin (plasma membrane intrinsic protein 1B)
MGVKRSPNMCASVGIQGIAWAFGGMIFALVYCTAGISGGHINPAVTFGLFLARKLSLTRAVYYIVMQCLGAICGAGVVKGFQPKQYQALGGGANTIAHGYTKGSGLGAEIIGTFVLVYTVFSATDAKRNARDSHVPILAPLPIGFAVFLVHLATIPITGTGINPARSLGAAIIFNKDNAWDDHWVFWVGPFIGAALAALYHVIVIRAIPFKSRS

SEQ ID NO: 39704 - protein, 206 aa, Arabidopsis thaliana
  peptide (1)..(206): Ceres Seq. ID no. 12331370
  misc_feature (1)..(193): Pfam Name: Major intrinsic protein Pfam Description: Major intrinsic protein
  misc_feature (1)..(206): Homolog of NCBI NO: 15233109 NR Description: plasma membrane intrinsic protein 1a
  misc_feature (1)..(206): Homolog of NCBI NO: 21536709 NR Description: aquaporin (plasma membrane intrinsic protein 1B)
  misc_feature (1)..(206): Homolog of NCBI NO: 2199574 NR Description: aquaporin [Brassica rapa]
  misc_feature (1)..(206): Homolog of NCBI NO: 1199503 NR Description: transmembrane channel protein [Brassica oleracea]
  misc_feature (1)..(206): Homolog of NCBI NO: 7209556 NR Description: plasma membrane aquaporin 1b [Raphanus sativus]
  misc_feature (1)..(206): Homolog of NCBI NO: 1199804 NR Description: transmembrane channel protein [Brassica oleracea]
  misc_feature (1)..(206): Homolog of NCBI NO: 4467357 NR Description: PIP1b protein [Arabidopsis thaliana]
  misc_feature (1)..(206): Homolog of NCBI NO: 10799095 NR Description: aquaporin PIP1b2 [Brassica oleracea]
  misc_feature (1)..(206): Homolog of NCBI NO: 10799093 NR Description: aquaporin PIP1b1 [Brassica oleracea]
  misc_feature (1)..(206): Homolog of NCBI NO: 15225913 NR Description: aquaporin (plasma membrane intrinsic protein 1B)
MCASVGIQGIAWAFGGMIFALVYCTAGISGGHINPAVTFGLFLARKLSLTRAVYYIVMQCLGAICGAGVVKGFQPKQYQALGGGANTIAHGYTKGSGLGAEIIGTFVLVYTVFSATDAKRNARDSHVPILAPLPIGFAVFLVHLATIPITGTGINPARSLGAAIIFNKDNAWDDHWVFWVGPFIGAALAALYHVIVIRAIPFKSRS

SEQ ID NO: 39705 - DNA, 1512 bp, Arabidopsis thaliana
  misc_feature (1)..(1512): Ceres Seq. ID no. 12330300
  misc_feature: MA Experiment ID: 108577 Result: Down-regulated in Transcription
  misc_feature: MA Experiment 108577 PARAMETER Experiment Name: At_42deg_Heat_cDNA_P Parameter: Temperature (deg C) Value: 42 vs. 22
  misc_feature: MA Experiment 108577 PARAMETER Experiment Name: At_42deg_Heat_cDNA_P Parameter: Timepoint (hr) Value: 6
  misc_feature: MA Experiment 108577 PARAMETER Experiment Name: At_42deg_Heat_cDNA_P Parameter: Tissue Value: Aerial
  misc_feature: MA Experiment ID: 108595 Result: Down-regulated in Transcription
  misc_feature: MA Experiment 108595 PARAMETER Experiment Name: At_Ler-pi_Ovule_cDNA_P Parameter: Plant Line Value: null
  misc_feature: MA Experiment ID: 20000111 Result: Down-regulated in Transcription
  misc_feature: MA Experiment 20000111 PARAMETER Experiment Name: At_42deg_Heat_cDNA_P Parameter: Temperature (deg C) Value: 42 vs. 22
  misc_feature: MA Experiment 20000111 PARAMETER Experiment Name: At_42deg_Heat_cDNA_P Parameter: Timepoint (hr) Value: 6
  misc_feature: MA Experiment 20000111 PARAMETER Experiment Name: At_42deg_Heat_cDNA_P Parameter: Tissue Value: Aerial
  misc_feature: MA Experiment ID: 20000113 Result: Down-regulated in Transcription
  misc_feature: MA Experiment 20000113 PARAMETER Experiment Name: At_42deg_Heat_cDNA_P Parameter: Temperature (deg C) Value: 42 vs. 22
  misc_feature: MA Experiment 20000113 PARAMETER Experiment Name: At_42deg_Heat_cDNA_P Parameter: Timepoint (hr) Value: 8
  misc_feature: MA Experiment 20000113 PARAMETER Experiment Name: At_42deg_Heat_cDNA_P Parameter: Tissue Value: Aerial
  misc_feature: MA Experiment ID: 20000173 Result: Down-regulated in Transcription
  misc_feature: MA Experiment 20000173 PARAMETER Experiment Name: At_42deg_Heat_P Parameter: Age (day) Value: 14
  misc_feature: MA Experiment 20000173 PARAMETER Experiment Name: At_42deg_Heat_P Parameter: Organism Value: A. thaliana
  misc_feature: MA Experiment 20000173 PARAMETER Experiment Name: At_42deg_Heat_P Parameter: Plant Line Value: WS
  misc_feature: MA Experiment 20000173 PARAMETER Experiment Name: At_42deg_Heat_P Parameter: Temperature (deg C) Value: 42 vs. 22
  misc_feature: MA Experiment 20000173 PARAMETER Experiment Name: At_42deg_Heat_P Parameter: Timepoint (hr) Value: 6
  misc_feature: MA Experiment 20000173 PARAMETER Experiment Name: At_42deg_Heat_P Parameter: Tissue Value: Aerial
  misc_feature: MA Experiment ID: 20000182 Result: Up-regulated in Transcription
  misc_feature: MA Experiment 20000182 PARAMETER Experiment Name: At_2mM_SA_P Parameter: Age (day) Value: 14
  misc_feature: MA Experiment 20000182 PARAMETER Experiment Name: At_2mM_SA_P Parameter: Organism Value: A. thaliana
  misc_feature: MA Experiment 20000182 PARAMETER Experiment Name: At_2mM_SA_P Parameter: Plant Line Value: WS
  misc_feature: MA Experiment 20000182 PARAMETER Experiment Name: At_2mM_SA_P Parameter: Timepoint (hr) Value: 6
  misc_feature: MA Experiment 20000182 PARAMETER Experiment Name: At_2mM_SA_P Parameter: Tissue Value: Aerial
  misc_feature: MA Experiment 20000182 PARAMETER Experiment Name: At_2mM_SA_P Parameter: Treatment Value: 2mM SA vs. No Treatment
  misc_feature: MA Experiment ID: 20000224 Result: Up-regulated in Transcription
  misc_feature: MA Experiment ID: 20000227 Result: Up-regulated in Transcription
  misc_feature: MA Experiment 20000227 PARAMETER Experiment Name: At_Root-Tips-vs-Tops_P Parameter: Tissue Value: Root Tips vs. Root Tops
  misc_feature: MA Experiment ID: 20001905 Result: Up-regulated in Transcription
  misc_feature: MA Experiment 20001905 PARAMETER Experiment Name: At_Drought_Reproduction_P Parameter: Age (day) Value: 40
  misc_feature: MA Experiment 20001905 PARAMETER Experiment Name: At_Drought_Reproduction_P Parameter: Organism Value: A. thaliana
  misc_feature: MA Experiment 20001905 PARAMETER Experiment Name: At_Drought_Reproduction_P Parameter: Plant Line Value: WS
  misc_feature: MA Experiment 20001905 PARAMETER Experiment Name: At_Drought_Reproduction_P Parameter: Timepoint (day) Value: 10
  misc_feature: MA Experiment 20001905 PARAMETER Experiment Name: At_Drought_Reproduction_P Parameter: Tissue Value: Rosettes
  misc_feature: MA Experiment 20001905 PARAMETER Experiment Name: At_Drought_Reproduction_P Parameter: Treatment Value: Drought vs. No Drought
gaaagacgacagcgtttaataatctccttctcttgtcttgcttccttgtgaatcaaaaaccagcgatcaaaagtcttcttcttgtgaatctgtgatctcaaaagctcctttaaccatggcgacttttgatgatggagatttcccagctcaaacccattctccgtctgaacacgaagactttggtggctacgataatttctccgaagcacagcaacctccgactcaacatcaatccggtggattctcttctttcaatggagatcctgcttccccaaatggatatggatttggtgcttcttcacctaaccatgacttttcctcgccttttgaatcttccgttaacgatgctaacggaaacggcggcggcagcggtggtgatgcgatcttcgcttccgatggtccgattcttccagatccaaatgagatgagagaggagggtttccaacgccgtgagtggcgccgtttgaacaccattcaccttgaggagaaggaaaagaaagagaaggagatgcggaatcagatcataactgaagcagaagatttcaagaaagccttctatgagaaaagagacaagaccattgagaccaacaagactgataaccgtgaaaaggagaagctatactgggctaaccaagagaagttccacaaagaagttgacaagcattactggaaagcaattgcagagctaatccctcgtgaggttcccaacattgagaaaaagagagggaaaaaggatccggacaagaaaccatcagtgaatgttattcagggtcctaaacctgggaagccaactgatctagggagaatgaggcagatattcttgaagctcaagacaaatcccccacctcacatgatgccgcctcctcctccagccaaagatgccaaagatgggaaggatgcgaaagatggcaaagatgcaaaaactgggaaagatgggaaggatgcaaaaggagggaaagacgctaaggacttaaaagatgggaaacctgcagatccaaaggtgacagaggaaaaacgtccttcacctgccaaagacgcaagtgttgaaacagcgaaacctgatgctgctgcctcgggagagggagagaaacctgtagctgtgactgaggccgagggaaccaaggcggagtgaagggtctttagtattactgttgggggattatttgatattgatgaagtcacaatagctgcgggcgaaaataagaagaggtaagttatgtgcacatagaagctcttatgggcgctgtctgtgagcacaacatttcctcttctggggagagaattttagtccttttgtttttggttattattttttattaccattatatttgttctgcaaaatttggttattgtcttggatgatgttcaccttaaatcattttggttccacgtattttacatttataagacttgagagaagtaaaggtttgttggatgaatcatttgattgtattgtgtgatgtgggcatgaggtagttgaggagtgtcatggcatgtgaactatctttcttt

SEQ ID NO: 39706 - protein, 338 aa, Arabidopsis thaliana
  peptide (1)..(338): Ceres Seq. ID no. 12330301
  misc_feature (105)..(255): Homolog of NCBI NO: 21617999 NR Description: unknown [Arabidopsis thaliana]
  misc_feature (36)..(255): Homolog of NCBI NO: 11291712 NR Description: hypothetical protein [imported] - Arabidopsis
  misc_feature (36)..(255): Homolog of NCBI NO: 18409442 NR Description: putative protein
  misc_feature (66)..(256): Homolog of NCBI NO: 21593842 NR Description: unknown [Arabidopsis thaliana]
  misc_feature (66)..(256): Homolog of NCBI NO: 18405251 NR Description: expressed protein
  misc_feature (44)..(314): Homolog of NCBI NO: 34394059 NR Description: hypothetical protein [Oryza sativa (japonica
  misc_feature (1)..(338): Homolog of NCBI NO: 21536711 NR Description: unknown [Arabidopsis thaliana]
  misc_feature (1)..(338): Homolog of NCBI NO: 18399468 NR Description: expressed protein
MATFDDGDFPAQTHSPSEHEDFGGYDNFSEAQQPPTQHQSGGFSSFNGDPASPNGYGFGASSPNHDFSSPFESSVNDANGNGGGSGGDAIFASDGPILPDPNEMREEGFQRREWRRLNTIHLEEKEKKEKEMRNQIITEAEDFKKAFYEKRDKTIETNKTDNREKEKLYWANQEKFHKEVDKHYWKAIAELIPREVPNIEKKRGKKDPDKKPSVNVIQGPKPGKPTDLGRMRQIFLKLKTNPPPHMMPPPPPAKDAKDGKDAKDGKDAKTGKDGKDAKGGKDAKDLKDGKPADPKVTEEKRPSPAKDASVETAKPDAAASGEGEKPVAVTEAEGTKAE

SEQ ID NO: 39707 - protein, 235 aa, Arabidopsis thaliana
  peptide (1)..(235): Ceres Seq. ID no. 12330302
  misc_feature (2)..(152): Homolog of NCBI NO: 21617999 NR Description: unknown [Arabidopsis thaliana]
  misc_feature (1)..(152): Homolog of NCBI NO: 11291712 NR Description: hypothetical protein [imported] - Arabidopsis
  misc_feature (1)..(152): Homolog of NCBI NO: 18409442 NR Description: putative protein
  misc_feature (1)..(153): Homolog of NCBI NO: 21593842 NR Description: unknown [Arabidopsis thaliana]
  misc_feature (1)..(153): Homolog of NCBI NO: 18405251 NR Description: expressed protein
  misc_feature (1)..(211): Homolog of NCBI NO: 34394059 NR Description: hypothetical protein [Oryza sativa (japonica
  misc_feature (1)..(235): Homolog of NCBI NO: 21536711 NR Description: unknown [Arabidopsis thaliana]
  misc_feature (1)..(235): Homolog of NCBI NO: 18399468 NR Description: expressed protein
MREEGFQRREWRRLNTIHLEEKEKKEKEMRNQIITEAEDFKKAFYEKRDKTIETNKTDNREKEKLYWANQEKFHKEVDKHYWKAIAELIPREVPNIEKKRGKKDPDKKPSVNVIQGPKPGKPTDLGRMRQIFLKLKTNPPPHMMPPPPPAKDAKDGKDAKDGKDAKTGKDGKDAKGGKDAKDLKDGKPADPKVTEEKRPSPAKDASVETAKPDAAASGEGEKPVAVTEAEGTKAE

SEQ ID NO: 39708 - protein, 207 aa, Arabidopsis thaliana
  peptide (1)..(207): Ceres Seq. ID no. 12330303
  misc_feature (1)..(124): Homolog of NCBI NO: 21617999 NR Description: unknown [Arabidopsis thaliana]
  misc_feature (1)..(124): Homolog of NCBI NO: 11291712 NR Description: hypothetical protein [imported] - Arabidopsis
  misc_feature (1)..(124): Homolog of NCBI NO: 18409442 NR Description: putative protein
  misc_feature (1)..(125): Homolog of NCBI NO: 21593842 NR Description: unknown [Arabidopsis thaliana]
  misc_feature (1)..(125): Homolog of NCBI NO: 18405251 NR Description: expressed protein
  misc_feature (1)..(183): Homolog of NCBI NO: 34394059 NR Description: hypothetical protein [Oryza sativa (japonica
  misc_feature (1)..(207): Homolog of NCBI NO: 21536711 NR Description: unknown [Arabidopsis thaliana]
  misc_feature (1)..(207): Homolog of NCBI NO: 18399468 NR Description: expressed protein
MRNQIITEAEDFKKAFYEKRDKTIETNKTDNREKEKLYWANQEKFHKEVDKHYWKAIAELIPREVPNIEKKRGKKDPDKKPSVNVIQGPKPGKPTDLGRMRQIFLKLKTNPPPHMMPPPPPAKDAKDGKDAKDGKDAKTGKDGKDAKGGKDAKDLKDGKPADPKVTEEKRPSPAKDASVETAKPDAAASGEGEKPVAVTEAEGTKAE

SEQ ID NO: 39709 - DNA, 815 bp, Arabidopsis thaliana
  misc_feature (1)..(815): Ceres Seq. ID no. 12325720
  misc_feature: MA Experiment ID: 108434 Result: Up-regulated in Transcription
  misc_feature: MA Experiment 108434 PARAMETER Experiment Name: At_Root_Tips_cDNA_P Parameter: Tissue Value: Root Tips
  misc_feature: MA Experiment ID: 108461 Result: Up-regulated in Transcription
  misc_feature: MA Experiment 108461 PARAMETER Experiment Name: At_Germinating_Seeds_cDNA_P Parameter: Age (day) Value: 1 vs. 0
  misc_feature: MA Experiment 108461 PARAMETER Experiment Name: At_Germinating_Seeds_cDNA_P Parameter: Tissue Value: Germinating Seeds
  misc_feature: MA Experiment ID: 108462 Result: Up-regulated in Transcription
  misc_feature: MA Experiment 108462 PARAMETER Experiment Name: At_Germinating_Seeds_cDNA_P Parameter: Age (day) Value: 2 vs. 0
  misc_feature: MA Experiment 108462 PARAMETER Experiment Name: At_Germinating_Seeds_cDNA_P Parameter: Tissue Value: Germinating Seeds
  misc_feature: MA Experiment ID: 108463 Result: Up-regulated in Transcription
  misc_feature: MA Experiment 108463 PARAMETER Experiment Name: At_Germinating_Seeds_cDNA_P Parameter: Age (day) Value: 3 vs. 0
  misc_feature: MA Experiment 108463 PARAMETER Experiment Name: At_Germinating_Seeds_cDNA_P Parameter: Tissue Value: Germinating Seeds
  misc_feature: MA Experiment ID: 108464 Result: Up-regulated in Transcription
  misc_feature: MA Experiment 108464 PARAMETER Experiment Name: At_Germinating_Seeds_cDNA_P Parameter: Age (day) Value: 4 vs. 0
  misc_feature: MA Experiment 108464 PARAMETER Experiment Name: At_Germinating_Seeds_cDNA_P Parameter: Tissue Value: Germinating Seeds
  misc_feature: MA Experiment ID: 108668 Result: Down-regulated in Transcription
  misc_feature: MA Experiment 108668 PARAMETER Experiment Name: At_2mM_SA_cDNA_P Parameter: Plant Line Value: WS
  misc_feature: MA Experiment 108668 PARAMETER Experiment Name: At_2mM_SA_cDNA_P Parameter: Timepoint (hr) Value: 6
  misc_feature: MA Experiment 108668 PARAMETER Experiment Name: At_2mM_SA_cDNA_P Parameter: Treatment Value: 2mM SA vs. No Treatment
  misc_feature: MA Experiment ID: 20000071 Result: Down-regulated in Transcription
  misc_feature: MA Experiment 20000071 PARAMETER Experiment Name: At_100uM_ABA_Mutants_cDNA_P Parameter: Plant Line Value: CS8104
  misc_feature: MA Experiment 20000071 PARAMETER Experiment Name: At_100uM_ABA_Mutants_cDNA_P Parameter: Timepoint (hr) Value: 6
  misc_feature: MA Experiment 20000071 PARAMETER Experiment Name: At_100uM_ABA_Mutants_cDNA_P Parameter: Tissue Value: Aerial
  misc_feature: MA Experiment 20000071 PARAMETER Experiment Name: At_100uM_ABA_Mutants_cDNA_P Parameter: Treatment Value: 100uM ABA vs. No Treatment
  misc_feature: MA Experiment ID: 20000088 Result: Down-regulated in Transcription
  misc_feature: MA Experiment 20000088 PARAMETER Experiment Name: At_100uM_ABA_Mutants_cDNA_P Parameter: Plant Line Value: Landsberg
  misc_feature: MA Experiment 20000088 PARAMETER Experiment Name: At_100uM_ABA_Mutants_cDNA_P Parameter: Timepoint (hr) Value: 6
  misc_feature: MA Experiment 20000088 PARAMETER Experiment Name: At_100uM_ABA_Mutants_cDNA_P Parameter: Tissue Value: Aerial
  misc_feature: MA Experiment 20000088 PARAMETER Experiment Name: At_100uM_ABA_Mutants_cDNA_P Parameter: Treatment Value: 100uM ABA vs. No Treatment
  misc_feature: MA Experiment ID: 20000117 Result: Down-regulated in Transcription
  misc_feature: MA Experiment 20000117 PARAMETER Experiment Name: At_100uM_ABA_Mutants_cDNA_P Parameter: Plant Line Value: Columbia
  misc_feature: MA Experiment 20000117 PARAMETER Experiment Name: At_100uM_ABA_Mutants_cDNA_P Parameter: Timepoint (hr) Value: 6
  misc_feature: MA Experiment 20000117 PARAMETER Experiment Name: At_100uM_ABA_Mutants_cDNA_P Parameter: Tissue Value: Aerial
  misc_feature: MA Experiment 20000117 PARAMETER Experiment Name: At_100uM_ABA_Mutants_cDNA_P Parameter: Treatment Value: 100uM ABA vs. No Treatment
  misc_feature: MA Experiment ID: 20000180 Result: Up-regulated in Transcription
  misc_feature: MA Experiment 20000180 PARAMETER Experiment Name: At_Germinating_Seeds_P Parameter: Age (hr) Value: 24 vs. 0
  misc_feature: MA Experiment 20000180 PARAMETER Experiment Name: At_Germinating_Seeds_P Parameter: Tissue Value: Germinating Seeds
  misc_feature: MA Experiment ID: 20000227 Result: Up-regulated in Transcription
  misc_feature: MA Experiment 20000227 PARAMETER Experiment Name: At_Root-Tips-vs-Tops_P Parameter: Tissue Value: Root Tips vs. Root Tops
  misc_feature: MA Experiment ID: 20000235 Result: Up-regulated in Transcription
  misc_feature: MA Experiment 20000235 PARAMETER Experiment Name: At_Siliques_P Parameter: Age (day) Value: 21
  misc_feature: MA Experiment 20000235 PARAMETER Experiment Name: At_Siliques_P Parameter: Organism Value: A. thaliana
  misc_feature: MA Experiment 20000235 PARAMETER Experiment Name: At_Siliques_P Parameter: Plant Line Value: WS
  misc_feature: MA Experiment 20000235 PARAMETER Experiment Name: At_Siliques_P Parameter: Tissue Value: 5-10mm Siliques vs. Whole Plant
  misc_feature: MA Experiment ID: 20000794 Result: Down-regulated in Transcription
  misc_feature: MA Experiment 20000794 PARAMETER Experiment Name: At_Petals_P Parameter: Age (day) Value: 23-25 days
  misc_feature: MA Experiment 20000794 PARAMETER Experiment Name: At_Petals_P Parameter: Plant Line Value: WS
  misc_feature: MA Experiment 20000794 PARAMETER Experiment Name: At_Petals_P Parameter: Tissue Value: Petals vs. Whole plant
  misc_feature: MA Experiment ID: 20001558 Result: Up-regulated in Transcription
  misc_feature: MA Experiment 20001558 PARAMETER Experiment Name: At_Drought_Soil_Dry_P Parameter: Age (day) Value: 27
  misc_feature: MA Experiment 20001558 PARAMETER Experiment Name: At_Drought_Soil_Dry_P Parameter: Organism Value: A. thaliana
  misc_feature: MA Experiment 20001558 PARAMETER Experiment Name: At_Drought_Soil_Dry_P Parameter: Plant Line Value: WS
  misc_feature: MA Experiment 20001558 PARAMETER Experiment Name: At_Drought_Soil_Dry_P Parameter: Post Timepoint (hr) Value: 6
  misc_feature: MA Experiment 20001558 PARAMETER Experiment Name: At_Drought_Soil_Dry_P Parameter: Post-Treatment Value: Re-Water vs. No Drought
  misc_feature: MA Experiment 20001558 PARAMETER Experiment Name: At_Drought_Soil_Dry_P Parameter: Timepoint (day) Value: 13
  misc_feature: MA Experiment 20001558 PARAMETER Experiment Name: At_Drought_Soil_Dry_P Parameter: Treatment Value: Drought vs. No Drought
  misc_feature: MA Experiment ID: 20001560 Result: Up-regulated in Transcription
  misc_feature: MA Experiment 20001560 PARAMETER Experiment Name: At_Drought_Soil_Dry_P Parameter: Age (day) Value: 28
  misc_feature: MA Experiment 20001560 PARAMETER Experiment Name: At_Drought_Soil_Dry_P Parameter: Organism Value: A. thaliana
  misc_feature: MA Experiment 20001560 PARAMETER Experiment Name: At_Drought_Soil_Dry_P Parameter: Plant Line Value: WS
  misc_feature: MA Experiment 20001560 PARAMETER Experiment Name: At_Drought_Soil_Dry_P Parameter: Post Timepoint (hr) Value: None
  misc_feature: MA Experiment 20001560 PARAMETER Experiment Name: At_Drought_Soil_Dry_P Parameter: Post-Treatment Value: None
  misc_feature: MA Experiment 20001560 PARAMETER Experiment Name: At_Drought_Soil_Dry_P Parameter: Timepoint (day) Value: 14
  misc_feature: MA Experiment 20001560 PARAMETER Experiment Name: At_Drought_Soil_Dry_P Parameter: Treatment Value: Drought vs. No Drought
  misc_feature: MA Experiment ID: 20001905 Result: Down-regulated in Transcription
  misc_feature: MA Experiment 20001905 PARAMETER Experiment Name: At_Drought_Reproduction_P Parameter: Age (day) Value: 40
  misc_feature: MA Experiment 20001905 PARAMETER Experiment Name: At_Drought_Reproduction_P Parameter: Organism Value: A. thaliana
  misc_feature: MA Experiment 20001905 PARAMETER Experiment Name: At_Drought_Reproduction_P Parameter: Plant Line Value: WS
  misc_feature: MA Experiment 20001905 PARAMETER Experiment Name: At_Drought_Reproduction_P Parameter: Timepoint (day) Value: 10
  misc_feature: MA Experiment 20001905 PARAMETER Experiment Name: At_Drought_Reproduction_P Parameter: Tissue Value: Rosettes
  misc_feature: MA Experiment 20001905 PARAMETER Experiment Name: At_Drought_Reproduction_P Parameter: Treatment Value: Drought vs. No Drought
  misc_feature: MA Experiment ID: 20001906 Result: Down-regulated in Transcription
  misc_feature: MA Experiment 20001906 PARAMETER Experiment Name: At_Drought_Reproduction_P Parameter: Age (day) Value: 35
  misc_feature: MA Experiment 20001906 PARAMETER Experiment Name: At_Drought_Reproduction_P Parameter: Organism Value: A. thaliana
  misc_feature: MA Experiment 20001906 PARAMETER Experiment Name: At_Drought_Reproduction_P Parameter: Plant Line Value: WS
  misc_feature: MA Experiment 20001906 PARAMETER Experiment Name: At_Drought_Reproduction_P Parameter: Timepoint (day) Value: 5
  misc_feature: MA Experiment 20001906 PARAMETER Experiment Name: At_Drought_Reproduction_P Parameter: Tissue Value: Siliques
  misc_feature: MA Experiment 20001906 PARAMETER Experiment Name: At_Drought_Reproduction_P Parameter: Treatment Value: Drought vs. No Drought
  misc_feature: MA Experiment ID: 20001911 Result: Down-regulated in Transcription
  misc_feature: MA Experiment 20001911 PARAMETER Experiment Name: At_Drought_Reproduction_P Parameter: Age (day) Value: 40
  misc_feature: MA Experiment 20001911 PARAMETER Experiment Name: At_Drought_Reproduction_P Parameter: Organism Value: A. thaliana
  misc_feature: MA Experiment 20001911 PARAMETER Experiment Name: At_Drought_Reproduction_P Parameter: Plant Line Value: WS
  misc_feature: MA Experiment 20001911 PARAMETER Experiment Name: At_Drought_Reproduction_P Parameter: Timepoint (day) Value: 10
  misc_feature: MA Experiment 20001911 PARAMETER Experiment Name: At_Drought_Reproduction_P Parameter: Tissue Value: Flowers
  misc_feature: MA Experiment 20001911 PARAMETER Experiment Name: At_Drought_Reproduction_P Parameter: Treatment Value: Drought vs. No Drought
aacctggcctccacttttgtttttccacttctacggtaagtgaaagagagagagagagaggaaaaaaaaggggaaagcttaagatattggagagtaacaatgccttcaaattcaggagatgataatgttcttcaagttctcataaagaactttgatgtccttgctctcccattggttacactcgtctatcctctatatgcatcagtgaaagcaatagagacaagatcattaccagaagatgaacaatggcttacttactgggttctttacgcacttatctctctctttgaactcactttctccaaacctctcgagtggtttcctatatggccatacatgaagttgtttgggatctgttggttagtgttaccacaattcaatggagcagaacatatctacaaacatttcattagaccattctacagagatcctcaaagagctaccaccaaaatttggtatgttcctcacaagaaattcaatttcttccctaaacgcgacgacgacgacattctcactgctgctgaaaaatacatggaacaacacggtaccgaagcgtttgagcgaatgatcgttaagaaggatagttatgaaagaggtaggagtagtagaggaatcaataatcacatgatctttgatgatgactataggtactaataagttcttaaaccggtttaattagctactttcagtttataagtttgctatgtgacaatatattgtctgtttctatggttgttataatttgcgtggattatgtataagcccttatttaggactgcttatttttgtgaaaaatcaaataaacattttctctc

SEQ ID NO: 39710 - protein, 184 aa, Arabidopsis thaliana
  peptide (1)..(184): Ceres Seq. ID no. 12325721
  misc_feature (11)..(108): Pfam Name: TB2/DP1, HVA22 family Pfam Description: TB2/DP1, HVA22 family
  misc_feature (28)..(109): Homolog of NCBI NO: 8777395 NR Description: gene_id:MFB16.12~pir||T05517~similar to unknown
  misc_feature (14)..(105): Homolog of NCBI NO: 33342176 NR Description: hypothetical protein [Triticum aestivum]
  misc_feature (14)..(105): Homolog of NCBI NO: 1076715 NR Description: abscisic acid-induced protein HVA22 - barley
  misc_feature (24)..(133): Homolog of NCBI NO: 18416458 NR Description: abscisic acid-induced - like protein
  misc_feature (21)..(109): Homolog of NCBI NO: 18423191 NR Description: putative protein
  misc_feature (36)..(157): Homolog of NCBI NO: 34910810 NR Description: P0042A10.34 [Oryza sativa (japonica
  misc_feature (4)..(184): Homolog of NCBI NO: 15241840 NR Description: AtHVA22b-like protein
  misc_feature (4)..(184): Homolog of NCBI NO: 4884934 NR Description: AtHVA22b [Arabidopsis thaliana]
  misc_feature (5)..(184): Homolog of NCBI NO: 15221266 NR Description: AtHVA22a; protein id: At1g74520.1, supported by
  misc_feature (1)..(184): Homolog of NCBI NO: 15222421 NR Description: AtHVA22c
MPSNSGDDNVLQVLIKNFDVLALPLVTLVYPLYASVKAIETRSLPEDEQWLTYWVLYALISLFELTFSKPLEWFPIWPYMKLFGICWLVLPQFNGAEHIYKHFIRPFYRDPQRATTKIWYVPHKKFNFFPKRDDDDILTAAEKYMEQHGTEAFERMIVKKDSYERGRSSRGINNHMIFDDDYRY

SEQ ID NO: 39711 - protein, 105 aa, Arabidopsis thaliana
  peptide (1)..(105): Ceres Seq. ID no. 12325722
  misc_feature (1)..(30): Homolog of NCBI NO: 8777395 NR Description: gene_id:MFB16.12~pir||T05517~similar to unknown
  misc_feature (1)..(26): Homolog of NCBI NO: 33342176 NR Description: hypothetical protein [Triticum aestivum]
  misc_feature (1)..(26): Homolog of NCBI NO: 1076715 NR Description: abscisic acid-induced protein HVA22 - barley
  misc_feature (1)..(54): Homolog of NCBI NO: 18416458 NR Description: abscisic acid-induced - like protein
  misc_feature (1)..(30): Homolog of NCBI NO: 18423191 NR Description: putative protein
  misc_feature (1)..(78): Homolog of NCBI NO: 34910810 NR Description: P0042A10.34 [Oryza sativa (japonica
  misc_feature (1)..(105): Homolog of NCBI NO: 15241840 NR Description: AtHVA22b-like protein
  misc_feature (1)..(105): Homolog of NCBI NO: 4884934 NR Description: AtHVA22b [Arabidopsis thaliana]
  misc_feature (1)..(105): Homolog of NCBI NO: 15221266 NR Description: AtHVA22a; protein id: At1g74520.1, supported by
  misc_feature (1)..(105): Homolog of NCBI NO: 15222421 NR Description: AtHVA22c
MKLFGICWLVLPQFNGAEHIYKHFIRPFYRDPQRATTKIWYVPHKKFNFFPKRDDDDILTAAEKYMEQHGTEAFERMIVKKDSYERGRSSRGINNHMIFDDDYRY

SEQ ID NO: 39712 - DNA, 1133 bp, Arabidopsis thaliana
  misc_feature (1)..(1133): Ceres Seq. ID no. 13497295
  misc_feature: MA Experiment ID: 20000179 Result: Up-regulated in Transcription
  misc_feature: MA Experiment 20000179 PARAMETER Experiment Name: At_Germinating_Seeds_P Parameter: Age (hr) Value: 6 vs. 0
  misc_feature: MA Experiment 20000179 PARAMETER Experiment Name: At_Germinating_Seeds_P Parameter: Tissue Value: Germinating Seeds
  misc_feature: MA Experiment ID: 20000227 Result: Up-regulated in Transcription
  misc_feature: MA Experiment 20000227 PARAMETER Experiment Name: At_Root-Tips-vs-Tops_P Parameter: Tissue Value: Root Tips vs. Root Tops
  misc_feature: MA Experiment ID: 20000235 Result: Down-regulated in Transcription
  misc_feature: MA Experiment 20000235 PARAMETER Experiment Name: At_Siliques_P Parameter: Age (day) Value: 21
  misc_feature: MA Experiment 20000235 PARAMETER Experiment Name: At_Siliques_P Parameter: Organism Value: A. thaliana
  misc_feature: MA Experiment 20000235 PARAMETER Experiment Name: At_Siliques_P Parameter: Plant Line Value: WS
  misc_feature: MA Experiment 20000235 PARAMETER Experiment Name: At_Siliques_P Parameter: Tissue Value: 5-10mm Siliques vs. Whole Plant
  misc_feature: MA Experiment ID: 20000268 Result: Down-regulated in Transcription
  misc_feature: MA Experiment 20000268 PARAMETER Experiment Name: At_100mM_NaCl__P Parameter: Age (day) Value: 14
  misc_feature: MA Experiment 20000268 PARAMETER Experiment Name: At_100mM_NaCl__P Parameter: Organism Value: A. thaliana
  misc_feature: MA Experiment 20000268 PARAMETER Experiment Name: At_100mM_NaCl__P Parameter: Plant Line Value: WS
  misc_feature: MA Experiment 20000268 PARAMETER Experiment Name: At_100mM_NaCl__P Parameter: Timepoint (hr) Value: 6
  misc_feature: MA Experiment 20000268 PARAMETER Experiment Name: At_100mM_NaCl__P Parameter: Tissue Value: Whole Plant
  misc_feature: MA Experiment 20000268 PARAMETER Experiment Name: At_100mM_NaCl__P Parameter: Treatment Value: 100mM NaCl vs. No Treatment
  misc_feature: MA Experiment ID: 20000574 Result: Down-regulated in Transcription
  misc_feature: MA Experiment 20000574 PARAMETER Experiment Name: At_100uM_ABA_Mutants__P Parameter: Organism Value: A. thaliana
  misc_feature: MA Experiment 20000574 PARAMETER Experiment Name: At_100uM_ABA_Mutants__P Parameter: Plant Line Value: CS23 vs. Ler wt
  misc_feature: MA Experiment 20000574 PARAMETER Experiment Name: At_100uM_ABA_Mutants__P Parameter: Timepoint (hr) Value: N/A
  misc_feature: MA Experiment 20000574 PARAMETER Experiment Name: At_100uM_ABA_Mutants__P Parameter: Tissue Value: Whole Plant
  misc_feature: MA Experiment 20000574 PARAMETER Experiment Name: At_100uM_ABA_Mutants__P Parameter: Treatment Value: None
  misc_feature: MA Experiment ID: 20001247 Result: Up-regulated in Transcription
  misc_feature: MA Experiment 20001247 PARAMETER Experiment Name: At_Far-red-induction_P Parameter: Age (day) Value: 7
  misc_feature: MA Experiment 20001247 PARAMETER Experiment Name: At_Far-red-induction_P Parameter: Light Value: Far-red vs. White
  misc_feature: MA Experiment 20001247 PARAMETER Experiment Name: At_Far-red-induction_P Parameter: Organism Value: A. thaliana
  misc_feature: MA Experiment 20001247 PARAMETER Experiment Name: At_Far-red-induction_P Parameter: Plant Line Value: Columbia
  misc_feature: MA Experiment 20001247 PARAMETER Experiment Name: At_Far-red-induction_P Parameter: Timepoint (hr) Value: 1
  misc_feature: MA Experiment 20001247 PARAMETER Experiment Name: At_Far-red-induction_P Parameter: Tissue Value: Whole Plant
  misc_feature: MA Experiment ID: 20001451 Result: Up-regulated in Transcription
  misc_feature: MA Experiment 20001451 PARAMETER Experiment Name: At_Far-red-induction_P Parameter: Age (day) Value: 7
  misc_feature: MA Experiment 20001451 PARAMETER Experiment Name: At_Far-red-induction_P Parameter: Light Value: Far-red vs. White
  misc_feature: MA Experiment 20001451 PARAMETER Experiment Name: At_Far-red-induction_P Parameter: Organism Value: A. thaliana
  misc_feature: MA Experiment 20001451 PARAMETER Experiment Name: At_Far-red-induction_P Parameter: Plant Line Value: Columbia
  misc_feature: MA Experiment 20001451 PARAMETER Experiment Name: At_Far-red-induction_P Parameter: Timepoint (hr) Value: 24
  misc_feature: MA Experiment 20001451 PARAMETER Experiment Name: At_Far-red-induction_P Parameter: Tissue Value: Whole Plant
  misc_feature: MA Experiment ID: 20001554 Result: Down-regulated in Transcription
  misc_feature: MA Experiment 20001554 PARAMETER Experiment Name: At_Drought_Soil_Dry_P Parameter: Age (day) Value: 21
  misc_feature: MA Experiment 20001554 PARAMETER Experiment Name: At_Drought_Soil_Dry_P Parameter: Organism Value: A. thaliana
  misc_feature: MA Experiment 20001554 PARAMETER Experiment Name: At_Drought_Soil_Dry_P Parameter: Plant Line Value: WS
  misc_feature: MA Experiment 20001554 PARAMETER Experiment Name: At_Drought_Soil_Dry_P Parameter: Post Timepoint (hr) Value: None
  misc_feature: MA Experiment 20001554 PARAMETER Experiment Name: At_Drought_Soil_Dry_P Parameter: Post-Treatment Value: None
  misc_feature: MA Experiment 20001554 PARAMETER Experiment Name: At_Drought_Soil_Dry_P Parameter: Timepoint (day) Value: 7
  misc_feature: MA Experiment 20001554 PARAMETER Experiment Name: At_Drought_Soil_Dry_P Parameter: Treatment Value: Drought vs. No Drought
  misc_feature: MA Experiment ID: 20001555 Result: Down-regulated in Transcription
  misc_feature: MA Experiment 20001555 PARAMETER Experiment Name: At_Drought_Soil_Dry_P Parameter: Age (day) Value: 24
  misc_feature: MA Experiment 20001555 PARAMETER Experiment Name: At_Drought_Soil_Dry_P Parameter: Organism Value: A. thaliana
  misc_feature: MA Experiment 20001555 PARAMETER Experiment Name: At_Drought_Soil_Dry_P Parameter: Plant Line Value: WS
  misc_feature: MA Experiment 20001555 PARAMETER Experiment Name: At_Drought_Soil_Dry_P Parameter: Post Timepoint (hr) Value: None
  misc_feature: MA Experiment 20001555 PARAMETER Experiment Name: At_Drought_Soil_Dry_P Parameter: Post-Treatment Value: None
  misc_feature: MA Experiment 20001555 PARAMETER Experiment Name: At_Drought_Soil_Dry_P Parameter: Timepoint (day) Value: 10
  misc_feature: MA Experiment 20001555 PARAMETER Experiment Name: At_Drought_Soil_Dry_P Parameter: Treatment Value: Drought vs. No Drought
  misc_feature: MA Experiment ID: 20001556 Result: Down-regulated in Transcription
  misc_feature: MA Experiment 20001556 PARAMETER Experiment Name: At_Drought_Soil_Dry_P Parameter: Age (day) Value: 26
  misc_feature: MA Experiment 20001556 PARAMETER Experiment Name: At_Drought_Soil_Dry_P Parameter: Organism Value: A. thaliana
  misc_feature: MA Experiment 20001556 PARAMETER Experiment Name: At_Drought_Soil_Dry_P Parameter: Plant Line Value: WS
  misc_feature: MA Experiment 20001556 PARAMETER Experiment Name: At_Drought_Soil_Dry_P Parameter: Post Timepoint (hr) Value: None
  misc_feature: MA Experiment 20001556 PARAMETER Experiment Name: At_Drought_Soil_Dry_P Parameter: Post-Treatment Value: None
  misc_feature: MA Experiment 20001556 PARAMETER Experiment Name: At_Drought_Soil_Dry_P Parameter: Timepoint (day) Value: 12
  misc_feature: MA Experiment 20001556 PARAMETER Experiment Name: At_Drought_Soil_Dry_P Parameter: Treatment Value: Drought vs. No Drought
  misc_feature: MA Experiment ID: 20001558 Result: Up-regulated in Transcription
  misc_feature: MA Experiment 20001558 PARAMETER Experiment Name: At_Drought_Soil_Dry_P Parameter: Age (day) Value: 27
  misc_feature: MA Experiment 20001558 PARAMETER Experiment Name: At_Drought_Soil_Dry_P Parameter: Organism Value: A. thaliana
  misc_feature: MA Experiment 20001558 PARAMETER Experiment Name: At_Drought_Soil_Dry_P Parameter: Plant Line Value: WS
  misc_feature: MA Experiment 20001558 PARAMETER Experiment Name: At_Drought_Soil_Dry_P Parameter: Post Timepoint (hr) Value: 6
  misc_feature: MA Experiment 20001558 PARAMETER Experiment Name: At_Drought_Soil_Dry_P Parameter: Post-Treatment Value: Re-Water vs. No Drought
  misc_feature: MA Experiment 20001558 PARAMETER Experiment Name: At_Drought_Soil_Dry_P Parameter: Timepoint (day) Value: 13
  misc_feature: MA Experiment 20001558 PARAMETER Experiment Name: At_Drought_Soil_Dry_P Parameter: Treatment Value: Drought vs. No Drought
  misc_feature: MA Experiment ID: 20001560 Result: Up-regulated in Transcription
  misc_feature: MA Experiment 20001560 PARAMETER Experiment Name: At_Drought_Soil_Dry_P Parameter: Age (day) Value: 28
  misc_feature: MA Experiment 20001560 PARAMETER Experiment Name: At_Drought_Soil_Dry_P Parameter: Organism Value: A. thaliana
  misc_feature: MA Experiment 20001560 PARAMETER Experiment Name: At_Drought_Soil_Dry_P Parameter: Plant Line Value: WS
  misc_feature: MA Experiment 20001560 PARAMETER Experiment Name: At_Drought_Soil_Dry_P Parameter: Post Timepoint (hr) Value: None
  misc_feature: MA Experiment 20001560 PARAMETER Experiment Name: At_Drought_Soil_Dry_P Parameter: Post-Treatment Value: None
  misc_feature: MA Experiment 20001560 PARAMETER Experiment Name: At_Drought_Soil_Dry_P Parameter: Timepoint (day) Value: 14
  misc_feature: MA Experiment 20001560 PARAMETER Experiment Name: At_Drought_Soil_Dry_P Parameter: Treatment Value: Drought vs. No Drought
  misc_feature: MA Experiment ID: 20001757 Result: Down-regulated in Transcription
  misc_feature: MA Experiment 20001757 PARAMETER Experiment Name: At_50mM_NH4NO3_L-to-H_P Parameter: Timepoint (hr) Value: 6
  misc_feature: MA Experiment 20001757 PARAMETER Experiment Name: At_50mM_NH4NO3_L-to-H_P Parameter: Tissue Value: Leaf
  misc_feature: MA Experiment 20001757 PARAMETER Experiment Name: At_50mM_NH4NO3_L-to-H_P Parameter: Treatment Value: 50mM NH4NO3 vs 100mM Mannitol
  misc_feature: MA Experiment ID: 20001772 Result: Up-regulated in Transcription
  misc_feature: MA Experiment 20001772 PARAMETER Experiment Name: At_Far-red-enriched-adult_P Parameter: Age (day) Value: 29
  misc_feature: MA Experiment 20001772 PARAMETER Experiment Name: At_Far-red-enriched-adult_P Parameter: Light Value: Far-red enriched vs. White
  misc_feature: MA Experiment 20001772 PARAMETER Experiment Name: At_Far-red-enriched-adult_P Parameter: Organism Value: A. thaliana
  misc_feature: MA Experiment 20001772 PARAMETER Experiment Name: At_Far-red-enriched-adult_P Parameter: Plant Line Value: Columbia
  misc_feature: MA Experiment 20001772 PARAMETER Experiment Name: At_Far-red-enriched-adult_P Parameter: Timepoint (hr) Value: 24
  misc_feature: MA Experiment 20001772 PARAMETER Experiment Name: At_Far-red-enriched-adult_P Parameter: Tissue Value: Aerial
  misc_feature: MA Experiment ID: 20001904 Result: Down-regulated in Transcription
  misc_feature: MA Experiment 20001904 PARAMETER Experiment Name: At_Drought_Reproduction_P Parameter: Age (day) Value: 37
  misc_feature: MA Experiment 20001904 PARAMETER Experiment Name: At_Drought_Reproduction_P Parameter: Organism Value: A. thaliana
  misc_feature: MA Experiment 20001904 PARAMETER Experiment Name: At_Drought_Reproduction_P Parameter: Plant Line Value: WS
  misc_feature: MA Experiment 20001904 PARAMETER Experiment Name: At_Drought_Reproduction_P Parameter: Timepoint (day) Value: 7
  misc_feature: MA Experiment 20001904 PARAMETER Experiment Name: At_Drought_Reproduction_P Parameter: Tissue Value: Rosettes
  misc_feature: MA Experiment 20001904 PARAMETER Experiment Name: At_Drought_Reproduction_P Parameter: Treatment Value: Drought vs. No Drought
  misc_feature: MA Experiment ID: 20001905 Result: Down-regulated in Transcription
  misc_feature: MA Experiment 20001905 PARAMETER Experiment Name: At_Drought_Reproduction_P Parameter: Age (day) Value: 40
  misc_feature: MA Experiment 20001905 PARAMETER Experiment Name: At_Drought_Reproduction_P Parameter: Organism Value: A. thaliana
  misc_feature: MA Experiment 20001905 PARAMETER Experiment Name: At_Drought_Reproduction_P Parameter: Plant Line Value: WS
  misc_feature: MA Experiment 20001905 PARAMETER Experiment Name: At_Drought_Reproduction_P Parameter: Timepoint (day) Value: 10
  misc_feature: MA Experiment 20001905 PARAMETER Experiment Name: At_Drought_Reproduction_P Parameter: Tissue Value: Rosettes
  misc_feature: MA Experiment 20001905 PARAMETER Experiment Name: At_Drought_Reproduction_P Parameter: Treatment Value: Drought vs. No Drought
aacaaaaatcatttcgttcttttccaaaatccccaaacaatagaaacgcgttttaaacgatttgattagttttaaattaaaaagaagatccgagcgatgtctggttcgacccggaaagaaatggatcggatcaaaggaccatggagtcctgaagaagacgatctgttacaatcgttggttcagaagcacggaccaaggaactggtctctgataagcaaatcaatccctggacgttccggtaaatcttgccgtctccgttggtgtaatcagctttctccggaggtagagcaccgtggattcacggcggaggaagatgatacgattatactagcgcacgctcggtttggtaacaagtgggcgacgattgcacggcttctcaatggtcgcactgataacgcgattaagaatcactggaactcaacgctgaagcggaaatgtagcggcggaggcggcggaggagaggaagggcagagttgtgatttcggtggtaatggagggtatgatggtaatttaactgatgaaaaaccgttaaaacggagggcgagtggtggaggaggagttgttgtggtgacggcgttaagtccaacgggatctgacgtcagcgagcaatcgcaatctagtggatctgttttaccggtttcttcttcttgtcatgtttttaaaccgacggcgagagctggtggagtggtgattgagtcatcatcgtcggaggaggaggagaaagatccgatgacttgtttgaggttgtctttgccttgggtcaatgagtcaacaactccaccggagttgtttccggtgaagagagaagaagaagaagagaaggaaagagagatttctggacttggtggagattttatgacggtggtgcaggagatgattaagacggaggttaggagttacatggcggatttacagctaggaaacggcggaggagctggaggaggagcaagttcgtgtatggtgcaaggaactaatggtcgtaatgtagggtttagagagtttattggattaggtaggatcgagtagtgagtgagaaaagagaagaattgtgtagcaaatgcagagaaagagccaatttcatgatttgagatttgattcattcgaaaaaaaactgaataaatgtattgattttg

SEQ ID NO: 39713 - protein, 309 aa, Arabidopsis thaliana
  peptide (1)..(309): Ceres Seq. ID no. 13497296
  misc_feature (13)..(59): Pfam Name: Myb-like DNA-binding domain Pfam Description: Myb-like DNA-binding domain
  misc_feature (10)..(301): Homolog of NCBI NO: 2832406 NR Description: R2R3-MYB transcription factor [Arabidopsis
  misc_feature (10)..(301): Homolog of NCBI NO: 15229664 NR Description: myb DNA-binding protein (MYB77) [Arabidopsis
  misc_feature (10)..(309): Homolog of NCBI NO: 21592897 NR Description: myb-related protein, 33.3K [Arabidopsis thaliana]
  misc_feature (10)..(309): Homolog of NCBI NO: 2129648 NR Description: myb-related protein, 33.3K - Arabidopsis thaliana
  misc_feature (10)..(309): Homolog of NCBI NO: 15450393 NR Description: AT5g67300/K8K14_2 [Arabidopsis thaliana]
  misc_feature (10)..(309): Homolog of NCBI NO: 15240708 NR Description: myb family transcription factor [Arabidopsis
  misc_feature (53)..(309): Homolog of NCBI NO: 11358558 NR Description: myb-related transcription factor MYB73
  misc_feature (1)..(309): Homolog of NCBI NO: 15235484 NR Description: myb DNA-binding protein (AtMYB73) [Arabidopsis
  misc_feature (1)..(309): Homolog of NCBI NO: 21593586 NR Description: putative MYB family transcription factor
  misc_feature (1)..(309): Homolog of NCBI NO: 15227806 NR Description: MYB family transcription factor [Arabidopsis
MSGSTRKEMDRIKGPWSPEEDDLLQSLVQKHGPRNWSLISKSIPGRSGKSCRLRWCNQLSPEVEHRGFTAEEDDTIILAHARFGNKWATIARLLNGRTDNAIKNHWNSTLKRKCSGGGGGGEEGQSCDFGGNGGYDGNLTDEKPLKRRASGGGGVVVVTALSPTGSDVSEQSQSSGSVLPVSSSCHVFKPTARAGGVVIESSSSEEEEKDPMTCLRLSLPWVNESTTPPELFPVKREEEEEKEREISGLGGDFMTVVQEMIKTEVRSYMADLQLGNGGGAGGGASSCMVQGTNGRNVGFREFIGLGRIE

SEQ ID NO: 39714 - protein, 301 aa, Arabidopsis thaliana
  peptide (1)..(301): Ceres Seq. ID no. 13497297
  misc_feature (5)..(51): Pfam Name: Myb-like DNA-binding domain Pfam Description: Myb-like DNA-binding domain
  misc_feature (2)..(293): Homolog of NCBI NO: 2832406 NR Description: R2R3-MYB transcription factor [Arabidopsis
  misc_feature (2)..(293): Homolog of NCBI NO: 15229664 NR Description: myb DNA-binding protein (MYB77) [Arabidopsis
  misc_feature (2)..(301): Homolog of NCBI NO: 21592897 NR Description: myb-related protein, 33.3K [Arabidopsis thaliana]
  misc_feature (2)..(301): Homolog of NCBI NO: 2129648 NR Description: myb-related protein, 33.3K - Arabidopsis thaliana
  misc_feature (2)..(301): Homolog of NCBI NO: 15450393 NR Description: AT5g67300/K8K14_2 [Arabidopsis thaliana]
  misc_feature (2)..(301): Homolog of NCBI NO: 15240708 NR Description: myb family transcription factor [Arabidopsis
  misc_feature (45)..(301): Homolog of NCBI NO: 11358558 NR Description: myb-related transcription factor MYB73
  misc_feature (1)..(301): Homolog of NCBI NO: 15235484 NR Description: myb DNA-binding protein (AtMYB73) [Arabidopsis
  misc_feature (1)..(301): Homolog of NCBI NO: 21593586 NR Description: putative MYB family transcription factor
  misc_feature (1)..(301): Homolog of NCBI NO: 15227806 NR Description: MYB family transcription factor [Arabidopsis
MDRIKGPWSPEEDDLLQSLVQKHGPRNWSLISKSIPGRSGKSCRLRWCNQLSPEVEHRGFTAEEDDTIILAHARFGNKWATIARLLNGRTDNAIKNHWNSTLKRKCSGGGGGGEEGQSCDFGGNGGYDGNLTDEKPLKRRASGGGGVVVVTALSPTGSDVSEQSQSSGSVLPVSSSCHVFKPTARAGGVVIESSSSEEEEKDPMTCLRLSLPWVNESTTPPELFPVKREEEEEKEREISGLGGDFMTVVQEMIKTEVRSYMADLQLGNGGGAGGGASSCMVQGTNGRNVGFREFIGLGRIE

SEQ ID NO: 39715 - DNA, 1240 bp, Arabidopsis thaliana
  misc_feature (1)..(1240): Ceres Seq. ID no. 12327606
  misc_feature: MA Experiment ID: 108434 Result: Down-regulated in Transcription
  misc_feature: MA Experiment 108434 PARAMETER Experiment Name: At_Root_Tips_cDNA_P Parameter: Tissue Value: Root Tips
  misc_feature: MA Experiment ID: 108488 Result: Down-regulated in Transcription
  misc_feature: MA Experiment ID: 108573 Result: Up-regulated in Transcription
  misc_feature: MA Experiment 108573 PARAMETER Experiment Name: At_Drought_cDNA_P Parameter: Timepoint (hr) Value: 6
  misc_feature: MA Experiment 108573 PARAMETER Experiment Name: At_Drought_cDNA_P Parameter: Tissue Value: Aerial
  misc_feature: MA Experiment 108573 PARAMETER Experiment Name: At_Drought_cDNA_P Parameter: Treatment Value: Drought vs. No Drought
  misc_feature: MA Experiment ID: 20000069 Result: Up-regulated in Transcription
  misc_feature: MA Experiment 20000069 PARAMETER Experiment Name: At_100uM_ABA_Mutants_cDNA_P Parameter: Plant Line Value: CS23
  misc_feature: MA Experiment 20000069 PARAMETER Experiment Name: At_100uM_ABA_Mutants_cDNA_P Parameter: Timepoint (hr) Value: 6
  misc_feature: MA Experiment 20000069 PARAMETER Experiment Name: At_100uM_ABA_Mutants_cDNA_P Parameter: Tissue Value: Aerial
  misc_feature: MA Experiment 20000069 PARAMETER Experiment Name: At_100uM_ABA_Mutants_cDNA_P Parameter: Treatment Value: 100uM ABA vs. No Treatment
  misc_feature: MA Experiment ID: 20000070 Result: Up-regulated in Transcription
  misc_feature: MA Experiment 20000070 PARAMETER Experiment Name: At_100uM_ABA_Mutants_cDNA_P Parameter: Plant Line Value: CS24
  misc_feature: MA Experiment 20000070 PARAMETER Experiment Name: At_100uM_ABA_Mutants_cDNA_P Parameter: Timepoint (hr) Value: 6
  misc_feature: MA Experiment 20000070 PARAMETER Experiment Name: At_100uM_ABA_Mutants_cDNA_P Parameter: Tissue Value: Aerial
  misc_feature: MA Experiment 20000070 PARAMETER Experiment Name: At_100uM_ABA_Mutants_cDNA_P Parameter: Treatment Value: 100uM ABA vs. No Treatment
  misc_feature: MA Experiment ID: 20000071 Result: Up-regulated in Transcription
  misc_feature: MA Experiment 20000071 PARAMETER Experiment Name: At_100uM_ABA_Mutants_cDNA_P Parameter: Plant Line Value: CS8104
  misc_feature: MA Experiment 20000071 PARAMETER Experiment Name: At_100uM_ABA_Mutants_cDNA_P Parameter: Timepoint (hr) Value: 6
  misc_feature: MA Experiment 20000071 PARAMETER Experiment Name: At_100uM_ABA_Mutants_cDNA_P Parameter: Tissue Value: Aerial
  misc_feature: MA Experiment 20000071 PARAMETER Experiment Name: At_100uM_ABA_Mutants_cDNA_P Parameter: Treatment Value: 100uM ABA vs. No Treatment
  misc_feature: MA Experiment ID: 20000086 Result: Up-regulated in Transcription
  misc_feature: MA Experiment 20000086 PARAMETER Experiment Name: At_100uM_ABA_Mutants_cDNA_P Parameter: Plant Line Value: CS22
  misc_feature: MA Experiment 20000086 PARAMETER Experiment Name: At_100uM_ABA_Mutants_cDNA_P Parameter: Timepoint (hr) Value: 6
  misc_feature: MA Experiment 20000086 PARAMETER Experiment Name: At_100uM_ABA_Mutants_cDNA_P Parameter: Tissue Value: Aerial
  misc_feature: MA Experiment 20000086 PARAMETER Experiment Name: At_100uM_ABA_Mutants_cDNA_P Parameter: Treatment Value: 100uM ABA vs. No Treatment
  misc_feature: MA Experiment ID: 20000088 Result: Up-regulated in Transcription
  misc_feature: MA Experiment 20000088 PARAMETER Experiment Name: At_100uM_ABA_Mutants_cDNA_P Parameter: Plant Line Value: Landsberg
  misc_feature: MA Experiment 20000088 PARAMETER Experiment Name: At_100uM_ABA_Mutants_cDNA_P Parameter: Timepoint (hr) Value: 6
  misc_feature: MA Experiment 20000088 PARAMETER Experiment Name: At_100uM_ABA_Mutants_cDNA_P Parameter: Tissue Value: Aerial
  misc_feature: MA Experiment 20000088 PARAMETER Experiment Name: At_100uM_ABA_Mutants_cDNA_P Parameter: Treatment Value: 100uM ABA vs. No Treatment
  misc_feature: MA Experiment ID: 20000117 Result: Up-regulated in Transcription
  misc_feature: MA Experiment 20000117 PARAMETER Experiment Name: At_100uM_ABA_Mutants_cDNA_P Parameter: Plant Line Value: Columbia
  misc_feature: MA Experiment 20000117 PARAMETER Experiment Name: At_100uM_ABA_Mutants_cDNA_P Parameter: Timepoint (hr) Value: 6
  misc_feature: MA Experiment 20000117 PARAMETER Experiment Name: At_100uM_ABA_Mutants_cDNA_P Parameter: Tissue Value: Aerial
  misc_feature: MA Experiment 20000117 PARAMETER Experiment Name: At_100uM_ABA_Mutants_cDNA_P Parameter: Treatment Value: 100uM ABA vs. No Treatment
  misc_feature: MA Experiment ID: 20000180 Result: Up-regulated in Transcription
  misc_feature: MA Experiment 20000180 PARAMETER Experiment Name: At_Germinating_Seeds_P Parameter: Age (hr) Value: 24 vs. 0
  misc_feature: MA Experiment 20000180 PARAMETER Experiment Name: At_Germinating_Seeds_P Parameter: Tissue Value: Germinating Seeds
  misc_feature: MA Experiment ID: 20000184 Result: Down-regulated in Transcription
  misc_feature: MA Experiment 20000184 PARAMETER Experiment Name: At_Shoots__P Parameter: Age (day) Value: 7
  misc_feature: MA Experiment 20000184 PARAMETER Experiment Name: At_Shoots__P Parameter: Tissue Value: Shoots vs. Whole Plant
  misc_feature: MA Experiment ID: 20000438 Result: Down-regulated in Transcription
  misc_feature: MA Experiment 20000438 PARAMETER Experiment Name: At_Shoots__P Parameter: Age (day) Value: 14
  misc_feature: MA Experiment 20000438 PARAMETER Experiment Name: At_Shoots__P Parameter: Tissue Value: Shoots vs. Whole Plant
  misc_feature: MA Experiment ID: 20000794 Result: Up-regulated in Transcription
  misc_feature: MA Experiment 20000794 PARAMETER Experiment Name: At_Petals_P Parameter: Age (day) Value: 23-25 days
  misc_feature: MA Experiment 20000794 PARAMETER Experiment Name: At_Petals_P Parameter: Plant Line Value: WS
  misc_feature: MA Experiment 20000794 PARAMETER Experiment Name: At_Petals_P Parameter: Tissue Value: Petals vs. Whole plant
  misc_feature: MA Experiment ID: 20001757 Result: Down-regulated in Transcription
  misc_feature: MA Experiment 20001757 PARAMETER Experiment Name: At_50mM_NH4NO3_L-to-H_P Parameter: Timepoint (hr) Value: 6
  misc_feature: MA Experiment 20001757 PARAMETER Experiment Name: At_50mM_NH4NO3_L-to-H_P Parameter: Tissue Value: Leaf
  misc_feature: MA Experiment 20001757 PARAMETER Experiment Name: At_50mM_NH4NO3_L-to-H_P Parameter: Treatment Value: 50mM NH4NO3 vs 100mM Mannitol
  misc_feature: MA Experiment ID: 20001904 Result: Up-regulated in Transcription
  misc_feature: MA Experiment 20001904 PARAMETER Experiment Name: At_Drought_Reproduction_P Parameter: Age (day) Value: 37
  misc_feature: MA Experiment 20001904 PARAMETER Experiment Name: At_Drought_Reproduction_P Parameter: Organism Value: A. thaliana
  misc_feature: MA Experiment 20001904 PARAMETER Experiment Name: At_Drought_Reproduction_P Parameter: Plant Line Value: WS
  misc_feature: MA Experiment 20001904 PARAMETER Experiment Name: At_Drought_Reproduction_P Parameter: Timepoint (day) Value: 7
  misc_feature: MA Experiment 20001904 PARAMETER Experiment Name: At_Drought_Reproduction_P Parameter: Tissue Value: Rosettes
  misc_feature: MA Experiment 20001904 PARAMETER Experiment Name: At_Drought_Reproduction_P Parameter: Treatment Value: Drought vs. No Drought
  misc_feature: MA Experiment ID: 20001905 Result: Up-regulated in Transcription
  misc_feature: MA Experiment 20001905 PARAMETER Experiment Name: At_Drought_Reproduction_P Parameter: Age (day) Value: 40
  misc_feature: MA Experiment 20001905 PARAMETER Experiment Name: At_Drought_Reproduction_P Parameter: Organism Value: A. thaliana
  misc_feature: MA Experiment 20001905 PARAMETER Experiment Name: At_Drought_Reproduction_P Parameter: Plant Line Value: WS
  misc_feature: MA Experiment 20001905 PARAMETER Experiment Name: At_Drought_Reproduction_P Parameter: Timepoint (day) Value: 10
  misc_feature: MA Experiment 20001905 PARAMETER Experiment Name: At_Drought_Reproduction_P Parameter: Tissue Value: Rosettes
  misc_feature: MA Experiment 20001905 PARAMETER Experiment Name: At_Drought_Reproduction_P Parameter: Treatment Value: Drought vs. No Drought
aggtgggacacggaagctgagctctaatcctgatcggagatggcgactagcgattctgaattcaattctgatcttcttctcgctcacaagcttcccgagacgcgttacacctacaatgaaagagatgtagcaatctatgctttgggaatcggcgcttgtggccaagatgctgtggattccgatgagctcaagtttgtgtatcacagaaatgggcaggatttgatccaggtcttaccaacttttgcttcactattcacacttggatctttgacagaaggactggatttgccaggttttaaatatgatcctagtctcttgttgcatgggcagcagtatattgaaatatacaggccattaccttccaaggcttccttaattaacaaagtaagcctcgctggtttgcaagataaaggtaaagcagctatccttgaattagaaaccagaagttacgaggaagggtcaggggaactgttatgcatgaataggacgactgttttcctaagaggtgctggtggtttctcaaattcatctcaaccattctcttacaaaaactatccaagtaaccagggcttagctgtgaaaatcccacaaagacaacctttgacagtgtgcgaagagcgcactcagccatcgcaggcattactttataggctgtctggtgactataatcctctgcattcagatccagaatttgcaaaacttgccggattcccacgcccgatattgcatgggctatgcacactcgggtttgcaatcaaggcaatcatcaagtgtgtttgcaagggtgacccaactgctgtcaaaaccatatctggacgattcctcacgactgtttttcctggcgaaactctgataaccgaaatgtggcttgaaggcttgagggttatatatcagacgaaagtgaaggaaaggaacaaaactgtgttagctggttatgttgatattcgtgggttatcttcgtcactttagaatgttaggtccttagatatattgggctgtcataatattgcaaaggtaataaacatgtcagaagactcttgatgtttgcttggcgtaatgagccattgagccatcaataaacactctttgatgacggtcacaatttactgaaatggttagttgtatcgtgttactgttgtaataaatgttgagtgacgcaaaatgcacatgccggatgaagcaaaatgcattgaagaaaatcctttttgggtgtcaatgaactggaacataaagcctgagt

SEQ ID NO: 39716 - protein, 309 aa, Arabidopsis thaliana
  peptide (1)..(309): Ceres Seq. ID no. 12327607
  misc_feature (174)..(299): Pfam Name: MaoC like domain Pfam Description: MaoC like domain
  misc_feature (1)..(302): Homolog of NCBI NO: 7514017 NR Description: multifunctional beta-oxidation protein 2,
  misc_feature (1)..(302): Homolog of NCBI NO: 1620451 NR Description: multifunctional protein 2 [Rattus norvegicus]
  misc_feature (14)..(309): Homolog of NCBI NO: 499340 NR Description: 17beta-estradiol dehydrogenase [Sus scrofa]
  misc_feature (1)..(302): Homolog of NCBI NO: 2492741 NR Description: Estradiol 17 beta-dehydrogenase 4 (17-beta-HSD 4)
  misc_feature (14)..(302): Homolog of NCBI NO: 31982273 NR Description: hydroxysteroid (17-beta) dehydrogenase 4
  misc_feature (1)..(302): Homolog of NCBI NO: 13242303 NR Description: peroxisomal multifunctional enzyme type II
  misc_feature (6)..(302): Homolog of NCBI NO: 2315981 NR Description: 17-beta-hydroxysteroid dehydrogenase type IV
  misc_feature (2)..(308): Homolog of NCBI NO: 4504505 NR Description: hydroxysteroid (17-beta) dehydrogenase 4 [Homo
  misc_feature (1)..(200): Homolog of NCBI NO: 6573727 NR Description: T23E18.9 [Arabidopsis thaliana]
  misc_feature (1)..(309): Homolog of NCBI NO: 22330656 NR Description: hypothetical protein
MATSDSEFNSDLLLAHKLPETRYTYNERDVAIYALGIGACGQDAVDSDELKFVYHRNGQDLIQVLPTFASLFTLGSLTEGLDLPGFKYDPSLLLHGQQYIEIYRPLPSKASLINKVSLAGLQDKGKAAILELETRSYEEGSGELLCMNRTTVFLRGAGGFSNSSQPFSYKNYPSNQGLAVKIPQRQPLTVCEERTQPSQALLYRLSGDYNPLHSDPEFAKLAGFPRPILHGLCTLGFAIKAIIKCVCKGDPTAVKTISGRFLTTVFPGETLITEMWLEGLRVIYQTKVKERNKTVLAGYVDIRGLSSSL

SEQ ID NO: 39717 - protein, 163 aa, Arabidopsis thaliana
  peptide (1)..(163): Ceres Seq. ID no. 12327608
  misc_feature (28)..(153): Pfam Name: MaoC like domain Pfam Description: MaoC like domain
  misc_feature (1)..(156): Homolog of NCBI NO: 7514017 NR Description: multifunctional beta-oxidation protein 2,
  misc_feature (1)..(156): Homolog of NCBI NO: 1620451 NR Description: multifunctional protein 2 [Rattus norvegicus]
  misc_feature (1)..(163): Homolog of NCBI NO: 499340 NR Description: 17beta-estradiol dehydrogenase [Sus scrofa]
  misc_feature (1)..(156): Homolog of NCBI NO: 2492741 NR Description: Estradiol 17 beta-dehydrogenase 4 (17-beta-HSD 4)
  misc_feature (1)..(156): Homolog of NCBI NO: 31982273 NR Description: hydroxysteroid (17-beta) dehydrogenase 4
  misc_feature (1)..(156): Homolog of NCBI NO: 13242303 NR Description: peroxisomal multifunctional enzyme type II
  misc_feature (1)..(156): Homolog of NCBI NO: 2315981 NR Description: 17-beta-hydroxysteroid dehydrogenase type IV
  misc_feature (1)..(162): Homolog of NCBI NO: 4504505 NR Description: hydroxysteroid (17-beta) dehydrogenase 4 [Homo
  misc_feature (1)..(54): Homolog of NCBI NO: 6573727 NR Description: T23E18.9 [Arabidopsis thaliana]
  misc_feature (1)..(163): Homolog of NCBI NO: 22330656 NR Description: hypothetical protein
MNRTTVFLRGAGGFSNSSQPFSYKNYPSNQGLAVKIPQRQPLTVCEERTQPSQALLYRLSGDYNPLHSDPEFAKLAGFPRPILHGLCTLGFAIKAIIKCVCKGDPTAVKTISGRFLTTVFPGETLITEMWLEGLRVIYQTKVKERNKTVLAGYVDIRGLSSSL

SEQ ID NO: 39718 - DNA, 1839 bp, Arabidopsis thaliana
  misc_feature (1)..(1839): Ceres Seq. ID no. 13491552
  misc_feature: MA Experiment ID: 108434 Result: Up-regulated in Transcription
  misc_feature: MA Experiment 108434 PARAMETER Experiment Name: At_Root_Tips_cDNA_P Parameter: Tissue Value: Root Tips
  misc_feature: MA Experiment ID: 108595 Result: Down-regulated in Transcription
  misc_feature: MA Experiment 108595 PARAMETER Experiment Name: At_Ler-pi_Ovule_cDNA_P Parameter: Plant Line Value: null
  misc_feature: MA Experiment ID: 20000179 Result: Up-regulated in Transcription
  misc_feature: MA Experiment 20000179 PARAMETER Experiment Name: At_Germinating_Seeds_P Parameter: Age (hr) Value: 6 vs. 0
  misc_feature: MA Experiment 20000179 PARAMETER Experiment Name: At_Germinating_Seeds_P Parameter: Tissue Value: Germinating Seeds
  misc_feature: MA Experiment ID: 20000180 Result: Up-regulated in Transcription
  misc_feature: MA Experiment 20000180 PARAMETER Experiment Name: At_Germinating_Seeds_P Parameter: Age (hr) Value: 24 vs. 0
  misc_feature: MA Experiment 20000180 PARAMETER Experiment Name: At_Germinating_Seeds_P Parameter: Tissue Value: Germinating Seeds
  misc_feature: MA Experiment ID: 20000182 Result: Down-regulated in Transcription
  misc_feature: MA Experiment 20000182 PARAMETER Experiment Name: At_2mM_SA_P Parameter: Age (day) Value: 14
  misc_feature: MA Experiment 20000182 PARAMETER Experiment Name: At_2mM_SA_P Parameter: Organism Value: A. thaliana
  misc_feature: MA Experiment 20000182 PARAMETER Experiment Name: At_2mM_SA_P Parameter: Plant Line Value: WS
  misc_feature: MA Experiment 20000182 PARAMETER Experiment Name: At_2mM_SA_P Parameter: Timepoint (hr) Value: 6
  misc_feature: MA Experiment 20000182 PARAMETER Experiment Name: At_2mM_SA_P Parameter: Tissue Value: Aerial
  misc_feature: MA Experiment 20000182 PARAMETER Experiment Name: At_2mM_SA_P Parameter: Treatment Value: 2mM SA vs. No Treatment
  misc_feature: MA Experiment ID: 20000184 Result: Up-regulated in Transcription
  misc_feature: MA Experiment 20000184 PARAMETER Experiment Name: At_Shoots__P Parameter: Age (day) Value: 7
  misc_feature: MA Experiment 20000184 PARAMETER Experiment Name: At_Shoots__P Parameter: Tissue Value: Shoots vs. Whole Plant
  misc_feature: MA Experiment ID: 20000224 Result: Down-regulated in Transcription
  misc_feature: MA Experiment ID: 20000265 Result: Up-regulated in Transcription
  misc_feature: MA Experiment 20000265 PARAMETER Experiment Name: At_Open_Flower_P Parameter: Age (day) Value: 21
  misc_feature: MA Experiment 20000265 PARAMETER Experiment Name: At_Open_Flower_P Parameter: Plant Line Value: WS
  misc_feature: MA Experiment 20000265 PARAMETER Experiment Name: At_Open_Flower_P Parameter: Tissue Value: Closed Flower vs. Whole Plant
  misc_feature: MA Experiment ID: 20000794 Result: Down-regulated in Transcription
  misc_feature: MA Experiment 20000794 PARAMETER Experiment Name: At_Petals_P Parameter: Age (day) Value: 23-25 days
  misc_feature: MA Experiment 20000794 PARAMETER Experiment Name: At_Petals_P Parameter: Plant Line Value: WS
  misc_feature: MA Experiment 20000794 PARAMETER Experiment Name: At_Petals_P Parameter: Tissue Value: Petals vs. Whole plant
  misc_feature: MA Experiment ID: 20001911 Result: Down-regulated in Transcription
  misc_feature: MA Experiment 20001911 PARAMETER Experiment Name: At_Drought_Reproduction_P Parameter: Age (day) Value: 40
  misc_feature: MA Experiment 20001911 PARAMETER Experiment Name: At_Drought_Reproduction_P Parameter: Organism Value: A. thaliana
  misc_feature: MA Experiment 20001911 PARAMETER Experiment Name: At_Drought_Reproduction_P Parameter: Plant Line Value: WS
  misc_feature: MA Experiment 20001911 PARAMETER Experiment Name: At_Drought_Reproduction_P Parameter: Timepoint (day) Value: 10
  misc_feature: MA Experiment 20001911 PARAMETER Experiment Name: At_Drought_Reproduction_P Parameter: Tissue Value: Flowers
  misc_feature: MA Experiment 20001911 PARAMETER Experiment Name: At_Drought_Reproduction_P Parameter: Treatment Value: Drought vs. No Drought
aaattagttggcaaactccgcctgctcttcgataattccgaggagcttcttcactcttcttaaatctcatttctctctctctctctctctctctctctctctctctctctctctctctctctctctctctctctctctctcgcattgcgattaacgaaattcgaaaaatgtctcgtcttctccaaacacccttcttaccttcagtttccctccccacaaaaacacgatcttccgttacgggtttccgggtaaagcccagaatcatcccaatccaagcaaagatccgagaaatcttcatgcctgcactaagttctacaatgaccgaaggaaaaatcgtctcttgggttaaatcagaaggcgataaactcaacaaaggagagagtgttgttgttgttgaatccgataaagctgatatggatgttgagactttctatgatggttatctagctgcaatcatggttgaagaaggtggtgttgctcctgttggttctgctattgctttgttagctgaaactgaagatgagattgctgatgctaaggctaaagcttctggtggtggaggtgattctaaggctcctcctccggcttctcctcctacggctacagttgtagcacctgtggctgttgagaagaagattgcagctcctcctgtggcgattaaggcggtggcggcgtctgcggtgcatccggcgtctgaaggagggaagaggattgtggcgtctccttatgctaagaagttagctaaggaattgaatgtggaattggctggtttagttggaagtggaccaatgggaaggattgtggctaaagatgttgaggcggttgcagctggaggaggagttcaagctgctgtagctgttaaggaggtagtggcagttcctggtgtggagttgggatcagtggttccgtttacgacaatgcagggggctgtgagtaggaatatggtggagagtcttgctgttcctacttttagagtcggttacacgattagtacggatgctcttgatgctctctacaagaagattaagtcgaaaggtgtgacaatgacggcactcctagcaaaggcaactgcacttgcactggcgaaacatccagttgtaaactcgtcctgtagagatggtaacagttttgtgtataacagtagcatcaacgttgctgttgctgttgctattgatggtggtctgataactcctgtgcttcagaacgctgataaggttgacatttattcgttatctagaaaatggaaagaattggttgataaggctcgagccaagcagctgcagcctcaggagtacaacactggtaccttcactctctctaacctaggaatgtttggcgttgatcggtttgatgctattctaccccctggaacaggagcgattatggctgtaggagcatctcaaccttcagtggttgcaactaaagacggccgcattggcatgaaaaaccagatgcaggtgaatgtgacggcagatcatcgtgtcatctatggtgctgatcttgcacagttcttgcaaacattggcaagcattatagaggacccaaaggaccttacattctaggccaaattactacttttcgcagcccagtcttctctgttcttgattccatgggagcttgtatttctgcggtaatcagtttctttgatagaatcgaacttttaagagtaatgttgaacataatcatttctttgtttgagatatatcttctgcaacattttctgcatggaaaggccgtcccacatgattttgctactgacttcatatatttccacttcatgtgatgaatcttatatgaactgataactttagcatgattaataacatgaatcttatatgg

SEQ ID NO: 39719 - protein, 464 aa, Arabidopsis thaliana; identical to SEQ ID NO: 38965
  peptide (1)..(464): Ceres Seq. ID no. 15222866
  misc_feature (240)..(464): Pfam Name: 2-oxoacid dehydrogenases acyltransferase Pfam Description: 2-oxoacid dehydrogenases acyltransferase
  misc_feature (39)..(463): Homolog of NCBI NO: 37522138 NR Description: dihydrolipoamide S-acetyltransferase [Gloeobacter
  misc_feature (39)..(463): Homolog of NCBI NO: 17231098 NR Description: dihydrolipoamide S-acetyltransferase [Nostoc sp.
  misc_feature (39)..(463): Homolog of NCBI NO: 23123757 NR Description: hypothetical protein [Nostoc punctiforme]
  misc_feature (39)..(463): Homolog of NCBI NO: 22298842 NR Description: dihydrolipoamide S-acetyltransferase
  misc_feature (39)..(458): Homolog of NCBI NO: 16331208 NR Description: dihydrolipoamide acetyltransferase component (E2)
  misc_feature (35)..(463): Homolog of NCBI NO: 9279589 NR Description: dihydrolipoamide S-acetyltransferase [Arabidopsis
  misc_feature (1)..(463): Homolog of NCBI NO: 15230922 NR Description: dihydrolipoamide S-acetyltransferase [Arabidopsis
  misc_feature (1)..(464): Homolog of NCBI NO: 25286434 NR Description: protein F12K21.24 [imported] - Arabidopsis
  misc_feature (1)..(464): Homolog of NCBI NO: 15218630 NR Description: dihydrolipoamide S-acetyltransferase -related
  misc_feature (1)..(464): Homolog of NCBI NO: 21536525 NR Description: dihydrolipoamide S-acetyltransferase, putative

SEQ ID NO: 39720 - protein, 421 aa, Arabidopsis thaliana; identical to SEQ ID NO: 38966
  peptide (1)..(421): Ceres Seq. ID no. 15222867
  misc_feature (197)..(421): Pfam Name: 2-oxoacid dehydrogenases acyltransferase Pfam Description: 2-oxoacid dehydrogenases acyltransferase
  misc_feature (1)..(420): Homolog of NCBI NO: 37522138 NR Description: dihydrolipoamide S-acetyltransferase [Gloeobacter
  misc_feature (1)..(420): Homolog of NCBI NO: 17231098 NR Description: dihydrolipoamide S-acetyltransferase [Nostoc sp.
  misc_feature (1)..(420): Homolog of NCBI NO: 23123757 NR Description: hypothetical protein [Nostoc punctiforme]
  misc_feature (1)..(420): Homolog of NCBI NO: 22298842 NR Description: dihydrolipoamide S-acetyltransferase
  misc_feature (1)..(415): Homolog of NCBI NO: 16331208 NR Description: dihydrolipoamide acetyltransferase component (E2)
  misc_feature (1)..(420): Homolog of NCBI NO: 9279589 NR Description: dihydrolipoamide S-acetyltransferase [Arabidopsis
  misc_feature (1)..(420): Homolog of NCBI NO: 15230922 NR Description: dihydrolipoamide S-acetyltransferase [Arabidopsis
  misc_feature (1)..(421): Homolog of NCBI NO: 25286434 NR Description: protein F12K21.24 [imported] - Arabidopsis
  misc_feature (1)..(421): Homolog of NCBI NO: 15218630 NR Description: dihydrolipoamide S-acetyltransferase -related
  misc_feature (1)..(421): Homolog of NCBI NO: 21536525 NR Description: dihydrolipoamide S-acetyltransferase, putative

SEQ ID NO: 39721 - protein, 414 aa, Arabidopsis thaliana
  peptide (1)..(414): Ceres Seq. ID no. 15222868
  misc_feature (190)..(414): Pfam Name: 2-oxoacid dehydrogenases acyltransferase Pfam Description: 2-oxoacid dehydrogenases acyltransferase
  misc_feature (1)..(413): Homolog of NCBI NO: 37522138 NR Description: dihydrolipoamide S-acetyltransferase [Gloeobacter
  misc_feature (1)..(413): Homolog of NCBI NO: 17231098 NR Description: dihydrolipoamide S-acetyltransferase [Nostoc sp.
  misc_feature (1)..(413): Homolog of NCBI NO: 23123757 NR Description: hypothetical protein [Nostoc punctiforme]
  misc_feature (1)..(413): Homolog of NCBI NO: 22298842 NR Description: dihydrolipoamide S-acetyltransferase
  misc_feature (1)..(408): Homolog of NCBI NO: 16331208 NR Description: dihydrolipoamide acetyltransferase component (E2)
  misc_feature (1)..(413): Homolog of NCBI NO: 9279589 NR Description: dihydrolipoamide S-acetyltransferase [Arabidopsis
  misc_feature (1)..(413): Homolog of NCBI NO: 15230922 NR Description: dihydrolipoamide S-acetyltransferase [Arabidopsis
  misc_feature (1)..(414): Homolog of NCBI NO: 25286434 NR Description: protein F12K21.24 [imported] - Arabidopsis
  misc_feature (1)..(414): Homolog of NCBI NO: 15218630 NR Description: dihydrolipoamide S-acetyltransferase -related
  misc_feature (1)..(414): Homolog of NCBI NO: 21536525 NR Description: dihydrolipoamide S-acetyltransferase, putative
MTEGKIVSWVKSEGDKLNKGESVVVVESDKADMDVETFYDGYLAAIMVEEGGVAPVGSAIALLAETEDEIADAKAKASGGGGDSKAPPPASPPTATVVAPVAVEKKIAAPPVAIKAVAASAVHPASEGGKRIVASPYAKKLAKELNVELAGLVGSGPMGRIVAKDVEAVAAGGGVQAAVAVKEVVAVPGVELGSVVPFTTMQGAVSRNMVESLAVPTFRVGYTISTDALDALYKKIKSKGVTMTALLAKATALALAKHPVVNSSCRDGNSFVYNSSINVAVAVAIDGGLITPVLQNADKVDIYSLSRKWKELVDKARAKQLQPQEYNTGTFTLSNLGMFGVDRFDAILPPGTGAIMAVGASQPSVVATKDGRIGMKNQMQVNVTADHRVIYGADLAQFLQTLASIIEDPKDLTF

SEQ ID NO: 39722 - DNA, 1310 bp, Arabidopsis thaliana
  misc_feature (1)..(1310): Ceres Seq. ID no. 12371052
  misc_feature: MA Experiment ID: 20000090 Result: Up-regulated in Transcription
  misc_feature: MA Experiment ID: 20000111 Result: Down-regulated in Transcription
  misc_feature: MA Experiment 20000111 PARAMETER Experiment Name: At_42deg_Heat_cDNA_P Parameter: Temperature (deg C) Value: 42 vs. 22
  misc_feature: MA Experiment 20000111 PARAMETER Experiment Name: At_42deg_Heat_cDNA_P Parameter: Timepoint (hr) Value: 6
  misc_feature: MA Experiment 20000111 PARAMETER Experiment Name: At_42deg_Heat_cDNA_P Parameter: Tissue Value: Aerial
  misc_feature: MA Experiment ID: 20000113 Result: Down-regulated in Transcription
  misc_feature: MA Experiment 20000113 PARAMETER Experiment Name: At_42deg_Heat_cDNA_P Parameter: Temperature (deg C) Value: 42 vs. 22
  misc_feature: MA Experiment 20000113 PARAMETER Experiment Name: At_42deg_Heat_cDNA_P Parameter: Timepoint (hr) Value: 8
  misc_feature: MA Experiment 20000113 PARAMETER Experiment Name: At_42deg_Heat_cDNA_P Parameter: Tissue Value: Aerial
  misc_feature: MA Experiment ID: 20000184 Result: Down-regulated in Transcription
  misc_feature: MA Experiment 20000184 PARAMETER Experiment Name: At_Shoots__P Parameter: Age (day) Value: 7
  misc_feature: MA Experiment 20000184 PARAMETER Experiment Name: At_Shoots__P Parameter: Tissue Value: Shoots vs. Whole Plant
  misc_feature: MA Experiment ID: 20000227 Result: Down-regulated in Transcription
  misc_feature: MA Experiment 20000227 PARAMETER Experiment Name: At_Root-Tips-vs-Tops_P Parameter: Tissue Value: Root Tips vs. Root Tops
  misc_feature: MA Experiment ID: 20001248 Result: Up-regulated in Transcription
  misc_feature: MA Experiment 20001248 PARAMETER Experiment Name: At_Far-red-induction_P Parameter: Age (day) Value: 7
  misc_feature: MA Experiment 20001248 PARAMETER Experiment Name: At_Far-red-induction_P Parameter: Light Value: Far-red vs. White
  misc_feature: MA Experiment 20001248 PARAMETER Experiment Name: At_Far-red-induction_P Parameter: Organism Value: A. thaliana
  misc_feature: MA Experiment 20001248 PARAMETER Experiment Name: At_Far-red-induction_P Parameter: Plant Line Value: Columbia
  misc_feature: MA Experiment 20001248 PARAMETER Experiment Name: At_Far-red-induction_P Parameter: Timepoint (hr) Value: 4
  misc_feature: MA Experiment 20001248 PARAMETER Experiment Name: At_Far-red-induction_P Parameter: Tissue Value: Whole Plant
  misc_feature: MA Experiment ID: 20001554 Result: Down-regulated in Transcription
  misc_feature: MA Experiment 20001554 PARAMETER Experiment Name: At_Drought_Soil_Dry_P Parameter: Age (day) Value: 21
  misc_feature: MA Experiment 20001554 PARAMETER Experiment Name: At_Drought_Soil_Dry_P Parameter: Organism Value: A. thaliana
  misc_feature: MA Experiment 20001554 PARAMETER Experiment Name: At_Drought_Soil_Dry_P Parameter: Plant Line Value: WS
  misc_feature: MA Experiment 20001554 PARAMETER Experiment Name: At_Drought_Soil_Dry_P Parameter: Post Timepoint (hr) Value: None
  misc_feature: MA Experiment 20001554 PARAMETER Experiment Name: At_Drought_Soil_Dry_P Parameter: Post-Treatment Value: None
  misc_feature: MA Experiment 20001554 PARAMETER Experiment Name: At_Drought_Soil_Dry_P Parameter: Timepoint (day) Value: 7
  misc_feature: MA Experiment 20001554 PARAMETER Experiment Name: At_Drought_Soil_Dry_P Parameter: Treatment Value: Drought vs. No Drought
  misc_feature: MA Experiment ID: 20001556 Result: Down-regulated in Transcription
  misc_feature: MA Experiment 20001556 PARAMETER Experiment Name: At_Drought_Soil_Dry_P Parameter: Age (day) Value: 26
  misc_feature: MA Experiment 20001556 PARAMETER Experiment Name: At_Drought_Soil_Dry_P Parameter: Organism Value: A. thaliana
  misc_feature: MA Experiment 20001556 PARAMETER Experiment Name: At_Drought_Soil_Dry_P Parameter: Plant Line Value: WS
  misc_feature: MA Experiment 20001556 PARAMETER Experiment Name: At_Drought_Soil_Dry_P Parameter: Post Timepoint (hr) Value: None
  misc_feature: MA Experiment 20001556 PARAMETER Experiment Name: At_Drought_Soil_Dry_P Parameter: Post-Treatment Value: None
  misc_feature: MA Experiment 20001556 PARAMETER Experiment Name: At_Drought_Soil_Dry_P Parameter: Timepoint (day) Value: 12
  misc_feature: MA Experiment 20001556 PARAMETER Experiment Name: At_Drought_Soil_Dry_P Parameter: Treatment Value: Drought vs. No Drought
  misc_feature: MA Experiment ID: 20001559 Result: Down-regulated in Transcription
  misc_feature: MA Experiment 20001559 PARAMETER Experiment Name: At_Drought_Soil_Dry_P Parameter: Age (day) Value: 28
  misc_feature: MA Experiment 20001559 PARAMETER Experiment Name: At_Drought_Soil_Dry_P Parameter: Organism Value: A. thaliana
  misc_feature: MA Experiment 20001559 PARAMETER Experiment Name: At_Drought_Soil_Dry_P Parameter: Plant Line Value: WS
  misc_feature: MA Experiment 20001559 PARAMETER Experiment Name: At_Drought_Soil_Dry_P Parameter: Post Timepoint (hr) Value: 29
  misc_feature: MA Experiment 20001559 PARAMETER Experiment Name: At_Drought_Soil_Dry_P Parameter: Post-Treatment Value: Re-Water vs. No Drought
  misc_feature: MA Experiment 20001559 PARAMETER Experiment Name: At_Drought_Soil_Dry_P Parameter: Timepoint (day) Value: 14
  misc_feature: MA Experiment 20001559 PARAMETER Experiment Name: At_Drought_Soil_Dry_P Parameter: Treatment Value: Drought vs. No Drought
  misc_feature: MA Experiment ID: 20001560 Result: Down-regulated in Transcription
  misc_feature: MA Experiment 20001560 PARAMETER Experiment Name: At_Drought_Soil_Dry_P Parameter: Age (day) Value: 28
  misc_feature: MA Experiment 20001560 PARAMETER Experiment Name: At_Drought_Soil_Dry_P Parameter: Organism Value: A. thaliana
  misc_feature: MA Experiment 20001560 PARAMETER Experiment Name: At_Drought_Soil_Dry_P Parameter: Plant Line Value: WS
  misc_feature: MA Experiment 20001560 PARAMETER Experiment Name: At_Drought_Soil_Dry_P Parameter: Post Timepoint (hr) Value: None
  misc_feature: MA Experiment 20001560 PARAMETER Experiment Name: At_Drought_Soil_Dry_P Parameter: Post-Treatment Value: None
  misc_feature: MA Experiment 20001560 PARAMETER Experiment Name: At_Drought_Soil_Dry_P Parameter: Timepoint (day) Value: 14
  misc_feature: MA Experiment 20001560 PARAMETER Experiment Name: At_Drought_Soil_Dry_P Parameter: Treatment Value: Drought vs. No Drought
  misc_feature: MA Experiment ID: 20001904 Result: Down-regulated in Transcription
  misc_feature: MA Experiment 20001904 PARAMETER Experiment Name: At_Drought_Reproduction_P Parameter: Age (day) Value: 37
  misc_feature: MA Experiment 20001904 PARAMETER Experiment Name: At_Drought_Reproduction_P Parameter: Organism Value: A. thaliana
  misc_feature: MA Experiment 20001904 PARAMETER Experiment Name: At_Drought_Reproduction_P Parameter: Plant Line Value: WS
  misc_feature: MA Experiment 20001904 PARAMETER Experiment Name: At_Drought_Reproduction_P Parameter: Timepoint (day) Value: 7
  misc_feature: MA Experiment 20001904 PARAMETER Experiment Name: At_Drought_Reproduction_P Parameter: Tissue Value: Rosettes
  misc_feature: MA Experiment 20001904 PARAMETER Experiment Name: At_Drought_Reproduction_P Parameter: Treatment Value: Drought vs. No Drought
aagtttctttatcttttagtttcccggtaaaaaatctctctgtcatgtctatgttcttccacgtcgttcctaatctcccaagacagaatctctaaacttcattttgctccttttccacacaaaactttctctccctccaaagaccacaaaaaatgttcttccttccttcaacttcaagtatctctctttattcacacgtatagcatccaaaaccaaaaatccataaccctttcctctgtaaaagtttcttcctttctaacttccccagaaaaaaaaaaaaaaaacattctgttagaaaaccatgagaggtctcgcggcttgttacagtgaacacgccattaaagtatcagatacatattgttcaggtccttcgaatcattcctatatatctccgacattacctccttcaatccccgacacagtaaccaccacttataaatcatatctcccttcttccgacaaacccgtctctgtttcactcacctggtcggataatctcaccgtcgtcatctcaacgccgccgaaatcatactctgtttcactcagaaaacctaaaggatcaagaaagttgacttcttcctccggttcactcaacgccgagatcctatgggatctatcggaagagagtacgaaaacaacggacctgaaccaataagaagattcttcgtcgtcgtcgttgtaaattccgagattaccctcggagtcggcgacgttgaccacgagcgagacacgtcatcatcgtcgtcgtggcgagtctcaaaaacggagagattctctggaacttgttggctcacgacgaaagctcaattctccgacgtcggaaggaaacacgagatacagattcaatgcggcggaggaggaggaggaggaggaggagaggaagggtatttatggaaagtgaaaagtcctgaaacgatgtcggtttatgttgataagaggaaagtgttttcggtgaagaagcttaagtggaactttagagggaatcaaaccatgtttttcgatggaatgcttatagacatgatgtgggatttacacgactggttctacaaagaaacgttgtcgtctgtttcgactagttcatcgtctaaaacggcgtcgtcgtcatcgtcttcttcaacttcatcgtctactcctccgtgtgctgtgtttatgtttaggaggaggagtggttttgatagtagattatggattgatgaagatgaacaagagagtaagatgaagaagaatattggttctagagatgagaaacattcgttttcacttatcatttgtgcctctaaaaagtgaccaaataaacaaataaacatttt

SEQ ID NO: 39723 - protein, 226 aa, Arabidopsis thaliana
  peptide (1)..(226): Ceres Seq. ID no. 12371053
  misc_feature (7)..(226): Pfam Name: Plant protein of unknown function (DUF868) Pfam Description: Plant protein of unknown function (DUF868)
  misc_feature (11)..(147): Homolog of NCBI NO: 21593854 NR Description: unknown [Arabidopsis thaliana]
  misc_feature (10)..(172): Homolog of NCBI NO: 15235452 NR Description: putative protein
  misc_feature (11)..(174): Homolog of NCBI NO: 15241702 NR Description: putative protein
  misc_feature (13)..(147): Homolog of NCBI NO: 14719318 NR Description: hypothetical protein [Oryza sativa]
  misc_feature (12)..(153): Homolog of NCBI NO: 30102999 NR Description: hypothetical protein [Oryza sativa (japonica
  misc_feature (12)..(147): Homolog of NCBI NO: 34394221 NR Description: unknown protein [Oryza sativa (japonica
  misc_feature (7)..(147): Homolog of NCBI NO: 21805715 NR Description: hypothetical protein [Arabidopsis thaliana]
  misc_feature (7)..(147): Homolog of NCBI NO: 15226242 NR Description: hypothetical protein; protein id: At2g27770.1
  misc_feature (7)..(226): Homolog of NCBI NO: 18404143 NR Description: expressed protein
  misc_feature (7)..(226): Homolog of NCBI NO: 21536715 NR Description: unknown [Arabidopsis thaliana]
MGSIGREYENNGPEPIRRFFVVVVVNSEITLGVGDVDHERDTSSSSSWRVSKTERFSGTCWLTTKAQFSDVGRKHEIQIQCGGGGGGGGGEEGYLWKVKSPETMSVYVDKRKVFSVKKLKWNFRGNQTMFFDGMLIDMMWDLHDWFYKETLSSVSTSSSSKTASSSSSSSTSSSTPPCAVFMFRRRSGFDSRLWIDEDEQESKMKKNIGSRDEKHSFSLIICASKK

SEQ ID NO: 39724 - protein, 123 aa, Arabidopsis thaliana
  peptide (1)..(123): Ceres Seq. ID no. 12371054
  misc_feature (1)..(123): Pfam Name: Plant protein of unknown function (DUF868) Pfam Description: Plant protein of unknown function (DUF868)
  misc_feature (1)..(44): Homolog of NCBI NO: 21593854 NR Description: unknown [Arabidopsis thaliana]
  misc_feature (1)..(69): Homolog of NCBI NO: 15235452 NR Description: putative protein
  misc_feature (1)..(71): Homolog of NCBI NO: 15241702 NR Description: putative protein
  misc_feature (1)..(44): Homolog of NCBI NO: 14719318 NR Description: hypothetical protein [Oryza sativa]
  misc_feature (1)..(50): Homolog of NCBI NO: 30102999 NR Description: hypothetical protein [Oryza sativa (japonica
  misc_feature (1)..(44): Homolog of NCBI NO: 34394221 NR Description: unknown protein [Oryza sativa (japonica
  misc_feature (1)..(44): Homolog of NCBI NO: 21805715 NR Description: hypothetical protein [Arabidopsis thaliana]
  misc_feature (1)..(44): Homolog of NCBI NO: 15226242 NR Description: hypothetical protein; protein id: At2g27770.1
  misc_feature (1)..(123): Homolog of NCBI NO: 18404143 NR Description: expressed protein
  misc_feature (1)..(123): Homolog of NCBI NO: 21536715 NR Description: unknown [Arabidopsis thaliana]
MSVYVDKRKVFSVKKLKWNFRGNQTMFFDGMLIDMMWDLHDWFYKETLSSVSTSSSSKTASSSSSSSTSSSTPPCAVFMFRRRSGFDSRLWIDEDEQESKMKKNIGSRDEKHSFSLIICASKK

SEQ ID NO: 39725 - protein, 117 aa, Arabidopsis thaliana
  peptide (1)..(117): Ceres Seq. ID no. 12371055
  misc_feature (34)..(107): Pfam Name: Plant protein of unknown function (DUF868) Pfam Description: Plant protein of unknown function (DUF868)
  misc_feature (1)..(107): Homolog of NCBI NO: 18404143 NR Description: expressed protein
  misc_feature (1)..(107): Homolog of NCBI NO: 21536715 NR Description: unknown [Arabidopsis thaliana]
MRGLAACYSEHAIKVSDTYCSGPSNHSYISPTLPPSIPDTVTTTYKSYLPSSDKPVSVSLTWSDNLTVVISTPPKSYSVSLRKPKGSRKLTSSSGSLNAEILWDLSEESTKTTDLNQ

SEQ ID NO: 39726 - DNA, 1226 bp, Arabidopsis thaliana
  misc_feature (1)..(1226): Ceres Seq. ID no. 12562726
  misc_feature: MA Experiment ID: 20000180 Result: Down-regulated in Transcription
  misc_feature: MA Experiment 20000180 PARAMETER Experiment Name: At_Germinating_Seeds_P Parameter: Age (hr) Value: 24 vs. 0
  misc_feature: MA Experiment 20000180 PARAMETER Experiment Name: At_Germinating_Seeds_P Parameter: Tissue Value: Germinating Seeds
  misc_feature: MA Experiment ID: 20000184 Result: Up-regulated in Transcription
  misc_feature: MA Experiment 20000184 PARAMETER Experiment Name: At_Shoots__P Parameter: Age (day) Value: 7
  misc_feature: MA Experiment 20000184 PARAMETER Experiment Name: At_Shoots__P Parameter: Tissue Value: Shoots vs. Whole Plant
  misc_feature: MA Experiment ID: 20001557 Result: Up-regulated in Transcription
  misc_feature: MA Experiment 20001557 PARAMETER Experiment Name: At_Drought_Soil_Dry_P Parameter: Age (day) Value: 27
  misc_feature: MA Experiment 20001557 PARAMETER Experiment Name: At_Drought_Soil_Dry_P Parameter: Organism Value: A. thaliana
  misc_feature: MA Experiment 20001557 PARAMETER Experiment Name: At_Drought_Soil_Dry_P Parameter: Plant Line Value: WS
  misc_feature: MA Experiment 20001557 PARAMETER Experiment Name: At_Drought_Soil_Dry_P Parameter: Post Timepoint (hr) Value: 3
  misc_feature: MA Experiment 20001557 PARAMETER Experiment Name: At_Drought_Soil_Dry_P Parameter: Post-Treatment Value: Re-Water vs. No Drought
  misc_feature: MA Experiment 20001557 PARAMETER Experiment Name: At_Drought_Soil_Dry_P Parameter: Timepoint (day) Value: 13
  misc_feature: MA Experiment 20001557 PARAMETER Experiment Name: At_Drought_Soil_Dry_P Parameter: Treatment Value: Drought vs. No Drought
  misc_feature: MA Experiment ID: 20001558 Result: Up-regulated in Transcription
  misc_feature: MA Experiment 20001558 PARAMETER Experiment Name: At_Drought_Soil_Dry_P Parameter: Age (day) Value: 27
  misc_feature: MA Experiment 20001558 PARAMETER Experiment Name: At_Drought_Soil_Dry_P Parameter: Organism Value: A. thaliana
  misc_feature: MA Experiment 20001558 PARAMETER Experiment Name: At_Drought_Soil_Dry_P Parameter: Plant Line Value: WS
  misc_feature: MA Experiment 20001558 PARAMETER Experiment Name: At_Drought_Soil_Dry_P Parameter: Post Timepoint (hr) Value: 6
  misc_feature: MA Experiment 20001558 PARAMETER Experiment Name: At_Drought_Soil_Dry_P Parameter: Post-Treatment Value: Re-Water vs. No Drought
  misc_feature: MA Experiment 20001558 PARAMETER Experiment Name: At_Drought_Soil_Dry_P Parameter: Timepoint (day) Value: 13
  misc_feature: MA Experiment 20001558 PARAMETER Experiment Name: At_Drought_Soil_Dry_P Parameter: Treatment Value: Drought vs. No Drought
attcactgattattgttttaaggcaaattaagatcatcttcaaaatcttctcagatctcttccaattntctagaaaaaacatgtcttgctgtggtggaagctgtggttgtggatctgcctgcaagtgcggcaatggttgcggagcgttgcaaaaggtaccctgacttggagaacaccgccaccgagactcttgtcctcggtgttgctccggcgatgaactctcagtacgaggcttccggcgagactttcgttgccgagaatgatgcctgcaaatgcaggcaggatccacaaccacagcttccaccagctaaagggaagaagatcaacgaagagcgtgaagatcgccgtacgctaggtttagtgttgcttagaggtgaagaagttatctcaatgactgtcgaaggaccacctcctcctgaagaatctcgtgctaaagctggctctgcagctgctgttgctggtccaggaattggccgtgccgctgggcgtggagttcctactggtccgttagttcaagctcagcctggtttatctggtcctgttcgtggtgttggtggacctgctccgggaatgatgcagcctcagatctctcgtccaccacagctttcagctcctccgattattcgacctccgggacagatgttgccaccgcctccttttggtggtcaaggtcctcctatgggaagaggtcctccaccgccttatggtatgaggccaccgccacagcagttttctggaccaccaccgcctcagtatgggcaaaggccaatgattcctcctcctggtggtatgatgagaggacctcctcctccacctcatggaatgcaaggacctcctccgcctcgccctggaatgcctcctgctcctggtggttttgctccaccgcgtcctggcatgccaccacataatcagcagcagtgattaggttagcagtgaatgaacaggactcttgtctcggctttttactgtttttgtcgctgttttcttgagattatgaaggctttaagatgtttgattgaacttcctcaggtttacggtatcgtgctatcatgttgcctttcattgactttagccgcaatttctcatctatcttagctttcaaagtttgtagatttgttgacgagtgagttgtctttgccttatcttcttgtgttttcttttaagaacgaatccattaaactttgttatgacttcttaaggtgaacatctatcttgaggatcgtttt

SEQ ID NO: 39727 - protein, 262 aa, Arabidopsis thaliana
  peptide (1)..(262): Ceres Seq. ID no. 12562727
  misc_feature (143)..(256): Pfam Name: Extensin-like region Pfam Description: Extensin-like region
  misc_feature (46)..(245): Homolog of NCBI NO: 337461 NR Description: small nuclear ribonucleoprotein particle (SmB')
  misc_feature (46)..(245): Homolog of NCBI NO: 8099650 NR Description: snRNP-associated protein; SmB [Danio rerio]
  misc_feature (46)..(245): Homolog of NCBI NO: 27687269 NR Description: similar to small nuclear
  misc_feature (46)..(245): Homolog of NCBI NO: 112305 NR Description: small nuclear ribonucleoprotein-associated
  misc_feature (46)..(245): Homolog of NCBI NO: 7208221 NR Description: small nuclear ribonucleoprotein B' [Macropus
  misc_feature (55)..(261): Homolog of NCBI NO: 34900024 NR Description: putative snRNP protein [Oryza sativa (japonica
  misc_feature (55)..(261): Homolog of NCBI NO: 33146808 NR Description: putative snRNP(small nuclear ribonucleoprotein
  misc_feature (55)..(261): Homolog of NCBI NO: 21536707 NR Description: putative snRNP protein [Arabidopsis thaliana]
  misc_feature (55)..(261): Homolog of NCBI NO: 15241519 NR Description: putative protein
  misc_feature (55)..(262): Homolog of NCBI NO: 15237095 NR Description: putative snRNP protein
MVAERCKRYPDLENTATETLVLGVAPAMNSQYEASGETFVAENDACKCRQDPQPQLPPAKGKKINEEREDRRTLGLVLLRGEEVISMTVEGPPPPEESRAKAGSAAAVAGPGIGRAAGRGVPTGPLVQAQPGLSGPVRGVGGPAPGMMQPQISRPPQLSAPPIIRPPGQMLPPPPFGGQGPPMGRGPPPPYGMRPPPQQFSGPPPPQYGQRPMIPPPGGMMRGPPPPPHGMQGPPPPRPGMPPAPGGFAPPRPGMPPHNQQQ

SEQ ID NO: 39728 - protein, 235 aa, Arabidopsis thaliana
  peptide (1)..(235): Ceres Seq. ID no. 12562728
  misc_feature (116)..(229): Pfam Name: Extensin-like region Pfam Description: Extensin-like region
  misc_feature (19)..(218): Homolog of NCBI NO: 337461 NR Description: small nuclear ribonucleoprotein particle (SmB')
  misc_feature (19)..(218): Homolog of NCBI NO: 8099650 NR Description: snRNP-associated protein; SmB [Danio rerio]
  misc_feature (19)..(218): Homolog of NCBI NO: 27687269 NR Description: similar to small nuclear
  misc_feature (19)..(218): Homolog of NCBI NO: 112305 NR Description: small nuclear ribonucleoprotein-associated
  misc_feature (19)..(218): Homolog of NCBI NO: 7208221 NR Description: small nuclear ribonucleoprotein B' [Macropus
  misc_feature (28)..(234): Homolog of NCBI NO: 34900024 NR Description: putative snRNP protein [Oryza sativa (japonica
  misc_feature (28)..(234): Homolog of NCBI NO: 33146808 NR Description: putative snRNP(small nuclear ribonucleoprotein
  misc_feature (28)..(234): Homolog of NCBI NO: 21536707 NR Description: putative snRNP protein [Arabidopsis thaliana]
  misc_feature (28)..(234): Homolog of NCBI NO: 15241519 NR Description: putative protein
  misc_feature (28)..(235): Homolog of NCBI NO: 15237095 NR Description: putative snRNP protein
MNSQYEASGETFVAENDACKCRQDPQPQLPPAKGKKINEEREDRRTLGLVLLRGEEVISMTVEGPPPPEESRAKAGSAAAVAGPGIGRAAGRGVPTGPLVQAQPGLSGPVRGVGGPAPGMMQPQISRPPQLSAPPIIRPPGQMLPPPPFGGQGPPMGRGPPPPYGMRPPPQQFSGPPPPQYGQRPMIPPPGGMMRGPPPPPHGMQGPPPPRPGMPPAPGGFAPPRPGMPPHNQQQ

SEQ ID NO: 39729 - protein, 176 aa, Arabidopsis thaliana; identical to SEQ ID NO: 23260
  peptide (1)..(176): Ceres Seq. ID no. 12562729
  misc_feature (57)..(170): Pfam Name: Extensin-like region Pfam Description: Extensin-like region
  misc_feature (1)..(159): Homolog of NCBI NO: 337461 NR Description: small nuclear ribonucleoprotein particle (SmB')
  misc_feature (1)..(159): Homolog of NCBI NO: 8099650 NR Description: snRNP-associated protein; SmB [Danio rerio]
  misc_feature (1)..(159): Homolog of NCBI NO: 27687269 NR Description: similar to small nuclear
  misc_feature (1)..(159): Homolog of NCBI NO: 112305 NR Description: small nuclear ribonucleoprotein-associated
  misc_feature (1)..(159): Homolog of NCBI NO: 7208221 NR Description: small nuclear ribonucleoprotein B' [Macropus
  misc_feature (1)..(175): Homolog of NCBI NO: 34900024 NR Description: putative snRNP protein [Oryza sativa (japonica
  misc_feature (1)..(175): Homolog of NCBI NO: 33146808 NR Description: putative snRNP(small nuclear ribonucleoprotein
  misc_feature (1)..(175): Homolog of NCBI NO: 21536707 NR Description: putative snRNP protein [Arabidopsis thaliana]
  misc_feature (1)..(175): Homolog of NCBI NO: 15241519 NR Description: putative protein
  misc_feature (1)..(176): Homolog of NCBI NO: 15237095 NR Description: putative snRNP protein

SEQ ID NO: 39730 - DNA, 1134 bp, Arabidopsis thaliana
  misc_feature (1)..(1134): Ceres Seq. ID no. 13489091
  misc_feature: MA Experiment ID: 108433 Result: Up-regulated in Transcription
  misc_feature: MA Experiment 108433 PARAMETER Experiment Name: At_rhl_Mutant2_cDNA_P Parameter: Age (day) Value: 7
  misc_feature: MA Experiment 108433 PARAMETER Experiment Name: At_rhl_Mutant2_cDNA_P Parameter: Organism Value: A. thaliana
  misc_feature: MA Experiment 108433 PARAMETER Experiment Name: At_rhl_Mutant2_cDNA_P Parameter: Plant Line Value: rhl Mutant vs. wt landsburg
  misc_feature: MA Experiment 108433 PARAMETER Experiment Name: At_rhl_Mutant2_cDNA_P Parameter: Tissue Value: Roots
  misc_feature: MA Experiment ID: 108434 Result: Up-regulated in Transcription
  misc_feature: MA Experiment 108434 PARAMETER Experiment Name: At_Root_Tips_cDNA_P Parameter: Tissue Value: Root Tips
  misc_feature: MA Experiment ID: 108464 Result: Down-regulated in Transcription
  misc_feature: MA Experiment 108464 PARAMETER Experiment Name: At_Germinating_Seeds_cDNA_P Parameter: Age (day) Value: 4 vs. 0
  misc_feature: MA Experiment 108464 PARAMETER Experiment Name: At_Germinating_Seeds_cDNA_P Parameter: Tissue Value: Germinating Seeds
  misc_feature: MA Experiment ID: 108473 Result: Down-regulated in Transcription
  misc_feature: MA Experiment 108473 PARAMETER Experiment Name: At_Drought_Flowers_cDNA_P Parameter: Timepoint (hr) Value: 7 d
  misc_feature: MA Experiment 108473 PARAMETER Experiment Name: At_Drought_Flowers_cDNA_P Parameter: Tissue Value: Flower
  misc_feature: MA Experiment 108473 PARAMETER Experiment Name: At_Drought_Flowers_cDNA_P Parameter: Treatment Value: Drought vs. No Drought
  misc_feature: MA Experiment ID: 108594 Result: Down-regulated in Transcription
  misc_feature: MA Experiment 108594 PARAMETER Experiment Name: At_Ler-rhl_Root_cDNA_P Parameter: Plant Line Value: null
  misc_feature: MA Experiment ID: 20000068 Result: Up-regulated in Transcription
  misc_feature: MA Experiment ID: 20000071 Result: Down-regulated in Transcription
  misc_feature: MA Experiment 20000071 PARAMETER Experiment Name: At_100uM_ABA_Mutants_cDNA_P Parameter: Plant Line Value: CS8104
  misc_feature: MA Experiment 20000071 PARAMETER Experiment Name: At_100uM_ABA_Mutants_cDNA_P Parameter: Timepoint (hr) Value: 6
  misc_feature: MA Experiment 20000071 PARAMETER Experiment Name: At_100uM_ABA_Mutants_cDNA_P Parameter: Tissue Value: Aerial
  misc_feature: MA Experiment 20000071 PARAMETER Experiment Name: At_100uM_ABA_Mutants_cDNA_P Parameter: Treatment Value: 100uM ABA vs. No Treatment
  misc_feature: MA Experiment ID: 20000087 Result: Down-regulated in Transcription
  misc_feature: MA Experiment 20000087 PARAMETER Experiment Name: At_100uM_ABA_Mutants_cDNA_P Parameter: Plant Line Value: WS
  misc_feature: MA Experiment 20000087 PARAMETER Experiment Name: At_100uM_ABA_Mutants_cDNA_P Parameter: Timepoint (hr) Value: 6
  misc_feature: MA Experiment 20000087 PARAMETER Experiment Name: At_100uM_ABA_Mutants_cDNA_P Parameter: Tissue Value: Aerial
  misc_feature: MA Experiment 20000087 PARAMETER Experiment Name: At_100uM_ABA_Mutants_cDNA_P Parameter: Treatment Value: 100uM ABA vs. No Treatment
  misc_feature: MA Experiment ID: 20000089 Result: Down-regulated in Transcription
  misc_feature: MA Experiment ID: 20000090 Result: Down-regulated in Transcription
  misc_feature: MA Experiment ID: 20000117 Result: Down-regulated in Transcription
  misc_feature: MA Experiment 20000117 PARAMETER Experiment Name: At_100uM_ABA_Mutants_cDNA_P Parameter: Plant Line Value: Columbia
  misc_feature: MA Experiment 20000117 PARAMETER Experiment Name: At_100uM_ABA_Mutants_cDNA_P Parameter: Timepoint (hr) Value: 6
  misc_feature: MA Experiment 20000117 PARAMETER Experiment Name: At_100uM_ABA_Mutants_cDNA_P Parameter: Tissue Value: Aerial
  misc_feature: MA Experiment 20000117 PARAMETER Experiment Name: At_100uM_ABA_Mutants_cDNA_P Parameter: Treatment Value: 100uM ABA vs. No Treatment
  misc_feature: MA Experiment ID: 20000184 Result: Up-regulated in Transcription
  misc_feature: MA Experiment 20000184 PARAMETER Experiment Name: At_Shoots__P Parameter: Age (day) Value: 7
  misc_feature: MA Experiment 20000184 PARAMETER Experiment Name: At_Shoots__P Parameter: Tissue Value: Shoots vs. Whole Plant
  misc_feature: MA Experiment ID: 20000185 Result: Up-regulated in Transcription
  misc_feature: MA Experiment 20000185 PARAMETER Experiment Name: At_Roots__P Parameter: Age (day) Value: 7 vs. 21
  misc_feature: MA Experiment 20000185 PARAMETER Experiment Name: At_Roots__P Parameter: Organism Value: A. thaliana
  misc_feature: MA Experiment 20000185 PARAMETER Experiment Name: At_Roots__P Parameter: Tissue Value: Roots vs. Whole Plant
  misc_feature: MA Experiment ID: 20000227 Result: Up-regulated in Transcription
  misc_feature: MA Experiment 20000227 PARAMETER Experiment Name: At_Root-Tips-vs-Tops_P Parameter: Tissue Value: Root Tips vs. Root Tops
  misc_feature: MA Experiment ID: 20000438 Result: Up-regulated in Transcription
  misc_feature: MA Experiment 20000438 PARAMETER Experiment Name: At_Shoots__P Parameter: Age (day) Value: 14
  misc_feature: MA Experiment 20000438 PARAMETER Experiment Name: At_Shoots__P Parameter: Tissue Value: Shoots vs. Whole Plant
  misc_feature: MA Experiment ID: 20000439 Result: Up-regulated in Transcription
  misc_feature: MA Experiment 20000439 PARAMETER Experiment Name: At_Roots__P Parameter: Age (day) Value: 14 vs. 21
  misc_feature: MA Experiment 20000439 PARAMETER Experiment Name: At_Roots__P Parameter: Organism Value: A. thaliana
  misc_feature: MA Experiment 20000439 PARAMETER Experiment Name: At_Roots__P Parameter: Tissue Value: Roots vs. Whole Plant
  misc_feature: MA Experiment ID: 20000527 Result: Down-regulated in Transcription
  misc_feature: MA Experiment 20000527 PARAMETER Experiment Name: At_10percent_PEG_P Parameter: Age (day) Value: 20
  misc_feature: MA Experiment 20000527 PARAMETER Experiment Name: At_10percent_PEG_P Parameter: Organism Value: A. thaliana
  misc_feature: MA Experiment 20000527 PARAMETER Experiment Name: At_10percent_PEG_P Parameter: Plant Line Value: WS
  misc_feature: MA Experiment 20000527 PARAMETER Experiment Name: At_10percent_PEG_P Parameter: Timepoint (day) Value: 20
  misc_feature: MA Experiment 20000527 PARAMETER Experiment Name: At_10percent_PEG_P Parameter: Tissue Value: Whole Plant
  misc_feature: MA Experiment 20000527 PARAMETER Experiment Name: At_10percent_PEG_P Parameter: Treatment Value: 10percent PEG vs. No Treatment
  misc_feature: MA Experiment ID: 20001248 Result: Down-regulated in Transcription
  misc_feature: MA Experiment 20001248 PARAMETER Experiment Name: At_Far-red-induction_P Parameter: Age (day) Value: 7
  misc_feature: MA Experiment 20001248 PARAMETER Experiment Name: At_Far-red-induction_P Parameter: Light Value: Far-red vs. White
  misc_feature: MA Experiment 20001248 PARAMETER Experiment Name: At_Far-red-induction_P Parameter: Organism Value: A. thaliana
  misc_feature: MA Experiment 20001248 PARAMETER Experiment Name: At_Far-red-induction_P Parameter: Plant Line Value: Columbia
  misc_feature: MA Experiment 20001248 PARAMETER Experiment Name: At_Far-red-induction_P Parameter: Timepoint (hr) Value: 4
  misc_feature: MA Experiment 20001248 PARAMETER Experiment Name: At_Far-red-induction_P Parameter: Tissue Value: Whole Plant
  misc_feature: MA Experiment ID: 20001906 Result: Up-regulated in Transcription
  misc_feature: MA Experiment 20001906 PARAMETER Experiment Name: At_Drought_Reproduction_P Parameter: Age (day) Value: 35
  misc_feature: MA Experiment 20001906 PARAMETER Experiment Name: At_Drought_Reproduction_P Parameter: Organism Value: A. thaliana
  misc_feature: MA Experiment 20001906 PARAMETER Experiment Name: At_Drought_Reproduction_P Parameter: Plant Line Value: WS
  misc_feature: MA Experiment 20001906 PARAMETER Experiment Name: At_Drought_Reproduction_P Parameter: Timepoint (day) Value: 5
  misc_feature: MA Experiment 20001906 PARAMETER Experiment Name: At_Drought_Reproduction_P Parameter: Tissue Value: Siliques
  misc_feature: MA Experiment 20001906 PARAMETER Experiment Name: At_Drought_Reproduction_P Parameter: Treatment Value: Drought vs. No Drought
tcacttctccactttttttctcggttagtgtcagtttttttgttggctagtctcttcggtcaaaatgcagctctttccggtcatcctaccgacactatgcgtcttcctccaccttctaataagtggctctggctctactccaccgttgactcactccaatcaacaagtggcagccactcgttggcttcccgccaccgcaacctggtacggaagtgccgagggagacggcagcagcggaggagcttgtggttacggatcgttggtggacgtgaagccgtttaaggctagagtcggagcggtgagtccgattctgttcaaaggtggtgaaggctgcggtgcatgctacaaggtcaggtgtctcgacaagaccatttgctctaagagagcagtcaccattattgccaccgaccagtcaccgtcaggaccatctgctaaagcaaaacacactcatttcgacctcagtggcgccgcctttggacatatggctattcccggccataacggtgtcatccgcaaccgtggcctattaaacatcctctaccgccgaacggcatgcaaatacagagggaagaacatagcgtttcatgtgaacgcaggatcaactgattattggttatcgcttctcattgagtatgaagacggtgaaggagacattggctctatgcacattcgtcaagcgggatctaaggagtggatatcgatgaagcacatatggggagcgaactggtgcatcgtcgaaggaccactcaagggaccattctccgtgaagctcacaactttgtccaacaataagacactctccgccaccgacgtcatccccagtaactgggttcccaaagctacttacacctctcgcctcaacttctcccctgttctctaattagcctctcttcaaaaaaattttgttgtgggagagaggaacacagagaagacaatgagtgagccatctccaaagttaggggattaagagcttttcattgtgtgtgtgactactaacattctatgttgtcccttttcatttttttccttctccatagggatgtgtgtatcatctataatgttgtttgtgggacattactatataagaatttacaaaagatgtaataatgtaatatgcaatctcattcctttttt

SEQ ID NO: 39731 - protein, 271 aa, Arabidopsis thaliana
  peptide (1)..(271): Ceres Seq. ID no. 13489092
  misc_feature (171)..(252): Pfam Name: Pollen allergen Pfam Description: Pollen allergen
  misc_feature (24)..(267): Homolog of NCBI NO: 12330698 NR Description: beta-expansin-like protein [Nicotiana tabacum]
  misc_feature (3)..(267): Homolog of NCBI NO: 20138423 NR Description: Putative beta-expansin 2 precursor (At-EXPB2)
  misc_feature (36)..(268): Homolog of NCBI NO: 1076486 NR Description: cim1 protein - soybean
  misc_feature (10)..(204): Homolog of NCBI NO: 21666634 NR Description: beta-expansin [Oryza sativa]
  misc_feature (10)..(271): Homolog of NCBI NO: 38346623 NR Description: OSJNBa0074L08.17 [Oryza sativa (japonica
  misc_feature (1)..(240): Homolog of NCBI NO: 7484871 NR Description: cim1 protein homolog F26K10.130 - Arabidopsis
  misc_feature (7)..(271): Homolog of NCBI NO: 21592834 NR Description: putative beta-expansin/allergen protein
  misc_feature (1)..(271): Homolog of NCBI NO: 18417157 NR Description: beta-expansin, putative (EXPB3) [Arabidopsis
  misc_feature (13)..(271): Homolog of NCBI NO: 11357194 NR Description: beta-expansin [imported] - Arabidopsis thaliana
  misc_feature (1)..(271): Homolog of NCBI NO: 15225423 NR Description: beta-expansin, putative (EXPB1) [Arabidopsis
MQLFPVILPTLCVFLHLLISGSGSTPPLTHSNQQVAATRWLPATATWYGSAEGDGSSGGACGYGSLVDVKPFKARVGAVSPILFKGGEGCGACYKVRCLDKTICSKRAVTIIATDQSPSGPSAKAKHTHFDLSGAAFGHMAIPGHNGVIRNRGLLNILYRRTACKYRGKNIAFHVNAGSTDYWLSLLIEYEDGEGDIGSMHIRQAGSKEWISMKHIWGANWCIVEGPLKGPFSVKLTTLSNNKTLSATDVIPSNWVPKATYTSRLNFSPVL

SEQ ID NO: 39732 - DNA, 1313 bp, Arabidopsis thaliana
  misc_feature (1)..(1313): Ceres Seq. ID no. 12328800
  misc_feature: MA Experiment ID: 108577 Result: Down-regulated in Transcription
  misc_feature: MA Experiment 108577 PARAMETER Experiment Name: At_42deg_Heat_cDNA_P Parameter: Temperature (deg C) Value: 42 vs. 22
  misc_feature: MA Experiment 108577 PARAMETER Experiment Name: At_42deg_Heat_cDNA_P Parameter: Timepoint (hr) Value: 6
  misc_feature: MA Experiment 108577 PARAMETER Experiment Name: At_42deg_Heat_cDNA_P Parameter: Tissue Value: Aerial
  misc_feature: MA Experiment ID: 20000224 Result: Down-regulated in Transcription
tttttttttgagtggtactgataggtacaagaaacacaacaaaccctagatttatcttcatctctctcaattctgtatcaagcaaagacggattcaacgatgtcttcacctgaatcaccttccggttccgactcatccacaccacttatccgttcacggcaatcatcaccacgtcgtcaacctgtaatcgcggttctattaaatcgagcttcaggacgacgaggagcttcgatggtggttagagaaacagctgcacaagagcttgaagagcgacgagctgattggggttactcgaaacctgttgttgctttggatatgctttggaacactgcttttgttcttgttgcgattgttatgcttttggtttttaaagaagagaagccaaatgttcctattaggatttggatctgtggttatgcgattcagtgtcttgttcatgttgtccttgtttggcttgagtttagaaagaggaatgctagaagcagacctggagatttagaagctgctcaagctacgaatcaggatagtgaagatgaagacaacgatgagaggtttctgagcactaagacttgtgaatcaatgaacactataatatcatttgtctggtggattgttggattctactggcttgtttctggtggtgatatccttctgcaaaacgcgacgcatttgtattggttaacctttgttttccttgcatttgatgtgttctttgccatcttttgcgttgtgctggcatgtcttattggaatcgccctctgttgttgcctaccttgtattattgctcttctttacgccgtcgcggggcaggagggtgcatcagaagcagatctcagcatccttcccaagtacaggtttcacacgatgaacaatgatgaaaagcaaagtgacggtggtgggaaaatgatacctgtggatgcagcgagtgagaatttaggaaacgagcgtgtgcttcttcccgaggatgctgactgttgtatatgtttgagttcatatgaagatggagcagagctggtctcacttccttgcaaccaccactttcattctacgtgcattgtgaaatggctgaaaatgaatgcgacatgtccactatgcaagttcaatatcctcaaaggtaatgaacaagaatgaagtaatgtagaggaaacttttcttctttttatgttgtgtttctttttgttgtatatagagtagagaaaaaagaaaatgattgtgttgtttgtaagtcataagacagtttgtttctttgttgaaatttgttgtcaattctctttttttttttatcaaataataatagatatattcatcatgtc

SEQ ID NO: 39733 - protein, 343 aa, Arabidopsis thaliana
  peptide (1)..(343): Ceres Seq. ID no. 12328801
  misc_feature (292)..(332): Pfam Name: Zinc finger, C3HC4 type (RING finger) Pfam Description: Zinc finger, C3HC4 type (RING finger)
  misc_feature (23)..(127): Homolog of NCBI NO: 9502381 NR Description: T12C24.29 [Arabidopsis thaliana]
  misc_feature (156)..(340): Homolog of NCBI NO: 9502381 NR Description: T12C24.29 [Arabidopsis thaliana]
  misc_feature (41)..(343): Homolog of NCBI NO: 38344371 NR Description: OSJNBb0032E06.5 [Oryza sativa (japonica
  misc_feature (1)..(340): Homolog of NCBI NO: 33146524 NR Description: putative RES protein [Oryza sativa (japonica
  misc_feature (291)..(343): Homolog of NCBI NO: 7487667 NR Description: hypothetical protein T5C23.110 - Arabidopsis
  misc_feature (8)..(290): Homolog of NCBI NO: 7487667 NR Description: hypothetical protein T5C23.110 - Arabidopsis
  misc_feature (8)..(343): Homolog of NCBI NO: 18413629 NR Description: putative protein
  misc_feature (3)..(343): Homolog of NCBI NO: 30677954 NR Description: RING zinc finger protein family [Arabidopsis
  misc_feature (1)..(343): Homolog of NCBI NO: 15220639 NR Description: putative RING zinc finger protein
  misc_feature (1)..(343): Homolog of NCBI NO: 21536719 NR Description: putative RING zinc finger protein [Arabidopsis
MSSPESPSGSDSSTPLIRSRQSSPRRQPVIAVLLNRASGRRGASMVVRETAAQELEERRADWGYSKPVVALDMLWNTAFVLVAIVMLLVFKEEKPNVPIRIWICGYAIQCLVHVVLVWLEFRKRNARSRPGDLEAAQATNQDSEDEDNDERFLSTKTCESMNTIISFVWWIVGFYWLVSGGDILLQNATHLYWLTFVFLAFDVFFAIFCVVLACLIGIALCCCLPCIIALLYAVAGQEGASEADLSILPKYRFHTMNNDEKQSDGGGKMIPVDAASENLGNERVLLPEDADCCICLSSYEDGAELVSLPCNHHFHSTCIVKWLKMNATCPLCKFNILKGNEQE

SEQ ID NO: 39734 - protein, 299 aa, Arabidopsis thaliana
  peptide (1)..(299): Ceres Seq. ID no. 12328802
  misc_feature (248)..(288): Pfam Name: Zinc finger, C3HC4 type (RING finger) Pfam Description: Zinc finger, C3HC4 type (RING finger)
  misc_feature (1)..(83): Homolog of NCBI NO: 9502381 NR Description: T12C24.29 [Arabidopsis thaliana]
  misc_feature (112)..(296): Homolog of NCBI NO: 9502381 NR Description: T12C24.29 [Arabidopsis thaliana]
  misc_feature (1)..(299): Homolog of NCBI NO: 38344371 NR Description: OSJNBb0032E06.5 [Oryza sativa (japonica
  misc_feature (1)..(296): Homolog of NCBI NO: 33146524 NR Description: putative RES protein [Oryza sativa (japonica
  misc_feature (247)..(299): Homolog of NCBI NO: 7487667 NR Description: hypothetical protein T5C23.110 - Arabidopsis
  misc_feature (1)..(246): Homolog of NCBI NO: 7487667 NR Description: hypothetical protein T5C23.110 - Arabidopsis
  misc_feature (1)..(299): Homolog of NCBI NO: 18413629 NR Description: putative protein
  misc_feature (1)..(299): Homolog of NCBI NO: 30677954 NR Description: RING zinc finger protein family [Arabidopsis
  misc_feature (1)..(299): Homolog of NCBI NO: 15220639 NR Description: putative RING zinc finger protein
  misc_feature (1)..(299): Homolog of NCBI NO: 21536719 NR Description: putative RING zinc finger protein [Arabidopsis
MVVRETAAQELEERRADWGYSKPVVALDMLWNTAFVLVAIVMLLVFKEEKPNVPIRIWICGYAIQCLVHVVLVWLEFRKRNARSRPGDLEAAQATNQDSEDEDNDERFLSTKTCESMNTIISFVWWIVGFYWLVSGGDILLQNATHLYWLTFVFLAFDVFFAIFCVVLACLIGIALCCCLPCIIALLYAVAGQEGASEADLSILPKYRFHTMNNDEKQSDGGGKMIPVDAASENLGNERVLLPEDADCCICLSSYEDGAELVSLPCNHHFHSTCIVKWLKMNATCPLCKFNILKGNEQE

SEQ ID NO: 39735 - protein, 271 aa, Arabidopsis thaliana
  peptide (1)..(271): Ceres Seq. ID no. 12328803
  misc_feature (220)..(260): Pfam Name: Zinc finger, C3HC4 type (RING finger) Pfam Description: Zinc finger, C3HC4 type (RING finger)
  misc_feature (1)..(55): Homolog of NCBI NO: 9502381 NR Description: T12C24.29 [Arabidopsis thaliana]
  misc_feature (84)..(268): Homolog of NCBI NO: 9502381 NR Description: T12C24.29 [Arabidopsis thaliana]
  misc_feature (1)..(271): Homolog of NCBI NO: 38344371 NR Description: OSJNBb0032E06.5 [Oryza sativa (japonica
  misc_feature (1)..(268): Homolog of NCBI NO: 33146524 NR Description: putative RES protein [Oryza sativa (japonica
  misc_feature (219)..(271): Homolog of NCBI NO: 7487667 NR Description: hypothetical protein T5C23.110 - Arabidopsis
  misc_feature (1)..(218): Homolog of NCBI NO: 7487667 NR Description: hypothetical protein T5C23.110 - Arabidopsis
  misc_feature (1)..(271): Homolog of NCBI NO: 18413629 NR Description: putative protein
  misc_feature (1)..(271): Homolog of NCBI NO: 30677954 NR Description: RING zinc finger protein family [Arabidopsis
  misc_feature (1)..(271): Homolog of NCBI NO: 15220639 NR Description: putative RING zinc finger protein
  misc_feature (1)..(271): Homolog of NCBI NO: 21536719 NR Description: putative RING zinc finger protein [Arabidopsis
MLWNTAFVLVAIVMLLVFKEEKPNVPIRIWICGYAIQCLVHVVLVWLEFRKRNARSRPGDLEAAQATNQDSEDEDNDERFLSTKTCESMNTIISFVWWIVGFYWLVSGGDILLQNATHLYWLTFVFLAFDVFFAIFCVVLACLIGIALCCCLPCIIALLYAVAGQEGASEADLSILPKYRFHTMNNDEKQSDGGGKMIPVDAASENLGNERVLLPEDADCCICLSSYEDGAELVSLPCNHHFHSTCIVKWLKMNATCPLCKFNILKGNEQE

SEQ ID NO: 39736 - DNA, 1683 bp, Arabidopsis thaliana
  misc_feature (1)..(1683): Ceres Seq. ID no. 13491363
  misc_feature: MA Experiment ID: 108488 Result: Down-regulated in Transcription
  misc_feature: MA Experiment ID: 108579 Result: Up-regulated in Transcription
  misc_feature: MA Experiment 108579 PARAMETER Experiment Name: At_4deg_Cold_cDNA_P Parameter: Temperature (deg C) Value: 4 vs. 22
  misc_feature: MA Experiment 108579 PARAMETER Experiment Name: At_4deg_Cold_cDNA_P Parameter: Timepoint (hr) Value: 6
  misc_feature: MA Experiment 108579 PARAMETER Experiment Name: At_4deg_Cold_cDNA_P Parameter: Tissue Value: Aerial
  misc_feature: MA Experiment ID: 108595 Result: Up-regulated in Transcription
  misc_feature: MA Experiment 108595 PARAMETER Experiment Name: At_Ler-pi_Ovule_cDNA_P Parameter: Plant Line Value: null
  misc_feature: MA Experiment ID: 20000227 Result: Down-regulated in Transcription
  misc_feature: MA Experiment 20000227 PARAMETER Experiment Name: At_Root-Tips-vs-Tops_P Parameter: Tissue Value: Root Tips vs. Root Tops
  misc_feature: MA Experiment ID: 20000234 Result: Down-regulated in Transcription
  misc_feature: MA Experiment 20000234 PARAMETER Experiment Name: At_Siliques_P Parameter: Age (day) Value: 21
  misc_feature: MA Experiment 20000234 PARAMETER Experiment Name: At_Siliques_P Parameter: Organism Value: A. thaliana
  misc_feature: MA Experiment 20000234 PARAMETER Experiment Name: At_Siliques_P Parameter: Plant Line Value: WS
  misc_feature: MA Experiment 20000234 PARAMETER Experiment Name: At_Siliques_P Parameter: Tissue Value: Less Than 5mm Siliques vs. Whole Plant
  misc_feature: MA Experiment ID: 20000527 Result: Down-regulated in Transcription
  misc_feature: MA Experiment 20000527 PARAMETER Experiment Name: At_10percent_PEG_P Parameter: Age (day) Value: 20
  misc_feature: MA Experiment 20000527 PARAMETER Experiment Name: At_10percent_PEG_P Parameter: Organism Value: A. thaliana
  misc_feature: MA Experiment 20000527 PARAMETER Experiment Name: At_10percent_PEG_P Parameter: Plant Line Value: WS
  misc_feature: MA Experiment 20000527 PARAMETER Experiment Name: At_10percent_PEG_P Parameter: Timepoint (day) Value: 20
  misc_feature: MA Experiment 20000527 PARAMETER Experiment Name: At_10percent_PEG_P Parameter: Tissue Value: Whole Plant
  misc_feature: MA Experiment 20000527 PARAMETER Experiment Name: At_10percent_PEG_P Parameter: Treatment Value: 10percent PEG vs. No Treatment
atggctggaggagagaaaagaagaggacttagtaaatcttgtgctcttctcatagtgattgctgggatagagagatatgcattcaaaggagttgcatcaaacttagtgacatatctaactgatgtagtgaagatgagcaattcaagagcagccacgactgtgaacacttggagtggcttcactttcatgttgcctctcttctctgctccttttgccgattcttattgggacagattcttcaccatccttgcttcttcttctctctactttgtgggtctagtgggattgacatttacggcatttgctgggtcacgttcgactacaaaaacaatctctctttacttcctctacacttcactttccctcgtcgctctaggccttggcgtcttaaacccatctctacaagcctttggtgctgaccagctcgactacgaccttgaccatgacaatgaccacgagccatcctcagagaacaaagaagtcaaatcgaaccgcaagactcagtttttccaatggtggtattttggtgtctgcgccggtagtcttctaggagtcaccgtcatggcttacatccaagacacgtttggatgggttatcggttttgcaatcccaaccgcttcgatgttgttgttgatcttcttgttcttgtgtggctgcggggtctatgtttatgctgatccagacctcaaagctaaaccatttcaaaggatattagagattatcaaagaaagagtgtgtggaagaaataagatcactcttgttaacgaccacgatttaaatgccatggaactagagctgcaagatcagaagcctctatgtaactgtagcaacactgaagctaatactactaccaagagcttacctgatgatcataaaagctgcaaaaccggtttttcggggcttgaaaccgtcaagctattgcttcgacttttacctatatggacgatgcttcttatgtttgcagttatattccaacaacccgcgacctttttcacaaagcaaggtatgactatgaagagaaacatcggaccaaacttcaagatcccaccagcaacactacaaagcactatcactttatccataatccttcttatgcccttctacgacaaaatcttgataccgatcgccaaaaaactaacgaaaaacgaaaagggtatttctgtgaaggaaagaatggggattgggatgttcctgtccatcatcgccattgttattgccgcgttagtcgaaagaaaaagactaaagataagcaaaatgatgaagactacacctaatttggaccccgtaagcatattgtggctcctacctcagtacattctattgggaatctcggacattttcacagttgttggaatgcaagagttcttctacagcgaggttcctgttagcatgagaacaatgggatttgctttgtacacaagcgttttcggtgtggggagttttgtgagtgctgcgttgatttcgataatagagacttacacgagctcaagaggtggaaaacataactggtttgcagatgatatgtcggaagctagacttgataactattattggcttttggctttcacaagtgctattagcttcttgatgtatattgttatttgcaagcatttcaagagtagaagtgatgatgatgatcaatgtgatacaaattgttaataaactaaagaaacacctcttttt

SEQ ID NO: 39737 - protein, 552 aa, Arabidopsis thaliana
  peptide (1)..(552): Ceres Seq. ID no. 13491364
  misc_feature (79)..(476): Pfam Name: POT family Pfam Description: POT family
  misc_feature (12)..(237): Homolog of NCBI NO: 34908690 NR Description: P0039A07.26 [Oryza sativa (japonica
  misc_feature (301)..(549): Homolog of NCBI NO: 34908690 NR Description: P0039A07.26 [Oryza sativa (japonica
  misc_feature (3)..(544): Homolog of NCBI NO: 15218352 NR Description: oligopeptide transporter -related [Arabidopsis
  misc_feature (9)..(225): Homolog of NCBI NO: 15218381 NR Description: peptide transporter PTR2-B -related [Arabidopsis
  misc_feature (301)..(538): Homolog of NCBI NO: 15218381 NR Description: peptide transporter PTR2-B -related [Arabidopsis
  misc_feature (15)..(544): Homolog of NCBI NO: 18086410 NR Description: At1g72120/F28P5_2 [Arabidopsis thaliana]
  misc_feature (12)..(544): Homolog of NCBI NO: 25402970 NR Description: Similar to peptide transporter [imported] -
  misc_feature (12)..(544): Homolog of NCBI NO: 30687920 NR Description: oligopeptide transporter -related [Arabidopsis
  misc_feature (5)..(547): Homolog of NCBI NO: 15232096 NR Description: peptide transporter -related [Arabidopsis
  misc_feature (1)..(552): Homolog of NCBI NO: 15242171 NR Description: oligopeptide transporter -related protein
MAGGEKRRGLSKSCALLIVIAGIERYAFKGVASNLVTYLTDVVKMSNSRAATTVNTWSGFTFMLPLFSAPFADSYWDRFFTILASSSLYFVGLVGLTFTAFAGSRSTTKTISLYFLYTSLSLVALGLGVLNPSLQAFGADQLDYDLDHDNDHEPSSENKEVKSNRKTQFFQWWYFGVCAGSLLGVTVMAYIQDTFGWVIGFAIPTASMLLLIFLFLCGCGVYVYADPDLKAKPFQRILEIIKERVCGRNKITLVNDHDLNAMELELQDQKPLCNCSNTEANTTTKSLPDDHKSCKTGFSGLETVKLLLRLLPIWTMLLMFAVIFQQPATFFTKQGMTMKRNIGPNFKIPPATLQSTITLSIILLMPFYDKILIPIAKKLTKNEKGISVKERMGIGMFLSIIAIVIAALVERKRLKISKMMKTTPNLDPVSILWLLPQYILLGISDIFTVVGMQEFFYSEVPVSMRTMGFALYTSVFGVGSFVSAALISIIETYTSSRGGKHNWFADDMSEARLDNYYWLLAFTSAISFLMYIVICKHFKSRSDDDDQCDTNC

SEQ ID NO: 39738 - protein, 508 aa, Arabidopsis thaliana
  peptide (1)..(508): Ceres Seq. ID no. 13491365
  misc_feature (35)..(432): Pfam Name: POT family Pfam Description: POT family
  misc_feature (1)..(193): Homolog of NCBI NO: 34908690 NR Description: P0039A07.26 [Oryza sativa (japonica
  misc_feature (257)..(505): Homolog of NCBI NO: 34908690 NR Description: P0039A07.26 [Oryza sativa (japonica
  misc_feature (1)..(500): Homolog of NCBI NO: 15218352 NR Description: oligopeptide transporter -related [Arabidopsis
  misc_feature (1)..(181): Homolog of NCBI NO: 15218381 NR Description: peptide transporter PTR2-B -related [Arabidopsis
  misc_feature (257)..(494): Homolog of NCBI NO: 15218381 NR Description: peptide transporter PTR2-B -related [Arabidopsis
  misc_feature (1)..(500): Homolog of NCBI NO: 18086410 NR Description: At1g72120/F28P5_2 [Arabidopsis thaliana]
  misc_feature (1)..(500): Homolog of NCBI NO: 25402970 NR Description: Similar to peptide transporter [imported] -
  misc_feature (1)..(500): Homolog of NCBI NO: 30687920 NR Description: oligopeptide transporter -related [Arabidopsis
  misc_feature (1)..(503): Homolog of NCBI NO: 15232096 NR Description: peptide transporter -related [Arabidopsis
  misc_feature (1)..(508): Homolog of NCBI NO: 15242171 NR Description: oligopeptide transporter -related protein
MSNSRAATTVNTWSGFTFMLPLFSAPFADSYWDRFFTILASSSLYFVGLVGLTFTAFAGSRSTTKTISLYFLYTSLSLVALGLGVLNPSLQAFGADQLDYDLDHDNDHEPSSENKEVKSNRKTQFFQWWYFGVCAGSLLGVTVMAYIQDTFGWVIGFAIPTASMLLLIFLFLCGCGVYVYADPDLKAKPFQRILEIIKERVCGRNKITLVNDHDLNAMELELQDQKPLCNCSNTEANTTTKSLPDDHKSCKTGFSGLETVKLLLRLLPIWTMLLMFAVIFQQPATFFTKQGMTMKRNIGPNFKIPPATLQSTITLSIILLMPFYDKILIPIAKKLTKNEKGISVKERMGIGMFLSIIAIVIAALVERKRLKISKMMKTTPNLDPVSILWLLPQYILLGISDIFTVVGMQEFFYSEVPVSMRTMGFALYTSVFGVGSFVSAALISIIETYTSSRGGKHNWFADDMSEARLDNYYWLLAFTSAISFLMYIVICKHFKSRSDDDDQCDTNC

SEQ ID NO: 39739 - protein, 490 aa, Arabidopsis thaliana
  peptide (1)..(490): Ceres Seq. ID no. 13491366
  misc_feature (17)..(414): Pfam Name: POT family Pfam Description: POT family
  misc_feature (1)..(175): Homolog of NCBI NO: 34908690 NR Description: P0039A07.26 [Oryza sativa (japonica
  misc_feature (239)..(487): Homolog of NCBI NO: 34908690 NR Description: P0039A07.26 [Oryza sativa (japonica
  misc_feature (1)..(482): Homolog of NCBI NO: 15218352 NR Description: oligopeptide transporter -related [Arabidopsis
  misc_feature (1)..(163): Homolog of NCBI NO: 15218381 NR Description: peptide transporter PTR2-B -related [Arabidopsis
  misc_feature (239)..(476): Homolog of NCBI NO: 15218381 NR Description: peptide transporter PTR2-B -related [Arabidopsis
  misc_feature (1)..(482): Homolog of NCBI NO: 18086410 NR Description: At1g72120/F28P5_2 [Arabidopsis thaliana]
  misc_feature (1)..(482): Homolog of NCBI NO: 25402970 NR Description: Similar to peptide transporter [imported] -
  misc_feature (1)..(482): Homolog of NCBI NO: 30687920 NR Description: oligopeptide transporter -related [Arabidopsis
  misc_feature (1)..(485): Homolog of NCBI NO: 15232096 NR Description: peptide transporter -related [Arabidopsis
  misc_feature (1)..(490): Homolog of NCBI NO: 15242171 NR Description: oligopeptide transporter -related protein
MLPLFSAPFADSYWDRFFTILASSSLYFVGLVGLTFTAFAGSRSTTKTISLYFLYTSLSLVALGLGVLNPSLQAFGADQLDYDLDHDNDHEPSSENKEVKSNRKTQFFQWWYFGVCAGSLLGVTVMAYIQDTFGWVIGFAIPTASMLLLIFLFLCGCGVYVYADPDLKAKPFQRILEIIKERVCGRNKITLVNDHDLNAMELELQDQKPLCNCSNTEANTTTKSLPDDHKSCKTGFSGLETVKLLLRLLPIWTMLLMFAVIFQQPATFFTKQGMTMKRNIGPNFKIPPATLQSTITLSIILLMPFYDKILIPIAKKLTKNEKGISVKERMGIGMFLSIIAIVIAALVERKRLKISKMMKTTPNLDPVSILWLLPQYILLGISDIFTVVGMQEFFYSEVPVSMRTMGFALYTSVFGVGSFVSAALISIIETYTSSRGGKHNWFADDMSEARLDNYYWLLAFTSAISFLMYIVICKHFKSRSDDDDQCDTNC

SEQ ID NO: 39740 - DNA, 1422 bp, Arabidopsis thaliana
  misc_feature (1)..(1422): Ceres Seq. ID no. 12328804
  misc_feature: MA Experiment ID: 108434 Result: Down-regulated in Transcription
  misc_feature: MA Experiment 108434 PARAMETER Experiment Name: At_Root_Tips_cDNA_P Parameter: Tissue Value: Root Tips
  misc_feature: MA Experiment ID: 108461 Result: Up-regulated in Transcription
  misc_feature: MA Experiment 108461 PARAMETER Experiment Name: At_Germinating_Seeds_cDNA_P Parameter: Age (day) Value: 1 vs. 0
  misc_feature: MA Experiment 108461 PARAMETER Experiment Name: At_Germinating_Seeds_cDNA_P Parameter: Tissue Value: Germinating Seeds
  misc_feature: MA Experiment ID: 108464 Result: Up-regulated in Transcription
  misc_feature: MA Experiment 108464 PARAMETER Experiment Name: At_Germinating_Seeds_cDNA_P Parameter: Age (day) Value: 4 vs. 0
  misc_feature: MA Experiment 108464 PARAMETER Experiment Name: At_Germinating_Seeds_cDNA_P Parameter: Tissue Value: Germinating Seeds
  misc_feature: MA Experiment ID: 108561 Result: Up-regulated in Transcription
  misc_feature: MA Experiment 108561 PARAMETER Experiment Name: At_100uM_ABA_cDNA_P Parameter: Timepoint (hr) Value: 6
  misc_feature: MA Experiment 108561 PARAMETER Experiment Name: At_100uM_ABA_cDNA_P Parameter: Tissue Value: Aerial
  misc_feature: MA Experiment 108561 PARAMETER Experiment Name: At_100uM_ABA_cDNA_P Parameter: Treatment Value: 100uM ABA vs. No Treatment
  misc_feature: MA Experiment ID: 108573 Result: Up-regulated in Transcription
  misc_feature: MA Experiment 108573 PARAMETER Experiment Name: At_Drought_cDNA_P Parameter: Timepoint (hr) Value: 6
  misc_feature: MA Experiment 108573 PARAMETER Experiment Name: At_Drought_cDNA_P Parameter: Tissue Value: Aerial
  misc_feature: MA Experiment 108573 PARAMETER Experiment Name: At_Drought_cDNA_P Parameter: Treatment Value: Drought vs. No Drought
  misc_feature: MA Experiment ID: 108668 Result: Up-regulated in Transcription
  misc_feature: MA Experiment 108668 PARAMETER Experiment Name: At_2mM_SA_cDNA_P Parameter: Plant Line Value: WS
  misc_feature: MA Experiment 108668 PARAMETER Experiment Name: At_2mM_SA_cDNA_P Parameter: Timepoint (hr) Value: 6
  misc_feature: MA Experiment 108668 PARAMETER Experiment Name: At_2mM_SA_cDNA_P Parameter: Treatment Value: 2mM SA vs. No Treatment
  misc_feature: MA Experiment ID: 20000072 Result: Up-regulated in Transcription
  misc_feature: MA Experiment 20000072 PARAMETER Experiment Name: At_100uM_ABA_Mutants_cDNA_P Parameter: Plant Line Value: CS8105
  misc_feature: MA Experiment 20000072 PARAMETER Experiment Name: At_100uM_ABA_Mutants_cDNA_P Parameter: Timepoint (hr) Value: 6
  misc_feature: MA Experiment 20000072 PARAMETER Experiment Name: At_100uM_ABA_Mutants_cDNA_P Parameter: Tissue Value: Aerial
  misc_feature: MA Experiment 20000072 PARAMETER Experiment Name: At_100uM_ABA_Mutants_cDNA_P Parameter: Treatment Value: 100uM ABA vs. No Treatment
  misc_feature: MA Experiment ID: 20000087 Result: Up-regulated in Transcription
  misc_feature: MA Experiment 20000087 PARAMETER Experiment Name: At_100uM_ABA_Mutants_cDNA_P Parameter: Plant Line Value: WS
  misc_feature: MA Experiment 20000087 PARAMETER Experiment Name: At_100uM_ABA_Mutants_cDNA_P Parameter: Timepoint (hr) Value: 6
  misc_feature: MA Experiment 20000087 PARAMETER Experiment Name: At_100uM_ABA_Mutants_cDNA_P Parameter: Tissue Value: Aerial
  misc_feature: MA Experiment 20000087 PARAMETER Experiment Name: At_100uM_ABA_Mutants_cDNA_P Parameter: Treatment Value: 100uM ABA vs. No Treatment
  misc_feature: MA Experiment ID: 20000180 Result: Up-regulated in Transcription
  misc_feature: MA Experiment 20000180 PARAMETER Experiment Name: At_Germinating_Seeds_P Parameter: Age (hr) Value: 24 vs. 0
  misc_feature: MA Experiment 20000180 PARAMETER Experiment Name: At_Germinating_Seeds_P Parameter: Tissue Value: Germinating Seeds
  misc_feature: MA Experiment ID: 20000185 Result: Up-regulated in Transcription
  misc_feature: MA Experiment 20000185 PARAMETER Experiment Name: At_Roots__P Parameter: Age (day) Value: 7 vs. 21
  misc_feature: MA Experiment 20000185 PARAMETER Experiment Name: At_Roots__P Parameter: Organism Value: A. thaliana
  misc_feature: MA Experiment 20000185 PARAMETER Experiment Name: At_Roots__P Parameter: Tissue Value: Roots vs. Whole Plant
  misc_feature: MA Experiment ID: 20000437 Result: Up-regulated in Transcription
  misc_feature: MA Experiment 20000437 PARAMETER Experiment Name: At_Drought_P Parameter: Age (day) Value: 8
  misc_feature: MA Experiment 20000437 PARAMETER Experiment Name: At_Drought_P Parameter: Organism Value: A. thaliana
  misc_feature: MA Experiment 20000437 PARAMETER Experiment Name: At_Drought_P Parameter: Plant Line Value: WS
  misc_feature: MA Experiment 20000437 PARAMETER Experiment Name: At_Drought_P Parameter: Timepoint (hr) Value: 24
  misc_feature: MA Experiment 20000437 PARAMETER Experiment Name: At_Drought_P Parameter: Tissue Value: Whole Plant
  misc_feature: MA Experiment 20000437 PARAMETER Experiment Name: At_Drought_P Parameter: Treatment Value: Drought vs. No Drought
  misc_feature: MA Experiment ID: 20001905 Result: Up-regulated in Transcription
  misc_feature: MA Experiment 20001905 PARAMETER Experiment Name: At_Drought_Reproduction_P Parameter: Age (day) Value: 40
  misc_feature: MA Experiment 20001905 PARAMETER Experiment Name: At_Drought_Reproduction_P Parameter: Organism Value: A. thaliana
  misc_feature: MA Experiment 20001905 PARAMETER Experiment Name: At_Drought_Reproduction_P Parameter: Plant Line Value: WS
  misc_feature: MA Experiment 20001905 PARAMETER Experiment Name: At_Drought_Reproduction_P Parameter: Timepoint (day) Value: 10
  misc_feature: MA Experiment 20001905 PARAMETER Experiment Name: At_Drought_Reproduction_P Parameter: Tissue Value: Rosettes
  misc_feature: MA Experiment 20001905 PARAMETER Experiment Name: At_Drought_Reproduction_P Parameter: Treatment Value: Drought vs. No Drought
  misc_feature: MA Experiment ID: 20001911 Result: Up-regulated in Transcription
  misc_feature: MA Experiment 20001911 PARAMETER Experiment Name: At_Drought_Reproduction_P Parameter: Age (day) Value: 40
  misc_feature: MA Experiment 20001911 PARAMETER Experiment Name: At_Drought_Reproduction_P Parameter: Organism Value: A. thaliana
  misc_feature: MA Experiment 20001911 PARAMETER Experiment Name: At_Drought_Reproduction_P Parameter: Plant Line Value: WS
  misc_feature: MA Experiment 20001911 PARAMETER Experiment Name: At_Drought_Reproduction_P Parameter: Timepoint (day) Value: 10
  misc_feature: MA Experiment 20001911 PARAMETER Experiment Name: At_Drought_Reproduction_P Parameter: Tissue Value: Flowers
  misc_feature: MA Experiment 20001911 PARAMETER Experiment Name: At_Drought_Reproduction_P Parameter: Treatment Value: Drought vs. No Drought
acgttacgtattagcttatagccattagttttgtctcttcttcttcttctcgttggtcggcttcttcgtcttactaattccatgattcttcttcttccttctgcttcactttctcgatgatcctctgcaccagccgcgatcatgacgttgaatcctcctccgtcgcagcaaacgtctcactcgccgcgtcggattcccaatcgccgcgttctcatcgtcggaaattattgccacgacgttttaatccaaaacggatccgtcgtagctgaaactctcggcggcgccgcctctttcatatctaatgtcttagattcttcctctgtctcctgcgatttggtctccaaagtaggacacgacttcagatacgaggtcacccactctccgatcgtggctccggagaaggaaacaacagttttcgaggcgtatttcgatctgggaatcgatgggatcggtcatgctgatcgggtgttgaaaagagtctctgcatgtgatccgattcttccttcggatatacccgattcgagatttgatttcggaatggccgttggagtcggcggcgagattttaccggagacgcttgagaaaatggtggagatctgtgacgttgttgctgtggatattcaagctttgattagggtttttgatcctgttgacggagctgtgaagcttgttgatttgaaagaaagtggattttatcacatcttgcatcgaattggattcttgaaagcttcgtcagacgaagctcttttcatggatgttgaacaaatgaagcacttgtgttgtgtggtggtgactaatggtgaaaaagggtgtaggatttatcataaggatgatgaaatgacggttcctccgttcttggcgaagcaggtggatcctaccggtgccggagacagctttctcggaggtttgattgttgggcttgttgaaggtttgactgttcctgatgctgcattgttagggaacctctttggttccatcactgtagagcatattggtcagccaaagttcgatttgatgatgcttcagaaagtcaaggatgaggtacagagaaggaagaagcagtgtaacatatctagcagccataacaacgatcacaacgagttccatgagcgtctaagtccagctcggttttcatgcgtagactctcaacttcaaccaaagttattggtcaatggtcactcttgtgatgatcggtccctgtgaatacgaatcttgaatcaccttttttttactaacaaagctcttctgagttgtgtaagcttgcttcaacacgttgatgaattttggaaattttaatgtataaaacgcgttgaccagcgtcttcaaacgctctttctggtcgttcccgcaaagtttgtttatcaactccgcgtttcaaaattcgaaatgaagatgtcaaattttgttttaaaagttttggat

SEQ ID NO: 39741 - protein, 353 aa, Arabidopsis thaliana
  peptide (1)..(353): Ceres Seq. ID no. 12328805
  misc_feature (20)..(294): Pfam Name: pfkB family carbohydrate kinase Pfam Description: pfkB family carbohydrate kinase
  misc_feature (187)..(289): Homolog of NCBI NO: 11498013 NR Description: carbohydrate kinase, pfkB family [Archaeoglobus
  misc_feature (220)..(290): Homolog of NCBI NO: 23116680 NR Description: hypothetical protein [Desulfitobacterium
  misc_feature (24)..(296): Homolog of NCBI NO: 31126792 NR Description: unknown protein [Oryza sativa (japonica
  misc_feature (24)..(353): Homolog of NCBI NO: 29788872 NR Description: unknown protein [Oryza sativa (japonica
  misc_feature (1)..(295): Homolog of NCBI NO: 8843793 NR Description: gene_id:MZN1.17~pir||T01971~similar to unknown
  misc_feature (1)..(353): Homolog of NCBI NO: 15237741 NR Description: putative protein
MTLNPPPSQQTSHSPRRIPNRRVLIVGNYCHDVLIQNGSVVAETLGGAASFISNVLDSSSVSCDLVSKVGHDFRYEVTHSPIVAPEKETTVFEAYFDLGIDGIGHADRVLKRVSACDPILPSDIPDSRFDFGMAVGVGGEILPETLEKMVEICDVVAVDIQALIRVFDPVDGAVKLVDLKESGFYHILHRIGFLKASSDEALFMDVEQMKHLCCVVVTNGEKGCRIYHKDDEMTVPPFLAKQVDPTGAGDSFLGGLIVGLVEGLTVPDAALLGNLFGSITVEHIGQPKFDLMMLQKVKDEVQRRKKQCNISSSHNNDHNEFHERLSPARFSCVDSQLQPKLLVNGHSCDDRSL

SEQ ID NO: 39742 - protein, 221 aa, Arabidopsis thaliana
  peptide (1)..(221): Ceres Seq. ID no. 12328806
  misc_feature (1)..(162): Pfam Name: pfkB family carbohydrate kinase Pfam Description: pfkB family carbohydrate kinase
  misc_feature (55)..(157): Homolog of NCBI NO: 11498013 NR Description: carbohydrate kinase, pfkB family [Archaeoglobus
  misc_feature (88)..(158): Homolog of NCBI NO: 23116680 NR Description: hypothetical protein [Desulfitobacterium
  misc_feature (1)..(164): Homolog of NCBI NO: 31126792 NR Description: unknown protein [Oryza sativa (japonica
  misc_feature (1)..(221): Homolog of NCBI NO: 29788872 NR Description: unknown protein [Oryza sativa (japonica
  misc_feature (1)..(163): Homolog of NCBI NO: 8843793 NR Description: gene_id:MZN1.17~pir||T01971~similar to unknown
  misc_feature (1)..(221): Homolog of NCBI NO: 15237741 NR Description: putative protein
MAVGVGGEILPETLEKMVEICDVVAVDIQALIRVFDPVDGAVKLVDLKESGFYHILHRIGFLKASSDEALFMDVEQMKHLCCVVVTNGEKGCRIYHKDDEMTVPPFLAKQVDPTGAGDSFLGGLIVGLVEGLTVPDAALLGNLFGSITVEHIGQPKFDLMMLQKVKDEVQRRKKQCNISSSHNNDHNEFHERLSPARFSCVDSQLQPKLLVNGHSCDDRSL

SEQ ID NO: 39743 - protein, 205 aa, Arabidopsis thaliana
  peptide (1)..(205): Ceres Seq. ID no. 12328807
  misc_feature (1)..(146): Pfam Name: pfkB family carbohydrate kinase Pfam Description: pfkB family carbohydrate kinase
  misc_feature (39)..(141): Homolog of NCBI NO: 11498013 NR Description: carbohydrate kinase, pfkB family [Archaeoglobus
  misc_feature (72)..(142): Homolog of NCBI NO: 23116680 NR Description: hypothetical protein [Desulfitobacterium
  misc_feature (1)..(148): Homolog of NCBI NO: 31126792 NR Description: unknown protein [Oryza sativa (japonica
  misc_feature (1)..(205): Homolog of NCBI NO: 29788872 NR Description: unknown protein [Oryza sativa (japonica
  misc_feature (1)..(147): Homolog of NCBI NO: 8843793 NR Description: gene_id:MZN1.17~pir||T01971~similar to unknown
  misc_feature (1)..(205): Homolog of NCBI NO: 15237741 NR Description: putative protein
MVEICDVVAVDIQALIRVFDPVDGAVKLVDLKESGFYHILHRIGFLKASSDEALFMDVEQMKHLCCVVVTNGEKGCRIYHKDDEMTVPPFLAKQVDPTGAGDSFLGGLIVGLVEGLTVPDAALLGNLFGSITVEHIGQPKFDLMMLQKVKDEVQRRKKQCNISSSHNNDHNEFHERLSPARFSCVDSQLQPKLLVNGHSCDDRSL

SEQ ID NO: 39744 - DNA, 1137 bp, Arabidopsis thaliana
  misc_feature (1)..(1137): Ceres Seq. ID no. 13497222
  misc_feature: MA Experiment ID: 108434 Result: Up-regulated in Transcription
  misc_feature: MA Experiment 108434 PARAMETER Experiment Name: At_Root_Tips_cDNA_P Parameter: Tissue Value: Root Tips
  misc_feature: MA Experiment ID: 108462 Result: Down-regulated in Transcription
  misc_feature: MA Experiment 108462 PARAMETER Experiment Name: At_Germinating_Seeds_cDNA_P Parameter: Age (day) Value: 2 vs. 0
  misc_feature: MA Experiment 108462 PARAMETER Experiment Name: At_Germinating_Seeds_cDNA_P Parameter: Tissue Value: Germinating Seeds
  misc_feature: MA Experiment ID: 108463 Result: Down-regulated in Transcription
  misc_feature: MA Experiment 108463 PARAMETER Experiment Name: At_Germinating_Seeds_cDNA_P Parameter: Age (day) Value: 3 vs. 0
  misc_feature: MA Experiment 108463 PARAMETER Experiment Name: At_Germinating_Seeds_cDNA_P Parameter: Tissue Value: Germinating Seeds
  misc_feature: MA Experiment ID: 108464 Result: Down-regulated in Transcription
  misc_feature: MA Experiment 108464 PARAMETER Experiment Name: At_Germinating_Seeds_cDNA_P Parameter: Age (day) Value: 4 vs. 0
  misc_feature: MA Experiment 108464 PARAMETER Experiment Name: At_Germinating_Seeds_cDNA_P Parameter: Tissue Value: Germinating Seeds
  misc_feature: MA Experiment ID: 108488 Result: Up-regulated in Transcription
  misc_feature: MA Experiment ID: 108595 Result: Down-regulated in Transcription
  misc_feature: MA Experiment 108595 PARAMETER Experiment Name: At_Ler-pi_Ovule_cDNA_P Parameter: Plant Line Value: null
  misc_feature: MA Experiment ID: 20000235 Result: Down-regulated in Transcription
  misc_feature: MA Experiment 20000235 PARAMETER Experiment Name: At_Siliques_P Parameter: Age (day) Value: 21
  misc_feature: MA Experiment 20000235 PARAMETER Experiment Name: At_Siliques_P Parameter: Organism Value: A. thaliana
  misc_feature: MA Experiment 20000235 PARAMETER Experiment Name: At_Siliques_P Parameter: Plant Line Value: WS
  misc_feature: MA Experiment 20000235 PARAMETER Experiment Name: At_Siliques_P Parameter: Tissue Value: 5-10mm Siliques vs. Whole Plant
  misc_feature: MA Experiment ID: 20001557 Result: Up-regulated in Transcription
  misc_feature: MA Experiment 20001557 PARAMETER Experiment Name: At_Drought_Soil_Dry_P Parameter: Age (day) Value: 27
  misc_feature: MA Experiment 20001557 PARAMETER Experiment Name: At_Drought_Soil_Dry_P Parameter: Organism Value: A. thaliana
  misc_feature: MA Experiment 20001557 PARAMETER Experiment Name: At_Drought_Soil_Dry_P Parameter: Plant Line Value: WS
  misc_feature: MA Experiment 20001557 PARAMETER Experiment Name: At_Drought_Soil_Dry_P Parameter: Post Timepoint (hr) Value: 3
  misc_feature: MA Experiment 20001557 PARAMETER Experiment Name: At_Drought_Soil_Dry_P Parameter: Post-Treatment Value: Re-Water vs. No Drought
  misc_feature: MA Experiment 20001557 PARAMETER Experiment Name: At_Drought_Soil_Dry_P Parameter: Timepoint (day) Value: 13
  misc_feature: MA Experiment 20001557 PARAMETER Experiment Name: At_Drought_Soil_Dry_P Parameter: Treatment Value: Drought vs. No Drought
aagataaaaacctaaaatccatcttcgttgtcgtttcgtctgcttcacatcggaaagctacatctttttcgttttttgtggtggcgatttctattctccggctgaaacctaccttcaggattcagcctttctcaggttttcagttggattcagatagcagcttgtacttcttctagataatcggcgacacatatggatgattgggaggccgaggactttcaaccacttccctcaaaagttgaactgaaaagtaactgggatgatgaggatgtggatgagaatgatatcaaggactcgtgggaggaggaagatgtatctgctccgccacctatagtaaagcctgcttctgagaaggctccaaagaaaccagcagtaaaagctgttgaaaagaaggttaaaactgttgaagctccgaaaggaacatcaagggaagaacctctagatcctattgctgagaaacttcgcatgcagaggcttgtagaggaagctgattaccaatcaactgctgaactctttggagtaaagactgaagagaaaagcgtcgatatgttaattccgaagtctgaaagcgatttcttggattatgctgagttgatatctcagagacttgtaccatttgagaaaagctttcactatatcgggctactcaaagcagtgatgagactttctgtggctaatatgaaagcagcagatgttaaagacgttgcttcgtccattacagctatagcaaatgaaaaattgaaggcggagaaagaagctgctgctggcaaaaagaagtcaggtaagaagaaacaacttcatgttgataagcctgatgatgatcttgtttcgggtccttatgatgccatggacgatgatgatttcatgtgagaaaatggcaattttggagattgcattttacctcctataggattgtaactgagaagaggtttaaatcgtcggcggttttttgttttgtatactgaattgcaaaagtgtttttcttctgttttctttgctcggtttgatttaaaaatttgtgtaataagatttgttgtgggcacactatttcctattatatgaattgaacgagtactaagagcacggcctatgattcacttagaatttgaagccacattagtaagataagttttcgat

SEQ ID NO: 39745 - protein, 225 aa, Arabidopsis thaliana
  peptide (1)..(225): Ceres Seq. ID no. 13497223
  misc_feature (2)..(225): Homolog of NCBI NO: 4503511 NR Description: eukaryotic translation initiation factor 3,
  misc_feature (2)..(225): Homolog of NCBI NO: 27374365 NR Description: Adam-PA [Drosophila willistoni]
  misc_feature (2)..(225): Homolog of NCBI NO: 26349519 NR Description: unnamed protein product [Mus musculus]
  misc_feature (2)..(225): Homolog of NCBI NO: 34856798 NR Description: similar to Eukaryotic translation initiation
  misc_feature (2)..(225): Homolog of NCBI NO: 27374242 NR Description: CG12131-PA [Drosophila erecta]
  misc_feature (2)..(225): Homolog of NCBI NO: 23503065 NR Description: Eukaryotic translation initiation factor 3
  misc_feature (2)..(225): Homolog of NCBI NO: 10435304 NR Description: unnamed protein product [Homo sapiens]
  misc_feature (2)..(225): Homolog of NCBI NO: 32766433 NR Description: Unknown (protein for MGC:63801) [Danio rerio]
  misc_feature (1)..(225): Homolog of NCBI NO: 18408426 NR Description: expressed protein [Arabidopsis thaliana]
  misc_feature (1)..(225): Homolog of NCBI NO: 30693092 NR Description: expressed protein [Arabidopsis thaliana]
MDDWEAEDFQPLPSKVELKSNWDDEDVDENDIKDSWEEEDVSAPPPIVKPASEKAPKKPAVKAVEKKVKTVEAPKGTSREEPLDPIAEKLRMQRLVEEADYQSTAELFGVKTEEKSVDMLIPKSESDFLDYAELISQRLVPFEKSFHYIGLLKAVMRLSVANMKAADVKDVASSITAIANEKLKAEKEAAAGKKKSGKKKQLHVDKPDDDLVSGPYDAMDDDDFM

SEQ ID NO: 39746 - protein, 134 aa, Arabidopsis thaliana
  peptide (1)..(134): Ceres Seq. ID no. 13497224
  misc_feature (1)..(134): Homolog of NCBI NO: 4503511 NR Description: eukaryotic translation initiation factor 3,
  misc_feature (1)..(134): Homolog of NCBI NO: 27374365 NR Description: Adam-PA [Drosophila willistoni]
  misc_feature (1)..(134): Homolog of NCBI NO: 26349519 NR Description: unnamed protein product [Mus musculus]
  misc_feature (1)..(134): Homolog of NCBI NO: 34856798 NR Description: similar to Eukaryotic translation initiation
  misc_feature (1)..(134): Homolog of NCBI NO: 27374242 NR Description: CG12131-PA [Drosophila erecta]
  misc_feature (1)..(134): Homolog of NCBI NO: 23503065 NR Description: Eukaryotic translation initiation factor 3
  misc_feature (1)..(134): Homolog of NCBI NO: 10435304 NR Description: unnamed protein product [Homo sapiens]
  misc_feature (1)..(134): Homolog of NCBI NO: 32766433 NR Description: Unknown (protein for MGC:63801) [Danio rerio]
  misc_feature (1)..(134): Homolog of NCBI NO: 18408426 NR Description: expressed protein [Arabidopsis thaliana]
  misc_feature (1)..(134): Homolog of NCBI NO: 30693092 NR Description: expressed protein [Arabidopsis thaliana]
MQRLVEEADYQSTAELFGVKTEEKSVDMLIPKSESDFLDYAELISQRLVPFEKSFHYIGLLKAVMRLSVANMKAADVKDVASSITAIANEKLKAEKEAAAGKKKSGKKKQLHVDKPDDDLVSGPYDAMDDDDFM

SEQ ID NO: 39747 - DNA, 616 bp, Arabidopsis thaliana
  misc_feature (1)..(616): Ceres Seq. ID no. 12338942
  misc_feature: MA Experiment ID: 108473 Result: Down-regulated in Transcription
  misc_feature: MA Experiment 108473 PARAMETER Experiment Name: At_Drought_Flowers_cDNA_P Parameter: Timepoint (hr) Value: 7 d
  misc_feature: MA Experiment 108473 PARAMETER Experiment Name: At_Drought_Flowers_cDNA_P Parameter: Tissue Value: Flower
  misc_feature: MA Experiment 108473 PARAMETER Experiment Name: At_Drought_Flowers_cDNA_P Parameter: Treatment Value: Drought vs. No Drought
  misc_feature: MA Experiment ID: 108501 Result: Down-regulated in Transcription
  misc_feature: MA Experiment 108501 PARAMETER Experiment Name: At_ap2_floral_buds_cDNA_P Parameter: Plant Line Value: ap2 (Ler.)
  misc_feature: MA Experiment 108501 PARAMETER Experiment Name: At_ap2_floral_buds_cDNA_P Parameter: Tissue Value: Closed Flower
  misc_feature: MA Experiment ID: 108573 Result: Up-regulated in Transcription
  misc_feature: MA Experiment 108573 PARAMETER Experiment Name: At_Drought_cDNA_P Parameter: Timepoint (hr) Value: 6
  misc_feature: MA Experiment 108573 PARAMETER Experiment Name: At_Drought_cDNA_P Parameter: Tissue Value: Aerial
  misc_feature: MA Experiment 108573 PARAMETER Experiment Name: At_Drought_cDNA_P Parameter: Treatment Value: Drought vs. No Drought
  misc_feature: MA Experiment ID: 108576 Result: Up-regulated in Transcription
  misc_feature: MA Experiment 108576 PARAMETER Experiment Name: At_42deg_Heat_cDNA_P Parameter: Temperature (deg C) Value: 42 vs. 22
  misc_feature: MA Experiment 108576 PARAMETER Experiment Name: At_42deg_Heat_cDNA_P Parameter: Timepoint (hr) Value: 1
  misc_feature: MA Experiment 108576 PARAMETER Experiment Name: At_42deg_Heat_cDNA_P Parameter: Tissue Value: Aerial
atcgaaaaaaagagcatcctattaagttgctaaagagagagacgccaatggctgtaaagcaaaaggtctgtgttactggtgcaggaggatttattgcttcatggctcgtcaagtttcttctctctcgtggctacactgtccatggaaccgttcgagatccttgtgatgaaaagaatgaccatttgaggaaactggataatgcttcaaaaaatctgaaacttttcaaggcagatttgtttgattatgaaggtcttttctcagccattgatggttgctctggcgttttccatatcgcttctcctgtgccttttgaaggagttcctgtcacagaggaagaactgattaaaccagctctcactggcaccaagaatgttctagaagcatgcacagaaaccaaagtgcagaaagttgtggttgtatcatcaatcgctgcagttgtttacaatccaaaatggcctcaagatgttgctaaggacgaggattgttggtcagacactcaataccttcactcacttgagggttattggcgttattactatcttgcaaaaacattaacggaacgtgaagctttagagtggagtaagaaaaactttgctgatgttgttacgctctgtcc

SEQ ID NO: 39748 - protein, 204 aa, Arabidopsis thaliana
  peptide (1)..(204): Ceres Seq. ID no. 12338943
  misc_feature (18)..(165): Pfam Name: 3-beta hydroxysteroid dehydrogenase/isomerase family Pfam Description: 3-beta hydroxysteroid dehydrogenase/isomerase
  misc_feature (20)..(203): Homolog of NCBI NO: 31414896 NR Description: cinnamoyl CoA reductase [Fragaria x ananassa]
  misc_feature (20)..(203): Homolog of NCBI NO: 40233135 NR Description: cinnamoyl CoA reductase [Populus tomentosa]
  misc_feature (20)..(203): Homolog of NCBI NO: 9998901 NR Description: cinnamoyl-CoA reductase [Populus balsamifera
  misc_feature (20)..(203): Homolog of NCBI NO: 25989515 NR Description: cinnamoyl CoA reductase [Eucalyptus globulus]
  misc_feature (20)..(203): Homolog of NCBI NO: 17978649 NR Description: cinnamoyl-CoA reductase [Pinus taeda]
  misc_feature (16)..(203): Homolog of NCBI NO: 25140436 NR Description: cinnamoyl CoA reductase 2 [Solanum tuberosum]
  misc_feature (19)..(203): Homolog of NCBI NO: 15226134 NR Description: putative cinnamoyl-CoA reductase
  misc_feature (16)..(203): Homolog of NCBI NO: 15226135 NR Description: putative cinnamoyl-CoA reductase
  misc_feature (16)..(203): Homolog of NCBI NO: 15223068 NR Description: putative cinnamoyl-CoA reductase; protein id:
  misc_feature (16)..(203): Homolog of NCBI NO: 6554472 NR Description: putative cinnamoyl-CoA reductase; 14056-15506
RKKEHPIKLLKRETPMAVKQKVCVTGAGGFIASWLVKFLLSRGYTVHGTVRDPCDEKNDHLRKLDNASKNLKLFKADLFDYEGLFSAIDGCSGVFHIASPVPFEGVPVTEEELIKPALTGTKNVLEACTETKVQKVVVVSSIAAVVYNPKWPQDVAKDEDCWSDTQYLHSLEGYWRYYYLAKTLTEREALEWSKKNFADVVTLC

SEQ ID NO: 39749 - protein, 189 aa, Arabidopsis thaliana
  peptide (1)..(189): Ceres Seq. ID no. 12338944
  misc_feature (3)..(150): Pfam Name: 3-beta hydroxysteroid dehydrogenase/isomerase family Pfam Description: 3-beta hydroxysteroid dehydrogenase/isomerase
  misc_feature (5)..(188): Homolog of NCBI NO: 31414896 NR Description: cinnamoyl CoA reductase [Fragaria x ananassa]
  misc_feature (5)..(188): Homolog of NCBI NO: 40233135 NR Description: cinnamoyl CoA reductase [Populus tomentosa]
  misc_feature (5)..(188): Homolog of NCBI NO: 9998901 NR Description: cinnamoyl-CoA reductase [Populus balsamifera
  misc_feature (5)..(188): Homolog of NCBI NO: 25989515 NR Description: cinnamoyl CoA reductase [Eucalyptus globulus]
  misc_feature (5)..(188): Homolog of NCBI NO: 17978649 NR Description: cinnamoyl-CoA reductase [Pinus taeda]
  misc_feature (1)..(188): Homolog of NCBI NO: 25140436 NR Description: cinnamoyl CoA reductase 2 [Solanum tuberosum]
  misc_feature (4)..(188): Homolog of NCBI NO: 15226134 NR Description: putative cinnamoyl-CoA reductase
  misc_feature (1)..(188): Homolog of NCBI NO: 15226135 NR Description: putative cinnamoyl-CoA reductase
  misc_feature (1)..(188): Homolog of NCBI NO: 15223068 NR Description: putative cinnamoyl-CoA reductase; protein id:
  misc_feature (1)..(188): Homolog of NCBI NO: 6554472 NR Description: putative cinnamoyl-CoA reductase; 14056-15506
MAVKQKVCVTGAGGFIASWLVKFLLSRGYTVHGTVRDPCDEKNDHLRKLDNASKNLKLFKADLFDYEGLFSAIDGCSGVFHIASPVPFEGVPVTEEELIKPALTGTKNVLEACTETKVQKVVVVSSIAAVVYNPKWPQDVAKDEDCWSDTQYLHSLEGYWRYYYLAKTLTEREALEWSKKNFADVVTLC

SEQ ID NO: 39750 - DNA, 1463 bp, Arabidopsis thaliana
  misc_feature (1)..(1463): Ceres Seq. ID no. 13488914
  misc_feature: MA Experiment ID: 20000184 Result: Down-regulated in Transcription
  misc_feature: MA Experiment 20000184 PARAMETER Experiment Name: At_Shoots__P Parameter: Age (day) Value: 7
  misc_feature: MA Experiment 20000184 PARAMETER Experiment Name: At_Shoots__P Parameter: Tissue Value: Shoots vs. Whole Plant
  misc_feature: MA Experiment ID: 20000185 Result: Down-regulated in Transcription
  misc_feature: MA Experiment 20000185 PARAMETER Experiment Name: At_Roots__P Parameter: Age (day) Value: 7 vs. 21
  misc_feature: MA Experiment 20000185 PARAMETER Experiment Name: At_Roots__P Parameter: Organism Value: A. thaliana
  misc_feature: MA Experiment 20000185 PARAMETER Experiment Name: At_Roots__P Parameter: Tissue Value: Roots vs. Whole Plant
  misc_feature: MA Experiment ID: 20000235 Result: Down-regulated in Transcription
  misc_feature: MA Experiment 20000235 PARAMETER Experiment Name: At_Siliques_P Parameter: Age (day) Value: 21
  misc_feature: MA Experiment 20000235 PARAMETER Experiment Name: At_Siliques_P Parameter: Organism Value: A. thaliana
  misc_feature: MA Experiment 20000235 PARAMETER Experiment Name: At_Siliques_P Parameter: Plant Line Value: WS
  misc_feature: MA Experiment 20000235 PARAMETER Experiment Name: At_Siliques_P Parameter: Tissue Value: 5-10mm Siliques vs. Whole Plant
  misc_feature: MA Experiment ID: 20000439 Result: Down-regulated in Transcription
  misc_feature: MA Experiment 20000439 PARAMETER Experiment Name: At_Roots__P Parameter: Age (day) Value: 14 vs. 21
  misc_feature: MA Experiment 20000439 PARAMETER Experiment Name: At_Roots__P Parameter: Organism Value: A. thaliana
  misc_feature: MA Experiment 20000439 PARAMETER Experiment Name: At_Roots__P Parameter: Tissue Value: Roots vs. Whole Plant
  misc_feature: MA Experiment ID: 20000573 Result: Down-regulated in Transcription
  misc_feature: MA Experiment 20000573 PARAMETER Experiment Name: At_100uM_ABA_Mutants__P Parameter: Organism Value: A. thaliana
  misc_feature: MA Experiment 20000573 PARAMETER Experiment Name: At_100uM_ABA_Mutants__P Parameter: Plant Line Value: CS22 vs. Ler wt
  misc_feature: MA Experiment 20000573 PARAMETER Experiment Name: At_100uM_ABA_Mutants__P Parameter: Timepoint (hr) Value: N/A
  misc_feature: MA Experiment 20000573 PARAMETER Experiment Name: At_100uM_ABA_Mutants__P Parameter: Tissue Value: Whole Plant
  misc_feature: MA Experiment 20000573 PARAMETER Experiment Name: At_100uM_ABA_Mutants__P Parameter: Treatment Value: None
  misc_feature: MA Experiment ID: 20000574 Result: Down-regulated in Transcription
  misc_feature: MA Experiment 20000574 PARAMETER Experiment Name: At_100uM_ABA_Mutants__P Parameter: Organism Value: A. thaliana
  misc_feature: MA Experiment 20000574 PARAMETER Experiment Name: At_100uM_ABA_Mutants__P Parameter: Plant Line Value: CS23 vs. Ler wt
  misc_feature: MA Experiment 20000574 PARAMETER Experiment Name: At_100uM_ABA_Mutants__P Parameter: Timepoint (hr) Value: N/A
  misc_feature: MA Experiment 20000574 PARAMETER Experiment Name: At_100uM_ABA_Mutants__P Parameter: Tissue Value: Whole Plant
  misc_feature: MA Experiment 20000574 PARAMETER Experiment Name: At_100uM_ABA_Mutants__P Parameter: Treatment Value: None
  misc_feature: MA Experiment ID: 20001451 Result: Up-regulated in Transcription
  misc_feature: MA Experiment 20001451 PARAMETER Experiment Name: At_Far-red-induction_P Parameter: Age (day) Value: 7
  misc_feature: MA Experiment 20001451 PARAMETER Experiment Name: At_Far-red-induction_P Parameter: Light Value: Far-red vs. White
  misc_feature: MA Experiment 20001451 PARAMETER Experiment Name: At_Far-red-induction_P Parameter: Organism Value: A. thaliana
  misc_feature: MA Experiment 20001451 PARAMETER Experiment Name: At_Far-red-induction_P Parameter: Plant Line Value: Columbia
  misc_feature: MA Experiment 20001451 PARAMETER Experiment Name: At_Far-red-induction_P Parameter: Timepoint (hr) Value: 24
  misc_feature: MA Experiment 20001451 PARAMETER Experiment Name: At_Far-red-induction_P Parameter: Tissue Value: Whole Plant
  misc_feature: MA Experiment ID: 20001905 Result: Up-regulated in Transcription
  misc_feature: MA Experiment 20001905 PARAMETER Experiment Name: At_Drought_Reproduction_P Parameter: Age (day) Value: 40
  misc_feature: MA Experiment 20001905 PARAMETER Experiment Name: At_Drought_Reproduction_P Parameter: Organism Value: A. thaliana
  misc_feature: MA Experiment 20001905 PARAMETER Experiment Name: At_Drought_Reproduction_P Parameter: Plant Line Value: WS
  misc_feature: MA Experiment 20001905 PARAMETER Experiment Name: At_Drought_Reproduction_P Parameter: Timepoint (day) Value: 10
  misc_feature: MA Experiment 20001905 PARAMETER Experiment Name: At_Drought_Reproduction_P Parameter: Tissue Value: Rosettes
  misc_feature: MA Experiment 20001905 PARAMETER Experiment Name: At_Drought_Reproduction_P Parameter: Treatment Value: Drought vs. No Drought
aataaaatccaacttcttctccttcaagaatctagagatagagagagagagagaacacaaagtgggaaaaaagataagaacccaccataaagtttttacatttctccctttaaaaggcgaaagcttttgatttgtataaaagtcccacttaatcacctctctagcttctcattccatttccatctcctctcttttgttttctaagttgcttcaagagttttggatagtgtagcagagagattttaactaatgggtttataaaattttgttcttttgcgtgaacaagttgtcaacttctagacagattttctttttgaagtgttttcttgtcgaaattcttcttcttttggtcaaagaacgcaagattcttctgtagttcctctaaaaaaaatcctaatggagggttattcaagaaacggtgaaatctctccgaagctgcttgacttgatgattccacaagagagaagaaattggtttcacgatgagaaaaactctgttttcaaaacagaggagaagaagcttgagctaaagcttggaccacctggtgaagaagatgatgatgaatcgatgataagacacatgaagaaagaaccaaaagacaaatctatcctctctctcgctggcaaatacttctctccttcttccaccaaaaccacatcccataaaagaactgctcctggtccagtggtgggatggcctccggttcgatccttcaggaagaatttagctagtggaagttcttcaaagcttggaaatgactcaaccacctccaatggtgttaccctcaagaaccaaaagtgtgatgctgctgctaagacaacagaaccaaagagacaaggaggcatgtttgtgaagatcaacatgtatggtgttcccattggtcgtaaagttgatctcagtgctcataatagctatgagcagttatctttcacagttgacaagctcttcagaggtcttcttgcagctcaaagagactttccatcatccatagaagatgaaaaaccaatcactggattattagatgggaatggagaatatactcttacatatgaagacaatgaaggagacaagatgcttgtaggagatgttccatggcaaatgtttgtgtcttcggtgaagaggctgcgtgtgattaaaacttctgagatttcttcagcattaacatatggaaatggtaagcaagagaaaatgagaagatgaagaaaaagatcttttacagcttttaaagaagtagagagatgttattaattgcattttgcctttaaactttgatgagtttttggtcttggaaaagtttctgatataagtctgatgtacattctggtttgttacatcttcttttggcttttgagatatcatagagttttgttggaactcaaagaccaaacagtgcaatgatgattttggggtcttgagtaaatttacaaacccttttaggcatattataatagtcttctgttttt

SEQ ID NO: 39751 - protein, 267 aa, Arabidopsis thaliana
  peptide (1)..(267): Ceres Seq. ID no. 13488915
  misc_feature (40)..(261): Pfam Name: AUX/IAA family Pfam Description: AUX/IAA family
  misc_feature (209)..(262): Homolog of NCBI NO: 18420964 NR Description: auxin-responsive protein IAA28 (Indoleacetic
  misc_feature (38)..(112): Homolog of NCBI NO: 18420964 NR Description: auxin-responsive protein IAA28 (Indoleacetic
  misc_feature (80)..(255): Homolog of NCBI NO: 34909384 NR Description: putative phytochrome-associated protein
  misc_feature (24)..(251): Homolog of NCBI NO: 34906394 NR Description: P0710E05.9 [Oryza sativa (japonica
  misc_feature (1)..(265): Homolog of NCBI NO: 4093155 NR Description: phytochrome-associated protein 1 [Arabidopsis
  misc_feature (1)..(265): Homolog of NCBI NO: 21593333 NR Description: phytochrome-associated protein 1 (PAP1)
  misc_feature (1)..(265): Homolog of NCBI NO: 15228226 NR Description: auxin-responsive protein (Indoleacetic
  misc_feature (31)..(267): Homolog of NCBI NO: 25296228 NR Description: auxin-induced protein IAA18
  misc_feature (1)..(267): Homolog of NCBI NO: 21594025 NR Description: auxin regulated protein IAA18, putative
  misc_feature (1)..(267): Homolog of NCBI NO: 15218080 NR Description: auxin-responsive protein IAA18 (Indoleacetic
MEGYSRNGEISPKLLDLMIPQERRNWFHDEKNSVFKTEEKKLELKLGPPGEEDDDESMIRHMKKEPKDKSILSLAGKYFSPSSTKTTSHKRTAPGPVVGWPPVRSFRKNLASGSSSKLGNDSTTSNGVTLKNQKCDAAAKTTEPKRQGGMFVKINMYGVPIGRKVDLSAHNSYEQLSFTVDKLFRGLLAAQRDFPSSIEDEKPITGLLDGNGEYTLTYEDNEGDKMLVGDVPWQMFVSSVKRLRVIKTSEISSALTYGNGKQEKMRR

SEQ ID NO: 39752 - protein, 250 aa, Arabidopsis thaliana
  peptide (1)..(250): Ceres Seq. ID no. 13488916
  misc_feature (23)..(244): Pfam Name: AUX/IAA family Pfam Description: AUX/IAA family
  misc_feature (192)..(245): Homolog of NCBI NO: 18420964 NR Description: auxin-responsive protein IAA28 (Indoleacetic
  misc_feature (21)..(95): Homolog of NCBI NO: 18420964 NR Description: auxin-responsive protein IAA28 (Indoleacetic
  misc_feature (63)..(238): Homolog of NCBI NO: 34909384 NR Description: putative phytochrome-associated protein
  misc_feature (7)..(234): Homolog of NCBI NO: 34906394 NR Description: P0710E05.9 [Oryza sativa (japonica
  misc_feature (1)..(248): Homolog of NCBI NO: 4093155 NR Description: phytochrome-associated protein 1 [Arabidopsis
  misc_feature (1)..(248): Homolog of NCBI NO: 21593333 NR Description: phytochrome-associated protein 1 (PAP1)
  misc_feature (1)..(248): Homolog of NCBI NO: 15228226 NR Description: auxin-responsive protein (Indoleacetic
  misc_feature (14)..(250): Homolog of NCBI NO: 25296228 NR Description: auxin-induced protein IAA18
  misc_feature (1)..(250): Homolog of NCBI NO: 21594025 NR Description: auxin regulated protein IAA18, putative
  misc_feature (1)..(250): Homolog of NCBI NO: 15218080 NR Description: auxin-responsive protein IAA18 (Indoleacetic
MIPQERRNWFHDEKNSVFKTEEKKLELKLGPPGEEDDDESMIRHMKKEPKDKSILSLAGKYFSPSSTKTTSHKRTAPGPVVGWPPVRSFRKNLASGSSSKLGNDSTTSNGVTLKNQKCDAAAKTTEPKRQGGMFVKINMYGVPIGRKVDLSAHNSYEQLSFTVDKLFRGLLAAQRDFPSSIEDEKPITGLLDGNGEYTLTYEDNEGDKMLVGDVPWQMFVSSVKRLRVIKTSEISSALTYGNGKQEKMRR

SEQ ID NO: 39753 - protein, 210 aa, Arabidopsis thaliana
  peptide (1)..(210): Ceres Seq. ID no. 13488917
  misc_feature (1)..(204): Pfam Name: AUX/IAA family Pfam Description: AUX/IAA family
  misc_feature (152)..(205): Homolog of NCBI NO: 18420964 NR Description: auxin-responsive protein IAA28 (Indoleacetic
  misc_feature (1)..(55): Homolog of NCBI NO: 18420964 NR Description: auxin-responsive protein IAA28 (Indoleacetic
  misc_feature (23)..(198): Homolog of NCBI NO: 34909384 NR Description: putative phytochrome-associated protein
  misc_feature (1)..(194): Homolog of NCBI NO: 34906394 NR Description: P0710E05.9 [Oryza sativa (japonica
  misc_feature (1)..(208): Homolog of NCBI NO: 4093155 NR Description: phytochrome-associated protein 1 [Arabidopsis
  misc_feature (1)..(208): Homolog of NCBI NO: 21593333 NR Description: phytochrome-associated protein 1 (PAP1)
  misc_feature (1)..(208): Homolog of NCBI NO: 15228226 NR Description: auxin-responsive protein (Indoleacetic
  misc_feature (1)..(210): Homolog of NCBI NO: 25296228 NR Description: auxin-induced protein IAA18
  misc_feature (1)..(210): Homolog of NCBI NO: 21594025 NR Description: auxin regulated protein IAA18, putative
  misc_feature (1)..(210): Homolog of NCBI NO: 15218080 NR Description: auxin-responsive protein IAA18 (Indoleacetic
MIRHMKKEPKDKSILSLAGKYFSPSSTKTTSHKRTAPGPVVGWPPVRSFRKNLASGSSSKLGNDSTTSNGVTLKNQKCDAAAKTTEPKRQGGMFVKINMYGVPIGRKVDLSAHNSYEQLSFTVDKLFRGLLAAQRDFPSSIEDEKPITGLLDGNGEYTLTYEDNEGDKMLVGDVPWQMFVSSVKRLRVIKTSEISSALTYGNGKQEKMRR

SEQ ID NO: 39754 - DNA, 1513 bp, Arabidopsis thaliana; identical to SEQ ID NO: 25707
  misc_feature (1)..(1513): Ceres Seq. ID no. 12331556
  misc_feature: MA Experiment ID: 20000213 Result: Up-regulated in Transcription
  misc_feature: MA Experiment 20000213 PARAMETER Experiment Name: At_4deg_Cold_P Parameter: Timepoint (hr) Value: 2
  misc_feature: MA Experiment ID: 20000214 Result: Up-regulated in Transcription
  misc_feature: MA Experiment 20000214 PARAMETER Experiment Name: At_4deg_Cold_P Parameter: Timepoint (hr) Value: 6
  misc_feature: MA Experiment ID: 20000227 Result: Up-regulated in Transcription
  misc_feature: MA Experiment 20000227 PARAMETER Experiment Name: At_Root-Tips-vs-Tops_P Parameter: Tissue Value: Root Tips vs. Root Tops
  misc_feature: MA Experiment ID: 20000437 Result: Down-regulated in Transcription
  misc_feature: MA Experiment 20000437 PARAMETER Experiment Name: At_Drought_P Parameter: Age (day) Value: 8
  misc_feature: MA Experiment 20000437 PARAMETER Experiment Name: At_Drought_P Parameter: Organism Value: A. thaliana
  misc_feature: MA Experiment 20000437 PARAMETER Experiment Name: At_Drought_P Parameter: Plant Line Value: WS
  misc_feature: MA Experiment 20000437 PARAMETER Experiment Name: At_Drought_P Parameter: Timepoint (hr) Value: 24
  misc_feature: MA Experiment 20000437 PARAMETER Experiment Name: At_Drought_P Parameter: Tissue Value: Whole Plant
  misc_feature: MA Experiment 20000437 PARAMETER Experiment Name: At_Drought_P Parameter: Treatment Value: Drought vs. No Drought
  misc_feature: MA Experiment ID: 20000794 Result: Down-regulated in Transcription
  misc_feature: MA Experiment 20000794 PARAMETER Experiment Name: At_Petals_P Parameter: Age (day) Value: 23-25 days
  misc_feature: MA Experiment 20000794 PARAMETER Experiment Name: At_Petals_P Parameter: Plant Line Value: WS
  misc_feature: MA Experiment 20000794 PARAMETER Experiment Name: At_Petals_P Parameter: Tissue Value: Petals vs. Whole plant
  misc_feature: MA Experiment ID: 20001247 Result: Up-regulated in Transcription
  misc_feature: MA Experiment 20001247 PARAMETER Experiment Name: At_Far-red-induction_P Parameter: Age (day) Value: 7
  misc_feature: MA Experiment 20001247 PARAMETER Experiment Name: At_Far-red-induction_P Parameter: Light Value: Far-red vs. White
  misc_feature: MA Experiment 20001247 PARAMETER Experiment Name: At_Far-red-induction_P Parameter: Organism Value: A. thaliana
  misc_feature: MA Experiment 20001247 PARAMETER Experiment Name: At_Far-red-induction_P Parameter: Plant Line Value: Columbia
  misc_feature: MA Experiment 20001247 PARAMETER Experiment Name: At_Far-red-induction_P Parameter: Timepoint (hr) Value: 1
  misc_feature: MA Experiment 20001247 PARAMETER Experiment Name: At_Far-red-induction_P Parameter: Tissue Value: Whole Plant
  misc_feature: MA Experiment ID: 20001451 Result: Down-regulated in Transcription
  misc_feature: MA Experiment 20001451 PARAMETER Experiment Name: At_Far-red-induction_P Parameter: Age (day) Value: 7
  misc_feature: MA Experiment 20001451 PARAMETER Experiment Name: At_Far-red-induction_P Parameter: Light Value: Far-red vs. White
  misc_feature: MA Experiment 20001451 PARAMETER Experiment Name: At_Far-red-induction_P Parameter: Organism Value: A. thaliana
  misc_feature: MA Experiment 20001451 PARAMETER Experiment Name: At_Far-red-induction_P Parameter: Plant Line Value: Columbia
  misc_feature: MA Experiment 20001451 PARAMETER Experiment Name: At_Far-red-induction_P Parameter: Timepoint (hr) Value: 24
  misc_feature: MA Experiment 20001451 PARAMETER Experiment Name: At_Far-red-induction_P Parameter: Tissue Value: Whole Plant
  misc_feature: MA Experiment ID: 20001557 Result: Up-regulated in Transcription
  misc_feature: MA Experiment 20001557 PARAMETER Experiment Name: At_Drought_Soil_Dry_P Parameter: Age (day) Value: 27
  misc_feature: MA Experiment 20001557 PARAMETER Experiment Name: At_Drought_Soil_Dry_P Parameter: Organism Value: A. thaliana
  misc_feature: MA Experiment 20001557 PARAMETER Experiment Name: At_Drought_Soil_Dry_P Parameter: Plant Line Value: WS
  misc_feature: MA Experiment 20001557 PARAMETER Experiment Name: At_Drought_Soil_Dry_P Parameter: Post Timepoint (hr) Value: 3
  misc_feature: MA Experiment 20001557 PARAMETER Experiment Name: At_Drought_Soil_Dry_P Parameter: Post-Treatment Value: Re-Water vs. No Drought
  misc_feature: MA Experiment 20001557 PARAMETER Experiment Name: At_Drought_Soil_Dry_P Parameter: Timepoint (day) Value: 13
  misc_feature: MA Experiment 20001557 PARAMETER Experiment Name: At_Drought_Soil_Dry_P Parameter: Treatment Value: Drought vs. No Drought
  misc_feature: MA Experiment ID: 20001558 Result: Up-regulated in Transcription
  misc_feature: MA Experiment 20001558 PARAMETER Experiment Name: At_Drought_Soil_Dry_P Parameter: Age (day) Value: 27
  misc_feature: MA Experiment 20001558 PARAMETER Experiment Name: At_Drought_Soil_Dry_P Parameter: Organism Value: A. thaliana
  misc_feature: MA Experiment 20001558 PARAMETER Experiment Name: At_Drought_Soil_Dry_P Parameter: Plant Line Value: WS
  misc_feature: MA Experiment 20001558 PARAMETER Experiment Name: At_Drought_Soil_Dry_P Parameter: Post Timepoint (hr) Value: 6
  misc_feature: MA Experiment 20001558 PARAMETER Experiment Name: At_Drought_Soil_Dry_P Parameter: Post-Treatment Value: Re-Water vs. No Drought
  misc_feature: MA Experiment 20001558 PARAMETER Experiment Name: At_Drought_Soil_Dry_P Parameter: Timepoint (day) Value: 13
  misc_feature: MA Experiment 20001558 PARAMETER Experiment Name: At_Drought_Soil_Dry_P Parameter: Treatment Value: Drought vs. No Drought
  misc_feature: MA Experiment ID: 20001560 Result: Up-regulated in Transcription
  misc_feature: MA Experiment 20001560 PARAMETER Experiment Name: At_Drought_Soil_Dry_P Parameter: Age (day) Value: 28
  misc_feature: MA Experiment 20001560 PARAMETER Experiment Name: At_Drought_Soil_Dry_P Parameter: Organism Value: A. thaliana
  misc_feature: MA Experiment 20001560 PARAMETER Experiment Name: At_Drought_Soil_Dry_P Parameter: Plant Line Value: WS
  misc_feature: MA Experiment 20001560 PARAMETER Experiment Name: At_Drought_Soil_Dry_P Parameter: Post Timepoint (hr) Value: None
  misc_feature: MA Experiment 20001560 PARAMETER Experiment Name: At_Drought_Soil_Dry_P Parameter: Post-Treatment Value: None
  misc_feature: MA Experiment 20001560 PARAMETER Experiment Name: At_Drought_Soil_Dry_P Parameter: Timepoint (day) Value: 14
  misc_feature: MA Experiment 20001560 PARAMETER Experiment Name: At_Drought_Soil_Dry_P Parameter: Treatment Value: Drought vs. No Drought

SEQ ID NO: 39755 - protein, 393 aa, Arabidopsis thaliana; identical to SEQ ID NO: 25708
  peptide (1)..(393): Ceres Seq. ID no. 12331557
  misc_feature (116)..(238): Pfam Name: S-adenosylmethionine synthetase, central domain Pfam Description: S-adenosylmethionine synthetase, central domain
  misc_feature (116)..(238): Pfam Name: S-adenosylmethionine synthetase, central domain Pfam Description: S-adenosylmethionine synthetase, central domain
  misc_feature (1)..(393): Homolog of NCBI NO: 1170938 NR Description: S-adenosylmethionine synthetase 2 (Methionine
  misc_feature (2)..(390): Homolog of NCBI NO: 18157331 NR Description: S-adenosylmethionine synthetase [Phaseolus
  misc_feature (1)..(393): Homolog of NCBI NO: 13540318 NR Description: S-adenosyl-L-methionine synthetase [Elaeagnus
  misc_feature (1)..(393): Homolog of NCBI NO: 13540316 NR Description: S-adenosyl-L-methionine synthetase [Elaeagnus
  misc_feature (2)..(393): Homolog of NCBI NO: 1346524 NR Description: S-adenosylmethionine synthetase (Methionine
  misc_feature (1)..(393): Homolog of NCBI NO: 1170938 NR Description: S-adenosylmethionine synthetase 2 (Methionine
  misc_feature (1)..(393): Homolog of NCBI NO: 13540318 NR Description: S-adenosyl-L-methionine synthetase [Elaeagnus
  misc_feature (2)..(393): Homolog of NCBI NO: 1346524 NR Description: S-adenosylmethionine synthetase (Methionine
  misc_feature (1)..(393): Homolog of NCBI NO: 15229033 NR Description: putative s-adenosylmethionine synthetase
  misc_feature (1)..(393): Homolog of NCBI NO: 10443981 NR Description: S-adenosylmethionine synthetase [Brassica juncea]
  misc_feature (1)..(393): Homolog of NCBI NO: 3024127 NR Description: S-adenosylmethionine synthetase 2 (Methionine
  misc_feature (1)..(392): Homolog of NCBI NO: 5726594 NR Description: S-adenosyl-L-methionine synthetase [Petunia x
  misc_feature (1)..(390): Homolog of NCBI NO: 3024126 NR Description: S-adenosylmethionine synthetase 1 (Methionine
  misc_feature (1)..(393): Homolog of NCBI NO: 13540316 NR Description: S-adenosyl-L-methionine synthetase [Elaeagnus
  misc_feature (2)..(390): Homolog of NCBI NO: 18157331 NR Description: S-adenosylmethionine synthetase [Phaseolus
  misc_feature (1)..(390): Homolog of NCBI NO: 3024126 NR Description: S-adenosylmethionine synthetase 1 (Methionine
  misc_feature (1)..(392): Homolog of NCBI NO: 5726594 NR Description: S-adenosyl-L-methionine synthetase [Petunia x
  misc_feature (1)..(393): Homolog of NCBI NO: 3024127 NR Description: S-adenosylmethionine synthetase 2 (Methionine
  misc_feature (1)..(393): Homolog of NCBI NO: 10443981 NR Description: S-adenosylmethionine synthetase [Brassica juncea]
  misc_feature (1)..(393): Homolog of NCBI NO: 15229033 NR Description: putative s-adenosylmethionine synthetase

SEQ ID NO: 39756 - protein, 344 aa, Arabidopsis thaliana; identical to SEQ ID NO: 25709
  peptide (1)..(344): Ceres Seq. ID no. 12331558
  misc_feature (67)..(189): Pfam Name: S-adenosylmethionine synthetase, central domain Pfam Description: S-adenosylmethionine synthetase, central domain
  misc_feature (67)..(189): Pfam Name: S-adenosylmethionine synthetase, central domain Pfam Description: S-adenosylmethionine synthetase, central domain
  misc_feature (1)..(344): Homolog of NCBI NO: 1170938 NR Description: S-adenosylmethionine synthetase 2 (Methionine
  misc_feature (1)..(341): Homolog of NCBI NO: 18157331 NR Description: S-adenosylmethionine synthetase [Phaseolus
  misc_feature (1)..(344): Homolog of NCBI NO: 13540318 NR Description: S-adenosyl-L-methionine synthetase [Elaeagnus
  misc_feature (1)..(344): Homolog of NCBI NO: 13540316 NR Description: S-adenosyl-L-methionine synthetase [Elaeagnus
  misc_feature (1)..(344): Homolog of NCBI NO: 1346524 NR Description: S-adenosylmethionine synthetase (Methionine
  misc_feature (1)..(344): Homolog of NCBI NO: 1170938 NR Description: S-adenosylmethionine synthetase 2 (Methionine
  misc_feature (1)..(344): Homolog of NCBI NO: 13540318 NR Description: S-adenosyl-L-methionine synthetase [Elaeagnus
  misc_feature (1)..(344): Homolog of NCBI NO: 1346524 NR Description: S-adenosylmethionine synthetase (Methionine
  misc_feature (1)..(344): Homolog of NCBI NO: 15229033 NR Description: putative s-adenosylmethionine synthetase
  misc_feature (1)..(344): Homolog of NCBI NO: 10443981 NR Description: S-adenosylmethionine synthetase [Brassica juncea]
  misc_feature (1)..(344): Homolog of NCBI NO: 3024127 NR Description: S-adenosylmethionine synthetase 2 (Methionine
  misc_feature (1)..(343): Homolog of NCBI NO: 5726594 NR Description: S-adenosyl-L-methionine synthetase [Petunia x
  misc_feature (1)..(341): Homolog of NCBI NO: 3024126 NR Description: S-adenosylmethionine synthetase 1 (Methionine
  misc_feature (1)..(344): Homolog of NCBI NO: 13540316 NR Description: S-adenosyl-L-methionine synthetase [Elaeagnus
  misc_feature (1)..(341): Homolog of NCBI NO: 18157331 NR Description: S-adenosylmethionine synthetase [Phaseolus
  misc_feature (1)..(341): Homolog of NCBI NO: 3024126 NR Description: S-adenosylmethionine synthetase 1 (Methionine
  misc_feature (1)..(343): Homolog of NCBI NO: 5726594 NR Description: S-adenosyl-L-methionine synthetase [Petunia x
  misc_feature (1)..(344): Homolog of NCBI NO: 3024127 NR Description: S-adenosylmethionine synthetase 2 (Methionine
  misc_feature (1)..(344): Homolog of NCBI NO: 10443981 NR Description: S-adenosylmethionine synthetase [Brassica juncea]
  misc_feature (1)..(344): Homolog of NCBI NO: 15229033 NR Description: putative s-adenosylmethionine synthetase

SEQ ID NO: 39757 - protein, 342 aa, Arabidopsis thaliana; identical to SEQ ID NO: 25710
  peptide (1)..(342): Ceres Seq. ID no. 12331559
  misc_feature (65)..(187): Pfam Name: S-adenosylmethionine synthetase, central domain Pfam Description: S-adenosylmethionine synthetase, central domain
  misc_feature (65)..(187): Pfam Name: S-adenosylmethionine synthetase, central domain Pfam Description: S-adenosylmethionine synthetase, central domain
  misc_feature (1)..(342): Homolog of NCBI NO: 1170938 NR Description: S-adenosylmethionine synthetase 2 (Methionine
  misc_feature (1)..(339): Homolog of NCBI NO: 18157331 NR Description: S-adenosylmethionine synthetase [Phaseolus
  misc_feature (1)..(342): Homolog of NCBI NO: 13540318 NR Description: S-adenosyl-L-methionine synthetase [Elaeagnus
  misc_feature (1)..(342): Homolog of NCBI NO: 13540316 NR Description: S-adenosyl-L-methionine synthetase [Elaeagnus
  misc_feature (1)..(342): Homolog of NCBI NO: 1346524 NR Description: S-adenosylmethionine synthetase (Methionine
  misc_feature (1)..(342): Homolog of NCBI NO: 1170938 NR Description: S-adenosylmethionine synthetase 2 (Methionine
  misc_feature (1)..(342): Homolog of NCBI NO: 13540318 NR Description: S-adenosyl-L-methionine synthetase [Elaeagnus
  misc_feature (1)..(342): Homolog of NCBI NO: 1346524 NR Description: S-adenosylmethionine synthetase (Methionine
  misc_feature (1)..(342): Homolog of NCBI NO: 15229033 NR Description: putative s-adenosylmethionine synthetase
  misc_feature (1)..(342): Homolog of NCBI NO: 10443981 NR Description: S-adenosylmethionine synthetase [Brassica juncea]
  misc_feature (1)..(342): Homolog of NCBI NO: 3024127 NR Description: S-adenosylmethionine synthetase 2 (Methionine
  misc_feature (1)..(341): Homolog of NCBI NO: 5726594 NR Description: S-adenosyl-L-methionine synthetase [Petunia x
  misc_feature (1)..(339): Homolog of NCBI NO: 3024126 NR Description: S-adenosylmethionine synthetase 1 (Methionine
  misc_feature (1)..(342): Homolog of NCBI NO: 13540316 NR Description: S-adenosyl-L-methionine synthetase [Elaeagnus
  misc_feature (1)..(339): Homolog of NCBI NO: 18157331 NR Description: S-adenosylmethionine synthetase [Phaseolus
  misc_feature (1)..(339): Homolog of NCBI NO: 3024126 NR Description: S-adenosylmethionine synthetase 1 (Methionine
  misc_feature (1)..(341): Homolog of NCBI NO: 5726594 NR Description: S-adenosyl-L-methionine synthetase [Petunia x
  misc_feature (1)..(342): Homolog of NCBI NO: 3024127 NR Description: S-adenosylmethionine synthetase 2 (Methionine
  misc_feature (1)..(342): Homolog of NCBI NO: 10443981 NR Description: S-adenosylmethionine synthetase [Brassica juncea]
  misc_feature (1)..(342): Homolog of NCBI NO: 15229033 NR Description: putative s-adenosylmethionine synthetase

SEQ ID NO: 39758 - DNA, 1169 bp, Arabidopsis thaliana
  misc_feature (1)..(1169): Ceres Seq. ID no. 12348407
  misc_feature: MA Experiment ID: 108434 Result: Down-regulated in Transcription
  misc_feature: MA Experiment 108434 PARAMETER Experiment Name: At_Root_Tips_cDNA_P Parameter: Tissue Value: Root Tips
  misc_feature: MA Experiment ID: 108462 Result: Up-regulated in Transcription
  misc_feature: MA Experiment 108462 PARAMETER Experiment Name: At_Germinating_Seeds_cDNA_P Parameter: Age (day) Value: 2 vs. 0
  misc_feature: MA Experiment 108462 PARAMETER Experiment Name: At_Germinating_Seeds_cDNA_P Parameter: Tissue Value: Germinating Seeds
  misc_feature: MA Experiment ID: 108463 Result: Up-regulated in Transcription
  misc_feature: MA Experiment 108463 PARAMETER Experiment Name: At_Germinating_Seeds_cDNA_P Parameter: Age (day) Value: 3 vs. 0
  misc_feature: MA Experiment 108463 PARAMETER Experiment Name: At_Germinating_Seeds_cDNA_P Parameter: Tissue Value: Germinating Seeds
  misc_feature: MA Experiment ID: 108464 Result: Up-regulated in Transcription
  misc_feature: MA Experiment 108464 PARAMETER Experiment Name: At_Germinating_Seeds_cDNA_P Parameter: Age (day) Value: 4 vs. 0
  misc_feature: MA Experiment 108464 PARAMETER Experiment Name: At_Germinating_Seeds_cDNA_P Parameter: Tissue Value: Germinating Seeds
  misc_feature: MA Experiment ID: 108469 Result: Up-regulated in Transcription
  misc_feature: MA Experiment ID: 108595 Result: Down-regulated in Transcription
  misc_feature: MA Experiment 108595 PARAMETER Experiment Name: At_Ler-pi_Ovule_cDNA_P Parameter: Plant Line Value: null
  misc_feature: MA Experiment ID: 20000185 Result: Up-regulated in Transcription
  misc_feature: MA Experiment 20000185 PARAMETER Experiment Name: At_Roots__P Parameter: Age (day) Value: 7 vs. 21
  misc_feature: MA Experiment 20000185 PARAMETER Experiment Name: At_Roots__P Parameter: Organism Value: A. thaliana
  misc_feature: MA Experiment 20000185 PARAMETER Experiment Name: At_Roots__P Parameter: Tissue Value: Roots vs. Whole Plant
  misc_feature: MA Experiment ID: 20000227 Result: Down-regulated in Transcription
  misc_feature: MA Experiment 20000227 PARAMETER Experiment Name: At_Root-Tips-vs-Tops_P Parameter: Tissue Value: Root Tips vs. Root Tops
  misc_feature: MA Experiment ID: 20000234 Result: Down-regulated in Transcription
  misc_feature: MA Experiment 20000234 PARAMETER Experiment Name: At_Siliques_P Parameter: Age (day) Value: 21
  misc_feature: MA Experiment 20000234 PARAMETER Experiment Name: At_Siliques_P Parameter: Organism Value: A. thaliana
  misc_feature: MA Experiment 20000234 PARAMETER Experiment Name: At_Siliques_P Parameter: Plant Line Value: WS
  misc_feature: MA Experiment 20000234 PARAMETER Experiment Name: At_Siliques_P Parameter: Tissue Value: Less Than 5mm Siliques vs. Whole Plant
  misc_feature: MA Experiment ID: 20000235 Result: Down-regulated in Transcription
  misc_feature: MA Experiment 20000235 PARAMETER Experiment Name: At_Siliques_P Parameter: Age (day) Value: 21
  misc_feature: MA Experiment 20000235 PARAMETER Experiment Name: At_Siliques_P Parameter: Organism Value: A. thaliana
  misc_feature: MA Experiment 20000235 PARAMETER Experiment Name: At_Siliques_P Parameter: Plant Line Value: WS
  misc_feature: MA Experiment 20000235 PARAMETER Experiment Name: At_Siliques_P Parameter: Tissue Value: 5-10mm Siliques vs. Whole Plant
  misc_feature: MA Experiment ID: 20000265 Result: Down-regulated in Transcription
  misc_feature: MA Experiment 20000265 PARAMETER Experiment Name: At_Open_Flower_P Parameter: Age (day) Value: 21
  misc_feature: MA Experiment 20000265 PARAMETER Experiment Name: At_Open_Flower_P Parameter: Plant Line Value: WS
  misc_feature: MA Experiment 20000265 PARAMETER Experiment Name: At_Open_Flower_P Parameter: Tissue Value: Closed Flower vs. Whole Plant
  misc_feature: MA Experiment ID: 20000286 Result: Down-regulated in Transcription
  misc_feature: MA Experiment 20000286 PARAMETER Experiment Name: At_Open_Flower_P Parameter: Age (day) Value: 21
  misc_feature: MA Experiment 20000286 PARAMETER Experiment Name: At_Open_Flower_P Parameter: Plant Line Value: WS
  misc_feature: MA Experiment 20000286 PARAMETER Experiment Name: At_Open_Flower_P Parameter: Tissue Value: Half Open vs. Whole Plant
  misc_feature: MA Experiment ID: 20001557 Result: Down-regulated in Transcription
  misc_feature: MA Experiment 20001557 PARAMETER Experiment Name: At_Drought_Soil_Dry_P Parameter: Age (day) Value: 27
  misc_feature: MA Experiment 20001557 PARAMETER Experiment Name: At_Drought_Soil_Dry_P Parameter: Organism Value: A. thaliana
  misc_feature: MA Experiment 20001557 PARAMETER Experiment Name: At_Drought_Soil_Dry_P Parameter: Plant Line Value: WS
  misc_feature: MA Experiment 20001557 PARAMETER Experiment Name: At_Drought_Soil_Dry_P Parameter: Post Timepoint (hr) Value: 3
  misc_feature: MA Experiment 20001557 PARAMETER Experiment Name: At_Drought_Soil_Dry_P Parameter: Post-Treatment Value: Re-Water vs. No Drought
  misc_feature: MA Experiment 20001557 PARAMETER Experiment Name: At_Drought_Soil_Dry_P Parameter: Timepoint (day) Value: 13
  misc_feature: MA Experiment 20001557 PARAMETER Experiment Name: At_Drought_Soil_Dry_P Parameter: Treatment Value: Drought vs. No Drought
  misc_feature: MA Experiment ID: 20001905 Result: Down-regulated in Transcription
  misc_feature: MA Experiment 20001905 PARAMETER Experiment Name: At_Drought_Reproduction_P Parameter: Age (day) Value: 40
  misc_feature: MA Experiment 20001905 PARAMETER Experiment Name: At_Drought_Reproduction_P Parameter: Organism Value: A. thaliana
  misc_feature: MA Experiment 20001905 PARAMETER Experiment Name: At_Drought_Reproduction_P Parameter: Plant Line Value: WS
  misc_feature: MA Experiment 20001905 PARAMETER Experiment Name: At_Drought_Reproduction_P Parameter: Timepoint (day) Value: 10
  misc_feature: MA Experiment 20001905 PARAMETER Experiment Name: At_Drought_Reproduction_P Parameter: Tissue Value: Rosettes
  misc_feature: MA Experiment 20001905 PARAMETER Experiment Name: At_Drought_Reproduction_P Parameter: Treatment Value: Drought vs. No Drought
actgggtcttcttcagcttctgagtcttctcctctctctctatctctcaagtgggctttgctttgctgtttttgtcttccttcgacgactcacttttgcagattctcataaattcttcaaagctttgagtcttttttcagattcgaaggtcggttttatatatgcttcaaatctcttacccaaatcaggtatggagactctgcatccattctctcacctacctatctctgaccaccggttcgttgttcaagagatggtgagctttcacagctcgagtagcggtagctggactaaagaagagaacaagatgttcgaacgagctcttgcgatatacgctgaagactcgcctgatcgctggtttaaagttgcttccatgatccctggaaagactgtttttgatgttatgaagcaatatagtaagcttgaagaagacgttttcgatattgaagcaggacgtgttcccattcctggttatcctgcagcttcttctcccttggggtttgacacggacatgtgtcgtaaacggcctagtggagctagaggatctgatcaagatcgaaagaaaggagtcccttggacagaggaagaacacaggagattcttgttaggcctactcaagtacggtaaaggagattggagaaacatatcgagaaacttcgtggtgtcaaagacgccaacgcaagtggcgagccacgcccaaaagtattaccagagacagctctccggagccaaggacaaacgcaggccaagtatccatgacatcacaaccggcaatcttctcaatgccaatctcaaccgttccttttccgatcatagagatattctccctgatttagggtttatcgataaggatgatacggaggagggagtaatatttatgggtcagaatctctcttcagaaaatctgttttctccatcaccaacttcattcgaagctgccattaacttcgccggagaaaatgtcttcagtgccggagcttaaggcaacatagaatccccaaactcagcgttcttaagaatctgagttttgaaactgtaattagagaaatataagcaaaaccaagtttattatatatgtattgtgtggtttaaaagtaagaacttgtttttactctgtatttttgtgtttctgtctactaaatacctgttatgttaaaaaattctgtgct

SEQ ID NO: 39759 - protein, 326 aa, Arabidopsis thaliana
  peptide (1)..(326): Ceres Seq. ID no. 12348408
  misc_feature (189)..(236): Pfam Name: Myb-like DNA-binding domain Pfam Description: Myb-like DNA-binding domain
  misc_feature (64)..(259): Homolog of NCBI NO: 18874263 NR Description: MYB-like transcription factor DIVARICATA
  misc_feature (64)..(259): Homolog of NCBI NO: 15237776 NR Description: I-box binding factor - like protein; protein id:
  misc_feature (63)..(259): Homolog of NCBI NO: 12005328 NR Description: unknown [Hevea brasiliensis]
  misc_feature (88)..(168): Homolog of NCBI NO: 7446171 NR Description: probable MYB family transcription factor
  misc_feature (157)..(314): Homolog of NCBI NO: 7446171 NR Description: probable MYB family transcription factor
  misc_feature (63)..(168): Homolog of NCBI NO: 30687381 NR Description: MYB family transcription factor -related
  misc_feature (157)..(314): Homolog of NCBI NO: 30687381 NR Description: MYB family transcription factor -related
  misc_feature (64)..(325): Homolog of NCBI NO: 15239231 NR Description: putative protein; protein id: At5g05790.1
  misc_feature (64)..(326): Homolog of NCBI NO: 15229712 NR Description: MYB-family transcription factor, putative
  misc_feature (64)..(326): Homolog of NCBI NO: 21618234 NR Description: MYB-family transcription factor, putative
LGLLQLLSLLLSLYLSSGLCFAVFVFLRRLTFADSHKFFKALSLFSDSKVGFIYASNLLPKSGMETLHPFSHLPISDHRFVVQEMVSFHSSSSGSWTKEENKMFERALAIYAEDSPDRWFKVASMIPGKTVFDVMKQYSKLEEDVFDIEAGRVPIPGYPAASSPLGFDTDMCRKRPSGARGSDQDRKKGVPWTEEEHRRFLLGLLKYGKGDWRNISRNFVVSKTPTQVASHAQKYYQRQLSGAKDKRRPSIHDITTGNLLNANLNRSFSDHRDILPDLGFIDKDDTEEGVIFMGQNLSSENLFSPSPTSFEAAINFAGENVFSAGA

SEQ ID NO: 39760 - protein, 263 aa, Arabidopsis thaliana
  peptide (1)..(263): Ceres Seq. ID no. 12348409
  misc_feature (126)..(173): Pfam Name: Myb-like DNA-binding domain Pfam Description: Myb-like DNA-binding domain
  misc_feature (1)..(196): Homolog of NCBI NO: 18874263 NR Description: MYB-like transcription factor DIVARICATA
  misc_feature (1)..(196): Homolog of NCBI NO: 15237776 NR Description: I-box binding factor - like protein; protein id:
  misc_feature (1)..(196): Homolog of NCBI NO: 12005328 NR Description: unknown [Hevea brasiliensis]
  misc_feature (25)..(105): Homolog of NCBI NO: 7446171 NR Description: probable MYB family transcription factor
  misc_feature (94)..(251): Homolog of NCBI NO: 7446171 NR Description: probable MYB family transcription factor
  misc_feature (1)..(105): Homolog of NCBI NO: 30687381 NR Description: MYB family transcription factor -related
  misc_feature (94)..(251): Homolog of NCBI NO: 30687381 NR Description: MYB family transcription factor -related
  misc_feature (1)..(262): Homolog of NCBI NO: 15239231 NR Description: putative protein; protein id: At5g05790.1
  misc_feature (1)..(263): Homolog of NCBI NO: 15229712 NR Description: MYB-family transcription factor, putative
  misc_feature (1)..(263): Homolog of NCBI NO: 21618234 NR Description: MYB-family transcription factor, putative
METLHPFSHLPISDHRFVVQEMVSFHSSSSGSWTKEENKMFERALAIYAEDSPDRWFKVASMIPGKTVFDVMKQYSKLEEDVFDIEAGRVPIPGYPAASSPLGFDTDMCRKRPSGARGSDQDRKKGVPWTEEEHRRFLLGLLKYGKGDWRNISRNFVVSKTPTQVASHAQKYYQRQLSGAKDKRRPSIHDITTGNLLNANLNRSFSDHRDILPDLGFIDKDDTEEGVIFMGQNLSSENLFSPSPTSFEAAINFAGENVFSAGA

SEQ ID NO: 39761 - protein, 242 aa, Arabidopsis thaliana
  peptide (1)..(242): Ceres Seq. ID no. 12348410
  misc_feature (105)..(152): Pfam Name: Myb-like DNA-binding domain Pfam Description: Myb-like DNA-binding domain
  misc_feature (1)..(175): Homolog of NCBI NO: 18874263 NR Description: MYB-like transcription factor DIVARICATA
  misc_feature (1)..(175): Homolog of NCBI NO: 15237776 NR Description: I-box binding factor - like protein; protein id:
  misc_feature (1)..(175): Homolog of NCBI NO: 12005328 NR Description: unknown [Hevea brasiliensis]
  misc_feature (4)..(84): Homolog of NCBI NO: 7446171 NR Description: probable MYB family transcription factor
  misc_feature (73)..(230): Homolog of NCBI NO: 7446171 NR Description: probable MYB family transcription factor
  misc_feature (1)..(84): Homolog of NCBI NO: 30687381 NR Description: MYB family transcription factor -related
  misc_feature (73)..(230): Homolog of NCBI NO: 30687381 NR Description: MYB family transcription factor -related
  misc_feature (1)..(241): Homolog of NCBI NO: 15239231 NR Description: putative protein; protein id: At5g05790.1
  misc_feature (1)..(242): Homolog of NCBI NO: 15229712 NR Description: MYB-family transcription factor, putative
  misc_feature (1)..(242): Homolog of NCBI NO: 21618234 NR Description: MYB-family transcription factor, putative
MVSFHSSSSGSWTKEENKMFERALAIYAEDSPDRWFKVASMIPGKTVFDVMKQYSKLEEDVFDIEAGRVPIPGYPAASSPLGFDTDMCRKRPSGARGSDQDRKKGVPWTEEEHRRFLLGLLKYGKGDWRNISRNFVVSKTPTQVASHAQKYYQRQLSGAKDKRRPSIHDITTGNLLNANLNRSFSDHRDILPDLGFIDKDDTEEGVIFMGQNLSSENLFSPSPTSFEAAINFAGENVFSAGA

SEQ ID NO: 39762 - DNA, 1555 bp, Arabidopsis thaliana; identical to SEQ ID NO: 23117
  misc_feature (1)..(1555): Ceres Seq. ID no. 12562703
  misc_feature: MA Experiment ID: 108434 Result: Down-regulated in Transcription
  misc_feature: MA Experiment 108434 PARAMETER Experiment Name: At_Root_Tips_cDNA_P Parameter: Tissue Value: Root Tips
  misc_feature: MA Experiment ID: 108573 Result: Up-regulated in Transcription
  misc_feature: MA Experiment 108573 PARAMETER Experiment Name: At_Drought_cDNA_P Parameter: Timepoint (hr) Value: 6
  misc_feature: MA Experiment 108573 PARAMETER Experiment Name: At_Drought_cDNA_P Parameter: Tissue Value: Aerial
  misc_feature: MA Experiment 108573 PARAMETER Experiment Name: At_Drought_cDNA_P Parameter: Treatment Value: Drought vs. No Drought
  misc_feature: MA Experiment ID: 20000224 Result: Down-regulated in Transcription
  misc_feature: MA Experiment ID: 20000227 Result: Down-regulated in Transcription
  misc_feature: MA Experiment 20000227 PARAMETER Experiment Name: At_Root-Tips-vs-Tops_P Parameter: Tissue Value: Root Tips vs. Root Tops
  misc_feature: MA Experiment ID: 20000234 Result: Down-regulated in Transcription
  misc_feature: MA Experiment 20000234 PARAMETER Experiment Name: At_Siliques_P Parameter: Age (day) Value: 21
  misc_feature: MA Experiment 20000234 PARAMETER Experiment Name: At_Siliques_P Parameter: Organism Value: A. thaliana
  misc_feature: MA Experiment 20000234 PARAMETER Experiment Name: At_Siliques_P Parameter: Plant Line Value: WS
  misc_feature: MA Experiment 20000234 PARAMETER Experiment Name: At_Siliques_P Parameter: Tissue Value: Less Than 5mm Siliques vs. Whole Plant
  misc_feature: MA Experiment ID: 20000235 Result: Down-regulated in Transcription
  misc_feature: MA Experiment 20000235 PARAMETER Experiment Name: At_Siliques_P Parameter: Age (day) Value: 21
  misc_feature: MA Experiment 20000235 PARAMETER Experiment Name: At_Siliques_P Parameter: Organism Value: A. thaliana
  misc_feature: MA Experiment 20000235 PARAMETER Experiment Name: At_Siliques_P Parameter: Plant Line Value: WS
  misc_feature: MA Experiment 20000235 PARAMETER Experiment Name: At_Siliques_P Parameter: Tissue Value: 5-10mm Siliques vs. Whole Plant
  misc_feature: MA Experiment ID: 20000264 Result: Down-regulated in Transcription
  misc_feature: MA Experiment 20000264 PARAMETER Experiment Name: At_Open_Flower_P Parameter: Age (day) Value: 21
  misc_feature: MA Experiment 20000264 PARAMETER Experiment Name: At_Open_Flower_P Parameter: Plant Line Value: WS
  misc_feature: MA Experiment 20000264 PARAMETER Experiment Name: At_Open_Flower_P Parameter: Tissue Value: Open Flower vs. Whole Plant
  misc_feature: MA Experiment ID: 20000265 Result: Down-regulated in Transcription
  misc_feature: MA Experiment 20000265 PARAMETER Experiment Name: At_Open_Flower_P Parameter: Age (day) Value: 21
  misc_feature: MA Experiment 20000265 PARAMETER Experiment Name: At_Open_Flower_P Parameter: Plant Line Value: WS
  misc_feature: MA Experiment 20000265 PARAMETER Experiment Name: At_Open_Flower_P Parameter: Tissue Value: Closed Flower vs. Whole Plant
  misc_feature: MA Experiment ID: 20000286 Result: Down-regulated in Transcription
  misc_feature: MA Experiment 20000286 PARAMETER Experiment Name: At_Open_Flower_P Parameter: Age (day) Value: 21
  misc_feature: MA Experiment 20000286 PARAMETER Experiment Name: At_Open_Flower_P Parameter: Plant Line Value: WS
  misc_feature: MA Experiment 20000286 PARAMETER Experiment Name: At_Open_Flower_P Parameter: Tissue Value: Half Open vs. Whole Plant
  misc_feature: MA Experiment ID: 20001560 Result: Down-regulated in Transcription
  misc_feature: MA Experiment 20001560 PARAMETER Experiment Name: At_Drought_Soil_Dry_P Parameter: Age (day) Value: 28
  misc_feature: MA Experiment 20001560 PARAMETER Experiment Name: At_Drought_Soil_Dry_P Parameter: Organism Value: A. thaliana
  misc_feature: MA Experiment 20001560 PARAMETER Experiment Name: At_Drought_Soil_Dry_P Parameter: Plant Line Value: WS
  misc_feature: MA Experiment 20001560 PARAMETER Experiment Name: At_Drought_Soil_Dry_P Parameter: Post Timepoint (hr) Value: None
  misc_feature: MA Experiment 20001560 PARAMETER Experiment Name: At_Drought_Soil_Dry_P Parameter: Post-Treatment Value: None
  misc_feature: MA Experiment 20001560 PARAMETER Experiment Name: At_Drought_Soil_Dry_P Parameter: Timepoint (day) Value: 14
  misc_feature: MA Experiment 20001560 PARAMETER Experiment Name: At_Drought_Soil_Dry_P Parameter: Treatment Value: Drought vs. No Drought

SEQ ID NO: 39763 - protein, 413 aa, Arabidopsis thaliana; identical to SEQ ID NO: 23118
  peptide (1)..(413): Ceres Seq. ID no. 12562704
  misc_feature (77)..(326): Homolog of NCBI NO: 21740745 NR Description: OSJNBa0072K14.10 [Oryza sativa (japonica
  misc_feature (40)..(407): Homolog of NCBI NO: 34899302 NR Description: putative protein serine/threonine kinase
  misc_feature (14)..(411): Homolog of NCBI NO: 7573596 NR Description: protein kinase 1 [Populus nigra]
  misc_feature (40)..(407): Homolog of NCBI NO: 34395193 NR Description: putative protein serine/threonine kinase
  misc_feature (56)..(407): Homolog of NCBI NO: 34907210 NR Description: putative serine/threonine kinase PBS1 protein
  misc_feature (80)..(406): Homolog of NCBI NO: 34394036 NR Description: putative protein serine/threonine kinase BNK1
  misc_feature (35)..(407): Homolog of NCBI NO: 15238886 NR Description: protein kinase -like protein; protein id:
  misc_feature (37)..(413): Homolog of NCBI NO: 10445209 NR Description: protein serine/threonine kinase BNK1 [Brassica
  misc_feature (37)..(413): Homolog of NCBI NO: 30679773 NR Description: protein kinase family [Arabidopsis thaliana]
  misc_feature (37)..(412): Homolog of NCBI NO: 11259782 NR Description: protein kinase-like - Arabidopsis thaliana
  misc_feature (77)..(326): Homolog of NCBI NO: 21740745 NR Description: OSJNBa0072K14.10 [Oryza sativa (japonica
  misc_feature (40)..(407): Homolog of NCBI NO: 34899302 NR Description: putative protein serine/threonine kinase
  misc_feature (14)..(411): Homolog of NCBI NO: 7573596 NR Description: protein kinase 1 [Populus nigra]
  misc_feature (40)..(407): Homolog of NCBI NO: 34395193 NR Description: putative protein serine/threonine kinase
  misc_feature (56)..(407): Homolog of NCBI NO: 34907210 NR Description: putative serine/threonine kinase PBS1 protein
  misc_feature (80)..(406): Homolog of NCBI NO: 34394036 NR Description: putative protein serine/threonine kinase BNK1
  misc_feature (35)..(407): Homolog of NCBI NO: 15238886 NR Description: protein kinase -like protein; protein id:
  misc_feature (37)..(413): Homolog of NCBI NO: 10445209 NR Description: protein serine/threonine kinase BNK1 [Brassica
  misc_feature (37)..(413): Homolog of NCBI NO: 30679773 NR Description: protein kinase family [Arabidopsis thaliana]
  misc_feature (37)..(412): Homolog of NCBI NO: 11259782 NR Description: protein kinase-like - Arabidopsis thaliana

SEQ ID NO: 39764 - protein, 258 aa, Arabidopsis thaliana; identical to SEQ ID NO: 23119
  peptide (1)..(258): Ceres Seq. ID no. 12562705
  misc_feature (1)..(171): Homolog of NCBI NO: 21740745 NR Description: OSJNBa0072K14.10 [Oryza sativa (japonica
  misc_feature (1)..(252): Homolog of NCBI NO: 34899302 NR Description: putative protein serine/threonine kinase
  misc_feature (1)..(256): Homolog of NCBI NO: 7573596 NR Description: protein kinase 1 [Populus nigra]
  misc_feature (1)..(252): Homolog of NCBI NO: 34395193 NR Description: putative protein serine/threonine kinase
  misc_feature (1)..(252): Homolog of NCBI NO: 34907210 NR Description: putative serine/threonine kinase PBS1 protein
  misc_feature (1)..(251): Homolog of NCBI NO: 34394036 NR Description: putative protein serine/threonine kinase BNK1
  misc_feature (1)..(252): Homolog of NCBI NO: 15238886 NR Description: protein kinase -like protein; protein id:
  misc_feature (1)..(258): Homolog of NCBI NO: 10445209 NR Description: protein serine/threonine kinase BNK1 [Brassica
  misc_feature (1)..(258): Homolog of NCBI NO: 30679773 NR Description: protein kinase family [Arabidopsis thaliana]
  misc_feature (1)..(257): Homolog of NCBI NO: 11259782 NR Description: protein kinase-like - Arabidopsis thaliana
  misc_feature (1)..(171): Homolog of NCBI NO: 21740745 NR Description: OSJNBa0072K14.10 [Oryza sativa (japonica
  misc_feature (1)..(252): Homolog of NCBI NO: 34899302 NR Description: putative protein serine/threonine kinase
  misc_feature (1)..(256): Homolog of NCBI NO: 7573596 NR Description: protein kinase 1 [Populus nigra]
  misc_feature (1)..(252): Homolog of NCBI NO: 34395193 NR Description: putative protein serine/threonine kinase
  misc_feature (1)..(252): Homolog of NCBI NO: 34907210 NR Description: putative serine/threonine kinase PBS1 protein
  misc_feature (1)..(251): Homolog of NCBI NO: 34394036 NR Description: putative protein serine/threonine kinase BNK1
  misc_feature (1)..(252): Homolog of NCBI NO: 15238886 NR Description: protein kinase -like protein; protein id:
  misc_feature (1)..(258): Homolog of NCBI NO: 10445209 NR Description: protein serine/threonine kinase BNK1 [Brassica
  misc_feature (1)..(258): Homolog of NCBI NO: 30679773 NR Description: protein kinase family [Arabidopsis thaliana]
  misc_feature (1)..(257): Homolog of NCBI NO: 11259782 NR Description: protein kinase-like - Arabidopsis thaliana

SEQ ID NO: 39765 - protein, 229 aa, Arabidopsis thaliana; identical to SEQ ID NO: 23120
  peptide (1)..(229): Ceres Seq. ID no. 12562706
  misc_feature (1)..(142): Homolog of NCBI NO: 21740745 NR Description: OSJNBa0072K14.10 [Oryza sativa (japonica
  misc_feature (1)..(223): Homolog of NCBI NO: 34899302 NR Description: putative protein serine/threonine kinase
  misc_feature (1)..(227): Homolog of NCBI NO: 7573596 NR Description: protein kinase 1 [Populus nigra]
  misc_feature (1)..(223): Homolog of NCBI NO: 34395193 NR Description: putative protein serine/threonine kinase
  misc_feature (1)..(223): Homolog of NCBI NO: 34907210 NR Description: putative serine/threonine kinase PBS1 protein
  misc_feature (1)..(222): Homolog of NCBI NO: 34394036 NR Description: putative protein serine/threonine kinase BNK1
  misc_feature (1)..(223): Homolog of NCBI NO: 15238886 NR Description: protein kinase -like protein; protein id:
  misc_feature (1)..(229): Homolog of NCBI NO: 10445209 NR Description: protein serine/threonine kinase BNK1 [Brassica
  misc_feature (1)..(229): Homolog of NCBI NO: 30679773 NR Description: protein kinase family [Arabidopsis thaliana]
  misc_feature (1)..(228): Homolog of NCBI NO: 11259782 NR Description: protein kinase-like - Arabidopsis thaliana
  misc_feature (1)..(142): Homolog of NCBI NO: 21740745 NR Description: OSJNBa0072K14.10 [Oryza sativa (japonica
  misc_feature (1)..(223): Homolog of NCBI NO: 34899302 NR Description: putative protein serine/threonine kinase
  misc_feature (1)..(227): Homolog of NCBI NO: 7573596 NR Description: protein kinase 1 [Populus nigra]
  misc_feature (1)..(223): Homolog of NCBI NO: 34395193 NR Description: putative protein serine/threonine kinase
  misc_feature (1)..(223): Homolog of NCBI NO: 34907210 NR Description: putative serine/threonine kinase PBS1 protein
  misc_feature (1)..(222): Homolog of NCBI NO: 34394036 NR Description: putative protein serine/threonine kinase BNK1
  misc_feature (1)..(223): Homolog of NCBI NO: 15238886 NR Description: protein kinase -like protein; protein id:
  misc_feature (1)..(229): Homolog of NCBI NO: 10445209 NR Description: protein serine/threonine kinase BNK1 [Brassica
  misc_feature (1)..(229): Homolog of NCBI NO: 30679773 NR Description: protein kinase family [Arabidopsis thaliana]
  misc_feature (1)..(228): Homolog of NCBI NO: 11259782 NR Description: protein kinase-like - Arabidopsis thaliana

SEQ ID NO: 39766 - DNA, 2298 bp, Arabidopsis thaliana
  misc_feature (1)..(2298): Ceres Seq. ID no. 13489521
  misc_feature: MA Experiment ID: 108434 Result: Down-regulated in Transcription
  misc_feature: MA Experiment 108434 PARAMETER Experiment Name: At_Root_Tips_cDNA_P Parameter: Tissue Value: Root Tips
  misc_feature: MA Experiment ID: 108463 Result: Up-regulated in Transcription
  misc_feature: MA Experiment 108463 PARAMETER Experiment Name: At_Germinating_Seeds_cDNA_P Parameter: Age (day) Value: 3 vs. 0
  misc_feature: MA Experiment 108463 PARAMETER Experiment Name: At_Germinating_Seeds_cDNA_P Parameter: Tissue Value: Germinating Seeds
  misc_feature: MA Experiment ID: 108464 Result: Up-regulated in Transcription
  misc_feature: MA Experiment 108464 PARAMETER Experiment Name: At_Germinating_Seeds_cDNA_P Parameter: Age (day) Value: 4 vs. 0
  misc_feature: MA Experiment 108464 PARAMETER Experiment Name: At_Germinating_Seeds_cDNA_P Parameter: Tissue Value: Germinating Seeds
  misc_feature: MA Experiment ID: 108573 Result: Up-regulated in Transcription
  misc_feature: MA Experiment 108573 PARAMETER Experiment Name: At_Drought_cDNA_P Parameter: Timepoint (hr) Value: 6
  misc_feature: MA Experiment 108573 PARAMETER Experiment Name: At_Drought_cDNA_P Parameter: Tissue Value: Aerial
  misc_feature: MA Experiment 108573 PARAMETER Experiment Name: At_Drought_cDNA_P Parameter: Treatment Value: Drought vs. No Drought
  misc_feature: MA Experiment ID: 108579 Result: Down-regulated in Transcription
  misc_feature: MA Experiment 108579 PARAMETER Experiment Name: At_4deg_Cold_cDNA_P Parameter: Temperature (deg C) Value: 4 vs. 22
  misc_feature: MA Experiment 108579 PARAMETER Experiment Name: At_4deg_Cold_cDNA_P Parameter: Timepoint (hr) Value: 6
  misc_feature: MA Experiment 108579 PARAMETER Experiment Name: At_4deg_Cold_cDNA_P Parameter: Tissue Value: Aerial
  misc_feature: MA Experiment ID: 20000087 Result: Down-regulated in Transcription
  misc_feature: MA Experiment 20000087 PARAMETER Experiment Name: At_100uM_ABA_Mutants_cDNA_P Parameter: Plant Line Value: WS
  misc_feature: MA Experiment 20000087 PARAMETER Experiment Name: At_100uM_ABA_Mutants_cDNA_P Parameter: Timepoint (hr) Value: 6
  misc_feature: MA Experiment 20000087 PARAMETER Experiment Name: At_100uM_ABA_Mutants_cDNA_P Parameter: Tissue Value: Aerial
  misc_feature: MA Experiment 20000087 PARAMETER Experiment Name: At_100uM_ABA_Mutants_cDNA_P Parameter: Treatment Value: 100uM ABA vs. No Treatment
  misc_feature: MA Experiment ID: 20000184 Result: Down-regulated in Transcription
  misc_feature: MA Experiment 20000184 PARAMETER Experiment Name: At_Shoots__P Parameter: Age (day) Value: 7
  misc_feature: MA Experiment 20000184 PARAMETER Experiment Name: At_Shoots__P Parameter: Tissue Value: Shoots vs. Whole Plant
  misc_feature: MA Experiment ID: 20000234 Result: Down-regulated in Transcription
  misc_feature: MA Experiment 20000234 PARAMETER Experiment Name: At_Siliques_P Parameter: Age (day) Value: 21
  misc_feature: MA Experiment 20000234 PARAMETER Experiment Name: At_Siliques_P Parameter: Organism Value: A. thaliana
  misc_feature: MA Experiment 20000234 PARAMETER Experiment Name: At_Siliques_P Parameter: Plant Line Value: WS
  misc_feature: MA Experiment 20000234 PARAMETER Experiment Name: At_Siliques_P Parameter: Tissue Value: Less Than 5mm Siliques vs. Whole Plant
  misc_feature: MA Experiment ID: 20000235 Result: Down-regulated in Transcription
  misc_feature: MA Experiment 20000235 PARAMETER Experiment Name: At_Siliques_P Parameter: Age (day) Value: 21
  misc_feature: MA Experiment 20000235 PARAMETER Experiment Name: At_Siliques_P Parameter: Organism Value: A. thaliana
  misc_feature: MA Experiment 20000235 PARAMETER Experiment Name: At_Siliques_P Parameter: Plant Line Value: WS
  misc_feature: MA Experiment 20000235 PARAMETER Experiment Name: At_Siliques_P Parameter: Tissue Value: 5-10mm Siliques vs. Whole Plant
  misc_feature: MA Experiment ID: 20000265 Result: Down-regulated in Transcription
  misc_feature: MA Experiment 20000265 PARAMETER Experiment Name: At_Open_Flower_P Parameter: Age (day) Value: 21
  misc_feature: MA Experiment 20000265 PARAMETER Experiment Name: At_Open_Flower_P Parameter: Plant Line Value: WS
  misc_feature: MA Experiment 20000265 PARAMETER Experiment Name: At_Open_Flower_P Parameter: Tissue Value: Closed Flower vs. Whole Plant
  misc_feature: MA Experiment ID: 20000286 Result: Down-regulated in Transcription
  misc_feature: MA Experiment 20000286 PARAMETER Experiment Name: At_Open_Flower_P Parameter: Age (day) Value: 21
  misc_feature: MA Experiment 20000286 PARAMETER Experiment Name: At_Open_Flower_P Parameter: Plant Line Value: WS
  misc_feature: MA Experiment 20000286 PARAMETER Experiment Name: At_Open_Flower_P Parameter: Tissue Value: Half Open vs. Whole Plant
  misc_feature: MA Experiment ID: 20001911 Result: Up-regulated in Transcription
  misc_feature: MA Experiment 20001911 PARAMETER Experiment Name: At_Drought_Reproduction_P Parameter: Age (day) Value: 40
  misc_feature: MA Experiment 20001911 PARAMETER Experiment Name: At_Drought_Reproduction_P Parameter: Organism Value: A. thaliana
  misc_feature: MA Experiment 20001911 PARAMETER Experiment Name: At_Drought_Reproduction_P Parameter: Plant Line Value: WS
  misc_feature: MA Experiment 20001911 PARAMETER Experiment Name: At_Drought_Reproduction_P Parameter: Timepoint (day) Value: 10
  misc_feature: MA Experiment 20001911 PARAMETER Experiment Name: At_Drought_Reproduction_P Parameter: Tissue Value: Flowers
  misc_feature: MA Experiment 20001911 PARAMETER Experiment Name: At_Drought_Reproduction_P Parameter: Treatment Value: Drought vs. No Drought
aaaaaaaatcagaacccaaagccaaagcgtttttatcatttctgtcttcttctgtgtaaacagtaagaccccaaaggtcaaacctttaggctttgtttcttcctttaaggcttttttccgacgtttatatcagatttcttcttgtcaatttcttcatttggacaacctccataatccaagaccgacccttttcctctaatctctcctgttgcagctgaatggtggaacaaactgtggttagagaacatatcaaagcgagagtcatgtcattagtgaggtctgcagagccatcctcatataggaacccgaagctttacacgttgaatgagaatggtaataacaatggtgtcagttctgctcaaatctttgatccagataggtcaaagaatccttgtctgactgatgattcttacccaagccaaagttatgagaagtactttcttgattcgccaactgatgagtttgttcaacatcctattggctctggtgcctcggttagctcatttggctctttagactcatttccttatcagtcaagaccagttcttggatgttccatggaatttcagttaccgttggattcaacctctacttcatctacaaggcttttgggagattaccaagcggtttcttacagtccgagcatggatgtagtggaggagtttgatgatgagcaaatgagatcaaagattcaagagcttgaaagagcgcttctcggcgatgaagatgataaaatggttggaatagataacctcatggagattgacagcgaatggtcgtaccaaaacgaaagcgaacagcatcaagactcgcccaaagaatcatcgtctgcagattccaactctcatgtaagtagcaaagaagtggtgtctcaagccactccaaagcaaatcttgatatcttgtgctcgtgcgctatctgaaggaaaattagaagaagctttgtcaatggtaaatgagctgaggcagatagtttctatccaaggagacccttctcagagaatcgcagcttacatggtggaaggtctagctgcaagaatggccgcttcaggaaaattcatctacagagcattgaaatgcaaagagcctccttcggatgagaggcttgcagctatgcaagtcctgtttgaagtctgcccttgtttcaagttcgggtttttagcagctaatggtgcgatacttgaagcaatcaaaggtgaagaagaagttcacataatcgatttcgatataaaccaagggaaccaatacatgacactgatacgaagcattgctgagttgcctggtaaacgacctcgcctgaggttaacaggaattgatgaccctgaatcagtccaacgctccattggagggctaagaatcatcggtctaagactcgagcaactcgcagaggataatggagtatccttcaaattcaaagcaatgccttcaaagacttcgattgtctctccatcaacactcggttgcaaaccaggagaaaccttaatagtgaactttgcattccaacttcaccacatgcctgacgagagtgtcacaacagtaaaccagcgggacgagctacttcacatggtcaaaagcttaaacccaaagcttgtcacggtcgttgaacaagacgtgaacacaaacacttcaccgttctttcccagattcatagaggcttacgaatactactcagcagttttcgagtctctagacatgacacttccaagagaaagccaagagaggatgaatgtagaaagacagtgtctcgctagagacatagtcaacattgttgcttgcgaaggagaagaacggatagagagatacgaggctgcgggaaaatggagagcaaggatgatgatggctggattcaatccaaaaccaatgagtgctaaagtaaccaacaatatacaaaacctgataaagcaacaatattgcaataagtacaagcttaaagaagaaatgggtgagctccatttttgctgggaggagaaaagcttaatcgttgcttcagcttggaggtaagataagtgacaagagcatatagtctttatgtttcataaaacataattatgtttttactgtaatcttgggttattgtgtaactggttaaatcatctccatgtattattaccagaggttaggggtgatcacaggtactaaaagctaatctaacacttatggaagaatttttctttcttttttttccctattatataaaaataattagagttttggttctaaacctatttgctaagtgtgaatgagtctttacatgttcatatttcagttcaaatggttaaatttgttaaggttctcactt

SEQ ID NO: 39767 - protein, 593 aa, Arabidopsis thaliana
  peptide (1)..(593): Ceres Seq. ID no. 13489522
  misc_feature (196)..(502): Pfam Name: GRAS family transcription factor Pfam Description: GRAS family transcription factor
  misc_feature (179)..(593): Homolog of NCBI NO: 30694805 NR Description: scarecrow-like transcription factor 5 (SCL5)
  misc_feature (179)..(593): Homolog of NCBI NO: 23397333 NR Description: putative scarecrow protein [Arabidopsis thaliana]
  misc_feature (179)..(593): Homolog of NCBI NO: 14517552 NR Description: F17J6.12/F17J6.12 [Arabidopsis thaliana]
  misc_feature (201)..(592): Homolog of NCBI NO: 25989334 NR Description: chitin-inducible gibberellin-responsive protein
  misc_feature (223)..(592): Homolog of NCBI NO: 37533564 NR Description: putative SCARECROW gene regulator-like
  misc_feature (197)..(593): Homolog of NCBI NO: 26450054 NR Description: putative SCARECROW gene regulator [Arabidopsis
  misc_feature (197)..(593): Homolog of NCBI NO: 15238903 NR Description: phytochrome A signal transduction 1 (PAT1)
  misc_feature (135)..(593): Homolog of NCBI NO: 34907424 NR Description: scarecrow-like protein [Oryza sativa (japonica
  misc_feature (242)..(593): Homolog of NCBI NO: 11358822 NR Description: scarecrow-like protein 1
  misc_feature (1)..(593): Homolog of NCBI NO: 15218990 NR Description: scarecrow-like transcription factor 1 (SCL1)
MVEQTVVREHIKARVMSLVRSAEPSSYRNPKLYTLNENGNNNGVSSAQIFDPDRSKNPCLTDDSYPSQSYEKYFLDSPTDEFVQHPIGSGASVSSFGSLDSFPYQSRPVLGCSMEFQLPLDSTSTSSTRLLGDYQAVSYSPSMDVVEEFDDEQMRSKIQELERALLGDEDDKMVGIDNLMEIDSEWSYQNESEQHQDSPKESSSADSNSHVSSKEVVSQATPKQILISCARALSEGKLEEALSMVNELRQIVSIQGDPSQRIAAYMVEGLAARMAASGKFIYRALKCKEPPSDERLAAMQVLFEVCPCFKFGFLAANGAILEAIKGEEEVHIIDFDINQGNQYMTLIRSIAELPGKRPRLRLTGIDDPESVQRSIGGLRIIGLRLEQLAEDNGVSFKFKAMPSKTSIVSPSTLGCKPGETLIVNFAFQLHHMPDESVTTVNQRDELLHMVKSLNPKLVTVVEQDVNTNTSPFFPRFIEAYEYYSAVFESLDMTLPRESQERMNVERQCLARDIVNIVACEGEERIERYEAAGKWRARMMMAGFNPKPMSAKVTNNIQNLIKQQYCNKYKLKEEMGELHFCWEEKSLIVASAWR

SEQ ID NO: 39768 - protein, 578 aa, Arabidopsis thaliana
  peptide (1)..(578): Ceres Seq. ID no. 13489523
  misc_feature (181)..(487): Pfam Name: GRAS family transcription factor Pfam Description: GRAS family transcription factor
  misc_feature (164)..(578): Homolog of NCBI NO: 25405382 NR Description: scarecrow-like protein [imported] - Arabidopsis
  misc_feature (164)..(578): Homolog of NCBI NO: 23397333 NR Description: putative scarecrow protein [Arabidopsis thaliana]
  misc_feature (164)..(578): Homolog of NCBI NO: 14517552 NR Description: F17J6.12/F17J6.12 [Arabidopsis thaliana]
  misc_feature (186)..(577): Homolog of NCBI NO: 25989334 NR Description: chitin-inducible gibberellin-responsive protein
  misc_feature (208)..(577): Homolog of NCBI NO: 37533564 NR Description: putative SCARECROW gene regulator-like
  misc_feature (182)..(578): Homolog of NCBI NO: 26450054 NR Description: putative SCARECROW gene regulator [Arabidopsis
  misc_feature (182)..(578): Homolog of NCBI NO: 15238903 NR Description: phytochrome A signal transduction 1 (PAT1)
  misc_feature (120)..(578): Homolog of NCBI NO: 34907424 NR Description: scarecrow-like protein [Oryza sativa (japonica
  misc_feature (227)..(578): Homolog of NCBI NO: 11358822 NR Description: scarecrow-like protein 1
  misc_feature (1)..(578): Homolog of NCBI NO: 15218990 NR Description: scarecrow-like transcription factor 1 (SCL1)
MSLVRSAEPSSYRNPKLYTLNENGNNNGVSSAQIFDPDRSKNPCLTDDSYPSQSYEKYFLDSPTDEFVQHPIGSGASVSSFGSLDSFPYQSRPVLGCSMEFQLPLDSTSTSSTRLLGDYQAVSYSPSMDVVEEFDDEQMRSKIQELERALLGDEDDKMVGIDNLMEIDSEWSYQNESEQHQDSPKESSSADSNSHVSSKEVVSQATPKQILISCARALSEGKLEEALSMVNELRQIVSIQGDPSQRIAAYMVEGLAARMAASGKFIYRALKCKEPPSDERLAAMQVLFEVCPCFKFGFLAANGAILEAIKGEEEVHIIDFDINQGNQYMTLIRSIAELPGKRPRLRLTGIDDPESVQRSIGGLRIIGLRLEQLAEDNGVSFKFKAMPSKTSIVSPSTLGCKPGETLIVNFAFQLHHMPDESVTTVNQRDELLHMVKSLNPKLVTVVEQDVNTNTSPFFPRFIEAYEYYSAVFESLDMTLPRESQERMNVERQCLARDIVNIVACEGEERIERYEAAGKWRARMMMAGFNPKPMSAKVTNNIQNLIKQQYCNKYKLKEEMGELHFCWEEKSLIVASAWR

SEQ ID NO: 39769 - protein, 480 aa, Arabidopsis thaliana
  peptide (1)..(480): Ceres Seq. ID no. 13489524
  misc_feature (83)..(389): Pfam Name: GRAS family transcription factor Pfam Description: GRAS family transcription factor
  misc_feature (66)..(480): Homolog of NCBI NO: 30694805 NR Description: scarecrow-like transcription factor 5 (SCL5)
  misc_feature (66)..(480): Homolog of NCBI NO: 23397333 NR Description: putative scarecrow protein [Arabidopsis thaliana]
  misc_feature (66)..(480): Homolog of NCBI NO: 14517552 NR Description: F17J6.12/F17J6.12 [Arabidopsis thaliana]
  misc_feature (88)..(479): Homolog of NCBI NO: 25989334 NR Description: chitin-inducible gibberellin-responsive protein
  misc_feature (110)..(479): Homolog of NCBI NO: 37533564 NR Description: putative SCARECROW gene regulator-like
  misc_feature (84)..(480): Homolog of NCBI NO: 26450054 NR Description: putative SCARECROW gene regulator [Arabidopsis
  misc_feature (84)..(480): Homolog of NCBI NO: 15238903 NR Description: phytochrome A signal transduction 1 (PAT1)
  misc_feature (22)..(480): Homolog of NCBI NO: 34907424 NR Description: scarecrow-like protein [Oryza sativa (japonica
  misc_feature (129)..(480): Homolog of NCBI NO: 11358822 NR Description: scarecrow-like protein 1
  misc_feature (1)..(480): Homolog of NCBI NO: 15218990 NR Description: scarecrow-like transcription factor 1 (SCL1)
MEFQLPLDSTSTSSTRLLGDYQAVSYSPSMDVVEEFDDEQMRSKIQELERALLGDEDDKMVGIDNLMEIDSEWSYQNESEQHQDSPKESSSADSNSHVSSKEVVSQATPKQILISCARALSEGKLEEALSMVNELRQIVSIQGDPSQRIAAYMVEGLAARMAASGKFIYRALKCKEPPSDERLAAMQVLFEVCPCFKFGFLAANGAILEAIKGEEEVHIIDFDINQGNQYMTLIRSIAELPGKRPRLRLTGIDDPESVQRSIGGLRIIGLRLEQLAEDNGVSFKFKAMPSKTSIVSPSTLGCKPGETLIVNFAFQLHHMPDESVTTVNQRDELLHMVKSLNPKLVTVVEQDVNTNTSPFFPRFIEAYEYYSAVFESLDMTLPRESQERMNVERQCLARDIVNIVACEGEERIERYEAAGKWRARMMMAGFNPKPMSAKVTNNIQNLIKQQYCNKYKLKEEMGELHFCWEEKSLIVASAWR

SEQ ID NO: 39770 - DNA, 1598 bp, Arabidopsis thaliana
  misc_feature (1)..(1598): Ceres Seq. ID no. 12328576
  misc_feature: MA Experiment ID: 108573 Result: Up-regulated in Transcription
  misc_feature: MA Experiment 108573 PARAMETER Experiment Name: At_Drought_cDNA_P Parameter: Timepoint (hr) Value: 6
  misc_feature: MA Experiment 108573 PARAMETER Experiment Name: At_Drought_cDNA_P Parameter: Tissue Value: Aerial
  misc_feature: MA Experiment 108573 PARAMETER Experiment Name: At_Drought_cDNA_P Parameter: Treatment Value: Drought vs. No Drought
  misc_feature: MA Experiment ID: 108607 Result: Up-regulated in Transcription
  misc_feature: MA Experiment 108607 PARAMETER Experiment Name: At_100uM_ABA_cDNA_P Parameter: Timepoint (hr) Value: 4
  misc_feature: MA Experiment 108607 PARAMETER Experiment Name: At_100uM_ABA_cDNA_P Parameter: Tissue Value: Aerial
  misc_feature: MA Experiment 108607 PARAMETER Experiment Name: At_100uM_ABA_cDNA_P Parameter: Treatment Value: 100uM ABA vs. No Treatment
  misc_feature: MA Experiment ID: 20000069 Result: Up-regulated in Transcription
  misc_feature: MA Experiment 20000069 PARAMETER Experiment Name: At_100uM_ABA_Mutants_cDNA_P Parameter: Plant Line Value: CS23
  misc_feature: MA Experiment 20000069 PARAMETER Experiment Name: At_100uM_ABA_Mutants_cDNA_P Parameter: Timepoint (hr) Value: 6
  misc_feature: MA Experiment 20000069 PARAMETER Experiment Name: At_100uM_ABA_Mutants_cDNA_P Parameter: Tissue Value: Aerial
  misc_feature: MA Experiment 20000069 PARAMETER Experiment Name: At_100uM_ABA_Mutants_cDNA_P Parameter: Treatment Value: 100uM ABA vs. No Treatment
  misc_feature: MA Experiment ID: 20000070 Result: Up-regulated in Transcription
  misc_feature: MA Experiment 20000070 PARAMETER Experiment Name: At_100uM_ABA_Mutants_cDNA_P Parameter: Plant Line Value: CS24
  misc_feature: MA Experiment 20000070 PARAMETER Experiment Name: At_100uM_ABA_Mutants_cDNA_P Parameter: Timepoint (hr) Value: 6
  misc_feature: MA Experiment 20000070 PARAMETER Experiment Name: At_100uM_ABA_Mutants_cDNA_P Parameter: Tissue Value: Aerial
  misc_feature: MA Experiment 20000070 PARAMETER Experiment Name: At_100uM_ABA_Mutants_cDNA_P Parameter: Treatment Value: 100uM ABA vs. No Treatment
  misc_feature: MA Experiment ID: 20000071 Result: Up-regulated in Transcription
  misc_feature: MA Experiment 20000071 PARAMETER Experiment Name: At_100uM_ABA_Mutants_cDNA_P Parameter: Plant Line Value: CS8104
  misc_feature: MA Experiment 20000071 PARAMETER Experiment Name: At_100uM_ABA_Mutants_cDNA_P Parameter: Timepoint (hr) Value: 6
  misc_feature: MA Experiment 20000071 PARAMETER Experiment Name: At_100uM_ABA_Mutants_cDNA_P Parameter: Tissue Value: Aerial
  misc_feature: MA Experiment 20000071 PARAMETER Experiment Name: At_100uM_ABA_Mutants_cDNA_P Parameter: Treatment Value: 100uM ABA vs. No Treatment
  misc_feature: MA Experiment ID: 20000072 Result: Up-regulated in Transcription
  misc_feature: MA Experiment 20000072 PARAMETER Experiment Name: At_100uM_ABA_Mutants_cDNA_P Parameter: Plant Line Value: CS8105
  misc_feature: MA Experiment 20000072 PARAMETER Experiment Name: At_100uM_ABA_Mutants_cDNA_P Parameter: Timepoint (hr) Value: 6
  misc_feature: MA Experiment 20000072 PARAMETER Experiment Name: At_100uM_ABA_Mutants_cDNA_P Parameter: Tissue Value: Aerial
  misc_feature: MA Experiment 20000072 PARAMETER Experiment Name: At_100uM_ABA_Mutants_cDNA_P Parameter: Treatment Value: 100uM ABA vs. No Treatment
  misc_feature: MA Experiment ID: 20000184 Result: Down-regulated in Transcription
  misc_feature: MA Experiment 20000184 PARAMETER Experiment Name: At_Shoots__P Parameter: Age (day) Value: 7
  misc_feature: MA Experiment 20000184 PARAMETER Experiment Name: At_Shoots__P Parameter: Tissue Value: Shoots vs. Whole Plant
  misc_feature: MA Experiment ID: 20000437 Result: Up-regulated in Transcription
  misc_feature: MA Experiment 20000437 PARAMETER Experiment Name: At_Drought_P Parameter: Age (day) Value: 8
  misc_feature: MA Experiment 20000437 PARAMETER Experiment Name: At_Drought_P Parameter: Organism Value: A. thaliana
  misc_feature: MA Experiment 20000437 PARAMETER Experiment Name: At_Drought_P Parameter: Plant Line Value: WS
  misc_feature: MA Experiment 20000437 PARAMETER Experiment Name: At_Drought_P Parameter: Timepoint (hr) Value: 24
  misc_feature: MA Experiment 20000437 PARAMETER Experiment Name: At_Drought_P Parameter: Tissue Value: Whole Plant
  misc_feature: MA Experiment 20000437 PARAMETER Experiment Name: At_Drought_P Parameter: Treatment Value: Drought vs. No Drought
  misc_feature: MA Experiment ID: 20000794 Result: Up-regulated in Transcription
  misc_feature: MA Experiment 20000794 PARAMETER Experiment Name: At_Petals_P Parameter: Age (day) Value: 23-25 days
  misc_feature: MA Experiment 20000794 PARAMETER Experiment Name: At_Petals_P Parameter: Plant Line Value: WS
  misc_feature: MA Experiment 20000794 PARAMETER Experiment Name: At_Petals_P Parameter: Tissue Value: Petals vs. Whole plant
aaaatcgcgtcaattctcaacccagttttcagatttggtttttggaagctaacttattgttggaggtggagagatatggctgactttggtttgttctgtttcccttgtttaatggaagttgtttcatcatcatcatcatctctgtgattgtaattgatctcacaccatgtctgattacaatggtgatgatcttgaagatgaatatatggctgatgagtatgacatggatgatctcgaggatgatatgaatgccgcgtttgatggaagagatatcgatgcttctgattccgaagtcgaagatttcgatcaattgaacaaggctgcagatacttctgctgctcaagcacggaatgggaaggatattcagggtataccgtgggatagtcttactcttactagaaaagattacagaaaaactaggctagaacaatataaaaactatgaaaatatacccaattctggtgatgaatctgccaagaaatgcatgaatactgagaaaggcagctctttctatgagttcagaaggaattctagatccgtgagatcaacgattctccattttcagttgaggaatttggtctgggctacctcaaaacacgatgtttatttattgtccaactactccatcagccactggtcttctttgacaggttgtaggagtgaaattcttaacgttaaaggtcatgtggctccgtctgagaaacatcccgagagtttgttggaaggatttacagagactcaagttagcactcttgcagtaaaagaaaggctactagttgctggtggattccaaggagaactcatttgcaagcatctcgatagacctggtgtgagcttctgctcacgcacaacttacaccgaaaacgctatcaccaatgcagtagatatatatagaaactccaacggcgcactgcatttcatggcctcaaataatgactgtggagtcagagactttgacatggagagatataagcttgtccaactcttccgttatctatggcccgtcaatcatagttccctaagtcctgatggaaaactagtagcagtcgttggagatgacccagatggtctactggtagacacaagtaacggacagacgatcgggacgctaaaaggtcacttagattattcatttgcatcagcttggcatccaaacggtgtaacatttgccacaggaagccaagacaagacctgtcgtatttgggacacaaggaaactctcggaatcagtcgctgtcctaaaaggtaaccttggagccgtacggtccattaggttcacatctgacggacggtacgttgccatggccgagccagcagatttcgttcatatctatgacacaaaatcaggatacaaaaaggagcaagagattgatttctttggagagatttctgggatatcgtttagcccagatactgaatctctcttcatcggtgtttgggacaggacttatggaagtctcttggagtatggtcgaaccagagactacacttatctcgattcattactttgatggaaatttaagctaagcctaaagaaaaaaaacttacgtaaaaataatttgttatacgccgtcttggttaggtttcataatcatatcg

SEQ ID NO: 39771 - protein, 447 aa, Arabidopsis thaliana
  peptide (1)..(447): Ceres Seq. ID no. 12328577
  misc_feature (69)..(447): Homolog of NCBI NO: 27948448 NR Description: GAMYB-binding protein [Hordeum vulgare subsp.
  misc_feature (1)..(446): Homolog of NCBI NO: 13937195 NR Description: At1g78070/F28K19_28 [Arabidopsis thaliana]
  misc_feature (35)..(447): Homolog of NCBI NO: 9294540 NR Description: WD domain protein-like [Arabidopsis thaliana]
  misc_feature (1)..(447): Homolog of NCBI NO: 25405994 NR Description: protein F20N2.10 [imported] - Arabidopsis
  misc_feature (1)..(447): Homolog of NCBI NO: 18405485 NR Description: expressed protein
  misc_feature (1)..(447): Homolog of NCBI NO: 18399975 NR Description: expressed protein
  misc_feature (11)..(447): Homolog of NCBI NO: 30696707 NR Description: WD-40 repeat protein family [Arabidopsis
  misc_feature (1)..(447): Homolog of NCBI NO: 9758639 NR Description: WD-repeat protein-like [Arabidopsis thaliana]
  misc_feature (1)..(447): Homolog of NCBI NO: 18423837 NR Description: WD-repeat protein-like
  misc_feature (1)..(447): Homolog of NCBI NO: 21536732 NR Description: WD-repeat protein-like [Arabidopsis thaliana]
MSDYNGDDLEDEYMADEYDMDDLEDDMNAAFDGRDIDASDSEVEDFDQLNKAADTSAAQARNGKDIQGIPWDSLTLTRKDYRKTRLEQYKNYENIPNSGDESAKKCMNTEKGSSFYEFRRNSRSVRSTILHFQLRNLVWATSKHDVYLLSNYSISHWSSLTGCRSEILNVKGHVAPSEKHPESLLEGFTETQVSTLAVKERLLVAGGFQGELICKHLDRPGVSFCSRTTYTENAITNAVDIYRNSNGALHFMASNNDCGVRDFDMERYKLVQLFRYLWPVNHSSLSPDGKLVAVVGDDPDGLLVDTSNGQTIGTLKGHLDYSFASAWHPNGVTFATGSQDKTCRIWDTRKLSESVAVLKGNLGAVRSIRFTSDGRYVAMAEPADFVHIYDTKSGYKKEQEIDFFGEISGISFSPDTESLFIGVWDRTYGSLLEYGRTRDYTYLDSLL

SEQ ID NO: 39772 - protein, 434 aa, Arabidopsis thaliana
  peptide (1)..(434): Ceres Seq. ID no. 12328578
  misc_feature (56)..(434): Homolog of NCBI NO: 27948448 NR Description: GAMYB-binding protein [Hordeum vulgare subsp.
  misc_feature (1)..(433): Homolog of NCBI NO: 13937195 NR Description: At1g78070/F28K19_28 [Arabidopsis thaliana]
  misc_feature (22)..(434): Homolog of NCBI NO: 9294540 NR Description: WD domain protein-like [Arabidopsis thaliana]
  misc_feature (1)..(434): Homolog of NCBI NO: 25405994 NR Description: protein F20N2.10 [imported] - Arabidopsis
  misc_feature (1)..(434): Homolog of NCBI NO: 18405485 NR Description: expressed protein
  misc_feature (1)..(434): Homolog of NCBI NO: 18399975 NR Description: expressed protein
  misc_feature (1)..(434): Homolog of NCBI NO: 30696707 NR Description: WD-40 repeat protein family [Arabidopsis
  misc_feature (1)..(434): Homolog of NCBI NO: 9758639 NR Description: WD-repeat protein-like [Arabidopsis thaliana]
  misc_feature (1)..(434): Homolog of NCBI NO: 18423837 NR Description: WD-repeat protein-like
  misc_feature (1)..(434): Homolog of NCBI NO: 21536732 NR Description: WD-repeat protein-like [Arabidopsis thaliana]
MADEYDMDDLEDDMNAAFDGRDIDASDSEVEDFDQLNKAADTSAAQARNGKDIQGIPWDSLTLTRKDYRKTRLEQYKNYENIPNSGDESAKKCMNTEKGSSFYEFRRNSRSVRSTILHFQLRNLVWATSKHDVYLLSNYSISHWSSLTGCRSEILNVKGHVAPSEKHPESLLEGFTETQVSTLAVKERLLVAGGFQGELICKHLDRPGVSFCSRTTYTENAITNAVDIYRNSNGALHFMASNNDCGVRDFDMERYKLVQLFRYLWPVNHSSLSPDGKLVAVVGDDPDGLLVDTSNGQTIGTLKGHLDYSFASAWHPNGVTFATGSQDKTCRIWDTRKLSESVAVLKGNLGAVRSIRFTSDGRYVAMAEPADFVHIYDTKSGYKKEQEIDFFGEISGISFSPDTESLFIGVWDRTYGSLLEYGRTRDYTYLDSLL

SEQ ID NO: 39773 - protein, 428 aa, Arabidopsis thaliana
  peptide (1)..(428): Ceres Seq. ID no. 12328579
  misc_feature (50)..(428): Homolog of NCBI NO: 27948448 NR Description: GAMYB-binding protein [Hordeum vulgare subsp.
  misc_feature (1)..(427): Homolog of NCBI NO: 13937195 NR Description: At1g78070/F28K19_28 [Arabidopsis thaliana]
  misc_feature (16)..(428): Homolog of NCBI NO: 9294540 NR Description: WD domain protein-like [Arabidopsis thaliana]
  misc_feature (1)..(428): Homolog of NCBI NO: 25405994 NR Description: protein F20N2.10 [imported] - Arabidopsis
  misc_feature (1)..(428): Homolog of NCBI NO: 18405485 NR Description: expressed protein
  misc_feature (1)..(428): Homolog of NCBI NO: 18399975 NR Description: expressed protein
  misc_feature (1)..(428): Homolog of NCBI NO: 30696707 NR Description: WD-40 repeat protein family [Arabidopsis
  misc_feature (1)..(428): Homolog of NCBI NO: 9758639 NR Description: WD-repeat protein-like [Arabidopsis thaliana]
  misc_feature (1)..(428): Homolog of NCBI NO: 18423837 NR Description: WD-repeat protein-like
  misc_feature (1)..(428): Homolog of NCBI NO: 21536732 NR Description: WD-repeat protein-like [Arabidopsis thaliana]
MDDLEDDMNAAFDGRDIDASDSEVEDFDQLNKAADTSAAQARNGKDIQGIPWDSLTLTRKDYRKTRLEQYKNYENIPNSGDESAKKCMNTEKGSSFYEFRRNSRSVRSTILHFQLRNLVWATSKHDVYLLSNYSISHWSSLTGCRSEILNVKGHVAPSEKHPESLLEGFTETQVSTLAVKERLLVAGGFQGELICKHLDRPGVSFCSRTTYTENAITNAVDIYRNSNGALHFMASNNDCGVRDFDMERYKLVQLFRYLWPVNHSSLSPDGKLVAVVGDDPDGLLVDTSNGQTIGTLKGHLDYSFASAWHPNGVTFATGSQDKTCRIWDTRKLSESVAVLKGNLGAVRSIRFTSDGRYVAMAEPADFVHIYDTKSGYKKEQEIDFFGEISGISFSPDTESLFIGVWDRTYGSLLEYGRTRDYTYLDSLL

SEQ ID NO: 39774 - DNA, 1169 bp, Arabidopsis thaliana
  misc_feature (1)..(1169): Ceres Seq. ID no. 13487856
  misc_feature: MA Experiment ID: 108434 Result: Up-regulated in Transcription
  misc_feature: MA Experiment 108434 PARAMETER Experiment Name: At_Root_Tips_cDNA_P Parameter: Tissue Value: Root Tips
  misc_feature: MA Experiment ID: 108594 Result: Down-regulated in Transcription
  misc_feature: MA Experiment 108594 PARAMETER Experiment Name: At_Ler-rhl_Root_cDNA_P Parameter: Plant Line Value: null
  misc_feature: MA Experiment ID: 20000179 Result: Up-regulated in Transcription
  misc_feature: MA Experiment 20000179 PARAMETER Experiment Name: At_Germinating_Seeds_P Parameter: Age (hr) Value: 6 vs. 0
  misc_feature: MA Experiment 20000179 PARAMETER Experiment Name: At_Germinating_Seeds_P Parameter: Tissue Value: Germinating Seeds
  misc_feature: MA Experiment ID: 20000180 Result: Up-regulated in Transcription
  misc_feature: MA Experiment 20000180 PARAMETER Experiment Name: At_Germinating_Seeds_P Parameter: Age (hr) Value: 24 vs. 0
  misc_feature: MA Experiment 20000180 PARAMETER Experiment Name: At_Germinating_Seeds_P Parameter: Tissue Value: Germinating Seeds
  misc_feature: MA Experiment ID: 20000185 Result: Up-regulated in Transcription
  misc_feature: MA Experiment 20000185 PARAMETER Experiment Name: At_Roots__P Parameter: Age (day) Value: 7 vs. 21
  misc_feature: MA Experiment 20000185 PARAMETER Experiment Name: At_Roots__P Parameter: Organism Value: A. thaliana
  misc_feature: MA Experiment 20000185 PARAMETER Experiment Name: At_Roots__P Parameter: Tissue Value: Roots vs. Whole Plant
  misc_feature: MA Experiment ID: 20000227 Result: Up-regulated in Transcription
  misc_feature: MA Experiment 20000227 PARAMETER Experiment Name: At_Root-Tips-vs-Tops_P Parameter: Tissue Value: Root Tips vs. Root Tops
  misc_feature: MA Experiment ID: 20000265 Result: Up-regulated in Transcription
  misc_feature: MA Experiment 20000265 PARAMETER Experiment Name: At_Open_Flower_P Parameter: Age (day) Value: 21
  misc_feature: MA Experiment 20000265 PARAMETER Experiment Name: At_Open_Flower_P Parameter: Plant Line Value: WS
  misc_feature: MA Experiment 20000265 PARAMETER Experiment Name: At_Open_Flower_P Parameter: Tissue Value: Closed Flower vs. Whole Plant
  misc_feature: MA Experiment ID: 20000439 Result: Up-regulated in Transcription
  misc_feature: MA Experiment 20000439 PARAMETER Experiment Name: At_Roots__P Parameter: Age (day) Value: 14 vs. 21
  misc_feature: MA Experiment 20000439 PARAMETER Experiment Name: At_Roots__P Parameter: Organism Value: A. thaliana
  misc_feature: MA Experiment 20000439 PARAMETER Experiment Name: At_Roots__P Parameter: Tissue Value: Roots vs. Whole Plant
  misc_feature: MA Experiment ID: 20000441 Result: Down-regulated in Transcription
  misc_feature: MA Experiment 20000441 PARAMETER Experiment Name: At_1uM_BR-BRZ__P Parameter: Tissue Value: Shoot Apices
  misc_feature: MA Experiment 20000441 PARAMETER Experiment Name: At_1uM_BR-BRZ__P Parameter: Treatment Value: 1uM BR vs. No Treatment
  misc_feature: MA Experiment ID: 20000443 Result: Down-regulated in Transcription
  misc_feature: MA Experiment 20000443 PARAMETER Experiment Name: At_1uM_BR-BRZ__P Parameter: Tissue Value: Shoot Apices
  misc_feature: MA Experiment 20000443 PARAMETER Experiment Name: At_1uM_BR-BRZ__P Parameter: Treatment Value: 1uM BRZ vs. No Treatment
  misc_feature: MA Experiment ID: 20000527 Result: Down-regulated in Transcription
  misc_feature: MA Experiment 20000527 PARAMETER Experiment Name: At_10percent_PEG_P Parameter: Age (day) Value: 20
  misc_feature: MA Experiment 20000527 PARAMETER Experiment Name: At_10percent_PEG_P Parameter: Organism Value: A. thaliana
  misc_feature: MA Experiment 20000527 PARAMETER Experiment Name: At_10percent_PEG_P Parameter: Plant Line Value: WS
  misc_feature: MA Experiment 20000527 PARAMETER Experiment Name: At_10percent_PEG_P Parameter: Timepoint (day) Value: 20
  misc_feature: MA Experiment 20000527 PARAMETER Experiment Name: At_10percent_PEG_P Parameter: Tissue Value: Whole Plant
  misc_feature: MA Experiment 20000527 PARAMETER Experiment Name: At_10percent_PEG_P Parameter: Treatment Value: 10percent PEG vs. No Treatment
  misc_feature: MA Experiment ID: 20000574 Result: Down-regulated in Transcription
  misc_feature: MA Experiment 20000574 PARAMETER Experiment Name: At_100uM_ABA_Mutants__P Parameter: Organism Value: A. thaliana
  misc_feature: MA Experiment 20000574 PARAMETER Experiment Name: At_100uM_ABA_Mutants__P Parameter: Plant Line Value: CS23 vs. Ler wt
  misc_feature: MA Experiment 20000574 PARAMETER Experiment Name: At_100uM_ABA_Mutants__P Parameter: Timepoint (hr) Value: N/A
  misc_feature: MA Experiment 20000574 PARAMETER Experiment Name: At_100uM_ABA_Mutants__P Parameter: Tissue Value: Whole Plant
  misc_feature: MA Experiment 20000574 PARAMETER Experiment Name: At_100uM_ABA_Mutants__P Parameter: Treatment Value: None
  misc_feature: MA Experiment ID: 20000606 Result: Up-regulated in Transcription
  misc_feature: MA Experiment 20000606 PARAMETER Experiment Name: At_CS8548_Mutant_P Parameter: Age (day) Value: 14
  misc_feature: MA Experiment 20000606 PARAMETER Experiment Name: At_CS8548_Mutant_P Parameter: Plant Line Value: CS8548 vs. wt
  misc_feature: MA Experiment 20000606 PARAMETER Experiment Name: At_CS8548_Mutant_P Parameter: Tissue Value: Whole Plant
  misc_feature: MA Experiment ID: 20000709 Result: Down-regulated in Transcription
  misc_feature: MA Experiment 20000709 PARAMETER Experiment Name: At_15mM_NH4NO3_L-to-H_P Parameter: Age (hr) Value: 14
  misc_feature: MA Experiment 20000709 PARAMETER Experiment Name: At_15mM_NH4NO3_L-to-H_P Parameter: Organism Value: A. thaliana
  misc_feature: MA Experiment 20000709 PARAMETER Experiment Name: At_15mM_NH4NO3_L-to-H_P Parameter: Plant Line Value: WS
  misc_feature: MA Experiment 20000709 PARAMETER Experiment Name: At_15mM_NH4NO3_L-to-H_P Parameter: Timepoint (hr) Value: 4
  misc_feature: MA Experiment 20000709 PARAMETER Experiment Name: At_15mM_NH4NO3_L-to-H_P Parameter: Tissue Value: Aerial
  misc_feature: MA Experiment 20000709 PARAMETER Experiment Name: At_15mM_NH4NO3_L-to-H_P Parameter: Treatment Value: 15mM NH4NO3 vs. 30mM Mannitol
  misc_feature: MA Experiment ID: 20001247 Result: Down-regulated in Transcription
  misc_feature: MA Experiment 20001247 PARAMETER Experiment Name: At_Far-red-induction_P Parameter: Age (day) Value: 7
  misc_feature: MA Experiment 20001247 PARAMETER Experiment Name: At_Far-red-induction_P Parameter: Light Value: Far-red vs. White
  misc_feature: MA Experiment 20001247 PARAMETER Experiment Name: At_Far-red-induction_P Parameter: Organism Value: A. thaliana
  misc_feature: MA Experiment 20001247 PARAMETER Experiment Name: At_Far-red-induction_P Parameter: Plant Line Value: Columbia
  misc_feature: MA Experiment 20001247 PARAMETER Experiment Name: At_Far-red-induction_P Parameter: Timepoint (hr) Value: 1
  misc_feature: MA Experiment 20001247 PARAMETER Experiment Name: At_Far-red-induction_P Parameter: Tissue Value: Whole Plant
attctcacaagtcataaacagtcgtttatagttcaatccttttcctcttctttgtttctaaaaagagaaaagtcacttatggcggatatctcgggaaacggctatggcaacgccagagaagaagtagtaatggtgaatctcaaggatgaagtcgaacatcaacaagaaatggaagacattcataacccaagacccttgaagaaacaagactctctactctcagtctctgtccctttcttacaaaagttgatcgcggagtttcttggaacctactttttggtattcaccggttgtgcatcggtggttgtaaacatgcaaaacgacaatgtcgtgactcttccagggatcgctatcgtttggggactcaccattatggtcctcatttactctcttggtcacatctctggtgctcatatcaatccggccgttaccattgccttcgcctcttgtggccgtttccctctcaaacaggttccagcttatgtcatatcacaagtgataggatcaacgctcgcggctgcgacattacggttgttgttcggacttgatcacgacgtttgtagcggaaaacacgatgtgtttatcggatcatcaccagtgggatcagatcttcaggcgtttacgatggagtttatcgtcactttctatctaatgttcatcatttctggcgttgctaccgataatagagcgatcggagaacttgctggattagcaataggatcaacggtgctacttaacgtgctaattgccgcaccggtatcgagtgcgtcgatgaatccaggaagaagtttaggacctgcactggtctatggttgctacaaaggaatttggatatacttagttgcgccaactcttggtgcgattgcgggtgcatgggtttataacacagttagatataccgataaaccattgcgagaaatcactaaaagtggttcatttctaaagaccgtgagaatcggtagcacttgataagagaaaagaaaacatgggtggagttgatggagtattttcaaatgaatgtaacaactttcaccacaccttacgtatatggcctttgtattaattgctacgtttatctcttttattgttaacgccaagattctctatcttgttattaatgtgtaactgtatcgtatattttttaaataataaaattcaattttcgaaag

SEQ ID NO: 39775 - protein, 322 aa, Arabidopsis thaliana
  peptide (1)..(322): Ceres Seq. ID no. 13487857
  misc_feature (76)..(317): Homolog of NCBI NO: 9082287 NR Description: multifunctional transport intrinsic membrane
  misc_feature (64)..(315): Homolog of NCBI NO: 541944 NR Description: nodulin-26 - soybean
  misc_feature (75)..(315): Homolog of NCBI NO: 17025880 NR Description: multifunctional aquaporin [Medicago truncatula]
  misc_feature (58)..(315): Homolog of NCBI NO: 5139541 NR Description: nodulin26-like major intrinsic protein [Pisum
  misc_feature (82)..(322): Homolog of NCBI NO: 7449725 NR Description: nodulin-26-like protein F13C5.200 - Arabidopsis
  misc_feature (27)..(322): Homolog of NCBI NO: 21536953 NR Description: major intrinsic protein (MIP)- like [Arabidopsis
  misc_feature (27)..(322): Homolog of NCBI NO: 15234059 NR Description: major intrinsic protein (MIP) family [Arabidopsis
  misc_feature (44)..(322): Homolog of NCBI NO: 2677614 NR Description: NLM1 protein (NodLikeMip1) [Arabidopsis thaliana]
  misc_feature (27)..(322): Homolog of NCBI NO: 25324917 NR Description: nodulin-26-like protein [imported] - Arabidopsis
  misc_feature (27)..(322): Homolog of NCBI NO: 18415224 NR Description: major intrinsic protein (MIP) family [Arabidopsis
ILTSHKQSFIVQSFSSSLFLKREKSLMADISGNGYGNAREEVVMVNLKDEVEHQQEMEDIHNPRPLKKQDSLLSVSVPFLQKLIAEFLGTYFLVFTGCASVVVNMQNDNVVTLPGIAIVWGLTIMVLIYSLGHISGAHINPAVTIAFASCGRFPLKQVPAYVISQVIGSTLAAATLRLLFGLDHDVCSGKHDVFIGSSPVGSDLQAFTMEFIVTFYLMFIISGVATDNRAIGELAGLAIGSTVLLNVLIAAPVSSASMNPGRSLGPALVYGCYKGIWIYLVAPTLGAIAGAWVYNTVRYTDKPLREITKSGSFLKTVRIGST

SEQ ID NO: 39776 - protein, 296 aa, Arabidopsis thaliana
  peptide (1)..(296): Ceres Seq. ID no. 13487858
  misc_feature (50)..(291): Homolog of NCBI NO: 9082287 NR Description: multifunctional transport intrinsic membrane
  misc_feature (38)..(289): Homolog of NCBI NO: 541944 NR Description: nodulin-26 - soybean
  misc_feature (49)..(289): Homolog of NCBI NO: 17025880 NR Description: multifunctional aquaporin [Medicago truncatula]
  misc_feature (32)..(289): Homolog of NCBI NO: 5139541 NR Description: nodulin26-like major intrinsic protein [Pisum
  misc_feature (56)..(296): Homolog of NCBI NO: 7449725 NR Description: nodulin-26-like protein F13C5.200 - Arabidopsis
  misc_feature (1)..(296): Homolog of NCBI NO: 21536953 NR Description: major intrinsic protein (MIP)- like [Arabidopsis
  misc_feature (1)..(296): Homolog of NCBI NO: 15234059 NR Description: major intrinsic protein (MIP) family [Arabidopsis
  misc_feature (18)..(296): Homolog of NCBI NO: 2677614 NR Description: NLM1 protein (NodLikeMip1) [Arabidopsis thaliana]
  misc_feature (1)..(296): Homolog of NCBI NO: 25324917 NR Description: nodulin-26-like protein [imported] - Arabidopsis
  misc_feature (1)..(296): Homolog of NCBI NO: 18415224 NR Description: major intrinsic protein (MIP) family [Arabidopsis
MADISGNGYGNAREEVVMVNLKDEVEHQQEMEDIHNPRPLKKQDSLLSVSVPFLQKLIAEFLGTYFLVFTGCASVVVNMQNDNVVTLPGIAIVWGLTIMVLIYSLGHISGAHINPAVTIAFASCGRFPLKQVPAYVISQVIGSTLAAATLRLLFGLDHDVCSGKHDVFIGSSPVGSDLQAFTMEFIVTFYLMFIISGVATDNRAIGELAGLAIGSTVLLNVLIAAPVSSASMNPGRSLGPALVYGCYKGIWIYLVAPTLGAIAGAWVYNTVRYTDKPLREITKSGSFLKTVRIGST

SEQ ID NO: 39777 - protein, 279 aa, Arabidopsis thaliana
  peptide (1)..(279): Ceres Seq. ID no. 13487859
  misc_feature (33)..(274): Homolog of NCBI NO: 9082287 NR Description: multifunctional transport intrinsic membrane
  misc_feature (21)..(272): Homolog of NCBI NO: 541944 NR Description: nodulin-26 - soybean
  misc_feature (32)..(272): Homolog of NCBI NO: 17025880 NR Description: multifunctional aquaporin [Medicago truncatula]
  misc_feature (15)..(272): Homolog of NCBI NO: 5139541 NR Description: nodulin26-like major intrinsic protein [Pisum
  misc_feature (39)..(279): Homolog of NCBI NO: 7449725 NR Description: nodulin-26-like protein F13C5.200 - Arabidopsis
  misc_feature (1)..(279): Homolog of NCBI NO: 21536953 NR Description: major intrinsic protein (MIP)- like [Arabidopsis
  misc_feature (1)..(279): Homolog of NCBI NO: 15234059 NR Description: major intrinsic protein (MIP) family [Arabidopsis
  misc_feature (1)..(279): Homolog of NCBI NO: 2677614 NR Description: NLM1 protein (NodLikeMip1) [Arabidopsis thaliana]
  misc_feature (1)..(279): Homolog of NCBI NO: 25324917 NR Description: nodulin-26-like protein [imported] - Arabidopsis
  misc_feature (1)..(279): Homolog of NCBI NO: 18415224 NR Description: major intrinsic protein (MIP) family [Arabidopsis
MVNLKDEVEHQQEMEDIHNPRPLKKQDSLLSVSVPFLQKLIAEFLGTYFLVFTGCASVVVNMQNDNVVTLPGIAIVWGLTIMVLIYSLGHISGAHINPAVTIAFASCGRFPLKQVPAYVISQVIGSTLAAATLRLLFGLDHDVCSGKHDVFIGSSPVGSDLQAFTMEFIVTFYLMFIISGVATDNRAIGELAGLAIGSTVLLNVLIAAPVSSASMNPGRSLGPALVYGCYKGIWIYLVAPTLGAIAGAWVYNTVRYTDKPLREITKSGSFLKTVRIGST

SEQ ID NO: 39778 - DNA, 2028 bp, Arabidopsis thaliana
  misc_feature (1)..(2028): Ceres Seq. ID no. 13497630
  misc_feature: MA Experiment ID: 20000185 Result: Down-regulated in Transcription
  misc_feature: MA Experiment 20000185 PARAMETER Experiment Name: At_Roots__P Parameter: Age (day) Value: 7 vs. 21
  misc_feature: MA Experiment 20000185 PARAMETER Experiment Name: At_Roots__P Parameter: Organism Value: A. thaliana
  misc_feature: MA Experiment 20000185 PARAMETER Experiment Name: At_Roots__P Parameter: Tissue Value: Roots vs. Whole Plant
  misc_feature: MA Experiment ID: 20000234 Result: Up-regulated in Transcription
  misc_feature: MA Experiment 20000234 PARAMETER Experiment Name: At_Siliques_P Parameter: Age (day) Value: 21
  misc_feature: MA Experiment 20000234 PARAMETER Experiment Name: At_Siliques_P Parameter: Organism Value: A. thaliana
  misc_feature: MA Experiment 20000234 PARAMETER Experiment Name: At_Siliques_P Parameter: Plant Line Value: WS
  misc_feature: MA Experiment 20000234 PARAMETER Experiment Name: At_Siliques_P Parameter: Tissue Value: Less Than 5mm Siliques vs. Whole Plant
  misc_feature: MA Experiment ID: 20000264 Result: Up-regulated in Transcription
  misc_feature: MA Experiment 20000264 PARAMETER Experiment Name: At_Open_Flower_P Parameter: Age (day) Value: 21
  misc_feature: MA Experiment 20000264 PARAMETER Experiment Name: At_Open_Flower_P Parameter: Plant Line Value: WS
  misc_feature: MA Experiment 20000264 PARAMETER Experiment Name: At_Open_Flower_P Parameter: Tissue Value: Open Flower vs. Whole Plant
  misc_feature: MA Experiment ID: 20000265 Result: Up-regulated in Transcription
  misc_feature: MA Experiment 20000265 PARAMETER Experiment Name: At_Open_Flower_P Parameter: Age (day) Value: 21
  misc_feature: MA Experiment 20000265 PARAMETER Experiment Name: At_Open_Flower_P Parameter: Plant Line Value: WS
  misc_feature: MA Experiment 20000265 PARAMETER Experiment Name: At_Open_Flower_P Parameter: Tissue Value: Closed Flower vs. Whole Plant
  misc_feature: MA Experiment ID: 20000286 Result: Up-regulated in Transcription
  misc_feature: MA Experiment 20000286 PARAMETER Experiment Name: At_Open_Flower_P Parameter: Age (day) Value: 21
  misc_feature: MA Experiment 20000286 PARAMETER Experiment Name: At_Open_Flower_P Parameter: Plant Line Value: WS
  misc_feature: MA Experiment 20000286 PARAMETER Experiment Name: At_Open_Flower_P Parameter: Tissue Value: Half Open vs. Whole Plant
  misc_feature: MA Experiment ID: 20000438 Result: Down-regulated in Transcription
  misc_feature: MA Experiment 20000438 PARAMETER Experiment Name: At_Shoots__P Parameter: Age (day) Value: 14
  misc_feature: MA Experiment 20000438 PARAMETER Experiment Name: At_Shoots__P Parameter: Tissue Value: Shoots vs. Whole Plant
  misc_feature: MA Experiment ID: 20000496 Result: Up-regulated in Transcription
  misc_feature: MA Experiment 20000496 PARAMETER Experiment Name: At_Guard_Cells_P Parameter: Harvest Date Value: 7/19/2002
  misc_feature: MA Experiment 20000496 PARAMETER Experiment Name: At_Guard_Cells_P Parameter: Organism Value: Canola
  misc_feature: MA Experiment 20000496 PARAMETER Experiment Name: At_Guard_Cells_P Parameter: Tissue Value: Guard Cells vs. Leaves
  misc_feature: MA Experiment ID: 20000794 Result: Up-regulated in Transcription
  misc_feature: MA Experiment 20000794 PARAMETER Experiment Name: At_Petals_P Parameter: Age (day) Value: 23-25 days
  misc_feature: MA Experiment 20000794 PARAMETER Experiment Name: At_Petals_P Parameter: Plant Line Value: WS
  misc_feature: MA Experiment 20000794 PARAMETER Experiment Name: At_Petals_P Parameter: Tissue Value: Petals vs. Whole plant
  misc_feature: MA Experiment ID: 20001761 Result: Down-regulated in Transcription
  misc_feature: MA Experiment 20001761 PARAMETER Experiment Name: At_50mM_NH4NO3_L-to-H_P Parameter: Timepoint (hr) Value: 4
  misc_feature: MA Experiment 20001761 PARAMETER Experiment Name: At_50mM_NH4NO3_L-to-H_P Parameter: Tissue Value: Siliques
  misc_feature: MA Experiment 20001761 PARAMETER Experiment Name: At_50mM_NH4NO3_L-to-H_P Parameter: Treatment Value: 50mM NH4NO3 vs 100mM Mannitol
  misc_feature: MA Experiment ID: 20001909 Result: Up-regulated in Transcription
  misc_feature: MA Experiment 20001909 PARAMETER Experiment Name: At_Drought_Reproduction_P Parameter: Age (day) Value: 35
  misc_feature: MA Experiment 20001909 PARAMETER Experiment Name: At_Drought_Reproduction_P Parameter: Organism Value: A. thaliana
  misc_feature: MA Experiment 20001909 PARAMETER Experiment Name: At_Drought_Reproduction_P Parameter: Plant Line Value: WS
  misc_feature: MA Experiment 20001909 PARAMETER Experiment Name: At_Drought_Reproduction_P Parameter: Timepoint (day) Value: 5
  misc_feature: MA Experiment 20001909 PARAMETER Experiment Name: At_Drought_Reproduction_P Parameter: Tissue Value: Flowers
  misc_feature: MA Experiment 20001909 PARAMETER Experiment Name: At_Drought_Reproduction_P Parameter: Treatment Value: Drought vs. No Drought
tgaggcatcacaacaatcaatataagcctgggatccaattttcttatttccccaaccaaaacaggggaagaaaaaaaaagaaaacaaaaaaatcaaaaaaaattagaaaatgaaagcctcaacaagagtcatatggacaatatctgtccttatgctcgctgctgtgtccgaggccatcttccctctaccgtttctaccgttcctccctgggttcaacaacggctttagggacaatgaggctgtcaaggttgcgaaaccacagcctgcaggagcagttggtggaaaagccgcaagaaggcagcgtggcggcggtttagacgctcagacaacctggggtggtaagtgggagctcttcttggaaaactcgggtgtgtcagggatgcatgcgatccttatgccagttatcaacaaggtccagtactatgacgccaccatttggagaatttcaaagattaagttgcctccaggcgtaccatgccatgtcgtggacgctaagactaacaaggtcgattgttgggctcattcgattctcatggatgtcaacaccggcgcccttaagcctctagggctttccaccgatacatggtgctcatccggaggtctgaccgtaaatggtacattggtgagcactggaggatacggaggaggagccaacaccgcgaggtacctatccagctgtgaaaactgcaagtgggaagaataccctcaggcattggccgcgaagagatggtactcaacgcaagcaactctccctgacggaaagttcttcgtgattggtggaagagacgccttgaactacgaatacattcctgaggagggacaaaacaacaggaagctctttgactcattgctcctcaggcaaacagacgacccgaaagaaaacaacctttaccctttcgtctggcttaacaccgacggtaacctcttcattttcgctaacaaccgatccatccttctaagccccaaaacaaaccaagtcatcaaggagttccctcagctcccaggtggtgcccgtaactacccgggatcaggttcttccgcactcctccccatccaactttacgtgaaaaaccccaaggtcatcccagccgaggttctcgtctgtggtggttccaaacaagacgcgtattacaaggctggtaaaaaaatatacgaaccagcactacaagactgcgccaggataaggatcaacagcgcaaagccacgatggaagacggagatgatgccaaccccacgaatcatgagtgatactgtcatcctccctaacggagacatccttctagtcaacggagctaaacgtggttgttcaggctggggatatggtaaagaccctgcctttgctcccctcttgtacaagccccatgctgcacgtggcaagcgtttcagacagctcaagcccaccaccatcccacgtatgtaccactccagcgccatcattcttccagacggtaaggttcttgtcggtggcagcaacaccaacgacggttacaagtacaacgttgagttcccaacggagcttcgcgttgagaaattctccccaccttacctcgacccggctctagccaacataaggccaaagatcgtcaccaccggcaccccaaaacaggtcaaatacggacaattcttcaacgtgaaggtcgaccttaaagaaaagggagcaaccaagggaaatctcaaggttaccatgttagcccctgccttcacaacacacagtatctcaatgaacatgaggatgctcatcttgggtgtcaataatgtcaaacctgctggtgccggttacgatatccaggccgttgcaccaccaaatggaaacatcgctccaccgggttactatcttatctttgccatctacaaaggtgttcccagcactggagaatggattcaggtcgtctaatgacgataatttttacccattttgtcttatgaccgtaacatcttaatataaaacaatcacataatatcagtttttttttccttctatatatattgtttatgccaccattaatggatccaaattacttgtgttct

SEQ ID NO: 39779 - protein, 594 aa, Arabidopsis thaliana
  peptide (1)..(594): Ceres Seq. ID no. 13497631
  misc_feature (129)..(180): Homolog of NCBI NO: 542394 NR Description: glyoxal oxidase (EC 1.2.3.-) precursor -
  misc_feature (139)..(593): Homolog of NCBI NO: 542394 NR Description: glyoxal oxidase (EC 1.2.3.-) precursor -
  misc_feature (78)..(593): Homolog of NCBI NO: 15230360 NR Description: expressed protein [Arabidopsis thaliana]
  misc_feature (91)..(593): Homolog of NCBI NO: 25352604 NR Description: hypothetical protein F6F9.4 [imported] -
  misc_feature (77)..(593): Homolog of NCBI NO: 15222300 NR Description: hypothetical protein [Arabidopsis thaliana]
  misc_feature (76)..(590): Homolog of NCBI NO: 15223754 NR Description: expressed protein [Arabidopsis thaliana]
  misc_feature (76)..(593): Homolog of NCBI NO: 25352602 NR Description: F14L17.20 protein - Arabidopsis thaliana
  misc_feature (77)..(593): Homolog of NCBI NO: 15223699 NR Description: expressed protein [Arabidopsis thaliana]
  misc_feature (69)..(593): Homolog of NCBI NO: 34911116 NR Description: putative glyoxal oxidase [Oryza sativa (japonica
  misc_feature (38)..(594): Homolog of NCBI NO: 15220398 NR Description: glyoxal oxidase (glx1) -related [Arabidopsis
MKASTRVIWTISVLMLAAVSEAIFPLPFLPFLPGFNNGFRDNEAVKVAKPQPAGAVGGKAARRQRGGGLDAQTTWGGKWELFLENSGVSGMHAILMPVINKVQYYDATIWRISKIKLPPGVPCHVVDAKTNKVDCWAHSILMDVNTGALKPLGLSTDTWCSSGGLTVNGTLVSTGGYGGGANTARYLSSCENCKWEEYPQALAAKRWYSTQATLPDGKFFVIGGRDALNYEYIPEEGQNNRKLFDSLLLRQTDDPKENNLYPFVWLNTDGNLFIFANNRSILLSPKTNQVIKEFPQLPGGARNYPGSGSSALLPIQLYVKNPKVIPAEVLVCGGSKQDAYYKAGKKIYEPALQDCARIRINSAKPRWKTEMMPTPRIMSDTVILPNGDILLVNGAKRGCSGWGYGKDPAFAPLLYKPHAARGKRFRQLKPTTIPRMYHSSAIILPDGKVLVGGSNTNDGYKYNVEFPTELRVEKFSPPYLDPALANIRPKIVTTGTPKQVKYGQFFNVKVDLKEKGATKGNLKVTMLAPAFTTHSISMNMRMLILGVNNVKPAGAGYDIQAVAPPNGNIAPPGYYLIFAIYKGVPSTGEWIQVV

SEQ ID NO: 39780 - protein, 580 aa, Arabidopsis thaliana
  peptide (1)..(580): Ceres Seq. ID no. 13497632
  misc_feature (115)..(166): Homolog of NCBI NO: 542394 NR Description: glyoxal oxidase (EC 1.2.3.-) precursor -
  misc_feature (125)..(579): Homolog of NCBI NO: 542394 NR Description: glyoxal oxidase (EC 1.2.3.-) precursor -
  misc_feature (64)..(579): Homolog of NCBI NO: 15230360 NR Description: expressed protein [Arabidopsis thaliana]
  misc_feature (77)..(579): Homolog of NCBI NO: 25352604 NR Description: hypothetical protein F6F9.4 [imported] -
  misc_feature (63)..(579): Homolog of NCBI NO: 15222300 NR Description: hypothetical protein [Arabidopsis thaliana]
  misc_feature (62)..(576): Homolog of NCBI NO: 15223754 NR Description: expressed protein [Arabidopsis thaliana]
  misc_feature (62)..(579): Homolog of NCBI NO: 25352602 NR Description: F14L17.20 protein - Arabidopsis thaliana
  misc_feature (63)..(579): Homolog of NCBI NO: 15223699 NR Description: expressed protein [Arabidopsis thaliana]
  misc_feature (55)..(579): Homolog of NCBI NO: 34911116 NR Description: putative glyoxal oxidase [Oryza sativa (japonica
  misc_feature (24)..(580): Homolog of NCBI NO: 15220398 NR Description: glyoxal oxidase (glx1) -related [Arabidopsis
MLAAVSEAIFPLPFLPFLPGFNNGFRDNEAVKVAKPQPAGAVGGKAARRQRGGGLDAQTTWGGKWELFLENSGVSGMHAILMPVINKVQYYDATIWRISKIKLPPGVPCHVVDAKTNKVDCWAHSILMDVNTGALKPLGLSTDTWCSSGGLTVNGTLVSTGGYGGGANTARYLSSCENCKWEEYPQALAAKRWYSTQATLPDGKFFVIGGRDALNYEYIPEEGQNNRKLFDSLLLRQTDDPKENNLYPFVWLNTDGNLFIFANNRSILLSPKTNQVIKEFPQLPGGARNYPGSGSSALLPIQLYVKNPKVIPAEVLVCGGSKQDAYYKAGKKIYEPALQDCARIRINSAKPRWKTEMMPTPRIMSDTVILPNGDILLVNGAKRGCSGWGYGKDPAFAPLLYKPHAARGKRFRQLKPTTIPRMYHSSAIILPDGKVLVGGSNTNDGYKYNVEFPTELRVEKFSPPYLDPALANIRPKIVTTGTPKQVKYGQFFNVKVDLKEKGATKGNLKVTMLAPAFTTHSISMNMRMLILGVNNVKPAGAGYDIQAVAPPNGNIAPPGYYLIFAIYKGVPSTGEWIQVV

SEQ ID NO: 39781 - protein, 504 aa, Arabidopsis thaliana
  peptide (1)..(504): Ceres Seq. ID no. 13497633
  misc_feature (39)..(90): Homolog of NCBI NO: 542394 NR Description: glyoxal oxidase (EC 1.2.3.-) precursor -
  misc_feature (49)..(503): Homolog of NCBI NO: 542394 NR Description: glyoxal oxidase (EC 1.2.3.-) precursor -
  misc_feature (1)..(503): Homolog of NCBI NO: 15230360 NR Description: expressed protein [Arabidopsis thaliana]
  misc_feature (1)..(503): Homolog of NCBI NO: 25352604 NR Description: hypothetical protein F6F9.4 [imported] -
  misc_feature (1)..(503): Homolog of NCBI NO: 15222300 NR Description: hypothetical protein [Arabidopsis thaliana]
  misc_feature (1)..(500): Homolog of NCBI NO: 15223754 NR Description: expressed protein [Arabidopsis thaliana]
  misc_feature (1)..(503): Homolog of NCBI NO: 25352602 NR Description: F14L17.20 protein - Arabidopsis thaliana
  misc_feature (1)..(503): Homolog of NCBI NO: 15223699 NR Description: expressed protein [Arabidopsis thaliana]
  misc_feature (1)..(503): Homolog of NCBI NO: 34911116 NR Description: putative glyoxal oxidase [Oryza sativa (japonica
  misc_feature (1)..(504): Homolog of NCBI NO: 15220398 NR Description: glyoxal oxidase (glx1) -related [Arabidopsis
MHAILMPVINKVQYYDATIWRISKIKLPPGVPCHVVDAKTNKVDCWAHSILMDVNTGALKPLGLSTDTWCSSGGLTVNGTLVSTGGYGGGANTARYLSSCENCKWEEYPQALAAKRWYSTQATLPDGKFFVIGGRDALNYEYIPEEGQNNRKLFDSLLLRQTDDPKENNLYPFVWLNTDGNLFIFANNRSILLSPKTNQVIKEFPQLPGGARNYPGSGSSALLPIQLYVKNPKVIPAEVLVCGGSKQDAYYKAGKKIYEPALQDCARIRINSAKPRWKTEMMPTPRIMSDTVILPNGDILLVNGAKRGCSGWGYGKDPAFAPLLYKPHAARGKRFRQLKPTTIPRMYHSSAIILPDGKVLVGGSNTNDGYKYNVEFPTELRVEKFSPPYLDPALANIRPKIVTTGTPKQVKYGQFFNVKVDLKEKGATKGNLKVTMLAPAFTTHSISMNMRMLILGVNNVKPAGAGYDIQAVAPPNGNIAPPGYYLIFAIYKGVPSTGEWIQVV

SEQ ID NO: 39782 - DNA, 469 bp, Arabidopsis thaliana
  misc_feature (1)..(469): Ceres Seq. ID no. 12602826
  misc_feature: MA Experiment ID: 20000182 Result: Up-regulated in Transcription
  misc_feature: MA Experiment 20000182 PARAMETER Experiment Name: At_2mM_SA_P Parameter: Age (day) Value: 14
  misc_feature: MA Experiment 20000182 PARAMETER Experiment Name: At_2mM_SA_P Parameter: Organism Value: A. thaliana
  misc_feature: MA Experiment 20000182 PARAMETER Experiment Name: At_2mM_SA_P Parameter: Plant Line Value: WS
  misc_feature: MA Experiment 20000182 PARAMETER Experiment Name: At_2mM_SA_P Parameter: Timepoint (hr) Value: 6
  misc_feature: MA Experiment 20000182 PARAMETER Experiment Name: At_2mM_SA_P Parameter: Tissue Value: Aerial
  misc_feature: MA Experiment 20000182 PARAMETER Experiment Name: At_2mM_SA_P Parameter: Treatment Value: 2mM SA vs. No Treatment
  misc_feature: MA Experiment ID: 20000436 Result: Up-regulated in Transcription
  misc_feature: MA Experiment 20000436 PARAMETER Experiment Name: At_Drought_P Parameter: Age (day) Value: 7
  misc_feature: MA Experiment 20000436 PARAMETER Experiment Name: At_Drought_P Parameter: Organism Value: A. thaliana
  misc_feature: MA Experiment 20000436 PARAMETER Experiment Name: At_Drought_P Parameter: Plant Line Value: WS
  misc_feature: MA Experiment 20000436 PARAMETER Experiment Name: At_Drought_P Parameter: Timepoint (hr) Value: 12
  misc_feature: MA Experiment 20000436 PARAMETER Experiment Name: At_Drought_P Parameter: Tissue Value: Whole Plant
  misc_feature: MA Experiment 20000436 PARAMETER Experiment Name: At_Drought_P Parameter: Treatment Value: Drought vs. No Drought
  misc_feature: MA Experiment ID: 20000451 Result: Down-regulated in Transcription
  misc_feature: MA Experiment 20000451 PARAMETER Experiment Name: At_CS6879_Shoots-Roots_P Parameter: Age (day) Value: 14
  misc_feature: MA Experiment 20000451 PARAMETER Experiment Name: At_CS6879_Shoots-Roots_P Parameter: Organism Value: A. thaliana
  misc_feature: MA Experiment 20000451 PARAMETER Experiment Name: At_CS6879_Shoots-Roots_P Parameter: Plant Line Value: CS6879 vs. WS
  misc_feature: MA Experiment 20000451 PARAMETER Experiment Name: At_CS6879_Shoots-Roots_P Parameter: Tissue Value: Roots
acaattcagattccaattttctcaaactctaaaatcaatctctcaaatctctcaaccgtgatcaagatgcagatcttcgttaagactctcaccggaaagactatcaccctcgaggtggaaagctctgacaccatcgacaacgttaaggccaagatccaggataaggaaggtattcctccggatcagcagaggcttatcttcgccggaaagcagttggaggatggccgcacgttggcggattacaacatccagaaggagtctactcttcacttggtcctccgtctccgtggtggtttctaaaccttgtctctctcttatggttactgaaccaagttcatgtctcgtttcatctagtactttggtggtttatgttttggggccatgtaagcctctgataaataattgatcgactatgtttccgtttctttcatctctcttttctttcaaacaacaaatcgaacttattcgc

SEQ ID NO: 39783 - protein, 99 aa, Arabidopsis thaliana
  peptide (1)..(99): Ceres Seq. ID no. 13645873
  misc_feature (23)..(96): Pfam Name: Ubiquitin family Pfam Description: Ubiquitin family
  misc_feature (23)..(99): Homolog of NCBI NO: 15982787 NR Description: AT4g05320/C17L7_240 [Arabidopsis thaliana]
  misc_feature (23)..(99): Homolog of NCBI NO: 18412077 NR Description: polyubiquitin (UBQ14)
  misc_feature (23)..(99): Homolog of NCBI NO: 7488781 NR Description: polyubiquitin 4.4 - kidney bean
  misc_feature (23)..(99): Homolog of NCBI NO: 170354 NR Description: pentameric polyubiquitin
  misc_feature (23)..(99): Homolog of NCBI NO: 1800281 NR Description: polyubiquitin [Fragaria x ananassa]
  misc_feature (23)..(99): Homolog of NCBI NO: 6118549 NR Description: ubiquitin precursor [Hevea brasiliensis]
  misc_feature (23)..(99): Homolog of NCBI NO: 170352 NR Description: hexameric polyubiquitin
  misc_feature (23)..(99): Homolog of NCBI NO: 70645 NR Description: polyubiquitin 5 - garden pea
  misc_feature (23)..(99): Homolog of NCBI NO: 70644 NR Description: ubiquitin precursor - common sunflower (fragment)
  misc_feature (23)..(99): Homolog of NCBI NO: 6671282 NR Description: recombinant ubiquitin-somatotropin fusion protein
TIQIPIFSNSKINLSNLSTVIKMQIFVKTLTGKTITLEVESSDTIDNVKAKIQDKEGIPPDQQRLIFAGKQLEDGRTLADYNIQKESTLHLVLRLRGGF

SEQ ID NO: 39784 - protein, 77 aa, Arabidopsis thaliana; identical to SEQ ID NO: 36575
  peptide (1)..(77): Ceres Seq. ID no. 13645874
  misc_feature (1)..(74): Pfam Name: Ubiquitin family Pfam Description: Ubiquitin family
  misc_feature (1)..(77): Homolog of NCBI NO: 70645 NR Description: polyubiquitin 5 - garden pea
  misc_feature (1)..(77): Homolog of NCBI NO: 170352 NR Description: hexameric polyubiquitin
  misc_feature (1)..(77): Homolog of NCBI NO: 170354 NR Description: pentameric polyubiquitin
  misc_feature (1)..(77): Homolog of NCBI NO: 1800281 NR Description: polyubiquitin [Fragaria x ananassa]
  misc_feature (1)..(77): Homolog of NCBI NO: 6118549 NR Description: ubiquitin precursor [Hevea brasiliensis]
  misc_feature (1)..(77): Homolog of NCBI NO: 7488781 NR Description: polyubiquitin 4.4 - kidney bean
  misc_feature (1)..(77): Homolog of NCBI NO: 15982787 NR Description: AT4g05320/C17L7_240 [Arabidopsis thaliana]
  misc_feature (1)..(77): Homolog of NCBI NO: 18412077 NR Description: polyubiquitin (UBQ14)
  misc_feature (1)..(77): Homolog of NCBI NO: 70644 NR Description: ubiquitin precursor - common sunflower (fragment)
  misc_feature (1)..(77): Homolog of NCBI NO: 6671282 NR Description: recombinant ubiquitin-somatotropin fusion protein

SEQ ID NO: 39785 - protein, 61 aa, Arabidopsis thaliana
  peptide (1)..(61): Ceres Seq. ID no. 13645875
  misc_feature (1)..(27): Homolog of NCBI NO: 30680052 NR Description: polyubiquitin UBQ10/SEN3 [Arabidopsis thaliana]
MAARWRITTSRRSLLFTWSSVSVVVSKPCLSLMVTEPSSCLVSSSTLVVYVLGPCKPLINN

SEQ ID NO: 39786 - DNA, 1598 bp, Arabidopsis thaliana
  misc_feature (1)..(1598): Ceres Seq. ID no. 12562571
  misc_feature: MA Experiment ID: 20000184 Result: Down-regulated in Transcription
  misc_feature: MA Experiment 20000184 PARAMETER Experiment Name: At_Shoots__P Parameter: Age (day) Value: 7
  misc_feature: MA Experiment 20000184 PARAMETER Experiment Name: At_Shoots__P Parameter: Tissue Value: Shoots vs. Whole Plant
actacaccataaaaagagaaaggcgtaaaaaggaaaaagaaaaaaaaaggtaaacgttataataaaagaaaaaaaaaatatatgacaacggcgttgttttcaccgtctaaccgtagaaaacgccgtctcacacacttcttcttcaccggtactcgctttcatcttactcgccgccttcatctacggccacgatttcatctctttctctcgtcggatctcttcactctccggacgatcgtccaccagtccgcaatcgtcgttgtagttgacgaacctcctccgcctccaccaacatctcctcctccgccttctcctccaccaccgtctcctccaccaccatctcctccaccgccatctcctccgccacctgcttttgcagtaggtaaaacgccggaaggatgcgatgtcttcaaagggaattgggtcaaagactggtcaacgcgtccactttacagagaatccgagtgtccgtacattcagccgcagctcacttgccgcacgcatggccgtcccgatagtgattatcagtcatggagatggcgacctgattcctgctcacttccttcgttagtctctctctccgttcgattttgaatgcgattcggtgattgatcttcagatcggatttgctctgtggttgttgaatgtgttaataggtttaatgcgacggtgatgttggagagcttaagagggaagaagatgatgttcgttggagattcgttgaacagaggaatgtatgtttctctcatctgtcttcttcattcacaaatcccagagaactccaaatccatggatactttcggatcactcaccgtcttctctctcaaggattacaatgcaacgattgagttctattgggcaccgtttcttctagaatcgaattcagataacgcaacagttcatagagtatcagatcgaattgtgaggaaaggatcgatcaacaaacacggtaggcattggcgaggggctgatatagttgtgttcaacacatacttgtggtggaggactggcttcaaaatgaagatcttgttctttcaaggatgagaagaagagaatcgttgagatggagagtgaagatgcttatagaatggcgttgaagactatggttaaatgggtgaagaagaatatggatccattgaagacgagggttttctttgctaccatgtctcctactcattacaagggcgaggattggggaggcgaacaaggaaaaaattgttacaatcaaacgacaccgatccaagacatgaaccattggccatcagactgcagcaaaaccttaatgaaagtgataggagaggaattagaccaaagagcagagtttccggtgacggtacttaacattacacaactctctggctatcggaaagacgcgcacacgtcaatctacaagaagcaatggagcccattgacgaaggagcagctagcaaatccggctagctactcagactgtatacattggtgcttgcctggtcttcaagatacttggaacgagcttttctttgccaagttattttatccatgattcttttctctaaattcaagatttttttagaactgtaattgtaaattatggttataatttttgttaattacgc

SEQ ID NO: 39787 - protein, 170 aa, Arabidopsis thaliana
  peptide (1)..(170): Ceres Seq. ID no. 12562572
  misc_feature (104)..(161): Homolog of NCBI NO: 26452343 NR Description: unknown protein [Arabidopsis thaliana]
  misc_feature (104)..(161): Homolog of NCBI NO: 15228789 NR Description: putative protein; protein id: At3g55990.1
  misc_feature (100)..(160): Homolog of NCBI NO: 18413698 NR Description: putative protein
  misc_feature (100)..(160): Homolog of NCBI NO: 11291876 NR Description: hypothetical protein F7A7.140 - Arabidopsis
  misc_feature (92)..(162): Homolog of NCBI NO: 28876024 NR Description: unknown protein [Oryza sativa (japonica
  misc_feature (96)..(153): Homolog of NCBI NO: 4588008 NR Description: hypothetical protein [Arabidopsis thaliana]
  misc_feature (66)..(162): Homolog of NCBI NO: 28876013 NR Description: unknown protein [Oryza sativa (japonica
  misc_feature (85)..(162): Homolog of NCBI NO: 28393743 NR Description: unknown protein [Arabidopsis thaliana]
  misc_feature (85)..(162): Homolog of NCBI NO: 15226647 NR Description: hypothetical protein; protein id: At2g40320.1
  misc_feature (1)..(162): Homolog of NCBI NO: 15228429 NR Description: unknown protein; protein id: At3g11030.1
MTTALFSPSNRRKRRLTHFFFTGTRFHLTRRLHLRPRFHLFLSSDLFTLRTIVHQSAIVVVVDEPPPPPPTSPPPPSPPPPSPPPPSPPPPSPPPPAFAVGKTPEGCDVFKGNWVKDWSTRPLYRESECPYIQPQLTCRTHGRPDSDYQSWRWRPDSCSLPSLVSLSVRF

SEQ ID NO: 39788 - protein, 153 aa, Arabidopsis thaliana
  peptide (1)..(153): Ceres Seq. ID no. 12562573
  misc_feature (1)..(150): Homolog of NCBI NO: 26452343 NR Description: unknown protein [Arabidopsis thaliana]
  misc_feature (1)..(150): Homolog of NCBI NO: 15228789 NR Description: putative protein; protein id: At3g55990.1
  misc_feature (1)..(147): Homolog of NCBI NO: 18413698 NR Description: putative protein
  misc_feature (1)..(147): Homolog of NCBI NO: 11291876 NR Description: hypothetical protein F7A7.140 - Arabidopsis
  misc_feature (1)..(153): Homolog of NCBI NO: 28876024 NR Description: unknown protein [Oryza sativa (japonica
  misc_feature (1)..(152): Homolog of NCBI NO: 4588008 NR Description: hypothetical protein [Arabidopsis thaliana]
  misc_feature (1)..(153): Homolog of NCBI NO: 28876013 NR Description: unknown protein [Oryza sativa (japonica
  misc_feature (1)..(152): Homolog of NCBI NO: 28393743 NR Description: unknown protein [Arabidopsis thaliana]
  misc_feature (1)..(152): Homolog of NCBI NO: 15226647 NR Description: hypothetical protein; protein id: At2g40320.1
  misc_feature (1)..(153): Homolog of NCBI NO: 15228429 NR Description: unknown protein; protein id: At3g11030.1
MESEDAYRMALKTMVKWVKKNMDPLKTRVFFATMSPTHYKGEDWGGEQGKNCYNQTTPIQDMNHWPSDCSKTLMKVIGEELDQRAEFPVTVLNITQLSGYRKDAHTSIYKKQWSPLTKEQLANPASYSDCIHWCLPGLQDTWNELFFAKLFYP

SEQ ID NO: 39789 - protein, 145 aa, Arabidopsis thaliana
  peptide (1)..(145): Ceres Seq. ID no. 12562574
  misc_feature (1)..(142): Homolog of NCBI NO: 26452343 NR Description: unknown protein [Arabidopsis thaliana]
  misc_feature (1)..(142): Homolog of NCBI NO: 15228789 NR Description: putative protein; protein id: At3g55990.1
  misc_feature (1)..(139): Homolog of NCBI NO: 18413698 NR Description: putative protein
  misc_feature (1)..(139): Homolog of NCBI NO: 11291876 NR Description: hypothetical protein F7A7.140 - Arabidopsis
  misc_feature (1)..(145): Homolog of NCBI NO: 28876024 NR Description: unknown protein [Oryza sativa (japonica
  misc_feature (1)..(144): Homolog of NCBI NO: 4588008 NR Description: hypothetical protein [Arabidopsis thaliana]
  misc_feature (1)..(145): Homolog of NCBI NO: 28876013 NR Description: unknown protein [Oryza sativa (japonica
  misc_feature (1)..(144): Homolog of NCBI NO: 28393743 NR Description: unknown protein [Arabidopsis thaliana]
  misc_feature (1)..(144): Homolog of NCBI NO: 15226647 NR Description: hypothetical protein; protein id: At2g40320.1
  misc_feature (1)..(145): Homolog of NCBI NO: 15228429 NR Description: unknown protein; protein id: At3g11030.1
MALKTMVKWVKKNMDPLKTRVFFATMSPTHYKGEDWGGEQGKNCYNQTTPIQDMNHWPSDCSKTLMKVIGEELDQRAEFPVTVLNITQLSGYRKDAHTSIYKKQWSPLTKEQLANPASYSDCIHWCLPGLQDTWNELFFAKLFYP

SEQ ID NO: 39790 - DNA, 1400 bp, Arabidopsis thaliana
  misc_feature (1)..(1400): Ceres Seq. ID no. 13576600
  misc_feature: MA Experiment ID: 20000184 Result: Up-regulated in Transcription
  misc_feature: MA Experiment 20000184 PARAMETER Experiment Name: At_Shoots__P Parameter: Age (day) Value: 7
  misc_feature: MA Experiment 20000184 PARAMETER Experiment Name: At_Shoots__P Parameter: Tissue Value: Shoots vs. Whole Plant
  misc_feature: MA Experiment ID: 20000495 Result: Up-regulated in Transcription
  misc_feature: MA Experiment 20000495 PARAMETER Experiment Name: At_Guard_Cells_P Parameter: Harvest Date Value: 8/2/2002
  misc_feature: MA Experiment 20000495 PARAMETER Experiment Name: At_Guard_Cells_P Parameter: Organism Value: A. thaliana
  misc_feature: MA Experiment 20000495 PARAMETER Experiment Name: At_Guard_Cells_P Parameter: Tissue Value: Guard Cells vs. Leaves
aaaattctaaagaacaaaaaaggaaaaacagagcagccatgagagcttctgtttattcattgatcctactcttcttctcgtgtttactacatctatcaaagtctcaaccgttcctcggagtaaactacggcctaaccgccgacaatcttccacctccgtcagcgagtgcaaagctccttcaatccacaactttccaaaaagtccgtctttacggatccgacccggctgtaatcaaggccctagcaaacacggggatcgagatcgtcatcggggcgtctaacggcgatgtacccggtctagcatcggacccgagtttcgcccgaagctgggtcgaaaccaacgtggtaccttattatccagcgagcaagattgttctcattgccgtgggaaatgagatcacatcattcggcgacaacagtctcatgtcgcagcttttgccggcgatgaaaaatgtccaaactgccctcgaggcggcgtctcttggtggcgggaaaatcaaagtctcgacagtacacataatgtcggttctagccgggtcagaccctccttcgaccgcggtatttaaaccggagcatgctgatatattgaagggattgctagagtttaatagtgaaaccgggtcgcctttcgcggttaacccctacccgtttttcgcttaccaagatgaccggagacccgaaacgttggcctattgcttgtttcaggccaatcctggccgtgtcgaccccaacagcaacctcaagtatatgaacatgttcgatgctcaggttgatgcggtgtattcagctttgaactcgatggggttcaaggacgtagagataatggtcgctgagactggatggccatacaagggagacccggaggaggctggtgcaacagttgagaacgctagagcttacaataaaaatctcattgctcatttaaaatctgggtccgggacgccacttatgcccgggagagtgatcgacacatacttgttcgcattgtacgacgagaatctcaagcccgggaaaggttctgaacgagccttcggtttgtttagacctgatctaaccatgacttatgatatcgggctcaccaagactaccaattataaccaaacttccatggctccattgtcaccaacaaggccacgtcttccaccagccgcggccccgacgagacaaacattaccttctcctccgcagatgattcttccttcaccagttactccctccgacaaaaactctgggcaaaccgatgttcacaattccactccgcgctctgcctctctggctcacatatgccgctctctctctatttcggcatcgatgttctttgtctccgttttgtatgcattgatcatattgttgtaaaatctcttcatcgatcttatattatgtctcttactaatttaaact

SEQ ID NO: 39791 - protein, 450 aa, Arabidopsis thaliana
  peptide (1)..(450): Ceres Seq. ID no. 13576601
  misc_feature (38)..(343): Pfam Name: Glycosyl hydrolases family 17 Pfam Description: Glycosyl hydrolases family 17
  misc_feature (13)..(356): Homolog of NCBI NO: 34908492 NR Description: putative beta-1,3-glucanase
  misc_feature (31)..(411): Homolog of NCBI NO: 34395169 NR Description: putative glucan endo-1,3-beta-glucosidase
  misc_feature (18)..(392): Homolog of NCBI NO: 34902328 NR Description: Putative glycosyl hydrolase
  misc_feature (27)..(362): Homolog of NCBI NO: 31126737 NR Description: putative beta 1,3-glucanase
  misc_feature (13)..(375): Homolog of NCBI NO: 14279169 NR Description: beta-1,3-glucanase-like protein [Olea europaea]
  misc_feature (34)..(366): Homolog of NCBI NO: 7447982 NR Description: hypothetical protein T4L20.60 - Arabidopsis
  misc_feature (21)..(371): Homolog of NCBI NO: 15226720 NR Description: glycosyl hydrolase family 17 [Arabidopsis
  misc_feature (12)..(366): Homolog of NCBI NO: 30690053 NR Description: glycosyl hydrolase family 17 [Arabidopsis
  misc_feature (13)..(343): Homolog of NCBI NO: 10177275 NR Description: beta-1,3-glucanase-like protein [Arabidopsis
  misc_feature (13)..(450): Homolog of NCBI NO: 22327528 NR Description: glycosyl hydrolase family 17 [Arabidopsis
NSKEQKRKNRAAMRASVYSLILLFFSCLLHLSKSQPFLGVNYGLTADNLPPPSASAKLLQSTTFQKVRLYGSDPAVIKALANTGIEIVIGASNGDVPGLASDPSFARSWVETNVVPYYPASKIVLIAVGNEITSFGDNSLMSQLLPAMKNVQTALEAASLGGGKIKVSTVHIMSVLAGSDPPSTAVFKPEHADILKGLLEFNSETGSPFAVNPYPFFAYQDDRRPETLAYCLFQANPGRVDPNSNLKYMNMFDAQVDAVYSALNSMGFKDVEIMVAETGWPYKGDPEEAGATVENARAYNKNLIAHLKSGSGTPLMPGRVIDTYLFALYDENLKPGKGSERAFGLFRPDLTMTYDIGLTKTTNYNQTSMAPLSPTRPRLPPAAAPTRQTLPSPPQMILPSPVTPSDKNSGQTDVHNSTPRSASLAHICRSLSISASMFFVSVLYALIILL

SEQ ID NO: 39792 - protein, 438 aa, Arabidopsis thaliana
  peptide (1)..(438): Ceres Seq. ID no. 13576602
  misc_feature (26)..(331): Pfam Name: Glycosyl hydrolases family 17 Pfam Description: Glycosyl hydrolases family 17
  misc_feature (1)..(344): Homolog of NCBI NO: 34908492 NR Description: putative beta-1,3-glucanase
  misc_feature (19)..(399): Homolog of NCBI NO: 34395169 NR Description: putative glucan endo-1,3-beta-glucosidase
  misc_feature (6)..(380): Homolog of NCBI NO: 34902328 NR Description: Putative glycosyl hydrolase
  misc_feature (15)..(350): Homolog of NCBI NO: 31126737 NR Description: putative beta 1,3-glucanase
  misc_feature (1)..(363): Homolog of NCBI NO: 14279169 NR Description: beta-1,3-glucanase-like protein [Olea europaea]
  misc_feature (22)..(354): Homolog of NCBI NO: 7447982 NR Description: hypothetical protein T4L20.60 - Arabidopsis
  misc_feature (9)..(359): Homolog of NCBI NO: 15226720 NR Description: glycosyl hydrolase family 17 [Arabidopsis
  misc_feature (1)..(354): Homolog of NCBI NO: 30690053 NR Description: glycosyl hydrolase family 17 [Arabidopsis
  misc_feature (1)..(331): Homolog of NCBI NO: 10177275 NR Description: beta-1,3-glucanase-like protein [Arabidopsis
  misc_feature (1)..(438): Homolog of NCBI NO: 22327528 NR Description: glycosyl hydrolase family 17 [Arabidopsis
MRASVYSLILLFFSCLLHLSKSQPFLGVNYGLTADNLPPPSASAKLLQSTTFQKVRLYGSDPAVIKALANTGIEIVIGASNGDVPGLASDPSFARSWVETNVVPYYPASKIVLIAVGNEITSFGDNSLMSQLLPAMKNVQTALEAASLGGGKIKVSTVHIMSVLAGSDPPSTAVFKPEHADILKGLLEFNSETGSPFAVNPYPFFAYQDDRRPETLAYCLFQANPGRVDPNSNLKYMNMFDAQVDAVYSALNSMGFKDVEIMVAETGWPYKGDPEEAGATVENARAYNKNLIAHLKSGSGTPLMPGRVIDTYLFALYDENLKPGKGSERAFGLFRPDLTMTYDIGLTKTTNYNQTSMAPLSPTRPRLPPAAAPTRQTLPSPPQMILPSPVTPSDKNSGQTDVHNSTPRSASLAHICRSLSISASMFFVSVLYALIILL

SEQ ID NO: 39793 - protein, 310 aa, Arabidopsis thaliana
  peptide (1)..(310): Ceres Seq. ID no. 13576603
  misc_feature (1)..(203): Pfam Name: Glycosyl hydrolases family 17 Pfam Description: Glycosyl hydrolases family 17
  misc_feature (1)..(216): Homolog of NCBI NO: 34908492 NR Description: putative beta-1,3-glucanase
  misc_feature (1)..(271): Homolog of NCBI NO: 34395169 NR Description: putative glucan endo-1,3-beta-glucosidase
  misc_feature (1)..(252): Homolog of NCBI NO: 34902328 NR Description: Putative glycosyl hydrolase
  misc_feature (1)..(222): Homolog of NCBI NO: 31126737 NR Description: putative beta 1,3-glucanase
  misc_feature (1)..(235): Homolog of NCBI NO: 14279169 NR Description: beta-1,3-glucanase-like protein [Olea europaea]
  misc_feature (1)..(226): Homolog of NCBI NO: 7447982 NR Description: hypothetical protein T4L20.60 - Arabidopsis
  misc_feature (1)..(231): Homolog of NCBI NO: 15226720 NR Description: glycosyl hydrolase family 17 [Arabidopsis
  misc_feature (1)..(226): Homolog of NCBI NO: 30690053 NR Description: glycosyl hydrolase family 17 [Arabidopsis
  misc_feature (1)..(203): Homolog of NCBI NO: 10177275 NR Description: beta-1,3-glucanase-like protein [Arabidopsis
  misc_feature (1)..(310): Homolog of NCBI NO: 22327528 NR Description: glycosyl hydrolase family 17 [Arabidopsis
MSQLLPAMKNVQTALEAASLGGGKIKVSTVHIMSVLAGSDPPSTAVFKPEHADILKGLLEFNSETGSPFAVNPYPFFAYQDDRRPETLAYCLFQANPGRVDPNSNLKYMNMFDAQVDAVYSALNSMGFKDVEIMVAETGWPYKGDPEEAGATVENARAYNKNLIAHLKSGSGTPLMPGRVIDTYLFALYDENLKPGKGSERAFGLFRPDLTMTYDIGLTKTTNYNQTSMAPLSPTRPRLPPAAAPTRQTLPSPPQMILPSPVTPSDKNSGQTDVHNSTPRSASLAHICRSLSISASMFFVSVLYALIILL

SEQ ID NO: 39794 - DNA, 2082 bp, Arabidopsis thaliana
  misc_feature (1)..(2082): Ceres Seq. ID no. 12396520
  misc_feature: MA Experiment ID: 108434 Result: Up-regulated in Transcription
  misc_feature: MA Experiment 108434 PARAMETER Experiment Name: At_Root_Tips_cDNA_P Parameter: Tissue Value: Root Tips
  misc_feature: MA Experiment ID: 20000227 Result: Up-regulated in Transcription
  misc_feature: MA Experiment 20000227 PARAMETER Experiment Name: At_Root-Tips-vs-Tops_P Parameter: Tissue Value: Root Tips vs. Root Tops
  misc_feature: MA Experiment ID: 20001248 Result: Up-regulated in Transcription
  misc_feature: MA Experiment 20001248 PARAMETER Experiment Name: At_Far-red-induction_P Parameter: Age (day) Value: 7
  misc_feature: MA Experiment 20001248 PARAMETER Experiment Name: At_Far-red-induction_P Parameter: Light Value: Far-red vs. White
  misc_feature: MA Experiment 20001248 PARAMETER Experiment Name: At_Far-red-induction_P Parameter: Organism Value: A. thaliana
  misc_feature: MA Experiment 20001248 PARAMETER Experiment Name: At_Far-red-induction_P Parameter: Plant Line Value: Columbia
  misc_feature: MA Experiment 20001248 PARAMETER Experiment Name: At_Far-red-induction_P Parameter: Timepoint (hr) Value: 4
  misc_feature: MA Experiment 20001248 PARAMETER Experiment Name: At_Far-red-induction_P Parameter: Tissue Value: Whole Plant
  misc_feature: MA Experiment ID: 20001450 Result: Up-regulated in Transcription
  misc_feature: MA Experiment 20001450 PARAMETER Experiment Name: At_Far-red-induction_P Parameter: Age (day) Value: 7
  misc_feature: MA Experiment 20001450 PARAMETER Experiment Name: At_Far-red-induction_P Parameter: Light Value: Far-red vs. White
  misc_feature: MA Experiment 20001450 PARAMETER Experiment Name: At_Far-red-induction_P Parameter: Organism Value: A. thaliana
  misc_feature: MA Experiment 20001450 PARAMETER Experiment Name: At_Far-red-induction_P Parameter: Plant Line Value: Columbia
  misc_feature: MA Experiment 20001450 PARAMETER Experiment Name: At_Far-red-induction_P Parameter: Timepoint (hr) Value: 8
  misc_feature: MA Experiment 20001450 PARAMETER Experiment Name: At_Far-red-induction_P Parameter: Tissue Value: Whole Plant
  misc_feature: MA Experiment ID: 20001905 Result: Down-regulated in Transcription
  misc_feature: MA Experiment 20001905 PARAMETER Experiment Name: At_Drought_Reproduction_P Parameter: Age (day) Value: 40
  misc_feature: MA Experiment 20001905 PARAMETER Experiment Name: At_Drought_Reproduction_P Parameter: Organism Value: A. thaliana
  misc_feature: MA Experiment 20001905 PARAMETER Experiment Name: At_Drought_Reproduction_P Parameter: Plant Line Value: WS
  misc_feature: MA Experiment 20001905 PARAMETER Experiment Name: At_Drought_Reproduction_P Parameter: Timepoint (day) Value: 10
  misc_feature: MA Experiment 20001905 PARAMETER Experiment Name: At_Drought_Reproduction_P Parameter: Tissue Value: Rosettes
  misc_feature: MA Experiment 20001905 PARAMETER Experiment Name: At_Drought_Reproduction_P Parameter: Treatment Value: Drought vs. No Drought
aagcacttcttctccgccttcgtaagttccgccgaaaagaaccaaatccttcactactctgtctcagctttcgacctctctcttctcattcctttgcaacttctcacttctcgaattccttctcttcaaaatcagaaatggctcaagtggttgctaccaggtcaattcaaggctcgatgttatctcccaacggtggatctgtgtctacaagatccgagaagctattgaaaccagcgagttttgcagtgaaggttcttggcaacgaagcaaagagaagtggaagagtctctgtaagaagcagaagagtggttgatactactgtgagatccgctcgtgttgagactgaagtcattcctgtttctcctgaagatgtgcctaacagagaggagcagcttgagaggttgttggaaatgcagcagtttggtgatacatcggtagggatgtggtcgaagccgacagtgaggaggaagacaaagattgtttgcaccgttggtccgtcgaccaacacacgagaaatgatatggaaattggctgaagctgggatgaatgttgctaggatgaatatgtctcatggagatcatgcttcacataagaaggttattgatttggttaaagaatacaatgcacaaactaaagacaacactattgctatcatgcttgacaccaagggtccggaagttaggagtggagatttacctcagccaattatgttagatcctggtcaagagtttacctttacaattgagagaggagtcagcacaccaagttgtgtcagtgttaactatgatgatttcgttaatgacgtggaagcgggtgacatgcttcttgttgatggtggtatgatgtcgtttatggtgaagtcaaagaccaaagactctgtcaaatgtgaagttgttgatggtggagaacttaagtcaaggagacacctgaatgtccgaggaaagagtgcaactttaccttcaatcactgagaaggactgggaggatattaaatttggagtggagaacaaagttgacttttatgcagtttcctttgtcaaagatgctcaagttgtacacgagttgaagaaataccttcaaaatagtggtgctgatatacacgtgatagtgaaaattgagagtgcagactccatacctaacttgcactccattatcacagcaccagatggggcaatggttgcaagaggtgatcttggtgcagagcttccaattgaagaagtccccattcttcaggaggagatcattaacctgtgccgtagtatgggaaaagctgttattgttgcgactaacatgcttgagagtatgatagttcatccaactccaacccgggcagaggtctcagacattgctatcgctgttagagaaggtgctgatgcggtaatgctttcaggagaaactgctcacggaaagttcccattgaaagctgctggagtgatgcacactgttgcattgcgaacagaagcaaccattactagcggtgaaatgccacctaatcttggtcaagccttcaagaaccatatgagtgagatgtttgcataccatgcaaccatgatgtcaaacacacttggaacttcaactgttgtcttcaccagaaccggtttcatggccatattgttaagtcactatcgtccttccggcacaatctatgccttcacaaatgagaaaaaaatacaacaaagattagctttgtatcaaggtgtatgccccatatatatggagttcacagatgatgcagaagaaacttttgctaatgctttggctacattactgaaacaaggaatggtgaagaagggagaggaaatagcaatcgtacagagcggtacacagccaatctggcgatctcaatcgacacataacatccaagtccgcaaggtttaaagcttcttttaagatgggatgtctttaatatgtagaacctcgtttttggttataattttcgttgcatgtctctcttctcttgtactattcacacttgttgtttgctgtatcttcttcttcagtttgctttgctacgattgtggtttttggagacattatagctcattaactgtttgtgagaccaaatgtgtcagaatccgctatt

SEQ ID NO: 39795 - protein, 624 aa, Arabidopsis thaliana
  peptide (1)..(624): Ceres Seq. ID no. 12396521
  misc_feature (507)..(623): Pfam Name: Pyruvate kinase, alpha/beta domain Pfam Description: Pyruvate kinase, alpha/beta domain
  misc_feature (155)..(610): Homolog of NCBI NO: 18403597 NR Description: pyruvate kinase, putative
  misc_feature (147)..(624): Homolog of NCBI NO: 24217414 NR Description: pyruvate kinase [Leptospira interrogans serovar
  misc_feature (207)..(624): Homolog of NCBI NO: 2497540 NR Description: PYRUVATE KINASE ISOZYME G, CHLOROPLAST
  misc_feature (154)..(624): Homolog of NCBI NO: 25287763 NR Description: hypothetical protein F5D14.22 - Arabidopsis
  misc_feature (154)..(624): Homolog of NCBI NO: 18398434 NR Description: pyruvate kinase, plastid isozyme, putative
  misc_feature (155)..(624): Homolog of NCBI NO: 2497542 NR Description: Pyruvate kinase isozyme G, chloroplast precursor
  misc_feature (154)..(624): Homolog of NCBI NO: 37537030 NR Description: putative pyruvate kinase [Oryza sativa (japonica
  misc_feature (46)..(620): Homolog of NCBI NO: 34912028 NR Description: putative pyruvate kinase [Oryza sativa (japonica
  misc_feature (46)..(624): Homolog of NCBI NO: 15237303 NR Description: pyruvate kinase
  misc_feature (46)..(624): Homolog of NCBI NO: 15081612 NR Description: AT5g52920/MXC20_15 [Arabidopsis thaliana]
ALLLRLRKFRRKEPNPSLLCLSFRPLSSHSFATSHFSNSFSSKSEMAQVVATRSIQGSMLSPNGGSVSTRSEKLLKPASFAVKVLGNEAKRSGRVSVRSRRVVDTTVRSARVETEVIPVSPEDVPNREEQLERLLEMQQFGDTSVGMWSKPTVRRKTKIVCTVGPSTNTREMIWKLAEAGMNVARMNMSHGDHASHKKVIDLVKEYNAQTKDNTIAIMLDTKGPEVRSGDLPQPIMLDPGQEFTFTIERGVSTPSCVSVNYDDFVNDVEAGDMLLVDGGMMSFMVKSKTKDSVKCEVVDGGELKSRRHLNVRGKSATLPSITEKDWEDIKFGVENKVDFYAVSFVKDAQVVHELKKYLQNSGADIHVIVKIESADSIPNLHSIITAPDGAMVARGDLGAELPIEEVPILQEEIINLCRSMGKAVIVATNMLESMIVHPTPTRAEVSDIAIAVREGADAVMLSGETAHGKFPLKAAGVMHTVALRTEATITSGEMPPNLGQAFKNHMSEMFAYHATMMSNTLGTSTVVFTRTGFMAILLSHYRPSGTIYAFTNEKKIQQRLALYQGVCPIYMEFTDDAEETFANALATLLKQGMVKKGEEIAIVQSGTQPIWRSQSTHNIQVRKV

SEQ ID NO: 39796 - protein, 579 aa, Arabidopsis thaliana
  peptide (1)..(579): Ceres Seq. ID no. 12396522
  misc_feature (462)..(578): Pfam Name: Pyruvate kinase, alpha/beta domain Pfam Description: Pyruvate kinase, alpha/beta domain
  misc_feature (110)..(565): Homolog of NCBI NO: 18403597 NR Description: pyruvate kinase, putative
  misc_feature (102)..(579): Homolog of NCBI NO: 24217414 NR Description: pyruvate kinase [Leptospira interrogans serovar
  misc_feature (162)..(579): Homolog of NCBI NO: 2497540 NR Description: PYRUVATE KINASE ISOZYME G, CHLOROPLAST
  misc_feature (109)..(579): Homolog of NCBI NO: 25287763 NR Description: hypothetical protein F5D14.22 - Arabidopsis
  misc_feature (109)..(579): Homolog of NCBI NO: 18398434 NR Description: pyruvate kinase, plastid isozyme, putative
  misc_feature (110)..(579): Homolog of NCBI NO: 2497542 NR Description: Pyruvate kinase isozyme G, chloroplast precursor
  misc_feature (109)..(579): Homolog of NCBI NO: 37537030 NR Description: putative pyruvate kinase [Oryza sativa (japonica
  misc_feature (1)..(575): Homolog of NCBI NO: 34912028 NR Description: putative pyruvate kinase [Oryza sativa (japonica
  misc_feature (1)..(579): Homolog of NCBI NO: 15237303 NR Description: pyruvate kinase
  misc_feature (1)..(579): Homolog of NCBI NO: 15081612 NR Description: AT5g52920/MXC20_15 [Arabidopsis thaliana]
MAQVVATRSIQGSMLSPNGGSVSTRSEKLLKPASFAVKVLGNEAKRSGRVSVRSRRVVDTTVRSARVETEVIPVSPEDVPNREEQLERLLEMQQFGDTSVGMWSKPTVRRKTKIVCTVGPSTNTREMIWKLAEAGMNVARMNMSHGDHASHKKVIDLVKEYNAQTKDNTIAIMLDTKGPEVRSGDLPQPIMLDPGQEFTFTIERGVSTPSCVSVNYDDFVNDVEAGDMLLVDGGMMSFMVKSKTKDSVKCEVVDGGELKSRRHLNVRGKSATLPSITEKDWEDIKFGVENKVDFYAVSFVKDAQVVHELKKYLQNSGADIHVIVKIESADSIPNLHSIITAPDGAMVARGDLGAELPIEEVPILQEEIINLCRSMGKAVIVATNMLESMIVHPTPTRAEVSDIAIAVREGADAVMLSGETAHGKFPLKAAGVMHTVALRTEATITSGEMPPNLGQAFKNHMSEMFAYHATMMSNTLGTSTVVFTRTGFMAILLSHYRPSGTIYAFTNEKKIQQRLALYQGVCPIYMEFTDDAEETFANALATLLKQGMVKKGEEIAIVQSGTQPIWRSQSTHNIQVRKV

SEQ ID NO: 39797 - protein, 566 aa, Arabidopsis thaliana
  peptide (1)..(566): Ceres Seq. ID no. 12396523
  misc_feature (449)..(565): Pfam Name: Pyruvate kinase, alpha/beta domain Pfam Description: Pyruvate kinase, alpha/beta domain
  misc_feature (97)..(552): Homolog of NCBI NO: 18403597 NR Description: pyruvate kinase, putative
  misc_feature (89)..(566): Homolog of NCBI NO: 24217414 NR Description: pyruvate kinase [Leptospira interrogans serovar
  misc_feature (149)..(566): Homolog of NCBI NO: 2497540 NR Description: PYRUVATE KINASE ISOZYME G, CHLOROPLAST
  misc_feature (96)..(566): Homolog of NCBI NO: 25287763 NR Description: hypothetical protein F5D14.22 - Arabidopsis
  misc_feature (96)..(566): Homolog of NCBI NO: 18398434 NR Description: pyruvate kinase, plastid isozyme, putative
  misc_feature (97)..(566): Homolog of NCBI NO: 2497542 NR Description: Pyruvate kinase isozyme G, chloroplast precursor
  misc_feature (96)..(566): Homolog of NCBI NO: 37537030 NR Description: putative pyruvate kinase [Oryza sativa (japonica
  misc_feature (1)..(562): Homolog of NCBI NO: 34912028 NR Description: putative pyruvate kinase [Oryza sativa (japonica
  misc_feature (1)..(566): Homolog of NCBI NO: 15237303 NR Description: pyruvate kinase
  misc_feature (1)..(566): Homolog of NCBI NO: 15081612 NR Description: AT5g52920/MXC20_15 [Arabidopsis thaliana]
MLSPNGGSVSTRSEKLLKPASFAVKVLGNEAKRSGRVSVRSRRVVDTTVRSARVETEVIPVSPEDVPNREEQLERLLEMQQFGDTSVGMWSKPTVRRKTKIVCTVGPSTNTREMIWKLAEAGMNVARMNMSHGDHASHKKVIDLVKEYNAQTKDNTIAIMLDTKGPEVRSGDLPQPIMLDPGQEFTFTIERGVSTPSCVSVNYDDFVNDVEAGDMLLVDGGMMSFMVKSKTKDSVKCEVVDGGELKSRRHLNVRGKSATLPSITEKDWEDIKFGVENKVDFYAVSFVKDAQVVHELKKYLQNSGADIHVIVKIESADSIPNLHSIITAPDGAMVARGDLGAELPIEEVPILQEEIINLCRSMGKAVIVATNMLESMIVHPTPTRAEVSDIAIAVREGADAVMLSGETAHGKFPLKAAGVMHTVALRTEATITSGEMPPNLGQAFKNHMSEMFAYHATMMSNTLGTSTVVFTRTGFMAILLSHYRPSGTIYAFTNEKKIQQRLALYQGVCPIYMEFTDDAEETFANALATLLKQGMVKKGEEIAIVQSGTQPIWRSQSTHNIQVRKV

SEQ ID NO: 39798 - DNA, 692 bp, Arabidopsis thaliana
  misc_feature (1)..(692): Ceres Seq. ID no. 12562575
  misc_feature: MA Experiment ID: 20000086 Result: Up-regulated in Transcription
  misc_feature: MA Experiment 20000086 PARAMETER Experiment Name: At_100uM_ABA_Mutants_cDNA_P Parameter: Plant Line Value: CS22
  misc_feature: MA Experiment 20000086 PARAMETER Experiment Name: At_100uM_ABA_Mutants_cDNA_P Parameter: Timepoint (hr) Value: 6
  misc_feature: MA Experiment 20000086 PARAMETER Experiment Name: At_100uM_ABA_Mutants_cDNA_P Parameter: Tissue Value: Aerial
  misc_feature: MA Experiment 20000086 PARAMETER Experiment Name: At_100uM_ABA_Mutants_cDNA_P Parameter: Treatment Value: 100uM ABA vs. No Treatment
  misc_feature: MA Experiment ID: 20000171 Result: Up-regulated in Transcription
  misc_feature: MA Experiment 20000171 PARAMETER Experiment Name: At_42deg_Heat_P Parameter: Age (day) Value: 14
  misc_feature: MA Experiment 20000171 PARAMETER Experiment Name: At_42deg_Heat_P Parameter: Organism Value: A. thaliana
  misc_feature: MA Experiment 20000171 PARAMETER Experiment Name: At_42deg_Heat_P Parameter: Plant Line Value: WS
  misc_feature: MA Experiment 20000171 PARAMETER Experiment Name: At_42deg_Heat_P Parameter: Temperature (deg C) Value: 42 vs. 22
  misc_feature: MA Experiment 20000171 PARAMETER Experiment Name: At_42deg_Heat_P Parameter: Timepoint (hr) Value: 1
  misc_feature: MA Experiment 20000171 PARAMETER Experiment Name: At_42deg_Heat_P Parameter: Tissue Value: Aerial
  misc_feature: MA Experiment ID: 20000184 Result: Up-regulated in Transcription
  misc_feature: MA Experiment 20000184 PARAMETER Experiment Name: At_Shoots__P Parameter: Age (day) Value: 7
  misc_feature: MA Experiment 20000184 PARAMETER Experiment Name: At_Shoots__P Parameter: Tissue Value: Shoots vs. Whole Plant
  misc_feature: MA Experiment ID: 20000185 Result: Up-regulated in Transcription
  misc_feature: MA Experiment 20000185 PARAMETER Experiment Name: At_Roots__P Parameter: Age (day) Value: 7 vs. 21
  misc_feature: MA Experiment 20000185 PARAMETER Experiment Name: At_Roots__P Parameter: Organism Value: A. thaliana
  misc_feature: MA Experiment 20000185 PARAMETER Experiment Name: At_Roots__P Parameter: Tissue Value: Roots vs. Whole Plant
  misc_feature: MA Experiment ID: 20000234 Result: Down-regulated in Transcription
  misc_feature: MA Experiment 20000234 PARAMETER Experiment Name: At_Siliques_P Parameter: Age (day) Value: 21
  misc_feature: MA Experiment 20000234 PARAMETER Experiment Name: At_Siliques_P Parameter: Organism Value: A. thaliana
  misc_feature: MA Experiment 20000234 PARAMETER Experiment Name: At_Siliques_P Parameter: Plant Line Value: WS
  misc_feature: MA Experiment 20000234 PARAMETER Experiment Name: At_Siliques_P Parameter: Tissue Value: Less Than 5mm Siliques vs. Whole Plant
  misc_feature: MA Experiment ID: 20000235 Result: Down-regulated in Transcription
  misc_feature: MA Experiment 20000235 PARAMETER Experiment Name: At_Siliques_P Parameter: Age (day) Value: 21
  misc_feature: MA Experiment 20000235 PARAMETER Experiment Name: At_Siliques_P Parameter: Organism Value: A. thaliana
  misc_feature: MA Experiment 20000235 PARAMETER Experiment Name: At_Siliques_P Parameter: Plant Line Value: WS
  misc_feature: MA Experiment 20000235 PARAMETER Experiment Name: At_Siliques_P Parameter: Tissue Value: 5-10mm Siliques vs. Whole Plant
  misc_feature: MA Experiment ID: 20000269 Result: Down-regulated in Transcription
  misc_feature: MA Experiment 20000269 PARAMETER Experiment Name: At_1mM_KNO3_L-vs-H_Roots_P Parameter: Age (day) Value: 7,10,12
  misc_feature: MA Experiment 20000269 PARAMETER Experiment Name: At_1mM_KNO3_L-vs-H_Roots_P Parameter: Organism Value: A. thaliana
  misc_feature: MA Experiment 20000269 PARAMETER Experiment Name: At_1mM_KNO3_L-vs-H_Roots_P Parameter: Plant Line Value: WS
  misc_feature: MA Experiment 20000269 PARAMETER Experiment Name: At_1mM_KNO3_L-vs-H_Roots_P Parameter: Timepoint (day) Value: 7,10,12
  misc_feature: MA Experiment 20000269 PARAMETER Experiment Name: At_1mM_KNO3_L-vs-H_Roots_P Parameter: Tissue Value: Roots
  misc_feature: MA Experiment 20000269 PARAMETER Experiment Name: At_1mM_KNO3_L-vs-H_Roots_P Parameter: Treatment Value: 1mM KNO3 vs. 50mM KNO3
  misc_feature: MA Experiment ID: 20000438 Result: Up-regulated in Transcription
  misc_feature: MA Experiment 20000438 PARAMETER Experiment Name: At_Shoots__P Parameter: Age (day) Value: 14
  misc_feature: MA Experiment 20000438 PARAMETER Experiment Name: At_Shoots__P Parameter: Tissue Value: Shoots vs. Whole Plant
  misc_feature: MA Experiment ID: 20000439 Result: Up-regulated in Transcription
  misc_feature: MA Experiment 20000439 PARAMETER Experiment Name: At_Roots__P Parameter: Age (day) Value: 14 vs. 21
  misc_feature: MA Experiment 20000439 PARAMETER Experiment Name: At_Roots__P Parameter: Organism Value: A. thaliana
  misc_feature: MA Experiment 20000439 PARAMETER Experiment Name: At_Roots__P Parameter: Tissue Value: Roots vs. Whole Plant
  misc_feature: MA Experiment ID: 20000451 Result: Down-regulated in Transcription
  misc_feature: MA Experiment 20000451 PARAMETER Experiment Name: At_CS6879_Shoots-Roots_P Parameter: Age (day) Value: 14
  misc_feature: MA Experiment 20000451 PARAMETER Experiment Name: At_CS6879_Shoots-Roots_P Parameter: Organism Value: A. thaliana
  misc_feature: MA Experiment 20000451 PARAMETER Experiment Name: At_CS6879_Shoots-Roots_P Parameter: Plant Line Value: CS6879 vs. WS
  misc_feature: MA Experiment 20000451 PARAMETER Experiment Name: At_CS6879_Shoots-Roots_P Parameter: Tissue Value: Roots
  misc_feature: MA Experiment ID: 20000452 Result: Down-regulated in Transcription
  misc_feature: MA Experiment 20000452 PARAMETER Experiment Name: At_CS6879_Shoots-Roots_P Parameter: Age (day) Value: 14
  misc_feature: MA Experiment 20000452 PARAMETER Experiment Name: At_CS6879_Shoots-Roots_P Parameter: Organism Value: A. thaliana
  misc_feature: MA Experiment 20000452 PARAMETER Experiment Name: At_CS6879_Shoots-Roots_P Parameter: Plant Line Value: CS6879 vs. WS
  misc_feature: MA Experiment 20000452 PARAMETER Experiment Name: At_CS6879_Shoots-Roots_P Parameter: Tissue Value: Shoots
  misc_feature: MA Experiment ID: 20000453 Result: Up-regulated in Transcription
  misc_feature: MA Experiment 20000453 PARAMETER Experiment Name: At_100uM_ABA_P Parameter: Age (day) Value: 15
  misc_feature: MA Experiment 20000453 PARAMETER Experiment Name: At_100uM_ABA_P Parameter: Organism Value: A. thaliana
  misc_feature: MA Experiment 20000453 PARAMETER Experiment Name: At_100uM_ABA_P Parameter: Plant Line Value: WS
  misc_feature: MA Experiment 20000453 PARAMETER Experiment Name: At_100uM_ABA_P Parameter: Timepoint (hr) Value: 24
  misc_feature: MA Experiment 20000453 PARAMETER Experiment Name: At_100uM_ABA_P Parameter: Tissue Value: Aerial
  misc_feature: MA Experiment 20000453 PARAMETER Experiment Name: At_100uM_ABA_P Parameter: Treatment Value: 100uM ABA vs. No Treatment
  misc_feature: MA Experiment ID: 20000455 Result: Up-regulated in Transcription
  misc_feature: MA Experiment 20000455 PARAMETER Experiment Name: At_100uM_ABA_P Parameter: Age (day) Value: 16
  misc_feature: MA Experiment 20000455 PARAMETER Experiment Name: At_100uM_ABA_P Parameter: Organism Value: A. thaliana
  misc_feature: MA Experiment 20000455 PARAMETER Experiment Name: At_100uM_ABA_P Parameter: Plant Line Value: WS
  misc_feature: MA Experiment 20000455 PARAMETER Experiment Name: At_100uM_ABA_P Parameter: Timepoint (hr) Value: 48
  misc_feature: MA Experiment 20000455 PARAMETER Experiment Name: At_100uM_ABA_P Parameter: Tissue Value: Aerial
  misc_feature: MA Experiment 20000455 PARAMETER Experiment Name: At_100uM_ABA_P Parameter: Treatment Value: 100uM ABA vs. No Treatment
  misc_feature: MA Experiment ID: 20000495 Result: Up-regulated in Transcription
  misc_feature: MA Experiment 20000495 PARAMETER Experiment Name: At_Guard_Cells_P Parameter: Harvest Date Value: 8/2/2002
  misc_feature: MA Experiment 20000495 PARAMETER Experiment Name: At_Guard_Cells_P Parameter: Organism Value: A. thaliana
  misc_feature: MA Experiment 20000495 PARAMETER Experiment Name: At_Guard_Cells_P Parameter: Tissue Value: Guard Cells vs. Leaves
  misc_feature: MA Experiment ID: 20000709 Result: Up-regulated in Transcription
  misc_feature: MA Experiment 20000709 PARAMETER Experiment Name: At_15mM_NH4NO3_L-to-H_P Parameter: Age (hr) Value: 14
  misc_feature: MA Experiment 20000709 PARAMETER Experiment Name: At_15mM_NH4NO3_L-to-H_P Parameter: Organism Value: A. thaliana
  misc_feature: MA Experiment 20000709 PARAMETER Experiment Name: At_15mM_NH4NO3_L-to-H_P Parameter: Plant Line Value: WS
  misc_feature: MA Experiment 20000709 PARAMETER Experiment Name: At_15mM_NH4NO3_L-to-H_P Parameter: Timepoint (hr) Value: 4
  misc_feature: MA Experiment 20000709 PARAMETER Experiment Name: At_15mM_NH4NO3_L-to-H_P Parameter: Tissue Value: Aerial
  misc_feature: MA Experiment 20000709 PARAMETER Experiment Name: At_15mM_NH4NO3_L-to-H_P Parameter: Treatment Value: 15mM NH4NO3 vs. 30mM Mannitol
  misc_feature: MA Experiment ID: 20001554 Result: Up-regulated in Transcription
  misc_feature: MA Experiment 20001554 PARAMETER Experiment Name: At_Drought_Soil_Dry_P Parameter: Age (day) Value: 21
  misc_feature: MA Experiment 20001554 PARAMETER Experiment Name: At_Drought_Soil_Dry_P Parameter: Organism Value: A. thaliana
  misc_feature: MA Experiment 20001554 PARAMETER Experiment Name: At_Drought_Soil_Dry_P Parameter: Plant Line Value: WS
  misc_feature: MA Experiment 20001554 PARAMETER Experiment Name: At_Drought_Soil_Dry_P Parameter: Post Timepoint (hr) Value: None
  misc_feature: MA Experiment 20001554 PARAMETER Experiment Name: At_Drought_Soil_Dry_P Parameter: Post-Treatment Value: None
  misc_feature: MA Experiment 20001554 PARAMETER Experiment Name: At_Drought_Soil_Dry_P Parameter: Timepoint (day) Value: 7
  misc_feature: MA Experiment 20001554 PARAMETER Experiment Name: At_Drought_Soil_Dry_P Parameter: Treatment Value: Drought vs. No Drought
  misc_feature: MA Experiment ID: 20001555 Result: Up-regulated in Transcription
  misc_feature: MA Experiment 20001555 PARAMETER Experiment Name: At_Drought_Soil_Dry_P Parameter: Age (day) Value: 24
  misc_feature: MA Experiment 20001555 PARAMETER Experiment Name: At_Drought_Soil_Dry_P Parameter: Organism Value: A. thaliana
  misc_feature: MA Experiment 20001555 PARAMETER Experiment Name: At_Drought_Soil_Dry_P Parameter: Plant Line Value: WS
  misc_feature: MA Experiment 20001555 PARAMETER Experiment Name: At_Drought_Soil_Dry_P Parameter: Post Timepoint (hr) Value: None
  misc_feature: MA Experiment 20001555 PARAMETER Experiment Name: At_Drought_Soil_Dry_P Parameter: Post-Treatment Value: None
  misc_feature: MA Experiment 20001555 PARAMETER Experiment Name: At_Drought_Soil_Dry_P Parameter: Timepoint (day) Value: 10
  misc_feature: MA Experiment 20001555 PARAMETER Experiment Name: At_Drought_Soil_Dry_P Parameter: Treatment Value: Drought vs. No Drought
  misc_feature: MA Experiment ID: 20001558 Result: Down-regulated in Transcription
  misc_feature: MA Experiment 20001558 PARAMETER Experiment Name: At_Drought_Soil_Dry_P Parameter: Age (day) Value: 27
  misc_feature: MA Experiment 20001558 PARAMETER Experiment Name: At_Drought_Soil_Dry_P Parameter: Organism Value: A. thaliana
  misc_feature: MA Experiment 20001558 PARAMETER Experiment Name: At_Drought_Soil_Dry_P Parameter: Plant Line Value: WS
  misc_feature: MA Experiment 20001558 PARAMETER Experiment Name: At_Drought_Soil_Dry_P Parameter: Post Timepoint (hr) Value: 6
  misc_feature: MA Experiment 20001558 PARAMETER Experiment Name: At_Drought_Soil_Dry_P Parameter: Post-Treatment Value: Re-Water vs. No Drought
  misc_feature: MA Experiment 20001558 PARAMETER Experiment Name: At_Drought_Soil_Dry_P Parameter: Timepoint (day) Value: 13
  misc_feature: MA Experiment 20001558 PARAMETER Experiment Name: At_Drought_Soil_Dry_P Parameter: Treatment Value: Drought vs. No Drought
atcacttacttaacatactaagagagttattagatcttgaaaaacatggcttccaaggctttgattctgttgggtctcttcgcaattcttctggtggtctccgaagtttctgccgcaaggatncgggcatggtgaagccagagagtgaggaaactgtgcaacctgaaggttatcacggaggacatggtggtcacggagggggaggccactacggaggaggaggccacgggcatggaggacacaacggaggagggggccacggacttgacggatacggaggaggacatggaggacactacggaggaggaggccacggacttgacggatacggaggaggtggaggacactatggaggaggtggaggacactacggaggaggtggaggacactacggaggaggtggaggacactacggaggaggtggtggaggacacggaggtggaggacactacggaggtggtggaggaggatacggaggtggaggaggacaccacggaggaggaggccacgggctaaacgaacctgttcagactaagccgggtgtttaaaactatataatatcttcactaccatgcatgattgcatatatatatatacgcttatgtattatctatatgcctataaataaaccatggtgagtttgtaacgcagtgccttcagaaatgttcggaataaatttccataatattagt

SEQ ID NO: 39799 - protein, 181 aa, Arabidopsis thaliana
  peptide (1)..(181): Ceres Seq. ID no. 12562576
  misc_feature (46)..(180): Pfam Name: Herpesvirus latent membrane protein 1 (LMP1) Pfam Description: Herpesvirus latent membrane protein 1 (LMP1)
  misc_feature (89)..(181): Homolog of NCBI NO: 9957568 NR Description: antimicrobial peptide shep-GRP [Capsella
  misc_feature (39)..(136): Homolog of NCBI NO: 9957568 NR Description: antimicrobial peptide shep-GRP [Capsella
  misc_feature (68)..(149): Homolog of NCBI NO: 15224547 NR Description: putative glycine-rich protein; protein id:
  misc_feature (73)..(181): Homolog of NCBI NO: 15224547 NR Description: putative glycine-rich protein; protein id:
  misc_feature (70)..(181): Homolog of NCBI NO: 21536606 NR Description: putative glycine-rich protein [Arabidopsis
  misc_feature (70)..(181): Homolog of NCBI NO: 15224540 NR Description: putative glycine-rich protein
  misc_feature (39)..(143): Homolog of NCBI NO: 21536606 NR Description: putative glycine-rich protein [Arabidopsis
  misc_feature (39)..(143): Homolog of NCBI NO: 15224540 NR Description: putative glycine-rich protein
  misc_feature (39)..(145): Homolog of NCBI NO: 15224547 NR Description: putative glycine-rich protein; protein id:
  misc_feature (39)..(181): Homolog of NCBI NO: 30678191 NR Description: glycine-rich protein [Arabidopsis thaliana]
  misc_feature (41)..(41): Xaa is any aa, unknown or other
HLLNILRELLDLEKHGFQGFDSVGSLRNSSGGLRSFCRKDXGMVKPESEETVQPEGYHGGHGGHGGGGHYGGGGHGHGGHNGGGGHGLDGYGGGHGGHYGGGGHGLDGYGGGGGHYGGGGGHYGGGGGHYGGGGGHYGGGGGGHGGGGHYGGGGGGYGGGGGHHGGGGHGLNEPVQTKPGV

SEQ ID NO: 39800 - protein, 139 aa, Arabidopsis thaliana
  peptide (1)..(139): Ceres Seq. ID no. 12562577
  misc_feature (4)..(138): Pfam Name: Herpesvirus latent membrane protein 1 (LMP1) Pfam Description: Herpesvirus latent membrane protein 1 (LMP1)
  misc_feature (47)..(139): Homolog of NCBI NO: 9957568 NR Description: antimicrobial peptide shep-GRP [Capsella
  misc_feature (1)..(94): Homolog of NCBI NO: 9957568 NR Description: antimicrobial peptide shep-GRP [Capsella
  misc_feature (26)..(107): Homolog of NCBI NO: 15224547 NR Description: putative glycine-rich protein; protein id:
  misc_feature (31)..(139): Homolog of NCBI NO: 15224547 NR Description: putative glycine-rich protein; protein id:
  misc_feature (28)..(139): Homolog of NCBI NO: 21536606 NR Description: putative glycine-rich protein [Arabidopsis
  misc_feature (28)..(139): Homolog of NCBI NO: 15224540 NR Description: putative glycine-rich protein
  misc_feature (1)..(101): Homolog of NCBI NO: 21536606 NR Description: putative glycine-rich protein [Arabidopsis
  misc_feature (1)..(101): Homolog of NCBI NO: 15224540 NR Description: putative glycine-rich protein
  misc_feature (1)..(103): Homolog of NCBI NO: 15224547 NR Description: putative glycine-rich protein; protein id:
  misc_feature (1)..(139): Homolog of NCBI NO: 30678191 NR Description: glycine-rich protein [Arabidopsis thaliana]
MVKPESEETVQPEGYHGGHGGHGGGGHYGGGGHGHGGHNGGGGHGLDGYGGGHGGHYGGGGHGLDGYGGGGGHYGGGGGHYGGGGGHYGGGGGHYGGGGGGHGGGGHYGGGGGGYGGGGGHHGGGGHGLNEPVQTKPGV

SEQ ID NO: 39801 - protein, 110 aa, Arabidopsis thaliana
  peptide (1)..(110): Ceres Seq. ID no. 12562578
  misc_feature (31)..(108): Pfam Name: Prothymosin/parathymosin family Pfam Description: Prothymosin/parathymosin family
MVVTEGEATTEEEATGMEDTTEEGATDLTDTEEDMEDTTEEEATDLTDTEEVEDTMEEVEDTTEEVEDTTEEVEDTTEEVVEDTEVEDTTEVVEEDTEVEEDTTEEEATG

SEQ ID NO: 39802 - DNA, 1273 bp, Arabidopsis thaliana
  misc_feature (1)..(1273): Ceres Seq. ID no. 13500210
  misc_feature: MA Experiment ID: 108434 Result: Down-regulated in Transcription
  misc_feature: MA Experiment 108434 PARAMETER Experiment Name: At_Root_Tips_cDNA_P Parameter: Tissue Value: Root Tips
  misc_feature: MA Experiment ID: 108461 Result: Up-regulated in Transcription
  misc_feature: MA Experiment 108461 PARAMETER Experiment Name: At_Germinating_Seeds_cDNA_P Parameter: Age (day) Value: 1 vs. 0
  misc_feature: MA Experiment 108461 PARAMETER Experiment Name: At_Germinating_Seeds_cDNA_P Parameter: Tissue Value: Germinating Seeds
  misc_feature: MA Experiment ID: 108462 Result: Up-regulated in Transcription
  misc_feature: MA Experiment 108462 PARAMETER Experiment Name: At_Germinating_Seeds_cDNA_P Parameter: Age (day) Value: 2 vs. 0
  misc_feature: MA Experiment 108462 PARAMETER Experiment Name: At_Germinating_Seeds_cDNA_P Parameter: Tissue Value: Germinating Seeds
  misc_feature: MA Experiment ID: 108464 Result: Up-regulated in Transcription
  misc_feature: MA Experiment 108464 PARAMETER Experiment Name: At_Germinating_Seeds_cDNA_P Parameter: Age (day) Value: 4 vs. 0
  misc_feature: MA Experiment 108464 PARAMETER Experiment Name: At_Germinating_Seeds_cDNA_P Parameter: Tissue Value: Germinating Seeds
  misc_feature: MA Experiment ID: 108488 Result: Down-regulated in Transcription
  misc_feature: MA Experiment ID: 108489 Result: Up-regulated in Transcription
  misc_feature: MA Experiment ID: 108501 Result: Down-regulated in Transcription
  misc_feature: MA Experiment 108501 PARAMETER Experiment Name: At_ap2_floral_buds_cDNA_P Parameter: Plant Line Value: ap2 (Ler.)
  misc_feature: MA Experiment 108501 PARAMETER Experiment Name: At_ap2_floral_buds_cDNA_P Parameter: Tissue Value: Closed Flower
  misc_feature: MA Experiment ID: 108561 Result: Up-regulated in Transcription
  misc_feature: MA Experiment 108561 PARAMETER Experiment Name: At_100uM_ABA_cDNA_P Parameter: Timepoint (hr) Value: 6
  misc_feature: MA Experiment 108561 PARAMETER Experiment Name: At_100uM_ABA_cDNA_P Parameter: Tissue Value: Aerial
  misc_feature: MA Experiment 108561 PARAMETER Experiment Name: At_100uM_ABA_cDNA_P Parameter: Treatment Value: 100uM ABA vs. No Treatment
  misc_feature: MA Experiment ID: 108572 Result: Up-regulated in Transcription
  misc_feature: MA Experiment 108572 PARAMETER Experiment Name: At_Drought_cDNA_P Parameter: Timepoint (hr) Value: 1
  misc_feature: MA Experiment 108572 PARAMETER Experiment Name: At_Drought_cDNA_P Parameter: Tissue Value: Aerial
  misc_feature: MA Experiment 108572 PARAMETER Experiment Name: At_Drought_cDNA_P Parameter: Treatment Value: Drought vs. No Drought
  misc_feature: MA Experiment ID: 108573 Result: Up-regulated in Transcription
  misc_feature: MA Experiment 108573 PARAMETER Experiment Name: At_Drought_cDNA_P Parameter: Timepoint (hr) Value: 6
  misc_feature: MA Experiment 108573 PARAMETER Experiment Name: At_Drought_cDNA_P Parameter: Tissue Value: Aerial
  misc_feature: MA Experiment 108573 PARAMETER Experiment Name: At_Drought_cDNA_P Parameter: Treatment Value: Drought vs. No Drought
  misc_feature: MA Experiment ID: 108585 Result: Up-regulated in Transcription
  misc_feature: MA Experiment 108585 PARAMETER Experiment Name: At_5mM_NaNP_cDNA_P Parameter: Timepoint (hr) Value: 6
  misc_feature: MA Experiment 108585 PARAMETER Experiment Name: At_5mM_NaNP_cDNA_P Parameter: Tissue Value: Aerial
  misc_feature: MA Experiment 108585 PARAMETER Experiment Name: At_5mM_NaNP_cDNA_P Parameter: Treatment Value: null
  misc_feature: MA Experiment ID: 108594 Result: Up-regulated in Transcription
  misc_feature: MA Experiment 108594 PARAMETER Experiment Name: At_Ler-rhl_Root_cDNA_P Parameter: Plant Line Value: null
  misc_feature: MA Experiment ID: 108595 Result: Up-regulated in Transcription
  misc_feature: MA Experiment 108595 PARAMETER Experiment Name: At_Ler-pi_Ovule_cDNA_P Parameter: Plant Line Value: null
  misc_feature: MA Experiment ID: 108605 Result: Up-regulated in Transcription
  misc_feature: MA Experiment 108605 PARAMETER Experiment Name: At_100uM_ABA_cDNA_P Parameter: Timepoint (hr) Value: 6
  misc_feature: MA Experiment 108605 PARAMETER Experiment Name: At_100uM_ABA_cDNA_P Parameter: Tissue Value: Aerial
  misc_feature: MA Experiment 108605 PARAMETER Experiment Name: At_100uM_ABA_cDNA_P Parameter: Treatment Value: 100uM ABA vs. No Treatment
  misc_feature: MA Experiment ID: 108607 Result: Up-regulated in Transcription
  misc_feature: MA Experiment 108607 PARAMETER Experiment Name: At_100uM_ABA_cDNA_P Parameter: Timepoint (hr) Value: 4
  misc_feature: MA Experiment 108607 PARAMETER Experiment Name: At_100uM_ABA_cDNA_P Parameter: Tissue Value: Aerial
  misc_feature: MA Experiment 108607 PARAMETER Experiment Name: At_100uM_ABA_cDNA_P Parameter: Treatment Value: 100uM ABA vs. No Treatment
  misc_feature: MA Experiment ID: 108608 Result: Up-regulated in Transcription
  misc_feature: MA Experiment 108608 PARAMETER Experiment Name: At_100uM_ABA_cDNA_P Parameter: Timepoint (hr) Value: 1
  misc_feature: MA Experiment 108608 PARAMETER Experiment Name: At_100uM_ABA_cDNA_P Parameter: Tissue Value: Aerial
  misc_feature: MA Experiment 108608 PARAMETER Experiment Name: At_100uM_ABA_cDNA_P Parameter: Treatment Value: 100uM ABA vs. No Treatment
  misc_feature: MA Experiment ID: 108668 Result: Up-regulated in Transcription
  misc_feature: MA Experiment 108668 PARAMETER Experiment Name: At_2mM_SA_cDNA_P Parameter: Plant Line Value: WS
  misc_feature: MA Experiment 108668 PARAMETER Experiment Name: At_2mM_SA_cDNA_P Parameter: Timepoint (hr) Value: 6
  misc_feature: MA Experiment 108668 PARAMETER Experiment Name: At_2mM_SA_cDNA_P Parameter: Treatment Value: 2mM SA vs. No Treatment
  misc_feature: MA Experiment ID: 20000070 Result: Up-regulated in Transcription
  misc_feature: MA Experiment 20000070 PARAMETER Experiment Name: At_100uM_ABA_Mutants_cDNA_P Parameter: Plant Line Value: CS24
  misc_feature: MA Experiment 20000070 PARAMETER Experiment Name: At_100uM_ABA_Mutants_cDNA_P Parameter: Timepoint (hr) Value: 6
  misc_feature: MA Experiment 20000070 PARAMETER Experiment Name: At_100uM_ABA_Mutants_cDNA_P Parameter: Tissue Value: Aerial
  misc_feature: MA Experiment 20000070 PARAMETER Experiment Name: At_100uM_ABA_Mutants_cDNA_P Parameter: Treatment Value: 100uM ABA vs. No Treatment
  misc_feature: MA Experiment ID: 20000071 Result: Up-regulated in Transcription
  misc_feature: MA Experiment 20000071 PARAMETER Experiment Name: At_100uM_ABA_Mutants_cDNA_P Parameter: Plant Line Value: CS8104
  misc_feature: MA Experiment 20000071 PARAMETER Experiment Name: At_100uM_ABA_Mutants_cDNA_P Parameter: Timepoint (hr) Value: 6
  misc_feature: MA Experiment 20000071 PARAMETER Experiment Name: At_100uM_ABA_Mutants_cDNA_P Parameter: Tissue Value: Aerial
  misc_feature: MA Experiment 20000071 PARAMETER Experiment Name: At_100uM_ABA_Mutants_cDNA_P Parameter: Treatment Value: 100uM ABA vs. No Treatment
  misc_feature: MA Experiment ID: 20000072 Result: Up-regulated in Transcription
  misc_feature: MA Experiment 20000072 PARAMETER Experiment Name: At_100uM_ABA_Mutants_cDNA_P Parameter: Plant Line Value: CS8105
  misc_feature: MA Experiment 20000072 PARAMETER Experiment Name: At_100uM_ABA_Mutants_cDNA_P Parameter: Timepoint (hr) Value: 6
  misc_feature: MA Experiment 20000072 PARAMETER Experiment Name: At_100uM_ABA_Mutants_cDNA_P Parameter: Tissue Value: Aerial
  misc_feature: MA Experiment 20000072 PARAMETER Experiment Name: At_100uM_ABA_Mutants_cDNA_P Parameter: Treatment Value: 100uM ABA vs. No Treatment
  misc_feature: MA Experiment ID: 20000087 Result: Up-regulated in Transcription
  misc_feature: MA Experiment 20000087 PARAMETER Experiment Name: At_100uM_ABA_Mutants_cDNA_P Parameter: Plant Line Value: WS
  misc_feature: MA Experiment 20000087 PARAMETER Experiment Name: At_100uM_ABA_Mutants_cDNA_P Parameter: Timepoint (hr) Value: 6
  misc_feature: MA Experiment 20000087 PARAMETER Experiment Name: At_100uM_ABA_Mutants_cDNA_P Parameter: Tissue Value: Aerial
  misc_feature: MA Experiment 20000087 PARAMETER Experiment Name: At_100uM_ABA_Mutants_cDNA_P Parameter: Treatment Value: 100uM ABA vs. No Treatment
  misc_feature: MA Experiment ID: 20000088 Result: Up-regulated in Transcription
  misc_feature: MA Experiment 20000088 PARAMETER Experiment Name: At_100uM_ABA_Mutants_cDNA_P Parameter: Plant Line Value: Landsberg
  misc_feature: MA Experiment 20000088 PARAMETER Experiment Name: At_100uM_ABA_Mutants_cDNA_P Parameter: Timepoint (hr) Value: 6
  misc_feature: MA Experiment 20000088 PARAMETER Experiment Name: At_100uM_ABA_Mutants_cDNA_P Parameter: Tissue Value: Aerial
  misc_feature: MA Experiment 20000088 PARAMETER Experiment Name: At_100uM_ABA_Mutants_cDNA_P Parameter: Treatment Value: 100uM ABA vs. No Treatment
  misc_feature: MA Experiment ID: 20000166 Result: Up-regulated in Transcription
  misc_feature: MA Experiment 20000166 PARAMETER Experiment Name: At_100uM_ABA_P Parameter: Age (day) Value: 14
  misc_feature: MA Experiment 20000166 PARAMETER Experiment Name: At_100uM_ABA_P Parameter: Organism Value: A. thaliana
  misc_feature: MA Experiment 20000166 PARAMETER Experiment Name: At_100uM_ABA_P Parameter: Plant Line Value: WS
  misc_feature: MA Experiment 20000166 PARAMETER Experiment Name: At_100uM_ABA_P Parameter: Timepoint (hr) Value: 1
  misc_feature: MA Experiment 20000166 PARAMETER Experiment Name: At_100uM_ABA_P Parameter: Tissue Value: Aerial
  misc_feature: MA Experiment 20000166 PARAMETER Experiment Name: At_100uM_ABA_P Parameter: Treatment Value: 100uM ABA vs. No Treatment
  misc_feature: MA Experiment ID: 20000169 Result: Up-regulated in Transcription
  misc_feature: MA Experiment 20000169 PARAMETER Experiment Name: At_100uM_ABA_P Parameter: Age (day) Value: 14
  misc_feature: MA Experiment 20000169 PARAMETER Experiment Name: At_100uM_ABA_P Parameter: Organism Value: A. thaliana
  misc_feature: MA Experiment 20000169 PARAMETER Experiment Name: At_100uM_ABA_P Parameter: Plant Line Value: WS
  misc_feature: MA Experiment 20000169 PARAMETER Experiment Name: At_100uM_ABA_P Parameter: Timepoint (hr) Value: 6
  misc_feature: MA Experiment 20000169 PARAMETER Experiment Name: At_100uM_ABA_P Parameter: Tissue Value: Aerial
  misc_feature: MA Experiment 20000169 PARAMETER Experiment Name: At_100uM_ABA_P Parameter: Treatment Value: 100uM ABA vs. No Treatment
  misc_feature: MA Experiment ID: 20000182 Result: Up-regulated in Transcription
  misc_feature: MA Experiment 20000182 PARAMETER Experiment Name: At_2mM_SA_P Parameter: Age (day) Value: 14
  misc_feature: MA Experiment 20000182 PARAMETER Experiment Name: At_2mM_SA_P Parameter: Organism Value: A. thaliana
  misc_feature: MA Experiment 20000182 PARAMETER Experiment Name: At_2mM_SA_P Parameter: Plant Line Value: WS
  misc_feature: MA Experiment 20000182 PARAMETER Experiment Name: At_2mM_SA_P Parameter: Timepoint (hr) Value: 6
  misc_feature: MA Experiment 20000182 PARAMETER Experiment Name: At_2mM_SA_P Parameter: Tissue Value: Aerial
  misc_feature: MA Experiment 20000182 PARAMETER Experiment Name: At_2mM_SA_P Parameter: Treatment Value: 2mM SA vs. No Treatment
  misc_feature: MA Experiment ID: 20000184 Result: Down-regulated in Transcription
  misc_feature: MA Experiment 20000184 PARAMETER Experiment Name: At_Shoots__P Parameter: Age (day) Value: 7
  misc_feature: MA Experiment 20000184 PARAMETER Experiment Name: At_Shoots__P Parameter: Tissue Value: Shoots vs. Whole Plant
  misc_feature: MA Experiment ID: 20000185 Result: Down-regulated in Transcription
  misc_feature: MA Experiment 20000185 PARAMETER Experiment Name: At_Roots__P Parameter: Age (day) Value: 7 vs. 21
  misc_feature: MA Experiment 20000185 PARAMETER Experiment Name: At_Roots__P Parameter: Organism Value: A. thaliana
  misc_feature: MA Experiment 20000185 PARAMETER Experiment Name: At_Roots__P Parameter: Tissue Value: Roots vs. Whole Plant
  misc_feature: MA Experiment ID: 20000224 Result: Down-regulated in Transcription
  misc_feature: MA Experiment ID: 20000234 Result: Down-regulated in Transcription
  misc_feature: MA Experiment 20000234 PARAMETER Experiment Name: At_Siliques_P Parameter: Age (day) Value: 21
  misc_feature: MA Experiment 20000234 PARAMETER Experiment Name: At_Siliques_P Parameter: Organism Value: A. thaliana
  misc_feature: MA Experiment 20000234 PARAMETER Experiment Name: At_Siliques_P Parameter: Plant Line Value: WS
  misc_feature: MA Experiment 20000234 PARAMETER Experiment Name: At_Siliques_P Parameter: Tissue Value: Less Than 5mm Siliques vs. Whole Plant
  misc_feature: MA Experiment ID: 20000235 Result: Down-regulated in Transcription
  misc_feature: MA Experiment 20000235 PARAMETER Experiment Name: At_Siliques_P Parameter: Age (day) Value: 21
  misc_feature: MA Experiment 20000235 PARAMETER Experiment Name: At_Siliques_P Parameter: Organism Value: A. thaliana
  misc_feature: MA Experiment 20000235 PARAMETER Experiment Name: At_Siliques_P Parameter: Plant Line Value: WS
  misc_feature: MA Experiment 20000235 PARAMETER Experiment Name: At_Siliques_P Parameter: Tissue Value: 5-10mm Siliques vs. Whole Plant
  misc_feature: MA Experiment ID: 20000265 Result: Down-regulated in Transcription
  misc_feature: MA Experiment 20000265 PARAMETER Experiment Name: At_Open_Flower_P Parameter: Age (day) Value: 21
  misc_feature: MA Experiment 20000265 PARAMETER Experiment Name: At_Open_Flower_P Parameter: Plant Line Value: WS
  misc_feature: MA Experiment 20000265 PARAMETER Experiment Name: At_Open_Flower_P Parameter: Tissue Value: Closed Flower vs. Whole Plant
  misc_feature: MA Experiment ID: 20000286 Result: Down-regulated in Transcription
  misc_feature: MA Experiment 20000286 PARAMETER Experiment Name: At_Open_Flower_P Parameter: Age (day) Value: 21
  misc_feature: MA Experiment 20000286 PARAMETER Experiment Name: At_Open_Flower_P Parameter: Plant Line Value: WS
  misc_feature: MA Experiment 20000286 PARAMETER Experiment Name: At_Open_Flower_P Parameter: Tissue Value: Half Open vs. Whole Plant
  misc_feature: MA Experiment ID: 20000437 Result: Up-regulated in Transcription
  misc_feature: MA Experiment 20000437 PARAMETER Experiment Name: At_Drought_P Parameter: Age (day) Value: 8
  misc_feature: MA Experiment 20000437 PARAMETER Experiment Name: At_Drought_P Parameter: Organism Value: A. thaliana
  misc_feature: MA Experiment 20000437 PARAMETER Experiment Name: At_Drought_P Parameter: Plant Line Value: WS
  misc_feature: MA Experiment 20000437 PARAMETER Experiment Name: At_Drought_P Parameter: Timepoint (hr) Value: 24
  misc_feature: MA Experiment 20000437 PARAMETER Experiment Name: At_Drought_P Parameter: Tissue Value: Whole Plant
  misc_feature: MA Experiment 20000437 PARAMETER Experiment Name: At_Drought_P Parameter: Treatment Value: Drought vs. No Drought
  misc_feature: MA Experiment ID: 20000438 Result: Down-regulated in Transcription
  misc_feature: MA Experiment 20000438 PARAMETER Experiment Name: At_Shoots__P Parameter: Age (day) Value: 14
  misc_feature: MA Experiment 20000438 PARAMETER Experiment Name: At_Shoots__P Parameter: Tissue Value: Shoots vs. Whole Plant
  misc_feature: MA Experiment ID: 20000439 Result: Down-regulated in Transcription
  misc_feature: MA Experiment 20000439 PARAMETER Experiment Name: At_Roots__P Parameter: Age (day) Value: 14 vs. 21
  misc_feature: MA Experiment 20000439 PARAMETER Experiment Name: At_Roots__P Parameter: Organism Value: A. thaliana
  misc_feature: MA Experiment 20000439 PARAMETER Experiment Name: At_Roots__P Parameter: Tissue Value: Roots vs. Whole Plant
  misc_feature: MA Experiment ID: 20000441 Result: Up-regulated in Transcription
  misc_feature: MA Experiment 20000441 PARAMETER Experiment Name: At_1uM_BR-BRZ__P Parameter: Tissue Value: Shoot Apices
  misc_feature: MA Experiment 20000441 PARAMETER Experiment Name: At_1uM_BR-BRZ__P Parameter: Treatment Value: 1uM BR vs. No Treatment
  misc_feature: MA Experiment ID: 20000443 Result: Up-regulated in Transcription
  misc_feature: MA Experiment 20000443 PARAMETER Experiment Name: At_1uM_BR-BRZ__P Parameter: Tissue Value: Shoot Apices
  misc_feature: MA Experiment 20000443 PARAMETER Experiment Name: At_1uM_BR-BRZ__P Parameter: Treatment Value: 1uM BRZ vs. No Treatment
  misc_feature: MA Experiment ID: 20000453 Result: Up-regulated in Transcription
  misc_feature: MA Experiment 20000453 PARAMETER Experiment Name: At_100uM_ABA_P Parameter: Age (day) Value: 15
  misc_feature: MA Experiment 20000453 PARAMETER Experiment Name: At_100uM_ABA_P Parameter: Organism Value: A. thaliana
  misc_feature: MA Experiment 20000453 PARAMETER Experiment Name: At_100uM_ABA_P Parameter: Plant Line Value: WS
  misc_feature: MA Experiment 20000453 PARAMETER Experiment Name: At_100uM_ABA_P Parameter: Timepoint (hr) Value: 24
  misc_feature: MA Experiment 20000453 PARAMETER Experiment Name: At_100uM_ABA_P Parameter: Tissue Value: Aerial
  misc_feature: MA Experiment 20000453 PARAMETER Experiment Name: At_100uM_ABA_P Parameter: Treatment Value: 100uM ABA vs. No Treatment
  misc_feature: MA Experiment ID: 20000460 Result: Up-regulated in Transcription
  misc_feature: MA Experiment 20000460 PARAMETER Experiment Name: At_10percent_PEG_P Parameter: Age (day) Value: 12
  misc_feature: MA Experiment 20000460 PARAMETER Experiment Name: At_10percent_PEG_P Parameter: Organism Value: A. thaliana
  misc_feature: MA Experiment 20000460 PARAMETER Experiment Name: At_10percent_PEG_P Parameter: Plant Line Value: WS
  misc_feature: MA Experiment 20000460 PARAMETER Experiment Name: At_10percent_PEG_P Parameter: Timepoint (day) Value: 12
  misc_feature: MA Experiment 20000460 PARAMETER Experiment Name: At_10percent_PEG_P Parameter: Tissue Value: Whole Plant
  misc_feature: MA Experiment 20000460 PARAMETER Experiment Name: At_10percent_PEG_P Parameter: Treatment Value: 10percent PEG vs. No Treatment
  misc_feature: MA Experiment ID: 20000495 Result: Down-regulated in Transcription
  misc_feature: MA Experiment 20000495 PARAMETER Experiment Name: At_Guard_Cells_P Parameter: Harvest Date Value: 8/2/2002
  misc_feature: MA Experiment 20000495 PARAMETER Experiment Name: At_Guard_Cells_P Parameter: Organism Value: A. thaliana
  misc_feature: MA Experiment 20000495 PARAMETER Experiment Name: At_Guard_Cells_P Parameter: Tissue Value: Guard Cells vs. Leaves
  misc_feature: MA Experiment ID: 20000709 Result: Up-regulated in Transcription
  misc_feature: MA Experiment 20000709 PARAMETER Experiment Name: At_15mM_NH4NO3_L-to-H_P Parameter: Age (hr) Value: 14
  misc_feature: MA Experiment 20000709 PARAMETER Experiment Name: At_15mM_NH4NO3_L-to-H_P Parameter: Organism Value: A. thaliana
  misc_feature: MA Experiment 20000709 PARAMETER Experiment Name: At_15mM_NH4NO3_L-to-H_P Parameter: Plant Line Value: WS
  misc_feature: MA Experiment 20000709 PARAMETER Experiment Name: At_15mM_NH4NO3_L-to-H_P Parameter: Timepoint (hr) Value: 4
  misc_feature: MA Experiment 20000709 PARAMETER Experiment Name: At_15mM_NH4NO3_L-to-H_P Parameter: Tissue Value: Aerial
  misc_feature: MA Experiment 20000709 PARAMETER Experiment Name: At_15mM_NH4NO3_L-to-H_P Parameter: Treatment Value: 15mM NH4NO3 vs. 30mM Mannitol
  misc_feature: MA Experiment ID: 20001450 Result: Up-regulated in Transcription
  misc_feature: MA Experiment 20001450 PARAMETER Experiment Name: At_Far-red-induction_P Parameter: Age (day) Value: 7
  misc_feature: MA Experiment 20001450 PARAMETER Experiment Name: At_Far-red-induction_P Parameter: Light Value: Far-red vs. White
  misc_feature: MA Experiment 20001450 PARAMETER Experiment Name: At_Far-red-induction_P Parameter: Organism Value: A. thaliana
  misc_feature: MA Experiment 20001450 PARAMETER Experiment Name: At_Far-red-induction_P Parameter: Plant Line Value: Columbia
  misc_feature: MA Experiment 20001450 PARAMETER Experiment Name: At_Far-red-induction_P Parameter: Timepoint (hr) Value: 8
  misc_feature: MA Experiment 20001450 PARAMETER Experiment Name: At_Far-red-induction_P Parameter: Tissue Value: Whole Plant
  misc_feature: MA Experiment ID: 20001451 Result: Up-regulated in Transcription
  misc_feature: MA Experiment 20001451 PARAMETER Experiment Name: At_Far-red-induction_P Parameter: Age (day) Value: 7
  misc_feature: MA Experiment 20001451 PARAMETER Experiment Name: At_Far-red-induction_P Parameter: Light Value: Far-red vs. White
  misc_feature: MA Experiment 20001451 PARAMETER Experiment Name: At_Far-red-induction_P Parameter: Organism Value: A. thaliana
  misc_feature: MA Experiment 20001451 PARAMETER Experiment Name: At_Far-red-induction_P Parameter: Plant Line Value: Columbia
  misc_feature: MA Experiment 20001451 PARAMETER Experiment Name: At_Far-red-induction_P Parameter: Timepoint (hr) Value: 24
  misc_feature: MA Experiment 20001451 PARAMETER Experiment Name: At_Far-red-induction_P Parameter: Tissue Value: Whole Plant
  misc_feature: MA Experiment ID: 20001556 Result: Up-regulated in Transcription
  misc_feature: MA Experiment 20001556 PARAMETER Experiment Name: At_Drought_Soil_Dry_P Parameter: Age (day) Value: 26
  misc_feature: MA Experiment 20001556 PARAMETER Experiment Name: At_Drought_Soil_Dry_P Parameter: Organism Value: A. thaliana
  misc_feature: MA Experiment 20001556 PARAMETER Experiment Name: At_Drought_Soil_Dry_P Parameter: Plant Line Value: WS
  misc_feature: MA Experiment 20001556 PARAMETER Experiment Name: At_Drought_Soil_Dry_P Parameter: Post Timepoint (hr) Value: None
  misc_feature: MA Experiment 20001556 PARAMETER Experiment Name: At_Drought_Soil_Dry_P Parameter: Post-Treatment Value: None
  misc_feature: MA Experiment 20001556 PARAMETER Experiment Name: At_Drought_Soil_Dry_P Parameter: Timepoint (day) Value: 12
  misc_feature: MA Experiment 20001556 PARAMETER Experiment Name: At_Drought_Soil_Dry_P Parameter: Treatment Value: Drought vs. No Drought
  misc_feature: MA Experiment ID: 20001559 Result: Up-regulated in Transcription
  misc_feature: MA Experiment 20001559 PARAMETER Experiment Name: At_Drought_Soil_Dry_P Parameter: Age (day) Value: 28
  misc_feature: MA Experiment 20001559 PARAMETER Experiment Name: At_Drought_Soil_Dry_P Parameter: Organism Value: A. thaliana
  misc_feature: MA Experiment 20001559 PARAMETER Experiment Name: At_Drought_Soil_Dry_P Parameter: Plant Line Value: WS
  misc_feature: MA Experiment 20001559 PARAMETER Experiment Name: At_Drought_Soil_Dry_P Parameter: Post Timepoint (hr) Value: 29
  misc_feature: MA Experiment 20001559 PARAMETER Experiment Name: At_Drought_Soil_Dry_P Parameter: Post-Treatment Value: Re-Water vs. No Drought
  misc_feature: MA Experiment 20001559 PARAMETER Experiment Name: At_Drought_Soil_Dry_P Parameter: Timepoint (day) Value: 14
  misc_feature: MA Experiment 20001559 PARAMETER Experiment Name: At_Drought_Soil_Dry_P Parameter: Treatment Value: Drought vs. No Drought
  misc_feature: MA Experiment ID: 20001905 Result: Up-regulated in Transcription
  misc_feature: MA Experiment 20001905 PARAMETER Experiment Name: At_Drought_Reproduction_P Parameter: Age (day) Value: 40
  misc_feature: MA Experiment 20001905 PARAMETER Experiment Name: At_Drought_Reproduction_P Parameter: Organism Value: A. thaliana
  misc_feature: MA Experiment 20001905 PARAMETER Experiment Name: At_Drought_Reproduction_P Parameter: Plant Line Value: WS
  misc_feature: MA Experiment 20001905 PARAMETER Experiment Name: At_Drought_Reproduction_P Parameter: Timepoint (day) Value: 10
  misc_feature: MA Experiment 20001905 PARAMETER Experiment Name: At_Drought_Reproduction_P Parameter: Tissue Value: Rosettes
  misc_feature: MA Experiment 20001905 PARAMETER Experiment Name: At_Drought_Reproduction_P Parameter: Treatment Value: Drought vs. No Drought
  misc_feature: MA Experiment ID: 20001906 Result: Up-regulated in Transcription
  misc_feature: MA Experiment 20001906 PARAMETER Experiment Name: At_Drought_Reproduction_P Parameter: Age (day) Value: 35
  misc_feature: MA Experiment 20001906 PARAMETER Experiment Name: At_Drought_Reproduction_P Parameter: Organism Value: A. thaliana
  misc_feature: MA Experiment 20001906 PARAMETER Experiment Name: At_Drought_Reproduction_P Parameter: Plant Line Value: WS
  misc_feature: MA Experiment 20001906 PARAMETER Experiment Name: At_Drought_Reproduction_P Parameter: Timepoint (day) Value: 5
  misc_feature: MA Experiment 20001906 PARAMETER Experiment Name: At_Drought_Reproduction_P Parameter: Tissue Value: Siliques
  misc_feature: MA Experiment 20001906 PARAMETER Experiment Name: At_Drought_Reproduction_P Parameter: Treatment Value: Drought vs. No Drought
ggagatctttaatctcagaatacaaaaaagaaaatcaaagaagatagttttgtgattgttttctataaaaagtgcagatattttctttgtcctagagaaagaggtgataggaaaaatgggtctccaagagcttgacccgttagcccaattgagcttaccgccgggttttcggttttatccgactgacgaagagctgatggttgaatatctctgtagaaaagccgccggtcacgacttctctctccagctcatagctgaaatcgatctctacaagtttgatccatgggttttaccaagtaaggcgttattcggtgaaaaagaatggtattttttcagcccgagggataggaagtatccaaacgggtcaagacctaatcgggttgccgggtcgggttattggtaagccaccggtacggataaagttatctcgacggagggaagaagagttggtatcaagaaagctttggtgttttacattggaaaagctccaaaaggaaccaaaaccaattggattatgcatgagtaccgtctcatcgaaccctctcgtcgaaatggaagcaccaagcttgatgattgggttttatgtcgaatatacaaaaagcaaacaagcgcacaaaaacaagcttacaataatctaatgacgagtggtcgtgaatacagcaacaatggttcgtcgacatcttcttcgtctcatcaatacgacgacgttctcgagtcgttgcatgagattgacaacagaagtttggggtttgccgccggttcatcaaacgcgctgcctcatagtcatagaccggttttaaccaatcataaaaccgggtttcagggtttagccagggagccaagttttgattgggcgaatttgattggacagaactcggtcccggaactcggactgagtcataacgttccgagtattcgttacggtgacggtggaacgcagcaacaaactgaggggattcctcggtttaataataactcggacgtctcggctaatcagggttttagtgttgacccggttaacggatttgggtactcgggtcaacaatctagtgggttcgggtttatttgattgtgtaatggtaacgtaataagaaaaacatatttttattttttgtccgtgtcagattagttaattaatatagcgtagaattcgaactctagggttagatttaggttctacgacttgtattgtatattcgtcgtcatttgtcctgacatttacatttttgtaaacttttatagctggaacttttgtattgatcaattatttatt

SEQ ID NO: 39803 - protein, 184 aa, Arabidopsis thaliana
  peptide (1)..(184): Ceres Seq. ID no. 13500211
  misc_feature (1)..(82): Homolog of NCBI NO: 34909234 NR Description: development regulation gene OsNAC4
  misc_feature (1)..(69): Homolog of NCBI NO: 21105748 NR Description: nam-like protein 10 [Petunia x hybrida]
  misc_feature (1)..(62): Homolog of NCBI NO: 40786563 NR Description: putative NAC-domain protein
  misc_feature (1)..(164): Homolog of NCBI NO: 23397295 NR Description: unknown protein [Arabidopsis thaliana]
  misc_feature (1)..(164): Homolog of NCBI NO: 7486254 NR Description: hypothetical protein F27G19.10 - Arabidopsis
  misc_feature (1)..(164): Homolog of NCBI NO: 18416983 NR Description: No apical meristem (NAM) protein family
  misc_feature (1)..(154): Homolog of NCBI NO: 6175246 NR Description: jasmonic acid 2 [Lycopersicon esculentum]
  misc_feature (1)..(184): Homolog of NCBI NO: 15219112 NR Description: No apical meristem (NAM) protein family
  misc_feature (1)..(184): Homolog of NCBI NO: 21536744 NR Description: putative jasmonic acid regulatory protein
  misc_feature (1)..(184): Homolog of NCBI NO: 15232604 NR Description: No apical meristem (NAM) protein family
MHEYRLIEPSRRNGSTKLDDWVLCRIYKKQTSAQKQAYNNLMTSGREYSNNGSSTSSSSHQYDDVLESLHEIDNRSLGFAAGSSNALPHSHRPVLTNHKTGFQGLAREPSFDWANLIGQNSVPELGLSHNVPSIRYGDGGTQQQTEGIPRFNNNSDVSANQGFSVDPVNGFGYSGQQSSGFGFI

SEQ ID NO: 39804 - protein, 143 aa, Arabidopsis thaliana
  peptide (1)..(143): Ceres Seq. ID no. 13500212
  misc_feature (1)..(41): Homolog of NCBI NO: 34909234 NR Description: development regulation gene OsNAC4
  misc_feature (1)..(28): Homolog of NCBI NO: 21105748 NR Description: nam-like protein 10 [Petunia x hybrida]
  misc_feature (1)..(21): Homolog of NCBI NO: 40786563 NR Description: putative NAC-domain protein
  misc_feature (1)..(123): Homolog of NCBI NO: 23397295 NR Description: unknown protein [Arabidopsis thaliana]
  misc_feature (1)..(123): Homolog of NCBI NO: 7486254 NR Description: hypothetical protein F27G19.10 - Arabidopsis
  misc_feature (1)..(123): Homolog of NCBI NO: 18416983 NR Description: No apical meristem (NAM) protein family
  misc_feature (1)..(113): Homolog of NCBI NO: 6175246 NR Description: jasmonic acid 2 [Lycopersicon esculentum]
  misc_feature (1)..(143): Homolog of NCBI NO: 15219112 NR Description: No apical meristem (NAM) protein family
  misc_feature (1)..(143): Homolog of NCBI NO: 21536744 NR Description: putative jasmonic acid regulatory protein
  misc_feature (1)..(143): Homolog of NCBI NO: 15232604 NR Description: No apical meristem (NAM) protein family
MTSGREYSNNGSSTSSSSHQYDDVLESLHEIDNRSLGFAAGSSNALPHSHRPVLTNHKTGFQGLAREPSFDWANLIGQNSVPELGLSHNVPSIRYGDGGTQQQTEGIPRFNNNSDVSANQGFSVDPVNGFGYSGQQSSGFGFI

SEQ ID NO: 39805 - protein, 95 aa, Arabidopsis thaliana
  peptide (1)..(95): Ceres Seq. ID no. 13500213
  misc_feature (14)..(95): Pfam Name: No apical meristem (NAM) protein Pfam Description: No apical meristem (NAM) protein
  misc_feature (10)..(95): Homolog of NCBI NO: 21105748 NR Description: nam-like protein 10 [Petunia x hybrida]
  misc_feature (1)..(95): Homolog of NCBI NO: 40786563 NR Description: putative NAC-domain protein
  misc_feature (7)..(95): Homolog of NCBI NO: 23397295 NR Description: unknown protein [Arabidopsis thaliana]
  misc_feature (1)..(62): Homolog of NCBI NO: 7486254 NR Description: hypothetical protein F27G19.10 - Arabidopsis
  misc_feature (62)..(95): Homolog of NCBI NO: 7486254 NR Description: hypothetical protein F27G19.10 - Arabidopsis
  misc_feature (1)..(95): Homolog of NCBI NO: 18416983 NR Description: No apical meristem (NAM) protein family
  misc_feature (1)..(95): Homolog of NCBI NO: 6175246 NR Description: jasmonic acid 2 [Lycopersicon esculentum]
  misc_feature (1)..(95): Homolog of NCBI NO: 15219112 NR Description: No apical meristem (NAM) protein family
  misc_feature (1)..(95): Homolog of NCBI NO: 21536744 NR Description: putative jasmonic acid regulatory protein
  misc_feature (1)..(95): Homolog of NCBI NO: 15232604 NR Description: No apical meristem (NAM) protein family
MGLQELDPLAQLSLPPGFRFYPTDEELMVEYLCRKAAGHDFSLQLIAEIDLYKFDPWVLPSKALFGEKEWYFFSPRDRKYPNGSRPNRVAGSGYW

SEQ ID NO: 39806 - DNA, 611 bp, Arabidopsis thaliana
  misc_feature (1)..(611): Ceres Seq. ID no. 12338945
  misc_feature: MA Experiment ID: 108434 Result: Down-regulated in Transcription
  misc_feature: MA Experiment 108434 PARAMETER Experiment Name: At_Root_Tips_cDNA_P Parameter: Tissue Value: Root Tips
  misc_feature: MA Experiment ID: 108435 Result: Down-regulated in Transcription
  misc_feature: MA Experiment 108435 PARAMETER Experiment Name: At_stm_Mutants_cDNA_P Parameter: Plant Line Value: wt Landsburg vs stm
  misc_feature: MA Experiment 108435 PARAMETER Experiment Name: At_stm_Mutants_cDNA_P Parameter: Tissue Value: Shoot Apical Meristem Region
  misc_feature: MA Experiment ID: 108462 Result: Up-regulated in Transcription
  misc_feature: MA Experiment 108462 PARAMETER Experiment Name: At_Germinating_Seeds_cDNA_P Parameter: Age (day) Value: 2 vs. 0
  misc_feature: MA Experiment 108462 PARAMETER Experiment Name: At_Germinating_Seeds_cDNA_P Parameter: Tissue Value: Germinating Seeds
  misc_feature: MA Experiment ID: 108464 Result: Up-regulated in Transcription
  misc_feature: MA Experiment 108464 PARAMETER Experiment Name: At_Germinating_Seeds_cDNA_P Parameter: Age (day) Value: 4 vs. 0
  misc_feature: MA Experiment 108464 PARAMETER Experiment Name: At_Germinating_Seeds_cDNA_P Parameter: Tissue Value: Germinating Seeds
  misc_feature: MA Experiment ID: 108488 Result: Up-regulated in Transcription
  misc_feature: MA Experiment ID: 108489 Result: Down-regulated in Transcription
  misc_feature: MA Experiment ID: 108595 Result: Down-regulated in Transcription
  misc_feature: MA Experiment 108595 PARAMETER Experiment Name: At_Ler-pi_Ovule_cDNA_P Parameter: Plant Line Value: null
  misc_feature: MA Experiment ID: 20000180 Result: Up-regulated in Transcription
  misc_feature: MA Experiment 20000180 PARAMETER Experiment Name: At_Germinating_Seeds_P Parameter: Age (hr) Value: 24 vs. 0
  misc_feature: MA Experiment 20000180 PARAMETER Experiment Name: At_Germinating_Seeds_P Parameter: Tissue Value: Germinating Seeds
  misc_feature: MA Experiment ID: 20000185 Result: Down-regulated in Transcription
  misc_feature: MA Experiment 20000185 PARAMETER Experiment Name: At_Roots__P Parameter: Age (day) Value: 7 vs. 21
  misc_feature: MA Experiment 20000185 PARAMETER Experiment Name: At_Roots__P Parameter: Organism Value: A. thaliana
  misc_feature: MA Experiment 20000185 PARAMETER Experiment Name: At_Roots__P Parameter: Tissue Value: Roots vs. Whole Plant
  misc_feature: MA Experiment ID: 20000439 Result: Down-regulated in Transcription
  misc_feature: MA Experiment 20000439 PARAMETER Experiment Name: At_Roots__P Parameter: Age (day) Value: 14 vs. 21
  misc_feature: MA Experiment 20000439 PARAMETER Experiment Name: At_Roots__P Parameter: Organism Value: A. thaliana
  misc_feature: MA Experiment 20000439 PARAMETER Experiment Name: At_Roots__P Parameter: Tissue Value: Roots vs. Whole Plant
acaacatgaacattagggtgagaagagatcgagagaagaatagtttgatcatcttgtgagaaaaataatggctgcttcagtgatgctatcttcggtgacattgaaaccagctggtttcacggtggagaagacggcggctagaggattaccgtcgctcacaagagctcgtccctccttcaaaattgtcgccagtggcgtcaagaagatcaagaccgacaagcccttcggaattaacggcagcatggacttgagggacggcgtcgacgcctccggcagaaagggcaagggatacggtgtttacaagtacgtcgacaagtatggagctaacgtcgatggatacagtcctatttacaacgagaacgagtggtcagcgagtggtgacgtgtacaagggaggagtcaccggattggcaatttgggcggtaactctcgccggaattcttgccggaggtgctcttcttgtgtacaacacaagtgctttggctcagtaaatcttaaagttgttagcgcatgtgtaatcatgtttctataaatgtttctgtgttgttctctttctctctaatgttgtaaaactcagacatactttgaatttataagacttctagtgtttgt

SEQ ID NO: 39807 - protein, 140 aa, Arabidopsis thaliana
  peptide (1)..(140): Ceres Seq. ID no. 12338947
  misc_feature (42)..(140): Pfam Name: Photosystem II 10 kDa polypeptide PsbR Pfam Description: Photosystem II 10 kDa polypeptide PsbR
  misc_feature (42)..(140): Pfam Name: Photosystem II 10 kDa polypeptide PsbR Pfam Description: Photosystem II 10 kDa polypeptide PsbR
  misc_feature (1)..(140): Homolog of NCBI NO: 33694227 NR Description: 10 kDa photosystem II polypeptide [Trifolium
  misc_feature (1)..(140): Homolog of NCBI NO: 131400 NR Description: Photosystem II 10 kDa polypeptide, chloroplast
  misc_feature (10)..(140): Homolog of NCBI NO: 1418984 NR Description: photosystem II 10 kD polypeptide [Lycopersicon
  misc_feature (1)..(140): Homolog of NCBI NO: 3914472 NR Description: Photosystem II 10 kDa polypeptide, chloroplast
  misc_feature (3)..(140): Homolog of NCBI NO: 21491 NR Description: ST-LS1 protein (AA 1-138) [Solanum tuberosum]
  misc_feature (1)..(140): Homolog of NCBI NO: 33694227 NR Description: 10 kDa photosystem II polypeptide [Trifolium
  misc_feature (10)..(140): Homolog of NCBI NO: 1418984 NR Description: photosystem II 10 kD polypeptide [Lycopersicon
  misc_feature (3)..(140): Homolog of NCBI NO: 21491 NR Description: ST-LS1 protein (AA 1-138) [Solanum tuberosum]
  misc_feature (1)..(140): Homolog of NCBI NO: 15219268 NR Description: photosystem II polypeptide, putative
  misc_feature (1)..(140): Homolog of NCBI NO: 1346871 NR Description: Photosystem II 10 kDa polypeptide, chloroplast
  misc_feature (4)..(140): Homolog of NCBI NO: 28207611 NR Description: photosystem II 10kDa polypeptide [Brassica rapa
  misc_feature (3)..(140): Homolog of NCBI NO: 131399 NR Description: Photosystem II 10 kDa polypeptide, chloroplast
  misc_feature (3)..(140): Homolog of NCBI NO: 3914471 NR Description: Photosystem II 10 kDa polypeptide, chloroplast
  misc_feature (1)..(140): Homolog of NCBI NO: 3914472 NR Description: Photosystem II 10 kDa polypeptide, chloroplast
  misc_feature (1)..(140): Homolog of NCBI NO: 131400 NR Description: Photosystem II 10 kDa polypeptide, chloroplast
  misc_feature (3)..(140): Homolog of NCBI NO: 3914471 NR Description: Photosystem II 10 kDa polypeptide, chloroplast
  misc_feature (3)..(140): Homolog of NCBI NO: 131399 NR Description: Photosystem II 10 kDa polypeptide, chloroplast
  misc_feature (4)..(140): Homolog of NCBI NO: 28207611 NR Description: photosystem II 10kDa polypeptide [Brassica rapa
  misc_feature (1)..(140): Homolog of NCBI NO: 1346871 NR Description: Photosystem II 10 kDa polypeptide, chloroplast
  misc_feature (1)..(140): Homolog of NCBI NO: 15219268 NR Description: photosystem II polypeptide, putative
MAASVMLSSVTLKPAGFTVEKTAARGLPSLTRARPSFKIVASGVKKIKTDKPFGINGSMDLRDGVDASGRKGKGYGVYKYVDKYGANVDGYSPIYNENEWSASGDVYKGGVTGLAIWAVTLAGILAGGALLVYNTSALAQ

SEQ ID NO: 39808 - protein, 135 aa, Arabidopsis thaliana
  peptide (1)..(135): Ceres Seq. ID no. 12338948
  misc_feature (37)..(135): Pfam Name: Photosystem II 10 kDa polypeptide PsbR Pfam Description: Photosystem II 10 kDa polypeptide PsbR
  misc_feature (37)..(135): Pfam Name: Photosystem II 10 kDa polypeptide PsbR Pfam Description: Photosystem II 10 kDa polypeptide PsbR
  misc_feature (1)..(135): Homolog of NCBI NO: 33694227 NR Description: 10 kDa photosystem II polypeptide [Trifolium
  misc_feature (1)..(135): Homolog of NCBI NO: 131400 NR Description: Photosystem II 10 kDa polypeptide, chloroplast
  misc_feature (5)..(135): Homolog of NCBI NO: 1418984 NR Description: photosystem II 10 kD polypeptide [Lycopersicon
  misc_feature (1)..(135): Homolog of NCBI NO: 3914472 NR Description: Photosystem II 10 kDa polypeptide, chloroplast
  misc_feature (1)..(135): Homolog of NCBI NO: 21491 NR Description: ST-LS1 protein (AA 1-138) [Solanum tuberosum]
  misc_feature (1)..(135): Homolog of NCBI NO: 33694227 NR Description: 10 kDa photosystem II polypeptide [Trifolium
  misc_feature (5)..(135): Homolog of NCBI NO: 1418984 NR Description: photosystem II 10 kD polypeptide [Lycopersicon
  misc_feature (1)..(135): Homolog of NCBI NO: 21491 NR Description: ST-LS1 protein (AA 1-138) [Solanum tuberosum]
  misc_feature (1)..(135): Homolog of NCBI NO: 15219268 NR Description: photosystem II polypeptide, putative
  misc_feature (1)..(135): Homolog of NCBI NO: 1346871 NR Description: Photosystem II 10 kDa polypeptide, chloroplast
  misc_feature (1)..(135): Homolog of NCBI NO: 28207611 NR Description: photosystem II 10kDa polypeptide [Brassica rapa
  misc_feature (1)..(135): Homolog of NCBI NO: 131399 NR Description: Photosystem II 10 kDa polypeptide, chloroplast
  misc_feature (1)..(135): Homolog of NCBI NO: 3914471 NR Description: Photosystem II 10 kDa polypeptide, chloroplast
  misc_feature (1)..(135): Homolog of NCBI NO: 3914472 NR Description: Photosystem II 10 kDa polypeptide, chloroplast
  misc_feature (1)..(135): Homolog of NCBI NO: 131400 NR Description: Photosystem II 10 kDa polypeptide, chloroplast
  misc_feature (1)..(135): Homolog of NCBI NO: 3914471 NR Description: Photosystem II 10 kDa polypeptide, chloroplast
  misc_feature (1)..(135): Homolog of NCBI NO: 131399 NR Description: Photosystem II 10 kDa polypeptide, chloroplast
  misc_feature (1)..(135): Homolog of NCBI NO: 28207611 NR Description: photosystem II 10kDa polypeptide [Brassica rapa
  misc_feature (1)..(135): Homolog of NCBI NO: 1346871 NR Description: Photosystem II 10 kDa polypeptide, chloroplast
  misc_feature (1)..(135): Homolog of NCBI NO: 15219268 NR Description: photosystem II polypeptide, putative
MLSSVTLKPAGFTVEKTAARGLPSLTRARPSFKIVASGVKKIKTDKPFGINGSMDLRDGVDASGRKGKGYGVYKYVDKYGANVDGYSPIYNENEWSASGDVYKGGVTGLAIWAVTLAGILAGGALLVYNTSALAQ

SEQ ID NO: 39809 - protein, 82 aa, Arabidopsis thaliana
  peptide (1)..(82): Ceres Seq. ID no. 12338949
  misc_feature (1)..(82): Pfam Name: Photosystem II 10 kDa polypeptide PsbR Pfam Description: Photosystem II 10 kDa polypeptide PsbR
  misc_feature (1)..(82): Pfam Name: Photosystem II 10 kDa polypeptide PsbR Pfam Description: Photosystem II 10 kDa polypeptide PsbR
  misc_feature (1)..(82): Homolog of NCBI NO: 33694227 NR Description: 10 kDa photosystem II polypeptide [Trifolium
  misc_feature (1)..(82): Homolog of NCBI NO: 131400 NR Description: Photosystem II 10 kDa polypeptide, chloroplast
  misc_feature (1)..(82): Homolog of NCBI NO: 1418984 NR Description: photosystem II 10 kD polypeptide [Lycopersicon
  misc_feature (1)..(82): Homolog of NCBI NO: 3914472 NR Description: Photosystem II 10 kDa polypeptide, chloroplast
  misc_feature (1)..(82): Homolog of NCBI NO: 21491 NR Description: ST-LS1 protein (AA 1-138) [Solanum tuberosum]
  misc_feature (1)..(82): Homolog of NCBI NO: 33694227 NR Description: 10 kDa photosystem II polypeptide [Trifolium
  misc_feature (1)..(82): Homolog of NCBI NO: 1418984 NR Description: photosystem II 10 kD polypeptide [Lycopersicon
  misc_feature (1)..(82): Homolog of NCBI NO: 21491 NR Description: ST-LS1 protein (AA 1-138) [Solanum tuberosum]
  misc_feature (1)..(82): Homolog of NCBI NO: 15219268 NR Description: photosystem II polypeptide, putative
  misc_feature (1)..(82): Homolog of NCBI NO: 1346871 NR Description: Photosystem II 10 kDa polypeptide, chloroplast
  misc_feature (1)..(82): Homolog of NCBI NO: 28207611 NR Description: photosystem II 10kDa polypeptide [Brassica rapa
  misc_feature (1)..(82): Homolog of NCBI NO: 131399 NR Description: Photosystem II 10 kDa polypeptide, chloroplast
  misc_feature (1)..(82): Homolog of NCBI NO: 3914471 NR Description: Photosystem II 10 kDa polypeptide, chloroplast
  misc_feature (1)..(82): Homolog of NCBI NO: 3914472 NR Description: Photosystem II 10 kDa polypeptide, chloroplast
  misc_feature (1)..(82): Homolog of NCBI NO: 131400 NR Description: Photosystem II 10 kDa polypeptide, chloroplast
  misc_feature (1)..(82): Homolog of NCBI NO: 3914471 NR Description: Photosystem II 10 kDa polypeptide, chloroplast
  misc_feature (1)..(82): Homolog of NCBI NO: 131399 NR Description: Photosystem II 10 kDa polypeptide, chloroplast
  misc_feature (1)..(82): Homolog of NCBI NO: 28207611 NR Description: photosystem II 10kDa polypeptide [Brassica rapa
  misc_feature (1)..(82): Homolog of NCBI NO: 1346871 NR Description: Photosystem II 10 kDa polypeptide, chloroplast
  misc_feature (1)..(82): Homolog of NCBI NO: 15219268 NR Description: photosystem II polypeptide, putative
MDLRDGVDASGRKGKGYGVYKYVDKYGANVDGYSPIYNENEWSASGDVYKGGVTGLAIWAVTLAGILAGGALLVYNTSALAQ

SEQ ID NO: 39810 - DNA, 1505 bp, Arabidopsis thaliana
  misc_feature (1)..(1505): Ceres Seq. ID no. 12396743
  misc_feature: MA Experiment ID: 108434 Result: Down-regulated in Transcription
  misc_feature: MA Experiment 108434 PARAMETER Experiment Name: At_Root_Tips_cDNA_P Parameter: Tissue Value: Root Tips
  misc_feature: MA Experiment ID: 108461 Result: Up-regulated in Transcription
  misc_feature: MA Experiment 108461 PARAMETER Experiment Name: At_Germinating_Seeds_cDNA_P Parameter: Age (day) Value: 1 vs. 0
  misc_feature: MA Experiment 108461 PARAMETER Experiment Name: At_Germinating_Seeds_cDNA_P Parameter: Tissue Value: Germinating Seeds
  misc_feature: MA Experiment ID: 108569 Result: Up-regulated in Transcription
  misc_feature: MA Experiment 108569 PARAMETER Experiment Name: At_0.001%_MeJA__cDNA_P Parameter: Timepoint (hr) Value: 6
  misc_feature: MA Experiment 108569 PARAMETER Experiment Name: At_0.001%_MeJA__cDNA_P Parameter: Tissue Value: Aerial
  misc_feature: MA Experiment 108569 PARAMETER Experiment Name: At_0.001%_MeJA__cDNA_P Parameter: Treatment Value: 0.001% MeJA vs. No Treatment
  misc_feature: MA Experiment ID: 108574 Result: Up-regulated in Transcription
  misc_feature: MA Experiment 108574 PARAMETER Experiment Name: At_Wounding__cDNA_P Parameter: Timepoint (hr) Value: 1
  misc_feature: MA Experiment 108574 PARAMETER Experiment Name: At_Wounding__cDNA_P Parameter: Tissue Value: Aerial
  misc_feature: MA Experiment 108574 PARAMETER Experiment Name: At_Wounding__cDNA_P Parameter: Treatment Value: Wounding vs. No Wounding
  misc_feature: MA Experiment ID: 108595 Result: Up-regulated in Transcription
  misc_feature: MA Experiment 108595 PARAMETER Experiment Name: At_Ler-pi_Ovule_cDNA_P Parameter: Plant Line Value: null
  misc_feature: MA Experiment ID: 108667 Result: Up-regulated in Transcription
  misc_feature: MA Experiment 108667 PARAMETER Experiment Name: At_2mM_SA_cDNA_P Parameter: Plant Line Value: WS
  misc_feature: MA Experiment 108667 PARAMETER Experiment Name: At_2mM_SA_cDNA_P Parameter: Timepoint (hr) Value: 1
  misc_feature: MA Experiment 108667 PARAMETER Experiment Name: At_2mM_SA_cDNA_P Parameter: Treatment Value: 2mM SA vs. No Treatment
  misc_feature: MA Experiment ID: 108668 Result: Up-regulated in Transcription
  misc_feature: MA Experiment 108668 PARAMETER Experiment Name: At_2mM_SA_cDNA_P Parameter: Plant Line Value: WS
  misc_feature: MA Experiment 108668 PARAMETER Experiment Name: At_2mM_SA_cDNA_P Parameter: Timepoint (hr) Value: 6
  misc_feature: MA Experiment 108668 PARAMETER Experiment Name: At_2mM_SA_cDNA_P Parameter: Treatment Value: 2mM SA vs. No Treatment
  misc_feature: MA Experiment ID: 20000071 Result: Up-regulated in Transcription
  misc_feature: MA Experiment 20000071 PARAMETER Experiment Name: At_100uM_ABA_Mutants_cDNA_P Parameter: Plant Line Value: CS8104
  misc_feature: MA Experiment 20000071 PARAMETER Experiment Name: At_100uM_ABA_Mutants_cDNA_P Parameter: Timepoint (hr) Value: 6
  misc_feature: MA Experiment 20000071 PARAMETER Experiment Name: At_100uM_ABA_Mutants_cDNA_P Parameter: Tissue Value: Aerial
  misc_feature: MA Experiment 20000071 PARAMETER Experiment Name: At_100uM_ABA_Mutants_cDNA_P Parameter: Treatment Value: 100uM ABA vs. No Treatment
  misc_feature: MA Experiment ID: 20000072 Result: Up-regulated in Transcription
  misc_feature: MA Experiment 20000072 PARAMETER Experiment Name: At_100uM_ABA_Mutants_cDNA_P Parameter: Plant Line Value: CS8105
  misc_feature: MA Experiment 20000072 PARAMETER Experiment Name: At_100uM_ABA_Mutants_cDNA_P Parameter: Timepoint (hr) Value: 6
  misc_feature: MA Experiment 20000072 PARAMETER Experiment Name: At_100uM_ABA_Mutants_cDNA_P Parameter: Tissue Value: Aerial
  misc_feature: MA Experiment 20000072 PARAMETER Experiment Name: At_100uM_ABA_Mutants_cDNA_P Parameter: Treatment Value: 100uM ABA vs. No Treatment
  misc_feature: MA Experiment ID: 20000088 Result: Up-regulated in Transcription
  misc_feature: MA Experiment 20000088 PARAMETER Experiment Name: At_100uM_ABA_Mutants_cDNA_P Parameter: Plant Line Value: Landsberg
  misc_feature: MA Experiment 20000088 PARAMETER Experiment Name: At_100uM_ABA_Mutants_cDNA_P Parameter: Timepoint (hr) Value: 6
  misc_feature: MA Experiment 20000088 PARAMETER Experiment Name: At_100uM_ABA_Mutants_cDNA_P Parameter: Tissue Value: Aerial
  misc_feature: MA Experiment 20000088 PARAMETER Experiment Name: At_100uM_ABA_Mutants_cDNA_P Parameter: Treatment Value: 100uM ABA vs. No Treatment
  misc_feature: MA Experiment ID: 20000112 Result: Down-regulated in Transcription
  misc_feature: MA Experiment 20000112 PARAMETER Experiment Name: At_42deg_Heat_cDNA_P Parameter: Temperature (deg C) Value: 42 vs. 22
  misc_feature: MA Experiment 20000112 PARAMETER Experiment Name: At_42deg_Heat_cDNA_P Parameter: Timepoint (hr) Value: 2
  misc_feature: MA Experiment 20000112 PARAMETER Experiment Name: At_42deg_Heat_cDNA_P Parameter: Tissue Value: Aerial
  misc_feature: MA Experiment ID: 20000117 Result: Up-regulated in Transcription
  misc_feature: MA Experiment 20000117 PARAMETER Experiment Name: At_100uM_ABA_Mutants_cDNA_P Parameter: Plant Line Value: Columbia
  misc_feature: MA Experiment 20000117 PARAMETER Experiment Name: At_100uM_ABA_Mutants_cDNA_P Parameter: Timepoint (hr) Value: 6
  misc_feature: MA Experiment 20000117 PARAMETER Experiment Name: At_100uM_ABA_Mutants_cDNA_P Parameter: Tissue Value: Aerial
  misc_feature: MA Experiment 20000117 PARAMETER Experiment Name: At_100uM_ABA_Mutants_cDNA_P Parameter: Treatment Value: 100uM ABA vs. No Treatment
  misc_feature: MA Experiment ID: 20000171 Result: Down-regulated in Transcription
  misc_feature: MA Experiment 20000171 PARAMETER Experiment Name: At_42deg_Heat_P Parameter: Age (day) Value: 14
  misc_feature: MA Experiment 20000171 PARAMETER Experiment Name: At_42deg_Heat_P Parameter: Organism Value: A. thaliana
  misc_feature: MA Experiment 20000171 PARAMETER Experiment Name: At_42deg_Heat_P Parameter: Plant Line Value: WS
  misc_feature: MA Experiment 20000171 PARAMETER Experiment Name: At_42deg_Heat_P Parameter: Temperature (deg C) Value: 42 vs. 22
  misc_feature: MA Experiment 20000171 PARAMETER Experiment Name: At_42deg_Heat_P Parameter: Timepoint (hr) Value: 1
  misc_feature: MA Experiment 20000171 PARAMETER Experiment Name: At_42deg_Heat_P Parameter: Tissue Value: Aerial
  misc_feature: MA Experiment ID: 20000173 Result: Down-regulated in Transcription
  misc_feature: MA Experiment 20000173 PARAMETER Experiment Name: At_42deg_Heat_P Parameter: Age (day) Value: 14
  misc_feature: MA Experiment 20000173 PARAMETER Experiment Name: At_42deg_Heat_P Parameter: Organism Value: A. thaliana
  misc_feature: MA Experiment 20000173 PARAMETER Experiment Name: At_42deg_Heat_P Parameter: Plant Line Value: WS
  misc_feature: MA Experiment 20000173 PARAMETER Experiment Name: At_42deg_Heat_P Parameter: Temperature (deg C) Value: 42 vs. 22
  misc_feature: MA Experiment 20000173 PARAMETER Experiment Name: At_42deg_Heat_P Parameter: Timepoint (hr) Value: 6
  misc_feature: MA Experiment 20000173 PARAMETER Experiment Name: At_42deg_Heat_P Parameter: Tissue Value: Aerial
  misc_feature: MA Experiment ID: 20000182 Result: Up-regulated in Transcription
  misc_feature: MA Experiment 20000182 PARAMETER Experiment Name: At_2mM_SA_P Parameter: Age (day) Value: 14
  misc_feature: MA Experiment 20000182 PARAMETER Experiment Name: At_2mM_SA_P Parameter: Organism Value: A. thaliana
  misc_feature: MA Experiment 20000182 PARAMETER Experiment Name: At_2mM_SA_P Parameter: Plant Line Value: WS
  misc_feature: MA Experiment 20000182 PARAMETER Experiment Name: At_2mM_SA_P Parameter: Timepoint (hr) Value: 6
  misc_feature: MA Experiment 20000182 PARAMETER Experiment Name: At_2mM_SA_P Parameter: Tissue Value: Aerial
  misc_feature: MA Experiment 20000182 PARAMETER Experiment Name: At_2mM_SA_P Parameter: Treatment Value: 2mM SA vs. No Treatment
  misc_feature: MA Experiment ID: 20000184 Result: Down-regulated in Transcription
  misc_feature: MA Experiment 20000184 PARAMETER Experiment Name: At_Shoots__P Parameter: Age (day) Value: 7
  misc_feature: MA Experiment 20000184 PARAMETER Experiment Name: At_Shoots__P Parameter: Tissue Value: Shoots vs. Whole Plant
  misc_feature: MA Experiment ID: 20000185 Result: Down-regulated in Transcription
  misc_feature: MA Experiment 20000185 PARAMETER Experiment Name: At_Roots__P Parameter: Age (day) Value: 7 vs. 21
  misc_feature: MA Experiment 20000185 PARAMETER Experiment Name: At_Roots__P Parameter: Organism Value: A. thaliana
  misc_feature: MA Experiment 20000185 PARAMETER Experiment Name: At_Roots__P Parameter: Tissue Value: Roots vs. Whole Plant
  misc_feature: MA Experiment ID: 20000234 Result: Down-regulated in Transcription
  misc_feature: MA Experiment 20000234 PARAMETER Experiment Name: At_Siliques_P Parameter: Age (day) Value: 21
  misc_feature: MA Experiment 20000234 PARAMETER Experiment Name: At_Siliques_P Parameter: Organism Value: A. thaliana
  misc_feature: MA Experiment 20000234 PARAMETER Experiment Name: At_Siliques_P Parameter: Plant Line Value: WS
  misc_feature: MA Experiment 20000234 PARAMETER Experiment Name: At_Siliques_P Parameter: Tissue Value: Less Than 5mm Siliques vs. Whole Plant
  misc_feature: MA Experiment ID: 20000235 Result: Down-regulated in Transcription
  misc_feature: MA Experiment 20000235 PARAMETER Experiment Name: At_Siliques_P Parameter: Age (day) Value: 21
  misc_feature: MA Experiment 20000235 PARAMETER Experiment Name: At_Siliques_P Parameter: Organism Value: A. thaliana
  misc_feature: MA Experiment 20000235 PARAMETER Experiment Name: At_Siliques_P Parameter: Plant Line Value: WS
  misc_feature: MA Experiment 20000235 PARAMETER Experiment Name: At_Siliques_P Parameter: Tissue Value: 5-10mm Siliques vs. Whole Plant
  misc_feature: MA Experiment ID: 20000264 Result: Down-regulated in Transcription
  misc_feature: MA Experiment 20000264 PARAMETER Experiment Name: At_Open_Flower_P Parameter: Age (day) Value: 21
  misc_feature: MA Experiment 20000264 PARAMETER Experiment Name: At_Open_Flower_P Parameter: Plant Line Value: WS
  misc_feature: MA Experiment 20000264 PARAMETER Experiment Name: At_Open_Flower_P Parameter: Tissue Value: Open Flower vs. Whole Plant
  misc_feature: MA Experiment ID: 20000438 Result: Down-regulated in Transcription
  misc_feature: MA Experiment 20000438 PARAMETER Experiment Name: At_Shoots__P Parameter: Age (day) Value: 14
  misc_feature: MA Experiment 20000438 PARAMETER Experiment Name: At_Shoots__P Parameter: Tissue Value: Shoots vs. Whole Plant
  misc_feature: MA Experiment ID: 20000439 Result: Down-regulated in Transcription
  misc_feature: MA Experiment 20000439 PARAMETER Experiment Name: At_Roots__P Parameter: Age (day) Value: 14 vs. 21
  misc_feature: MA Experiment 20000439 PARAMETER Experiment Name: At_Roots__P Parameter: Organism Value: A. thaliana
  misc_feature: MA Experiment 20000439 PARAMETER Experiment Name: At_Roots__P Parameter: Tissue Value: Roots vs. Whole Plant
  misc_feature: MA Experiment ID: 20000527 Result: Down-regulated in Transcription
  misc_feature: MA Experiment 20000527 PARAMETER Experiment Name: At_10percent_PEG_P Parameter: Age (day) Value: 20
  misc_feature: MA Experiment 20000527 PARAMETER Experiment Name: At_10percent_PEG_P Parameter: Organism Value: A. thaliana
  misc_feature: MA Experiment 20000527 PARAMETER Experiment Name: At_10percent_PEG_P Parameter: Plant Line Value: WS
  misc_feature: MA Experiment 20000527 PARAMETER Experiment Name: At_10percent_PEG_P Parameter: Timepoint (day) Value: 20
  misc_feature: MA Experiment 20000527 PARAMETER Experiment Name: At_10percent_PEG_P Parameter: Tissue Value: Whole Plant
  misc_feature: MA Experiment 20000527 PARAMETER Experiment Name: At_10percent_PEG_P Parameter: Treatment Value: 10percent PEG vs. No Treatment
  misc_feature: MA Experiment ID: 20000573 Result: Up-regulated in Transcription
  misc_feature: MA Experiment 20000573 PARAMETER Experiment Name: At_100uM_ABA_Mutants__P Parameter: Organism Value: A. thaliana
  misc_feature: MA Experiment 20000573 PARAMETER Experiment Name: At_100uM_ABA_Mutants__P Parameter: Plant Line Value: CS22 vs. Ler wt
  misc_feature: MA Experiment 20000573 PARAMETER Experiment Name: At_100uM_ABA_Mutants__P Parameter: Timepoint (hr) Value: N/A
  misc_feature: MA Experiment 20000573 PARAMETER Experiment Name: At_100uM_ABA_Mutants__P Parameter: Tissue Value: Whole Plant
  misc_feature: MA Experiment 20000573 PARAMETER Experiment Name: At_100uM_ABA_Mutants__P Parameter: Treatment Value: None
  misc_feature: MA Experiment ID: 20000574 Result: Up-regulated in Transcription
  misc_feature: MA Experiment 20000574 PARAMETER Experiment Name: At_100uM_ABA_Mutants__P Parameter: Organism Value: A. thaliana
  misc_feature: MA Experiment 20000574 PARAMETER Experiment Name: At_100uM_ABA_Mutants__P Parameter: Plant Line Value: CS23 vs. Ler wt
  misc_feature: MA Experiment 20000574 PARAMETER Experiment Name: At_100uM_ABA_Mutants__P Parameter: Timepoint (hr) Value: N/A
  misc_feature: MA Experiment 20000574 PARAMETER Experiment Name: At_100uM_ABA_Mutants__P Parameter: Tissue Value: Whole Plant
  misc_feature: MA Experiment 20000574 PARAMETER Experiment Name: At_100uM_ABA_Mutants__P Parameter: Treatment Value: None
  misc_feature: MA Experiment ID: 20000709 Result: Up-regulated in Transcription
  misc_feature: MA Experiment 20000709 PARAMETER Experiment Name: At_15mM_NH4NO3_L-to-H_P Parameter: Age (hr) Value: 14
  misc_feature: MA Experiment 20000709 PARAMETER Experiment Name: At_15mM_NH4NO3_L-to-H_P Parameter: Organism Value: A. thaliana
  misc_feature: MA Experiment 20000709 PARAMETER Experiment Name: At_15mM_NH4NO3_L-to-H_P Parameter: Plant Line Value: WS
  misc_feature: MA Experiment 20000709 PARAMETER Experiment Name: At_15mM_NH4NO3_L-to-H_P Parameter: Timepoint (hr) Value: 4
  misc_feature: MA Experiment 20000709 PARAMETER Experiment Name: At_15mM_NH4NO3_L-to-H_P Parameter: Tissue Value: Aerial
  misc_feature: MA Experiment 20000709 PARAMETER Experiment Name: At_15mM_NH4NO3_L-to-H_P Parameter: Treatment Value: 15mM NH4NO3 vs. 30mM Mannitol
  misc_feature: MA Experiment ID: 20000794 Result: Down-regulated in Transcription
  misc_feature: MA Experiment 20000794 PARAMETER Experiment Name: At_Petals_P Parameter: Age (day) Value: 23-25 days
  misc_feature: MA Experiment 20000794 PARAMETER Experiment Name: At_Petals_P Parameter: Plant Line Value: WS
  misc_feature: MA Experiment 20000794 PARAMETER Experiment Name: At_Petals_P Parameter: Tissue Value: Petals vs. Whole plant
  misc_feature: MA Experiment ID: 20001248 Result: Down-regulated in Transcription
  misc_feature: MA Experiment 20001248 PARAMETER Experiment Name: At_Far-red-induction_P Parameter: Age (day) Value: 7
  misc_feature: MA Experiment 20001248 PARAMETER Experiment Name: At_Far-red-induction_P Parameter: Light Value: Far-red vs. White
  misc_feature: MA Experiment 20001248 PARAMETER Experiment Name: At_Far-red-induction_P Parameter: Organism Value: A. thaliana
  misc_feature: MA Experiment 20001248 PARAMETER Experiment Name: At_Far-red-induction_P Parameter: Plant Line Value: Columbia
  misc_feature: MA Experiment 20001248 PARAMETER Experiment Name: At_Far-red-induction_P Parameter: Timepoint (hr) Value: 4
  misc_feature: MA Experiment 20001248 PARAMETER Experiment Name: At_Far-red-induction_P Parameter: Tissue Value: Whole Plant
  misc_feature: MA Experiment ID: 20001450 Result: Down-regulated in Transcription
  misc_feature: MA Experiment 20001450 PARAMETER Experiment Name: At_Far-red-induction_P Parameter: Age (day) Value: 7
  misc_feature: MA Experiment 20001450 PARAMETER Experiment Name: At_Far-red-induction_P Parameter: Light Value: Far-red vs. White
  misc_feature: MA Experiment 20001450 PARAMETER Experiment Name: At_Far-red-induction_P Parameter: Organism Value: A. thaliana
  misc_feature: MA Experiment 20001450 PARAMETER Experiment Name: At_Far-red-induction_P Parameter: Plant Line Value: Columbia
  misc_feature: MA Experiment 20001450 PARAMETER Experiment Name: At_Far-red-induction_P Parameter: Timepoint (hr) Value: 8
  misc_feature: MA Experiment 20001450 PARAMETER Experiment Name: At_Far-red-induction_P Parameter: Tissue Value: Whole Plant
  misc_feature: MA Experiment ID: 20001451 Result: Down-regulated in Transcription
  misc_feature: MA Experiment 20001451 PARAMETER Experiment Name: At_Far-red-induction_P Parameter: Age (day) Value: 7
  misc_feature: MA Experiment 20001451 PARAMETER Experiment Name: At_Far-red-induction_P Parameter: Light Value: Far-red vs. White
  misc_feature: MA Experiment 20001451 PARAMETER Experiment Name: At_Far-red-induction_P Parameter: Organism Value: A. thaliana
  misc_feature: MA Experiment 20001451 PARAMETER Experiment Name: At_Far-red-induction_P Parameter: Plant Line Value: Columbia
  misc_feature: MA Experiment 20001451 PARAMETER Experiment Name: At_Far-red-induction_P Parameter: Timepoint (hr) Value: 24
  misc_feature: MA Experiment 20001451 PARAMETER Experiment Name: At_Far-red-induction_P Parameter: Tissue Value: Whole Plant
  misc_feature: MA Experiment ID: 20001558 Result: Down-regulated in Transcription
  misc_feature: MA Experiment 20001558 PARAMETER Experiment Name: At_Drought_Soil_Dry_P Parameter: Age (day) Value: 27
  misc_feature: MA Experiment 20001558 PARAMETER Experiment Name: At_Drought_Soil_Dry_P Parameter: Organism Value: A. thaliana
  misc_feature: MA Experiment 20001558 PARAMETER Experiment Name: At_Drought_Soil_Dry_P Parameter: Plant Line Value: WS
  misc_feature: MA Experiment 20001558 PARAMETER Experiment Name: At_Drought_Soil_Dry_P Parameter: Post Timepoint (hr) Value: 6
  misc_feature: MA Experiment 20001558 PARAMETER Experiment Name: At_Drought_Soil_Dry_P Parameter: Post-Treatment Value: Re-Water vs. No Drought
  misc_feature: MA Experiment 20001558 PARAMETER Experiment Name: At_Drought_Soil_Dry_P Parameter: Timepoint (day) Value: 13
  misc_feature: MA Experiment 20001558 PARAMETER Experiment Name: At_Drought_Soil_Dry_P Parameter: Treatment Value: Drought vs. No Drought
  misc_feature: MA Experiment ID: 20001904 Result: Down-regulated in Transcription
  misc_feature: MA Experiment 20001904 PARAMETER Experiment Name: At_Drought_Reproduction_P Parameter: Age (day) Value: 37
  misc_feature: MA Experiment 20001904 PARAMETER Experiment Name: At_Drought_Reproduction_P Parameter: Organism Value: A. thaliana
  misc_feature: MA Experiment 20001904 PARAMETER Experiment Name: At_Drought_Reproduction_P Parameter: Plant Line Value: WS
  misc_feature: MA Experiment 20001904 PARAMETER Experiment Name: At_Drought_Reproduction_P Parameter: Timepoint (day) Value: 7
  misc_feature: MA Experiment 20001904 PARAMETER Experiment Name: At_Drought_Reproduction_P Parameter: Tissue Value: Rosettes
  misc_feature: MA Experiment 20001904 PARAMETER Experiment Name: At_Drought_Reproduction_P Parameter: Treatment Value: Drought vs. No Drought
  misc_feature: MA Experiment ID: 20001905 Result: Down-regulated in Transcription
  misc_feature: MA Experiment 20001905 PARAMETER Experiment Name: At_Drought_Reproduction_P Parameter: Age (day) Value: 40
  misc_feature: MA Experiment 20001905 PARAMETER Experiment Name: At_Drought_Reproduction_P Parameter: Organism Value: A. thaliana
  misc_feature: MA Experiment 20001905 PARAMETER Experiment Name: At_Drought_Reproduction_P Parameter: Plant Line Value: WS
  misc_feature: MA Experiment 20001905 PARAMETER Experiment Name: At_Drought_Reproduction_P Parameter: Timepoint (day) Value: 10
  misc_feature: MA Experiment 20001905 PARAMETER Experiment Name: At_Drought_Reproduction_P Parameter: Tissue Value: Rosettes
  misc_feature: MA Experiment 20001905 PARAMETER Experiment Name: At_Drought_Reproduction_P Parameter: Treatment Value: Drought vs. No Drought
aaaatttgctccaatgcctgtacttttctcctctcgttctctcatactctccattattgtccccttacttatatctatcgctctctacaaactcgacacattcgaccccgctattgttccttccgatgcattcacatcctctgctacttcactcccgccgcttataaacgacgaatttctcaccggagctgagtttatcggtgtcggtcttctcaatatacccgaagatatcgcctaccataaggaatctaatctcatctacactggttgtgttgatggatgggtgaaacgagtcaaggtcgccgactcggttaatgactcagtcgttgaggattgggtcaatactggtggtagaccgctcggaatcgcgttcggaatccacggcgaagtcattgtcgcagagtacacaaggttggggttttgaaatcgaattttgaaaaatcacaatcttaggtttgactttgttgttatgtatagggactgttgaatataagcggtgacggaaagaagacggaattgttgacggacgaagcggacggtgtgaagtttaagctgacggatgcagttaccgttgcagataacggcgttttgtatttcacagatgcttcttacaagtacactctcaatcaattgagtttagacatgttagaagggaaaccttttggacgactcttgagctttgatcccaccacacgtgttacaaaagtacttctcaaagacctctacttcgctaatggcatcaccatctctcctgatcaaactcatctcatcttctgtgaaactccaatgtatgtgcattggatcagttaaattttttataaatttccgactcagtttgatttggcaataagttaatttatctatatctgttatatactactttaggaaaaggtgcagcaagtattacatcagtgaggagcgtgtggaggtattcactcaaagcttaccaggttatccagataacattcgttacgatggagatggacattactggattgcattgccttcggtaacgttacaaattgaatttcttttcttttctttgaggtcatgttattaactcattacatgctaataaaggatcatctttgtgttgtggttgtgcaaacagggagtcacgacattgtggaatatctcgttgaaataccctttcttgaggaaactcacagcaatggtggctaagtacggcgtggatcttatgtttatggagaatgcaggcgttttacaggtggatttggatggaaatcccatcgcgtactaccatgatccaaaactctctcacatagccacatgtgacaagattgggaaatatctctattgtggaagtctctcgcaatcacatatcctccgacttgatctcctgaaatatcctgcacagaacaagaaactttgaaatattatgttttcacaaataaggaaagtttccattttaggaaggagcattcactgtcacaaaaatgtaaactcatttcctgagaatgaatgatgattgtatctcttttttt

SEQ ID NO: 39811 - protein, 140 aa, Arabidopsis thaliana
  peptide (1)..(140): Ceres Seq. ID no. 12396744
  misc_feature (12)..(134): Pfam Name: Strictosidine synthase Pfam Description: Strictosidine synthase
  misc_feature (14)..(134): Homolog of NCBI NO: 23237921 NR Description: contains ESTs
  misc_feature (10)..(134): Homolog of NCBI NO: 37536558 NR Description: mucin-like protein [Oryza sativa (japonica
  misc_feature (5)..(134): Homolog of NCBI NO: 15230477 NR Description: strictosidine synthase-related
  misc_feature (5)..(134): Homolog of NCBI NO: 11358518 NR Description: mucin-like protein - Arabidopsis thaliana
  misc_feature (5)..(134): Homolog of NCBI NO: 15230488 NR Description: strictosidine synthase-related
  misc_feature (5)..(134): Homolog of NCBI NO: 18409339 NR Description: strictosidine synthase-related
  misc_feature (5)..(134): Homolog of NCBI NO: 15230490 NR Description: strictosidine synthase-related
KFAPMPVLFSSRSLILSIIVPLLISIALYKLDTFDPAIVPSDAFTSSATSLPPLINDEFLTGAEFIGVGLLNIPEDIAYHKESNLIYTGCVDGWVKRVKVADSVNDSVVEDWVNTGGRPLGIAFGIHGEVIVAEYTRLGF

SEQ ID NO: 39812 - protein, 136 aa, Arabidopsis thaliana
  peptide (1)..(136): Ceres Seq. ID no. 12396745
  misc_feature (8)..(130): Pfam Name: Strictosidine synthase Pfam Description: Strictosidine synthase
  misc_feature (10)..(130): Homolog of NCBI NO: 23237921 NR Description: contains ESTs
  misc_feature (6)..(130): Homolog of NCBI NO: 37536558 NR Description: mucin-like protein [Oryza sativa (japonica
  misc_feature (1)..(130): Homolog of NCBI NO: 15230477 NR Description: strictosidine synthase-related
  misc_feature (1)..(130): Homolog of NCBI NO: 11358518 NR Description: mucin-like protein - Arabidopsis thaliana
  misc_feature (1)..(130): Homolog of NCBI NO: 15230488 NR Description: strictosidine synthase-related
  misc_feature (1)..(130): Homolog of NCBI NO: 18409339 NR Description: strictosidine synthase-related
  misc_feature (1)..(130): Homolog of NCBI NO: 15230490 NR Description: strictosidine synthase-related
MPVLFSSRSLILSIIVPLLISIALYKLDTFDPAIVPSDAFTSSATSLPPLINDEFLTGAEFIGVGLLNIPEDIAYHKESNLIYTGCVDGWVKRVKVADSVNDSVVEDWVNTGGRPLGIAFGIHGEVIVAEYTRLGF

SEQ ID NO: 39813 - protein, 73 aa, Arabidopsis thaliana
  peptide (1)..(73): Ceres Seq. ID no. 12396746
  misc_feature (1)..(58): Pfam Name: Strictosidine synthase Pfam Description: Strictosidine synthase
  misc_feature (1)..(69): Homolog of NCBI NO: 37536558 NR Description: mucin-like protein [Oryza sativa (japonica
  misc_feature (1)..(71): Homolog of NCBI NO: 15230477 NR Description: strictosidine synthase-related
  misc_feature (1)..(73): Homolog of NCBI NO: 11358518 NR Description: mucin-like protein - Arabidopsis thaliana
  misc_feature (1)..(73): Homolog of NCBI NO: 15230488 NR Description: strictosidine synthase-related
  misc_feature (1)..(73): Homolog of NCBI NO: 18409339 NR Description: strictosidine synthase-related
  misc_feature (1)..(73): Homolog of NCBI NO: 15230490 NR Description: strictosidine synthase-related
MVAKYGVDLMFMENAGVLQVDLDGNPIAYYHDPKLSHIATCDKIGKYLYCGSLSQSHILRLDLLKYPAQNKKL

SEQ ID NO: 39814 - DNA, 1906 bp, Arabidopsis thaliana
  misc_feature (1)..(1906): Ceres Seq. ID no. 13488813
  misc_feature: MA Experiment ID: 108464 Result: Up-regulated in Transcription
  misc_feature: MA Experiment 108464 PARAMETER Experiment Name: At_Germinating_Seeds_cDNA_P Parameter: Age (day) Value: 4 vs. 0
  misc_feature: MA Experiment 108464 PARAMETER Experiment Name: At_Germinating_Seeds_cDNA_P Parameter: Tissue Value: Germinating Seeds
  misc_feature: MA Experiment ID: 108572 Result: Up-regulated in Transcription
  misc_feature: MA Experiment 108572 PARAMETER Experiment Name: At_Drought_cDNA_P Parameter: Timepoint (hr) Value: 1
  misc_feature: MA Experiment 108572 PARAMETER Experiment Name: At_Drought_cDNA_P Parameter: Tissue Value: Aerial
  misc_feature: MA Experiment 108572 PARAMETER Experiment Name: At_Drought_cDNA_P Parameter: Treatment Value: Drought vs. No Drought
  misc_feature: MA Experiment ID: 108573 Result: Up-regulated in Transcription
  misc_feature: MA Experiment 108573 PARAMETER Experiment Name: At_Drought_cDNA_P Parameter: Timepoint (hr) Value: 6
  misc_feature: MA Experiment 108573 PARAMETER Experiment Name: At_Drought_cDNA_P Parameter: Tissue Value: Aerial
  misc_feature: MA Experiment 108573 PARAMETER Experiment Name: At_Drought_cDNA_P Parameter: Treatment Value: Drought vs. No Drought
  misc_feature: MA Experiment ID: 20000069 Result: Up-regulated in Transcription
  misc_feature: MA Experiment 20000069 PARAMETER Experiment Name: At_100uM_ABA_Mutants_cDNA_P Parameter: Plant Line Value: CS23
  misc_feature: MA Experiment 20000069 PARAMETER Experiment Name: At_100uM_ABA_Mutants_cDNA_P Parameter: Timepoint (hr) Value: 6
  misc_feature: MA Experiment 20000069 PARAMETER Experiment Name: At_100uM_ABA_Mutants_cDNA_P Parameter: Tissue Value: Aerial
  misc_feature: MA Experiment 20000069 PARAMETER Experiment Name: At_100uM_ABA_Mutants_cDNA_P Parameter: Treatment Value: 100uM ABA vs. No Treatment
  misc_feature: MA Experiment ID: 20000070 Result: Up-regulated in Transcription
  misc_feature: MA Experiment 20000070 PARAMETER Experiment Name: At_100uM_ABA_Mutants_cDNA_P Parameter: Plant Line Value: CS24
  misc_feature: MA Experiment 20000070 PARAMETER Experiment Name: At_100uM_ABA_Mutants_cDNA_P Parameter: Timepoint (hr) Value: 6
  misc_feature: MA Experiment 20000070 PARAMETER Experiment Name: At_100uM_ABA_Mutants_cDNA_P Parameter: Tissue Value: Aerial
  misc_feature: MA Experiment 20000070 PARAMETER Experiment Name: At_100uM_ABA_Mutants_cDNA_P Parameter: Treatment Value: 100uM ABA vs. No Treatment
  misc_feature: MA Experiment ID: 20000071 Result: Up-regulated in Transcription
  misc_feature: MA Experiment 20000071 PARAMETER Experiment Name: At_100uM_ABA_Mutants_cDNA_P Parameter: Plant Line Value: CS8104
  misc_feature: MA Experiment 20000071 PARAMETER Experiment Name: At_100uM_ABA_Mutants_cDNA_P Parameter: Timepoint (hr) Value: 6
  misc_feature: MA Experiment 20000071 PARAMETER Experiment Name: At_100uM_ABA_Mutants_cDNA_P Parameter: Tissue Value: Aerial
  misc_feature: MA Experiment 20000071 PARAMETER Experiment Name: At_100uM_ABA_Mutants_cDNA_P Parameter: Treatment Value: 100uM ABA vs. No Treatment
  misc_feature: MA Experiment ID: 20000072 Result: Up-regulated in Transcription
  misc_feature: MA Experiment 20000072 PARAMETER Experiment Name: At_100uM_ABA_Mutants_cDNA_P Parameter: Plant Line Value: CS8105
  misc_feature: MA Experiment 20000072 PARAMETER Experiment Name: At_100uM_ABA_Mutants_cDNA_P Parameter: Timepoint (hr) Value: 6
  misc_feature: MA Experiment 20000072 PARAMETER Experiment Name: At_100uM_ABA_Mutants_cDNA_P Parameter: Tissue Value: Aerial
  misc_feature: MA Experiment 20000072 PARAMETER Experiment Name: At_100uM_ABA_Mutants_cDNA_P Parameter: Treatment Value: 100uM ABA vs. No Treatment
  misc_feature: MA Experiment ID: 20000088 Result: Up-regulated in Transcription
  misc_feature: MA Experiment 20000088 PARAMETER Experiment Name: At_100uM_ABA_Mutants_cDNA_P Parameter: Plant Line Value: Landsberg
  misc_feature: MA Experiment 20000088 PARAMETER Experiment Name: At_100uM_ABA_Mutants_cDNA_P Parameter: Timepoint (hr) Value: 6
  misc_feature: MA Experiment 20000088 PARAMETER Experiment Name: At_100uM_ABA_Mutants_cDNA_P Parameter: Tissue Value: Aerial
  misc_feature: MA Experiment 20000088 PARAMETER Experiment Name: At_100uM_ABA_Mutants_cDNA_P Parameter: Treatment Value: 100uM ABA vs. No Treatment
  misc_feature: MA Experiment ID: 20000112 Result: Down-regulated in Transcription
  misc_feature: MA Experiment 20000112 PARAMETER Experiment Name: At_42deg_Heat_cDNA_P Parameter: Temperature (deg C) Value: 42 vs. 22
  misc_feature: MA Experiment 20000112 PARAMETER Experiment Name: At_42deg_Heat_cDNA_P Parameter: Timepoint (hr) Value: 2
  misc_feature: MA Experiment 20000112 PARAMETER Experiment Name: At_42deg_Heat_cDNA_P Parameter: Tissue Value: Aerial
  misc_feature: MA Experiment ID: 20000117 Result: Up-regulated in Transcription
  misc_feature: MA Experiment 20000117 PARAMETER Experiment Name: At_100uM_ABA_Mutants_cDNA_P Parameter: Plant Line Value: Columbia
  misc_feature: MA Experiment 20000117 PARAMETER Experiment Name: At_100uM_ABA_Mutants_cDNA_P Parameter: Timepoint (hr) Value: 6
  misc_feature: MA Experiment 20000117 PARAMETER Experiment Name: At_100uM_ABA_Mutants_cDNA_P Parameter: Tissue Value: Aerial
  misc_feature: MA Experiment 20000117 PARAMETER Experiment Name: At_100uM_ABA_Mutants_cDNA_P Parameter: Treatment Value: 100uM ABA vs. No Treatment
  misc_feature: MA Experiment ID: 20000144 Result: Down-regulated in Transcription
  misc_feature: MA Experiment 20000144 PARAMETER Experiment Name: At_42deg_Heat_cDNA_P Parameter: Temperature (deg C) Value: 42 vs. 22
  misc_feature: MA Experiment 20000144 PARAMETER Experiment Name: At_42deg_Heat_cDNA_P Parameter: Timepoint (hr) Value: 1
  misc_feature: MA Experiment 20000144 PARAMETER Experiment Name: At_42deg_Heat_cDNA_P Parameter: Tissue Value: Aerial
  misc_feature: MA Experiment ID: 20000171 Result: Down-regulated in Transcription
  misc_feature: MA Experiment 20000171 PARAMETER Experiment Name: At_42deg_Heat_P Parameter: Age (day) Value: 14
  misc_feature: MA Experiment 20000171 PARAMETER Experiment Name: At_42deg_Heat_P Parameter: Organism Value: A. thaliana
  misc_feature: MA Experiment 20000171 PARAMETER Experiment Name: At_42deg_Heat_P Parameter: Plant Line Value: WS
  misc_feature: MA Experiment 20000171 PARAMETER Experiment Name: At_42deg_Heat_P Parameter: Temperature (deg C) Value: 42 vs. 22
  misc_feature: MA Experiment 20000171 PARAMETER Experiment Name: At_42deg_Heat_P Parameter: Timepoint (hr) Value: 1
  misc_feature: MA Experiment 20000171 PARAMETER Experiment Name: At_42deg_Heat_P Parameter: Tissue Value: Aerial
  misc_feature: MA Experiment ID: 20000173 Result: Down-regulated in Transcription
  misc_feature: MA Experiment 20000173 PARAMETER Experiment Name: At_42deg_Heat_P Parameter: Age (day) Value: 14
  misc_feature: MA Experiment 20000173 PARAMETER Experiment Name: At_42deg_Heat_P Parameter: Organism Value: A. thaliana
  misc_feature: MA Experiment 20000173 PARAMETER Experiment Name: At_42deg_Heat_P Parameter: Plant Line Value: WS
  misc_feature: MA Experiment 20000173 PARAMETER Experiment Name: At_42deg_Heat_P Parameter: Temperature (deg C) Value: 42 vs. 22
  misc_feature: MA Experiment 20000173 PARAMETER Experiment Name: At_42deg_Heat_P Parameter: Timepoint (hr) Value: 6
  misc_feature: MA Experiment 20000173 PARAMETER Experiment Name: At_42deg_Heat_P Parameter: Tissue Value: Aerial
  misc_feature: MA Experiment ID: 20000180 Result: Up-regulated in Transcription
  misc_feature: MA Experiment 20000180 PARAMETER Experiment Name: At_Germinating_Seeds_P Parameter: Age (hr) Value: 24 vs. 0
  misc_feature: MA Experiment 20000180 PARAMETER Experiment Name: At_Germinating_Seeds_P Parameter: Tissue Value: Germinating Seeds
  misc_feature: MA Experiment ID: 20000224 Result: Down-regulated in Transcription
  misc_feature: MA Experiment ID: 20000436 Result: Up-regulated in Transcription
  misc_feature: MA Experiment 20000436 PARAMETER Experiment Name: At_Drought_P Parameter: Age (day) Value: 7
  misc_feature: MA Experiment 20000436 PARAMETER Experiment Name: At_Drought_P Parameter: Organism Value: A. thaliana
  misc_feature: MA Experiment 20000436 PARAMETER Experiment Name: At_Drought_P Parameter: Plant Line Value: WS
  misc_feature: MA Experiment 20000436 PARAMETER Experiment Name: At_Drought_P Parameter: Timepoint (hr) Value: 12
  misc_feature: MA Experiment 20000436 PARAMETER Experiment Name: At_Drought_P Parameter: Tissue Value: Whole Plant
  misc_feature: MA Experiment 20000436 PARAMETER Experiment Name: At_Drought_P Parameter: Treatment Value: Drought vs. No Drought
  misc_feature: MA Experiment ID: 20000437 Result: Up-regulated in Transcription
  misc_feature: MA Experiment 20000437 PARAMETER Experiment Name: At_Drought_P Parameter: Age (day) Value: 8
  misc_feature: MA Experiment 20000437 PARAMETER Experiment Name: At_Drought_P Parameter: Organism Value: A. thaliana
  misc_feature: MA Experiment 20000437 PARAMETER Experiment Name: At_Drought_P Parameter: Plant Line Value: WS
  misc_feature: MA Experiment 20000437 PARAMETER Experiment Name: At_Drought_P Parameter: Timepoint (hr) Value: 24
  misc_feature: MA Experiment 20000437 PARAMETER Experiment Name: At_Drought_P Parameter: Tissue Value: Whole Plant
  misc_feature: MA Experiment 20000437 PARAMETER Experiment Name: At_Drought_P Parameter: Treatment Value: Drought vs. No Drought
  misc_feature: MA Experiment ID: 20000794 Result: Up-regulated in Transcription
  misc_feature: MA Experiment 20000794 PARAMETER Experiment Name: At_Petals_P Parameter: Age (day) Value: 23-25 days
  misc_feature: MA Experiment 20000794 PARAMETER Experiment Name: At_Petals_P Parameter: Plant Line Value: WS
  misc_feature: MA Experiment 20000794 PARAMETER Experiment Name: At_Petals_P Parameter: Tissue Value: Petals vs. Whole plant
  misc_feature: MA Experiment ID: 20001558 Result: Down-regulated in Transcription
  misc_feature: MA Experiment 20001558 PARAMETER Experiment Name: At_Drought_Soil_Dry_P Parameter: Age (day) Value: 27
  misc_feature: MA Experiment 20001558 PARAMETER Experiment Name: At_Drought_Soil_Dry_P Parameter: Organism Value: A. thaliana
  misc_feature: MA Experiment 20001558 PARAMETER Experiment Name: At_Drought_Soil_Dry_P Parameter: Plant Line Value: WS
  misc_feature: MA Experiment 20001558 PARAMETER Experiment Name: At_Drought_Soil_Dry_P Parameter: Post Timepoint (hr) Value: 6
  misc_feature: MA Experiment 20001558 PARAMETER Experiment Name: At_Drought_Soil_Dry_P Parameter: Post-Treatment Value: Re-Water vs. No Drought
  misc_feature: MA Experiment 20001558 PARAMETER Experiment Name: At_Drought_Soil_Dry_P Parameter: Timepoint (day) Value: 13
  misc_feature: MA Experiment 20001558 PARAMETER Experiment Name: At_Drought_Soil_Dry_P Parameter: Treatment Value: Drought vs. No Drought
ggcaaaatgaatagagataatatataaacacaagcattaggctgtcgagaaaacataaattttctatgattaggccatacaaatcataataagtagtagaaatacaaaaaaatctgtttgttggctaaagagaaatcgaaggaattagtcttttcacccatttttctctctctgtgtggcttcttcttcttcttcttcttcctatcaaaatcatcatcatcatcttctctatattactaaaatagagagagccaacaaaagagaggagagggcgtaaaacagcagacggtggcgcaccgtagcaccgccccctcctaacctgcgcctttcttccttctctttcattttttttttttccggtttcaggaattattcctctcctcctctctcaggtcgcttcgatcccaaggcaaaatagtttcctgatttttgattcttaccttcgattttggcttcttcttcttcttcttcagatgcattcacctagaaaactctggcggacatcaaaggaaccctagcttttctccggtcttgttatatcgcctctatcgccgccgatcggtggtttgatttcaaatccaagagaaagaaacgcagaggttcatttctcaggatgctttggatcatgagattctccggtttattctccgccgctttggttatcatcgtcctctctccttctctccaatcgtttcctccagctgaagctatcagatcctctcatctcgacgcttacctccgtttcccctcctccgatccaccgccgcatagattctccttcagaaaagctcctgttttccgcaatgccgccgattgcgccgccgcagatatcgattccggcgtctgtaacccttccttggtccacgtcgcgattactctcgatttcgagtacctgcgtggctcaatcgccgccgttcattcgattctcaagcactcgtcgtgtcccgagagcgtcttcttccatttcctcgtctccgagactgacctagaatccttgattcgttcgacttttcccgaattgaaattaaaggtttactacttcgatccggagattgtacggacgctgatctcaacctccgtgagacaagcgctcgagcagccgttgaattacgctagaaattacctagctgaccttctcgagccttgcgtgcgtcgcgtgatctacctagattccgatctaatcgtcgtcgacgacatcgcaaagctctggatgacgaaactgggatcgaaaacgatcggagctcccgagtactgtcacgcgaacttcacaaagtatttcacaccggcgttctggtccgacgagaggttctccggagctttctccgggaggaaaccgtgctacttcaacacgggagtgatggtgatggatctagagagatggaggcgcgtagggtacacggaggtgatagagaaatggatggagattcagaagagtgataggatttacgagctgggatcattgccgccgttcttgttggtgttcgccggagaagtagctccgatagagcatcggtggaaccagcatgggcttggtggagataacgtgagaggaagctgtagagatttacatcccggtccggttagcttgcttcattggtccggtagtggtaaaccgtggtttcggttagattcgagacggccttgtccacttgatactctttgggcaccttatgatttgtatggacactactctcgctgatgatgattgatgatctctgttattacatattattatagtctcagtctcagctggtaaattctctcatctcctttgacaaaaaaaaaaacattctttcttctctcttttgattttaccaacttttggttggaatttgtttcgttactctgtattctattcgattgttctgtgcatcaaaccataggatacaatcagatttgttgttgt

SEQ ID NO: 39815 - protein, 361 aa, Arabidopsis thaliana
  peptide (1)..(361): Ceres Seq. ID no. 13488814
  misc_feature (55)..(360): Homolog of NCBI NO: 18391493 NR Description: glycosyltransferase family 8 [Arabidopsis
  misc_feature (15)..(356): Homolog of NCBI NO: 12003394 NR Description: Avr9/Cf-9 rapidly elicited protein 231 [Nicotiana
  misc_feature (56)..(358): Homolog of NCBI NO: 15221684 NR Description: glycosyltransferase family 8 [Arabidopsis
  misc_feature (55)..(358): Homolog of NCBI NO: 18409445 NR Description: glycosyltransferase family 8 [Arabidopsis
  misc_feature (1)..(327): Homolog of NCBI NO: 20258800 NR Description: putative glycosyl transferase [Arabidopsis
  misc_feature (1)..(358): Homolog of NCBI NO: 21554300 NR Description: putative glycosyl transferase [Arabidopsis
  misc_feature (1)..(358): Homolog of NCBI NO: 15235247 NR Description: glycosyltransferase family 8 [Arabidopsis
  misc_feature (1)..(358): Homolog of NCBI NO: 15217851 NR Description: glycosyltransferase family 8 [Arabidopsis
  misc_feature (5)..(361): Homolog of NCBI NO: 11281926 NR Description: hypothetical protein F26K9.90 - Arabidopsis
  misc_feature (1)..(361): Homolog of NCBI NO: 22331906 NR Description: glycosyltransferase family 8 [Arabidopsis
MLWIMRFSGLFSAALVIIVLSPSLQSFPPAEAIRSSHLDAYLRFPSSDPPPHRFSFRKAPVFRNAADCAAADIDSGVCNPSLVHVAITLDFEYLRGSIAAVHSILKHSSCPESVFFHFLVSETDLESLIRSTFPELKLKVYYFDPEIVRTLISTSVRQALEQPLNYARNYLADLLEPCVRRVIYLDSDLIVVDDIAKLWMTKLGSKTIGAPEYCHANFTKYFTPAFWSDERFSGAFSGRKPCYFNTGVMVMDLERWRRVGYTEVIEKWMEIQKSDRIYELGSLPPFLLVFAGEVAPIEHRWNQHGLGGDNVRGSCRDLHPGPVSLLHWSGSGKPWFRLDSRRPCPLDTLWAPYDLYGHYSR

SEQ ID NO: 39816 - protein, 357 aa, Arabidopsis thaliana
  peptide (1)..(357): Ceres Seq. ID no. 13488815
  misc_feature (51)..(356): Homolog of NCBI NO: 18391493 NR Description: glycosyltransferase family 8 [Arabidopsis
  misc_feature (11)..(352): Homolog of NCBI NO: 12003394 NR Description: Avr9/Cf-9 rapidly elicited protein 231 [Nicotiana
  misc_feature (52)..(354): Homolog of NCBI NO: 15221684 NR Description: glycosyltransferase family 8 [Arabidopsis
  misc_feature (51)..(354): Homolog of NCBI NO: 18409445 NR Description: glycosyltransferase family 8 [Arabidopsis
  misc_feature (1)..(323): Homolog of NCBI NO: 20258800 NR Description: putative glycosyl transferase [Arabidopsis
  misc_feature (1)..(354): Homolog of NCBI NO: 21554300 NR Description: putative glycosyl transferase [Arabidopsis
  misc_feature (1)..(354): Homolog of NCBI NO: 15235247 NR Description: glycosyltransferase family 8 [Arabidopsis
  misc_feature (1)..(354): Homolog of NCBI NO: 15217851 NR Description: glycosyltransferase family 8 [Arabidopsis
  misc_feature (1)..(357): Homolog of NCBI NO: 11281926 NR Description: hypothetical protein F26K9.90 - Arabidopsis
  misc_feature (1)..(357): Homolog of NCBI NO: 22331906 NR Description: glycosyltransferase family 8 [Arabidopsis
MRFSGLFSAALVIIVLSPSLQSFPPAEAIRSSHLDAYLRFPSSDPPPHRFSFRKAPVFRNAADCAAADIDSGVCNPSLVHVAITLDFEYLRGSIAAVHSILKHSSCPESVFFHFLVSETDLESLIRSTFPELKLKVYYFDPEIVRTLISTSVRQALEQPLNYARNYLADLLEPCVRRVIYLDSDLIVVDDIAKLWMTKLGSKTIGAPEYCHANFTKYFTPAFWSDERFSGAFSGRKPCYFNTGVMVMDLERWRRVGYTEVIEKWMEIQKSDRIYELGSLPPFLLVFAGEVAPIEHRWNQHGLGGDNVRGSCRDLHPGPVSLLHWSGSGKPWFRLDSRRPCPLDTLWAPYDLYGHYSR

SEQ ID NO: 39817 - DNA, 1565 bp, Arabidopsis thaliana
  misc_feature (1)..(1565): Ceres Seq. ID no. 12330249
  misc_feature: MA Experiment ID: 20000184 Result: Down-regulated in Transcription
  misc_feature: MA Experiment 20000184 PARAMETER Experiment Name: At_Shoots__P Parameter: Age (day) Value: 7
  misc_feature: MA Experiment 20000184 PARAMETER Experiment Name: At_Shoots__P Parameter: Tissue Value: Shoots vs. Whole Plant
  misc_feature: MA Experiment ID: 20000234 Result: Down-regulated in Transcription
  misc_feature: MA Experiment 20000234 PARAMETER Experiment Name: At_Siliques_P Parameter: Age (day) Value: 21
  misc_feature: MA Experiment 20000234 PARAMETER Experiment Name: At_Siliques_P Parameter: Organism Value: A. thaliana
  misc_feature: MA Experiment 20000234 PARAMETER Experiment Name: At_Siliques_P Parameter: Plant Line Value: WS
  misc_feature: MA Experiment 20000234 PARAMETER Experiment Name: At_Siliques_P Parameter: Tissue Value: Less Than 5mm Siliques vs. Whole Plant
  misc_feature: MA Experiment ID: 20000265 Result: Down-regulated in Transcription
  misc_feature: MA Experiment 20000265 PARAMETER Experiment Name: At_Open_Flower_P Parameter: Age (day) Value: 21
  misc_feature: MA Experiment 20000265 PARAMETER Experiment Name: At_Open_Flower_P Parameter: Plant Line Value: WS
  misc_feature: MA Experiment 20000265 PARAMETER Experiment Name: At_Open_Flower_P Parameter: Tissue Value: Closed Flower vs. Whole Plant
  misc_feature: MA Experiment ID: 20000794 Result: Up-regulated in Transcription
  misc_feature: MA Experiment 20000794 PARAMETER Experiment Name: At_Petals_P Parameter: Age (day) Value: 23-25 days
  misc_feature: MA Experiment 20000794 PARAMETER Experiment Name: At_Petals_P Parameter: Plant Line Value: WS
  misc_feature: MA Experiment 20000794 PARAMETER Experiment Name: At_Petals_P Parameter: Tissue Value: Petals vs. Whole plant
  misc_feature: MA Experiment ID: 20001558 Result: Down-regulated in Transcription
  misc_feature: MA Experiment 20001558 PARAMETER Experiment Name: At_Drought_Soil_Dry_P Parameter: Age (day) Value: 27
  misc_feature: MA Experiment 20001558 PARAMETER Experiment Name: At_Drought_Soil_Dry_P Parameter: Organism Value: A. thaliana
  misc_feature: MA Experiment 20001558 PARAMETER Experiment Name: At_Drought_Soil_Dry_P Parameter: Plant Line Value: WS
  misc_feature: MA Experiment 20001558 PARAMETER Experiment Name: At_Drought_Soil_Dry_P Parameter: Post Timepoint (hr) Value: 6
  misc_feature: MA Experiment 20001558 PARAMETER Experiment Name: At_Drought_Soil_Dry_P Parameter: Post-Treatment Value: Re-Water vs. No Drought
  misc_feature: MA Experiment 20001558 PARAMETER Experiment Name: At_Drought_Soil_Dry_P Parameter: Timepoint (day) Value: 13
  misc_feature: MA Experiment 20001558 PARAMETER Experiment Name: At_Drought_Soil_Dry_P Parameter: Treatment Value: Drought vs. No Drought
  misc_feature: MA Experiment ID: 20001560 Result: Down-regulated in Transcription
  misc_feature: MA Experiment 20001560 PARAMETER Experiment Name: At_Drought_Soil_Dry_P Parameter: Age (day) Value: 28
  misc_feature: MA Experiment 20001560 PARAMETER Experiment Name: At_Drought_Soil_Dry_P Parameter: Organism Value: A. thaliana
  misc_feature: MA Experiment 20001560 PARAMETER Experiment Name: At_Drought_Soil_Dry_P Parameter: Plant Line Value: WS
  misc_feature: MA Experiment 20001560 PARAMETER Experiment Name: At_Drought_Soil_Dry_P Parameter: Post Timepoint (hr) Value: None
  misc_feature: MA Experiment 20001560 PARAMETER Experiment Name: At_Drought_Soil_Dry_P Parameter: Post-Treatment Value: None
  misc_feature: MA Experiment 20001560 PARAMETER Experiment Name: At_Drought_Soil_Dry_P Parameter: Timepoint (day) Value: 14
  misc_feature: MA Experiment 20001560 PARAMETER Experiment Name: At_Drought_Soil_Dry_P Parameter: Treatment Value: Drought vs. No Drought
acttgaatagagatcattcgtatttcatcgacgtttctaattcgcaatcacaattgttttcttcaaggaattggtttgcttgctttgatcctcagttttgtcaaaggtcttttttttttttttcctggacttgctaaaatctcttgtggcttttgctctgatacttgttagtttgggtttcgtgagtctcgctttataaaggatatgggacaaaagagatggttcttcttgttggcaatttttgtttgtcttgtttcatcttcatgtgttagagttctcaagtttaagagcgatgatggtcgacctgtgtacaatcatacgcttgccatcacacttgtggagtatacttctgcggtctatatgtctgatttgtcagaactcttcacttggacatgcgaaagatgcaatggtttgacaaagggttttgaggtaatagagataatagttgacgttgagcactgcttacaggcatatgttggggtggctaaggatttgaatgctatcattattgcatttcggggaactcaagaacaccatacaaaattgggtctcagacttgttctggaaacagctcgatctaaattaccctgatatgcaagatgcaatggtgcaccatggcttttatagtgcttatcacaatacaactgtacggcctgcagttttggatgcagtaaaacgagcaaaggaatcctatggggccaacctcaacatcatggtgactggtcattcaatgggaggagccatggcttccttttgtgcgctagacctagttgttaatgaaggagaagaaaacgtacaagttatgacatttgggcaacctcgtgttgggaatgctgcttttgcatcttatttcaatttgcttgtgcctaataccttccggatcatacatgaccatgacatagttcctcatctgcctccttactatcatcttttccctcaaaaaacatatcaccacttccccacagaggtgtggttgacagaactaagtattttgaatattgttatccgtggtgtggaaaaagtttgtgacaacaccggtgaagatcctacatgcagcagatcggtaatgggaaatagcatatctgaccatttaacgtactttggagtggaattgatgggtgagacttggaggcaatgtaacatagtgatgggccatgagatggagagttacagtaggaaagattcaaagggtaacatattcctttcgcggacagttccttccacggaggtaatcaaaacaaaaagtatatccaaaaccggaatctcaagtctataggagttggttgattcgagactcgaacaagaatgcttgcttgaaagggaggttgggagattcaaatgtgcaggaagaagaagggttctttcattctttgtggtcgtcaaagaaagtgaaacaaatgacaatcaagacattgtaaataagtcgtaggttgataccataataccatgtagcaaaaacaatacactgttcatttgttattcccttaatttaaatccatgatcacatatgtattggattcaaccttgtaaatatgtgaatgaatatccaattgctgtggatggtt

SEQ ID NO: 39818 - protein, 259 aa, Arabidopsis thaliana
  peptide (1)..(259): Ceres Seq. ID no. 12330250
  misc_feature (12)..(204): Homolog of NCBI NO: 230348 NR Description: Triacylglycerol Acylhydrolase (E.C.3.1.1.3)
  misc_feature (14)..(204): Homolog of NCBI NO: 21166167 NR Description: triacylglycerol lipase-like protein
  misc_feature (8)..(238): Homolog of NCBI NO: 34907212 NR Description: P0492G09.26 [Oryza sativa (japonica
  misc_feature (11)..(250): Homolog of NCBI NO: 34899296 NR Description: putative triacylglycerol lipase
  misc_feature (8)..(250): Homolog of NCBI NO: 34395192 NR Description: putative triacylglycerol lipase
  misc_feature (8)..(238): Homolog of NCBI NO: 21425571 NR Description: triacylglycerol lipase [Triticum aestivum]
  misc_feature (8)..(238): Homolog of NCBI NO: 21425569 NR Description: triacylglycerol Lipase [Triticum aestivum]
  misc_feature (8)..(188): Homolog of NCBI NO: 30686925 NR Description: lipase (class 3) family [Arabidopsis thaliana]
  misc_feature (8)..(259): Homolog of NCBI NO: 18418946 NR Description: triacylglycerol lipase-like protein
  misc_feature (8)..(259): Homolog of NCBI NO: 15238889 NR Description: triacylglycerol lipase-like protein; protein id:
MLSLLHFGELKNTIQNWVSDLFWKQLDLNYPDMQDAMVHHGFYSAYHNTTVRPAVLDAVKRAKESYGANLNIMVTGHSMGGAMASFCALDLVVNEGEENVQVMTFGQPRVGNAAFASYFNLLVPNTFRIIHDHDIVPHLPPYYHLFPQKTYHHFPTEVWLTELSILNIVIRGVEKVCDNTGEDPTCSRSVMGNSISDHLTYFGVELMGETWRQCNIVMGHEMESYSRKDSKGNIFLSRTVPSTEVIKTKSISKTGISSL

SEQ ID NO: 39819 - protein, 227 aa, Arabidopsis thaliana
  peptide (1)..(227): Ceres Seq. ID no. 12330251
  misc_feature (1)..(172): Homolog of NCBI NO: 230348 NR Description: Triacylglycerol Acylhydrolase (E.C.3.1.1.3)
  misc_feature (1)..(172): Homolog of NCBI NO: 21166167 NR Description: triacylglycerol lipase-like protein
  misc_feature (1)..(206): Homolog of NCBI NO: 34907212 NR Description: P0492G09.26 [Oryza sativa (japonica
  misc_feature (1)..(218): Homolog of NCBI NO: 34899296 NR Description: putative triacylglycerol lipase
  misc_feature (1)..(218): Homolog of NCBI NO: 34395192 NR Description: putative triacylglycerol lipase
  misc_feature (1)..(206): Homolog of NCBI NO: 21425571 NR Description: triacylglycerol lipase [Triticum aestivum]
  misc_feature (1)..(206): Homolog of NCBI NO: 21425569 NR Description: triacylglycerol Lipase [Triticum aestivum]
  misc_feature (1)..(156): Homolog of NCBI NO: 30686925 NR Description: lipase (class 3) family [Arabidopsis thaliana]
  misc_feature (1)..(227): Homolog of NCBI NO: 18418946 NR Description: triacylglycerol lipase-like protein
  misc_feature (1)..(227): Homolog of NCBI NO: 15238889 NR Description: triacylglycerol lipase-like protein; protein id:
MQDAMVHHGFYSAYHNTTVRPAVLDAVKRAKESYGANLNIMVTGHSMGGAMASFCALDLVVNEGEENVQVMTFGQPRVGNAAFASYFNLLVPNTFRIIHDHDIVPHLPPYYHLFPQKTYHHFPTEVWLTELSILNIVIRGVEKVCDNTGEDPTCSRSVMGNSISDHLTYFGVELMGETWRQCNIVMGHEMESYSRKDSKGNIFLSRTVPSTEVIKTKSISKTGISSL

SEQ ID NO: 39820 - protein, 223 aa, Arabidopsis thaliana
  peptide (1)..(223): Ceres Seq. ID no. 12330252
  misc_feature (1)..(168): Homolog of NCBI NO: 230348 NR Description: Triacylglycerol Acylhydrolase (E.C.3.1.1.3)
  misc_feature (1)..(168): Homolog of NCBI NO: 21166167 NR Description: triacylglycerol lipase-like protein
  misc_feature (1)..(202): Homolog of NCBI NO: 34907212 NR Description: P0492G09.26 [Oryza sativa (japonica
  misc_feature (1)..(214): Homolog of NCBI NO: 34899296 NR Description: putative triacylglycerol lipase
  misc_feature (1)..(214): Homolog of NCBI NO: 34395192 NR Description: putative triacylglycerol lipase
  misc_feature (1)..(202): Homolog of NCBI NO: 21425571 NR Description: triacylglycerol lipase [Triticum aestivum]
  misc_feature (1)..(202): Homolog of NCBI NO: 21425569 NR Description: triacylglycerol Lipase [Triticum aestivum]
  misc_feature (1)..(152): Homolog of NCBI NO: 30686925 NR Description: lipase (class 3) family [Arabidopsis thaliana]
  misc_feature (1)..(223): Homolog of NCBI NO: 18418946 NR Description: triacylglycerol lipase-like protein
  misc_feature (1)..(223): Homolog of NCBI NO: 15238889 NR Description: triacylglycerol lipase-like protein; protein id:
MVHHGFYSAYHNTTVRPAVLDAVKRAKESYGANLNIMVTGHSMGGAMASFCALDLVVNEGEENVQVMTFGQPRVGNAAFASYFNLLVPNTFRIIHDHDIVPHLPPYYHLFPQKTYHHFPTEVWLTELSILNIVIRGVEKVCDNTGEDPTCSRSVMGNSISDHLTYFGVELMGETWRQCNIVMGHEMESYSRKDSKGNIFLSRTVPSTEVIKTKSISKTGISSL

SEQ ID NO: 39821 - DNA, 1138 bp, Arabidopsis thaliana
  misc_feature (1)..(1138): Ceres Seq. ID no. 12329720
  misc_feature: MA Experiment ID: 108434 Result: Down-regulated in Transcription
  misc_feature: MA Experiment 108434 PARAMETER Experiment Name: At_Root_Tips_cDNA_P Parameter: Tissue Value: Root Tips
  misc_feature: MA Experiment ID: 108461 Result: Up-regulated in Transcription
  misc_feature: MA Experiment 108461 PARAMETER Experiment Name: At_Germinating_Seeds_cDNA_P Parameter: Age (day) Value: 1 vs. 0
  misc_feature: MA Experiment 108461 PARAMETER Experiment Name: At_Germinating_Seeds_cDNA_P Parameter: Tissue Value: Germinating Seeds
  misc_feature: MA Experiment ID: 108462 Result: Up-regulated in Transcription
  misc_feature: MA Experiment 108462 PARAMETER Experiment Name: At_Germinating_Seeds_cDNA_P Parameter: Age (day) Value: 2 vs. 0
  misc_feature: MA Experiment 108462 PARAMETER Experiment Name: At_Germinating_Seeds_cDNA_P Parameter: Tissue Value: Germinating Seeds
  misc_feature: MA Experiment ID: 108463 Result: Up-regulated in Transcription
  misc_feature: MA Experiment 108463 PARAMETER Experiment Name: At_Germinating_Seeds_cDNA_P Parameter: Age (day) Value: 3 vs. 0
  misc_feature: MA Experiment 108463 PARAMETER Experiment Name: At_Germinating_Seeds_cDNA_P Parameter: Tissue Value: Germinating Seeds
  misc_feature: MA Experiment ID: 108464 Result: Up-regulated in Transcription
  misc_feature: MA Experiment 108464 PARAMETER Experiment Name: At_Germinating_Seeds_cDNA_P Parameter: Age (day) Value: 4 vs. 0
  misc_feature: MA Experiment 108464 PARAMETER Experiment Name: At_Germinating_Seeds_cDNA_P Parameter: Tissue Value: Germinating Seeds
  misc_feature: MA Experiment ID: 108561 Result: Up-regulated in Transcription
  misc_feature: MA Experiment 108561 PARAMETER Experiment Name: At_100uM_ABA_cDNA_P Parameter: Timepoint (hr) Value: 6
  misc_feature: MA Experiment 108561 PARAMETER Experiment Name: At_100uM_ABA_cDNA_P Parameter: Tissue Value: Aerial
  misc_feature: MA Experiment 108561 PARAMETER Experiment Name: At_100uM_ABA_cDNA_P Parameter: Treatment Value: 100uM ABA vs. No Treatment
  misc_feature: MA Experiment ID: 108573 Result: Down-regulated in Transcription
  misc_feature: MA Experiment 108573 PARAMETER Experiment Name: At_Drought_cDNA_P Parameter: Timepoint (hr) Value: 6
  misc_feature: MA Experiment 108573 PARAMETER Experiment Name: At_Drought_cDNA_P Parameter: Tissue Value: Aerial
  misc_feature: MA Experiment 108573 PARAMETER Experiment Name: At_Drought_cDNA_P Parameter: Treatment Value: Drought vs. No Drought
  misc_feature: MA Experiment ID: 108574 Result: Up-regulated in Transcription
  misc_feature: MA Experiment 108574 PARAMETER Experiment Name: At_Wounding__cDNA_P Parameter: Timepoint (hr) Value: 1
  misc_feature: MA Experiment 108574 PARAMETER Experiment Name: At_Wounding__cDNA_P Parameter: Tissue Value: Aerial
  misc_feature: MA Experiment 108574 PARAMETER Experiment Name: At_Wounding__cDNA_P Parameter: Treatment Value: Wounding vs. No Wounding
  misc_feature: MA Experiment ID: 108579 Result: Down-regulated in Transcription
  misc_feature: MA Experiment 108579 PARAMETER Experiment Name: At_4deg_Cold_cDNA_P Parameter: Temperature (deg C) Value: 4 vs. 22
  misc_feature: MA Experiment 108579 PARAMETER Experiment Name: At_4deg_Cold_cDNA_P Parameter: Timepoint (hr) Value: 6
  misc_feature: MA Experiment 108579 PARAMETER Experiment Name: At_4deg_Cold_cDNA_P Parameter: Tissue Value: Aerial
  misc_feature: MA Experiment ID: 108595 Result: Up-regulated in Transcription
  misc_feature: MA Experiment 108595 PARAMETER Experiment Name: At_Ler-pi_Ovule_cDNA_P Parameter: Plant Line Value: null
  misc_feature: MA Experiment ID: 108607 Result: Up-regulated in Transcription
  misc_feature: MA Experiment 108607 PARAMETER Experiment Name: At_100uM_ABA_cDNA_P Parameter: Timepoint (hr) Value: 4
  misc_feature: MA Experiment 108607 PARAMETER Experiment Name: At_100uM_ABA_cDNA_P Parameter: Tissue Value: Aerial
  misc_feature: MA Experiment 108607 PARAMETER Experiment Name: At_100uM_ABA_cDNA_P Parameter: Treatment Value: 100uM ABA vs. No Treatment
  misc_feature: MA Experiment ID: 20000071 Result: Up-regulated in Transcription
  misc_feature: MA Experiment 20000071 PARAMETER Experiment Name: At_100uM_ABA_Mutants_cDNA_P Parameter: Plant Line Value: CS8104
  misc_feature: MA Experiment 20000071 PARAMETER Experiment Name: At_100uM_ABA_Mutants_cDNA_P Parameter: Timepoint (hr) Value: 6
  misc_feature: MA Experiment 20000071 PARAMETER Experiment Name: At_100uM_ABA_Mutants_cDNA_P Parameter: Tissue Value: Aerial
  misc_feature: MA Experiment 20000071 PARAMETER Experiment Name: At_100uM_ABA_Mutants_cDNA_P Parameter: Treatment Value: 100uM ABA vs. No Treatment
  misc_feature: MA Experiment ID: 20000072 Result: Up-regulated in Transcription
  misc_feature: MA Experiment 20000072 PARAMETER Experiment Name: At_100uM_ABA_Mutants_cDNA_P Parameter: Plant Line Value: CS8105
  misc_feature: MA Experiment 20000072 PARAMETER Experiment Name: At_100uM_ABA_Mutants_cDNA_P Parameter: Timepoint (hr) Value: 6
  misc_feature: MA Experiment 20000072 PARAMETER Experiment Name: At_100uM_ABA_Mutants_cDNA_P Parameter: Tissue Value: Aerial
  misc_feature: MA Experiment 20000072 PARAMETER Experiment Name: At_100uM_ABA_Mutants_cDNA_P Parameter: Treatment Value: 100uM ABA vs. No Treatment
  misc_feature: MA Experiment ID: 20000087 Result: Up-regulated in Transcription
  misc_feature: MA Experiment 20000087 PARAMETER Experiment Name: At_100uM_ABA_Mutants_cDNA_P Parameter: Plant Line Value: WS
  misc_feature: MA Experiment 20000087 PARAMETER Experiment Name: At_100uM_ABA_Mutants_cDNA_P Parameter: Timepoint (hr) Value: 6
  misc_feature: MA Experiment 20000087 PARAMETER Experiment Name: At_100uM_ABA_Mutants_cDNA_P Parameter: Tissue Value: Aerial
  misc_feature: MA Experiment 20000087 PARAMETER Experiment Name: At_100uM_ABA_Mutants_cDNA_P Parameter: Treatment Value: 100uM ABA vs. No Treatment
  misc_feature: MA Experiment ID: 20000111 Result: Down-regulated in Transcription
  misc_feature: MA Experiment 20000111 PARAMETER Experiment Name: At_42deg_Heat_cDNA_P Parameter: Temperature (deg C) Value: 42 vs. 22
  misc_feature: MA Experiment 20000111 PARAMETER Experiment Name: At_42deg_Heat_cDNA_P Parameter: Timepoint (hr) Value: 6
  misc_feature: MA Experiment 20000111 PARAMETER Experiment Name: At_42deg_Heat_cDNA_P Parameter: Tissue Value: Aerial
  misc_feature: MA Experiment ID: 20000169 Result: Up-regulated in Transcription
  misc_feature: MA Experiment 20000169 PARAMETER Experiment Name: At_100uM_ABA_P Parameter: Age (day) Value: 14
  misc_feature: MA Experiment 20000169 PARAMETER Experiment Name: At_100uM_ABA_P Parameter: Organism Value: A. thaliana
  misc_feature: MA Experiment 20000169 PARAMETER Experiment Name: At_100uM_ABA_P Parameter: Plant Line Value: WS
  misc_feature: MA Experiment 20000169 PARAMETER Experiment Name: At_100uM_ABA_P Parameter: Timepoint (hr) Value: 6
  misc_feature: MA Experiment 20000169 PARAMETER Experiment Name: At_100uM_ABA_P Parameter: Tissue Value: Aerial
  misc_feature: MA Experiment 20000169 PARAMETER Experiment Name: At_100uM_ABA_P Parameter: Treatment Value: 100uM ABA vs. No Treatment
  misc_feature: MA Experiment ID: 20000173 Result: Down-regulated in Transcription
  misc_feature: MA Experiment 20000173 PARAMETER Experiment Name: At_42deg_Heat_P Parameter: Age (day) Value: 14
  misc_feature: MA Experiment 20000173 PARAMETER Experiment Name: At_42deg_Heat_P Parameter: Organism Value: A. thaliana
  misc_feature: MA Experiment 20000173 PARAMETER Experiment Name: At_42deg_Heat_P Parameter: Plant Line Value: WS
  misc_feature: MA Experiment 20000173 PARAMETER Experiment Name: At_42deg_Heat_P Parameter: Temperature (deg C) Value: 42 vs. 22
  misc_feature: MA Experiment 20000173 PARAMETER Experiment Name: At_42deg_Heat_P Parameter: Timepoint (hr) Value: 6
  misc_feature: MA Experiment 20000173 PARAMETER Experiment Name: At_42deg_Heat_P Parameter: Tissue Value: Aerial
  misc_feature: MA Experiment ID: 20000179 Result: Up-regulated in Transcription
  misc_feature: MA Experiment 20000179 PARAMETER Experiment Name: At_Germinating_Seeds_P Parameter: Age (hr) Value: 6 vs. 0
  misc_feature: MA Experiment 20000179 PARAMETER Experiment Name: At_Germinating_Seeds_P Parameter: Tissue Value: Germinating Seeds
  misc_feature: MA Experiment ID: 20000180 Result: Up-regulated in Transcription
  misc_feature: MA Experiment 20000180 PARAMETER Experiment Name: At_Germinating_Seeds_P Parameter: Age (hr) Value: 24 vs. 0
  misc_feature: MA Experiment 20000180 PARAMETER Experiment Name: At_Germinating_Seeds_P Parameter: Tissue Value: Germinating Seeds
  misc_feature: MA Experiment ID: 20000227 Result: Down-regulated in Transcription
  misc_feature: MA Experiment 20000227 PARAMETER Experiment Name: At_Root-Tips-vs-Tops_P Parameter: Tissue Value: Root Tips vs. Root Tops
  misc_feature: MA Experiment ID: 20000234 Result: Down-regulated in Transcription
  misc_feature: MA Experiment 20000234 PARAMETER Experiment Name: At_Siliques_P Parameter: Age (day) Value: 21
  misc_feature: MA Experiment 20000234 PARAMETER Experiment Name: At_Siliques_P Parameter: Organism Value: A. thaliana
  misc_feature: MA Experiment 20000234 PARAMETER Experiment Name: At_Siliques_P Parameter: Plant Line Value: WS
  misc_feature: MA Experiment 20000234 PARAMETER Experiment Name: At_Siliques_P Parameter: Tissue Value: Less Than 5mm Siliques vs. Whole Plant
  misc_feature: MA Experiment ID: 20000265 Result: Down-regulated in Transcription
  misc_feature: MA Experiment 20000265 PARAMETER Experiment Name: At_Open_Flower_P Parameter: Age (day) Value: 21
  misc_feature: MA Experiment 20000265 PARAMETER Experiment Name: At_Open_Flower_P Parameter: Plant Line Value: WS
  misc_feature: MA Experiment 20000265 PARAMETER Experiment Name: At_Open_Flower_P Parameter: Tissue Value: Closed Flower vs. Whole Plant
  misc_feature: MA Experiment ID: 20000439 Result: Up-regulated in Transcription
  misc_feature: MA Experiment 20000439 PARAMETER Experiment Name: At_Roots__P Parameter: Age (day) Value: 14 vs. 21
  misc_feature: MA Experiment 20000439 PARAMETER Experiment Name: At_Roots__P Parameter: Organism Value: A. thaliana
  misc_feature: MA Experiment 20000439 PARAMETER Experiment Name: At_Roots__P Parameter: Tissue Value: Roots vs. Whole Plant
  misc_feature: MA Experiment ID: 20001247 Result: Down-regulated in Transcription
  misc_feature: MA Experiment 20001247 PARAMETER Experiment Name: At_Far-red-induction_P Parameter: Age (day) Value: 7
  misc_feature: MA Experiment 20001247 PARAMETER Experiment Name: At_Far-red-induction_P Parameter: Light Value: Far-red vs. White
  misc_feature: MA Experiment 20001247 PARAMETER Experiment Name: At_Far-red-induction_P Parameter: Organism Value: A. thaliana
  misc_feature: MA Experiment 20001247 PARAMETER Experiment Name: At_Far-red-induction_P Parameter: Plant Line Value: Columbia
  misc_feature: MA Experiment 20001247 PARAMETER Experiment Name: At_Far-red-induction_P Parameter: Timepoint (hr) Value: 1
  misc_feature: MA Experiment 20001247 PARAMETER Experiment Name: At_Far-red-induction_P Parameter: Tissue Value: Whole Plant
  misc_feature: MA Experiment ID: 20001248 Result: Down-regulated in Transcription
  misc_feature: MA Experiment 20001248 PARAMETER Experiment Name: At_Far-red-induction_P Parameter: Age (day) Value: 7
  misc_feature: MA Experiment 20001248 PARAMETER Experiment Name: At_Far-red-induction_P Parameter: Light Value: Far-red vs. White
  misc_feature: MA Experiment 20001248 PARAMETER Experiment Name: At_Far-red-induction_P Parameter: Organism Value: A. thaliana
  misc_feature: MA Experiment 20001248 PARAMETER Experiment Name: At_Far-red-induction_P Parameter: Plant Line Value: Columbia
  misc_feature: MA Experiment 20001248 PARAMETER Experiment Name: At_Far-red-induction_P Parameter: Timepoint (hr) Value: 4
  misc_feature: MA Experiment 20001248 PARAMETER Experiment Name: At_Far-red-induction_P Parameter: Tissue Value: Whole Plant
  misc_feature: MA Experiment ID: 20001557 Result: Down-regulated in Transcription
  misc_feature: MA Experiment 20001557 PARAMETER Experiment Name: At_Drought_Soil_Dry_P Parameter: Age (day) Value: 27
  misc_feature: MA Experiment 20001557 PARAMETER Experiment Name: At_Drought_Soil_Dry_P Parameter: Organism Value: A. thaliana
  misc_feature: MA Experiment 20001557 PARAMETER Experiment Name: At_Drought_Soil_Dry_P Parameter: Plant Line Value: WS
  misc_feature: MA Experiment 20001557 PARAMETER Experiment Name: At_Drought_Soil_Dry_P Parameter: Post Timepoint (hr) Value: 3
  misc_feature: MA Experiment 20001557 PARAMETER Experiment Name: At_Drought_Soil_Dry_P Parameter: Post-Treatment Value: Re-Water vs. No Drought
  misc_feature: MA Experiment 20001557 PARAMETER Experiment Name: At_Drought_Soil_Dry_P Parameter: Timepoint (day) Value: 13
  misc_feature: MA Experiment 20001557 PARAMETER Experiment Name: At_Drought_Soil_Dry_P Parameter: Treatment Value: Drought vs. No Drought
  misc_feature: MA Experiment ID: 20001558 Result: Down-regulated in Transcription
  misc_feature: MA Experiment 20001558 PARAMETER Experiment Name: At_Drought_Soil_Dry_P Parameter: Age (day) Value: 27
  misc_feature: MA Experiment 20001558 PARAMETER Experiment Name: At_Drought_Soil_Dry_P Parameter: Organism Value: A. thaliana
  misc_feature: MA Experiment 20001558 PARAMETER Experiment Name: At_Drought_Soil_Dry_P Parameter: Plant Line Value: WS
  misc_feature: MA Experiment 20001558 PARAMETER Experiment Name: At_Drought_Soil_Dry_P Parameter: Post Timepoint (hr) Value: 6
  misc_feature: MA Experiment 20001558 PARAMETER Experiment Name: At_Drought_Soil_Dry_P Parameter: Post-Treatment Value: Re-Water vs. No Drought
  misc_feature: MA Experiment 20001558 PARAMETER Experiment Name: At_Drought_Soil_Dry_P Parameter: Timepoint (day) Value: 13
  misc_feature: MA Experiment 20001558 PARAMETER Experiment Name: At_Drought_Soil_Dry_P Parameter: Treatment Value: Drought vs. No Drought
  misc_feature: MA Experiment ID: 20001911 Result: Down-regulated in Transcription
  misc_feature: MA Experiment 20001911 PARAMETER Experiment Name: At_Drought_Reproduction_P Parameter: Age (day) Value: 40
  misc_feature: MA Experiment 20001911 PARAMETER Experiment Name: At_Drought_Reproduction_P Parameter: Organism Value: A. thaliana
  misc_feature: MA Experiment 20001911 PARAMETER Experiment Name: At_Drought_Reproduction_P Parameter: Plant Line Value: WS
  misc_feature: MA Experiment 20001911 PARAMETER Experiment Name: At_Drought_Reproduction_P Parameter: Timepoint (day) Value: 10
  misc_feature: MA Experiment 20001911 PARAMETER Experiment Name: At_Drought_Reproduction_P Parameter: Tissue Value: Flowers
  misc_feature: MA Experiment 20001911 PARAMETER Experiment Name: At_Drought_Reproduction_P Parameter: Treatment Value: Drought vs. No Drought
actacatcttctctctcttcttcgctcattctctcttcctcatatatttccaaaacaatacctttcttcttctctcttcagaagaaacgagagattcgagtgatgttttatgaactactactagtgtttttttccgtgaagtaaagagaaacggtaactttttctatttgttttcaagaaaagccaaagaaaaaaagaatttttaatatactctgttttttgcaatgattttgttttgtgaaatttttctcggagaagaaagtaatttagaagacggagagtggcaaaacgaaatataaaaaaaaaagttttcaatttcttttaagaaaaaaaaaaagctttttcccttcttaaaacccttcctctgtttcagaaacagagacataagaagaaaatagatcacaagctaattgcgttctcttctcttcttcttctactgggttttaaaatcaagaaaccatgtctgcaagtgttctaagtgatccaacaatgttaatttcaacaccagaggtaatactcgtttcgccggtgccggttactcaaatctccggagatgagccagattcggtaacttgtgactgttgcggattaaccgaggagtgtacacaatcgtacatagagatgatcagagagcgttacatggggaaatggatctgtgggctttgttctgaagctgtgaagtatgaagtcatgagaactaaacgattgttaacgacagaagaagccatggcaagacacatgaacatgtgtaataagttcaaatcctcaagcccaccaccgaatccgacaggacatttgatctctgcgatgagacagatcttgagaagaagcttagattcaccaagaatgcttagatctatgcctaatagcccatctaaagacgaccaagatcatcatcatgattgtgtttctaatgttttgtctaggtccgatagctgtttcgctagtttgacttgaaaaaaactcatcgttgaaaaaattgttttaaaccgtcggtttagggacccacttggatcaaatccggttttctgatttgaaattttcgtcggtaaatcaaaaattggtttctgtatgtgtttttgccggatttgttgttgtacttgtggaaaattttgggctaaaagaataatttggtgcc

SEQ ID NO: 39822 - protein, 165 aa, Arabidopsis thaliana
  peptide (1)..(165): Ceres Seq. ID no. 12329721
  misc_feature (35)..(165): Homolog of NCBI NO: 34903632 NR Description: B1046G12.23 [Oryza sativa (japonica
  misc_feature (5)..(124): Homolog of NCBI NO: 34909436 NR Description: OSJNBa0014K08.12 [Oryza sativa (japonica
  misc_feature (29)..(165): Homolog of NCBI NO: 25405692 NR Description: F15I1.18 [imported] - Arabidopsis thaliana
  misc_feature (24)..(165): Homolog of NCBI NO: 30695655 NR Description: expressed protein [Arabidopsis thaliana]
  misc_feature (33)..(123): Homolog of NCBI NO: 15228776 NR Description: hypothetical protein; protein id: At3g22540.1
  misc_feature (37)..(141): Homolog of NCBI NO: 23237920 NR Description: hypothetical protein~predicted by FGENESH etc.
  misc_feature (36)..(165): Homolog of NCBI NO: 21554329 NR Description: unknown [Arabidopsis thaliana]
  misc_feature (35)..(165): Homolog of NCBI NO: 15242032 NR Description: putative protein
  misc_feature (1)..(165): Homolog of NCBI NO: 15226673 NR Description: unknown protein; protein id: At2g09970.1
  misc_feature (1)..(165): Homolog of NCBI NO: 15218503 NR Description: unknown protein; protein id: At1g72510.1
MSASVLSDPTMLISTPEVILVSPVPVTQISGDEPDSVTCDCCGLTEECTQSYIEMIRERYMGKWICGLCSEAVKYEVMRTKRLLTTEEAMARHMNMCNKFKSSSPPPNPTGHLISAMRQILRRSLDSPRMLRSMPNSPSKDDQDHHHDCVSNVLSRSDSCFASLT

SEQ ID NO: 39823 - protein, 155 aa, Arabidopsis thaliana
  peptide (1)..(155): Ceres Seq. ID no. 12329722
  misc_feature (25)..(155): Homolog of NCBI NO: 34903632 NR Description: B1046G12.23 [Oryza sativa (japonica
  misc_feature (1)..(114): Homolog of NCBI NO: 34909436 NR Description: OSJNBa0014K08.12 [Oryza sativa (japonica
  misc_feature (19)..(155): Homolog of NCBI NO: 25405692 NR Description: F15I1.18 [imported] - Arabidopsis thaliana
  misc_feature (14)..(155): Homolog of NCBI NO: 30695655 NR Description: expressed protein [Arabidopsis thaliana]
  misc_feature (23)..(113): Homolog of NCBI NO: 15228776 NR Description: hypothetical protein; protein id: At3g22540.1
  misc_feature (27)..(131): Homolog of NCBI NO: 23237920 NR Description: hypothetical protein~predicted by FGENESH etc.
  misc_feature (26)..(155): Homolog of NCBI NO: 21554329 NR Description: unknown [Arabidopsis thaliana]
  misc_feature (25)..(155): Homolog of NCBI NO: 15242032 NR Description: putative protein
  misc_feature (1)..(155): Homolog of NCBI NO: 15226673 NR Description: unknown protein; protein id: At2g09970.1
  misc_feature (1)..(155): Homolog of NCBI NO: 15218503 NR Description: unknown protein; protein id: At1g72510.1
MLISTPEVILVSPVPVTQISGDEPDSVTCDCCGLTEECTQSYIEMIRERYMGKWICGLCSEAVKYEVMRTKRLLTTEEAMARHMNMCNKFKSSSPPPNPTGHLISAMRQILRRSLDSPRMLRSMPNSPSKDDQDHHHDCVSNVLSRSDSCFASLT

SEQ ID NO: 39824 - protein, 111 aa, Arabidopsis thaliana
  peptide (1)..(111): Ceres Seq. ID no. 12329723
  misc_feature (1)..(111): Homolog of NCBI NO: 34903632 NR Description: B1046G12.23 [Oryza sativa (japonica
  misc_feature (1)..(70): Homolog of NCBI NO: 34909436 NR Description: OSJNBa0014K08.12 [Oryza sativa (japonica
  misc_feature (1)..(111): Homolog of NCBI NO: 25405692 NR Description: F15I1.18 [imported] - Arabidopsis thaliana
  misc_feature (1)..(111): Homolog of NCBI NO: 30695655 NR Description: expressed protein [Arabidopsis thaliana]
  misc_feature (1)..(69): Homolog of NCBI NO: 15228776 NR Description: hypothetical protein; protein id: At3g22540.1
  misc_feature (1)..(87): Homolog of NCBI NO: 23237920 NR Description: hypothetical protein~predicted by FGENESH etc.
  misc_feature (1)..(111): Homolog of NCBI NO: 21554329 NR Description: unknown [Arabidopsis thaliana]
  misc_feature (1)..(111): Homolog of NCBI NO: 15242032 NR Description: putative protein
  misc_feature (1)..(111): Homolog of NCBI NO: 15226673 NR Description: unknown protein; protein id: At2g09970.1
  misc_feature (1)..(111): Homolog of NCBI NO: 15218503 NR Description: unknown protein; protein id: At1g72510.1
MIRERYMGKWICGLCSEAVKYEVMRTKRLLTTEEAMARHMNMCNKFKSSSPPPNPTGHLISAMRQILRRSLDSPRMLRSMPNSPSKDDQDHHHDCVSNVLSRSDSCFASLT

SEQ ID NO: 39825 - DNA, 1170 bp, Arabidopsis thaliana
  misc_feature (1)..(1170): Ceres Seq. ID no. 12370981
  misc_feature: MA Experiment ID: 108579 Result: Down-regulated in Transcription
  misc_feature: MA Experiment 108579 PARAMETER Experiment Name: At_4deg_Cold_cDNA_P Parameter: Temperature (deg C) Value: 4 vs. 22
  misc_feature: MA Experiment 108579 PARAMETER Experiment Name: At_4deg_Cold_cDNA_P Parameter: Timepoint (hr) Value: 6
  misc_feature: MA Experiment 108579 PARAMETER Experiment Name: At_4deg_Cold_cDNA_P Parameter: Tissue Value: Aerial
  misc_feature: MA Experiment ID: 20000214 Result: Down-regulated in Transcription
  misc_feature: MA Experiment 20000214 PARAMETER Experiment Name: At_4deg_Cold_P Parameter: Timepoint (hr) Value: 6
  misc_feature: MA Experiment ID: 20000265 Result: Down-regulated in Transcription
  misc_feature: MA Experiment 20000265 PARAMETER Experiment Name: At_Open_Flower_P Parameter: Age (day) Value: 21
  misc_feature: MA Experiment 20000265 PARAMETER Experiment Name: At_Open_Flower_P Parameter: Plant Line Value: WS
  misc_feature: MA Experiment 20000265 PARAMETER Experiment Name: At_Open_Flower_P Parameter: Tissue Value: Closed Flower vs. Whole Plant
  misc_feature: MA Experiment ID: 20001557 Result: Down-regulated in Transcription
  misc_feature: MA Experiment 20001557 PARAMETER Experiment Name: At_Drought_Soil_Dry_P Parameter: Age (day) Value: 27
  misc_feature: MA Experiment 20001557 PARAMETER Experiment Name: At_Drought_Soil_Dry_P Parameter: Organism Value: A. thaliana
  misc_feature: MA Experiment 20001557 PARAMETER Experiment Name: At_Drought_Soil_Dry_P Parameter: Plant Line Value: WS
  misc_feature: MA Experiment 20001557 PARAMETER Experiment Name: At_Drought_Soil_Dry_P Parameter: Post Timepoint (hr) Value: 3
  misc_feature: MA Experiment 20001557 PARAMETER Experiment Name: At_Drought_Soil_Dry_P Parameter: Post-Treatment Value: Re-Water vs. No Drought
  misc_feature: MA Experiment 20001557 PARAMETER Experiment Name: At_Drought_Soil_Dry_P Parameter: Timepoint (day) Value: 13
  misc_feature: MA Experiment 20001557 PARAMETER Experiment Name: At_Drought_Soil_Dry_P Parameter: Treatment Value: Drought vs. No Drought
atctttttgtaatcgatttgcaatttcaatttcgcaaagttggatcatgggcaatgtcataagcggtggaagccgcccggaaaatcatcgggaccgtacttcgccgccgtatccaaaccctaatgctcagtaccaaggcaattatccgtcgccgtaccaagattgtgctaggtatccgtatggagagatggcgtctccagtgcaatacgtagagcatcaggaagcagtgactataaggaacgacatcaatctgaagaaagaaactttgagacttgagcctgatgaacagaaccctggcaagtttttgctctccttcacttttgacgcctctgttcctggaagcatcactgtaatgttctttgctaaagaaggcaaagactgtaaccttattgcgacaaaggaggatctttttccatccactcaagttagttttgcaaaaggtctggaacagagattcaagcaggcttgtgggacagggattgatttctcagatatgtcagaggcagatttggttgaggcaaacgagacagatgtgtatcatgtggcagtgaaagcagaggtagtatcagaagatgatcatcctgagtctgggacaccaaacagacagataactcatgtggttttagagaaagatcataagggtgagtacaaggcgagagtggtgaagcagatcctgtgggtgaatgggaataggtatgttcttcaagagatttatgggattggtaatacagttgatgataatggagaagatgcgaatgaaagaggaaaagaatgcgtcatctgcttatctgagccacgggataccactgttctcccttgcaggcacatgtgtatgtgtagcggttgtgcaaagcttttgaggtttcagacaaacctctgccccatctgtagacaaccggtggataggcttttggagataacagtgaacaacaacgacaggaactagtgagccttgctacgttactcttctcctgtttttatataaagactgcttcccaatgttcttgtttgtggtatcggtatatatgcaggcattagaactcaagttacaaacttacatatgccaaatgacacttaaattccgggttttacttccaagtgttttgtaaatcatcatgctactttgtctagcggtcttcgttgttaatgaagtgaacaacttttgcagtg

SEQ ID NO: 39826 - protein, 314 aa, Arabidopsis thaliana
  peptide (1)..(314): Ceres Seq. ID no. 12370982
  misc_feature (258)..(296): Pfam Name: Zinc finger, C3HC4 type (RING finger) Pfam Description: Zinc finger, C3HC4 type (RING finger)
  misc_feature (59)..(312): Homolog of NCBI NO: 21928149 NR Description: AT5g19080/T16G12_120 [Arabidopsis thaliana]
  misc_feature (16)..(310): Homolog of NCBI NO: 34914816 NR Description: B1045D11.20 [Oryza sativa (japonica
  misc_feature (59)..(312): Homolog of NCBI NO: 15239642 NR Description: unknown protein; protein id: At5g19080.1
  misc_feature (26)..(276): Homolog of NCBI NO: 30681003 NR Description: putative RING zinc finger protein [Arabidopsis
  misc_feature (37)..(309): Homolog of NCBI NO: 26449588 NR Description: unknown protein [Arabidopsis thaliana]
  misc_feature (37)..(309): Homolog of NCBI NO: 21618140 NR Description: putative RING zinc finger protein [Arabidopsis
  misc_feature (37)..(309): Homolog of NCBI NO: 15242675 NR Description: expressed protein
  misc_feature (40)..(310): Homolog of NCBI NO: 37532246 NR Description: putative hydroxyproline-rich glycoprotein
  misc_feature (26)..(312): Homolog of NCBI NO: 18398633 NR Description: expressed protein
  misc_feature (16)..(314): Homolog of NCBI NO: 15231808 NR Description: putative protein
SFCNRFAISISQSWIMGNVISGGSRPENHRDRTSPPYPNPNAQYQGNYPSPYQDCARYPYGEMASPVQYVEHQEAVTIRNDINLKKETLRLEPDEQNPGKFLLSFTFDASVPGSITVMFFAKEGKDCNLIATKEDLFPSTQVSFAKGLEQRFKQACGTGIDFSDMSEADLVEANETDVYHVAVKAEVVSEDDHPESGTPNRQITHVVLEKDHKGEYKARVVKQILWVNGNRYVLQEIYGIGNTVDDNGEDANERGKECVICLSEPRDTTVLPCRHMCMCSGCAKLLRFQTNLCPICRQPVDRLLEITVNNNDRN

SEQ ID NO: 39827 - protein, 299 aa, Arabidopsis thaliana
  peptide (1)..(299): Ceres Seq. ID no. 12370983
  misc_feature (243)..(281): Pfam Name: Zinc finger, C3HC4 type (RING finger) Pfam Description: Zinc finger, C3HC4 type (RING finger)
  misc_feature (44)..(297): Homolog of NCBI NO: 21928149 NR Description: AT5g19080/T16G12_120 [Arabidopsis thaliana]
  misc_feature (1)..(295): Homolog of NCBI NO: 34914816 NR Description: B1045D11.20 [Oryza sativa (japonica
  misc_feature (44)..(297): Homolog of NCBI NO: 15239642 NR Description: unknown protein; protein id: At5g19080.1
  misc_feature (11)..(261): Homolog of NCBI NO: 30681003 NR Description: putative RING zinc finger protein [Arabidopsis
  misc_feature (22)..(294): Homolog of NCBI NO: 26449588 NR Description: unknown protein [Arabidopsis thaliana]
  misc_feature (22)..(294): Homolog of NCBI NO: 21618140 NR Description: putative RING zinc finger protein [Arabidopsis
  misc_feature (22)..(294): Homolog of NCBI NO: 15242675 NR Description: expressed protein
  misc_feature (25)..(295): Homolog of NCBI NO: 37532246 NR Description: putative hydroxyproline-rich glycoprotein
  misc_feature (11)..(297): Homolog of NCBI NO: 18398633 NR Description: expressed protein
  misc_feature (1)..(299): Homolog of NCBI NO: 15231808 NR Description: putative protein
MGNVISGGSRPENHRDRTSPPYPNPNAQYQGNYPSPYQDCARYPYGEMASPVQYVEHQEAVTIRNDINLKKETLRLEPDEQNPGKFLLSFTFDASVPGSITVMFFAKEGKDCNLIATKEDLFPSTQVSFAKGLEQRFKQACGTGIDFSDMSEADLVEANETDVYHVAVKAEVVSEDDHPESGTPNRQITHVVLEKDHKGEYKARVVKQILWVNGNRYVLQEIYGIGNTVDDNGEDANERGKECVICLSEPRDTTVLPCRHMCMCSGCAKLLRFQTNLCPICRQPVDRLLEITVNNNDRN

SEQ ID NO: 39828 - protein, 252 aa, Arabidopsis thaliana
  peptide (1)..(252): Ceres Seq. ID no. 12370984
  misc_feature (196)..(234): Pfam Name: Zinc finger, C3HC4 type (RING finger) Pfam Description: Zinc finger, C3HC4 type (RING finger)
  misc_feature (1)..(250): Homolog of NCBI NO: 21928149 NR Description: AT5g19080/T16G12_120 [Arabidopsis thaliana]
  misc_feature (1)..(248): Homolog of NCBI NO: 34914816 NR Description: B1045D11.20 [Oryza sativa (japonica
  misc_feature (1)..(250): Homolog of NCBI NO: 15239642 NR Description: unknown protein; protein id: At5g19080.1
  misc_feature (1)..(214): Homolog of NCBI NO: 30681003 NR Description: putative RING zinc finger protein [Arabidopsis
  misc_feature (1)..(247): Homolog of NCBI NO: 26449588 NR Description: unknown protein [Arabidopsis thaliana]
  misc_feature (1)..(247): Homolog of NCBI NO: 21618140 NR Description: putative RING zinc finger protein [Arabidopsis
  misc_feature (1)..(247): Homolog of NCBI NO: 15242675 NR Description: expressed protein
  misc_feature (1)..(248): Homolog of NCBI NO: 37532246 NR Description: putative hydroxyproline-rich glycoprotein
  misc_feature (1)..(250): Homolog of NCBI NO: 18398633 NR Description: expressed protein
  misc_feature (1)..(252): Homolog of NCBI NO: 15231808 NR Description: putative protein
MASPVQYVEHQEAVTIRNDINLKKETLRLEPDEQNPGKFLLSFTFDASVPGSITVMFFAKEGKDCNLIATKEDLFPSTQVSFAKGLEQRFKQACGTGIDFSDMSEADLVEANETDVYHVAVKAEVVSEDDHPESGTPNRQITHVVLEKDHKGEYKARVVKQILWVNGNRYVLQEIYGIGNTVDDNGEDANERGKECVICLSEPRDTTVLPCRHMCMCSGCAKLLRFQTNLCPICRQPVDRLLEITVNNNDRN

SEQ ID NO: 39829 - DNA, 1659 bp, Arabidopsis thaliana
  misc_feature (1)..(1659): Ceres Seq. ID no. 13491257
  misc_feature: MA Experiment ID: 108434 Result: Down-regulated in Transcription
  misc_feature: MA Experiment 108434 PARAMETER Experiment Name: At_Root_Tips_cDNA_P Parameter: Tissue Value: Root Tips
  misc_feature: MA Experiment ID: 108488 Result: Down-regulated in Transcription
  misc_feature: MA Experiment ID: 108561 Result: Up-regulated in Transcription
  misc_feature: MA Experiment 108561 PARAMETER Experiment Name: At_100uM_ABA_cDNA_P Parameter: Timepoint (hr) Value: 6
  misc_feature: MA Experiment 108561 PARAMETER Experiment Name: At_100uM_ABA_cDNA_P Parameter: Tissue Value: Aerial
  misc_feature: MA Experiment 108561 PARAMETER Experiment Name: At_100uM_ABA_cDNA_P Parameter: Treatment Value: 100uM ABA vs. No Treatment
  misc_feature: MA Experiment ID: 108569 Result: Up-regulated in Transcription
  misc_feature: MA Experiment 108569 PARAMETER Experiment Name: At_0.001%_MeJA__cDNA_P Parameter: Timepoint (hr) Value: 6
  misc_feature: MA Experiment 108569 PARAMETER Experiment Name: At_0.001%_MeJA__cDNA_P Parameter: Tissue Value: Aerial
  misc_feature: MA Experiment 108569 PARAMETER Experiment Name: At_0.001%_MeJA__cDNA_P Parameter: Treatment Value: 0.001% MeJA vs. No Treatment
  misc_feature: MA Experiment ID: 108572 Result: Up-regulated in Transcription
  misc_feature: MA Experiment 108572 PARAMETER Experiment Name: At_Drought_cDNA_P Parameter: Timepoint (hr) Value: 1
  misc_feature: MA Experiment 108572 PARAMETER Experiment Name: At_Drought_cDNA_P Parameter: Tissue Value: Aerial
  misc_feature: MA Experiment 108572 PARAMETER Experiment Name: At_Drought_cDNA_P Parameter: Treatment Value: Drought vs. No Drought
  misc_feature: MA Experiment ID: 108573 Result: Up-regulated in Transcription
  misc_feature: MA Experiment 108573 PARAMETER Experiment Name: At_Drought_cDNA_P Parameter: Timepoint (hr) Value: 6
  misc_feature: MA Experiment 108573 PARAMETER Experiment Name: At_Drought_cDNA_P Parameter: Tissue Value: Aerial
  misc_feature: MA Experiment 108573 PARAMETER Experiment Name: At_Drought_cDNA_P Parameter: Treatment Value: Drought vs. No Drought
  misc_feature: MA Experiment ID: 108585 Result: Up-regulated in Transcription
  misc_feature: MA Experiment 108585 PARAMETER Experiment Name: At_5mM_NaNP_cDNA_P Parameter: Timepoint (hr) Value: 6
  misc_feature: MA Experiment 108585 PARAMETER Experiment Name: At_5mM_NaNP_cDNA_P Parameter: Tissue Value: Aerial
  misc_feature: MA Experiment 108585 PARAMETER Experiment Name: At_5mM_NaNP_cDNA_P Parameter: Treatment Value: null
  misc_feature: MA Experiment ID: 108595 Result: Down-regulated in Transcription
  misc_feature: MA Experiment 108595 PARAMETER Experiment Name: At_Ler-pi_Ovule_cDNA_P Parameter: Plant Line Value: null
  misc_feature: MA Experiment ID: 108605 Result: Up-regulated in Transcription
  misc_feature: MA Experiment 108605 PARAMETER Experiment Name: At_100uM_ABA_cDNA_P Parameter: Timepoint (hr) Value: 6
  misc_feature: MA Experiment 108605 PARAMETER Experiment Name: At_100uM_ABA_cDNA_P Parameter: Tissue Value: Aerial
  misc_feature: MA Experiment 108605 PARAMETER Experiment Name: At_100uM_ABA_cDNA_P Parameter: Treatment Value: 100uM ABA vs. No Treatment
  misc_feature: MA Experiment ID: 108607 Result: Up-regulated in Transcription
  misc_feature: MA Experiment 108607 PARAMETER Experiment Name: At_100uM_ABA_cDNA_P Parameter: Timepoint (hr) Value: 4
  misc_feature: MA Experiment 108607 PARAMETER Experiment Name: At_100uM_ABA_cDNA_P Parameter: Tissue Value: Aerial
  misc_feature: MA Experiment 108607 PARAMETER Experiment Name: At_100uM_ABA_cDNA_P Parameter: Treatment Value: 100uM ABA vs. No Treatment
  misc_feature: MA Experiment ID: 20000070 Result: Up-regulated in Transcription
  misc_feature: MA Experiment 20000070 PARAMETER Experiment Name: At_100uM_ABA_Mutants_cDNA_P Parameter: Plant Line Value: CS24
  misc_feature: MA Experiment 20000070 PARAMETER Experiment Name: At_100uM_ABA_Mutants_cDNA_P Parameter: Timepoint (hr) Value: 6
  misc_feature: MA Experiment 20000070 PARAMETER Experiment Name: At_100uM_ABA_Mutants_cDNA_P Parameter: Tissue Value: Aerial
  misc_feature: MA Experiment 20000070 PARAMETER Experiment Name: At_100uM_ABA_Mutants_cDNA_P Parameter: Treatment Value: 100uM ABA vs. No Treatment
  misc_feature: MA Experiment ID: 20000071 Result: Up-regulated in Transcription
  misc_feature: MA Experiment 20000071 PARAMETER Experiment Name: At_100uM_ABA_Mutants_cDNA_P Parameter: Plant Line Value: CS8104
  misc_feature: MA Experiment 20000071 PARAMETER Experiment Name: At_100uM_ABA_Mutants_cDNA_P Parameter: Timepoint (hr) Value: 6
  misc_feature: MA Experiment 20000071 PARAMETER Experiment Name: At_100uM_ABA_Mutants_cDNA_P Parameter: Tissue Value: Aerial
  misc_feature: MA Experiment 20000071 PARAMETER Experiment Name: At_100uM_ABA_Mutants_cDNA_P Parameter: Treatment Value: 100uM ABA vs. No Treatment
  misc_feature: MA Experiment ID: 20000072 Result: Up-regulated in Transcription
  misc_feature: MA Experiment 20000072 PARAMETER Experiment Name: At_100uM_ABA_Mutants_cDNA_P Parameter: Plant Line Value: CS8105
  misc_feature: MA Experiment 20000072 PARAMETER Experiment Name: At_100uM_ABA_Mutants_cDNA_P Parameter: Timepoint (hr) Value: 6
  misc_feature: MA Experiment 20000072 PARAMETER Experiment Name: At_100uM_ABA_Mutants_cDNA_P Parameter: Tissue Value: Aerial
  misc_feature: MA Experiment 20000072 PARAMETER Experiment Name: At_100uM_ABA_Mutants_cDNA_P Parameter: Treatment Value: 100uM ABA vs. No Treatment
  misc_feature: MA Experiment ID: 20000086 Result: Up-regulated in Transcription
  misc_feature: MA Experiment 20000086 PARAMETER Experiment Name: At_100uM_ABA_Mutants_cDNA_P Parameter: Plant Line Value: CS22
  misc_feature: MA Experiment 20000086 PARAMETER Experiment Name: At_100uM_ABA_Mutants_cDNA_P Parameter: Timepoint (hr) Value: 6
  misc_feature: MA Experiment 20000086 PARAMETER Experiment Name: At_100uM_ABA_Mutants_cDNA_P Parameter: Tissue Value: Aerial
  misc_feature: MA Experiment 20000086 PARAMETER Experiment Name: At_100uM_ABA_Mutants_cDNA_P Parameter: Treatment Value: 100uM ABA vs. No Treatment
  misc_feature: MA Experiment ID: 20000088 Result: Up-regulated in Transcription
  misc_feature: MA Experiment 20000088 PARAMETER Experiment Name: At_100uM_ABA_Mutants_cDNA_P Parameter: Plant Line Value: Landsberg
  misc_feature: MA Experiment 20000088 PARAMETER Experiment Name: At_100uM_ABA_Mutants_cDNA_P Parameter: Timepoint (hr) Value: 6
  misc_feature: MA Experiment 20000088 PARAMETER Experiment Name: At_100uM_ABA_Mutants_cDNA_P Parameter: Tissue Value: Aerial
  misc_feature: MA Experiment 20000088 PARAMETER Experiment Name: At_100uM_ABA_Mutants_cDNA_P Parameter: Treatment Value: 100uM ABA vs. No Treatment
  misc_feature: MA Experiment ID: 20000117 Result: Up-regulated in Transcription
  misc_feature: MA Experiment 20000117 PARAMETER Experiment Name: At_100uM_ABA_Mutants_cDNA_P Parameter: Plant Line Value: Columbia
  misc_feature: MA Experiment 20000117 PARAMETER Experiment Name: At_100uM_ABA_Mutants_cDNA_P Parameter: Timepoint (hr) Value: 6
  misc_feature: MA Experiment 20000117 PARAMETER Experiment Name: At_100uM_ABA_Mutants_cDNA_P Parameter: Tissue Value: Aerial
  misc_feature: MA Experiment 20000117 PARAMETER Experiment Name: At_100uM_ABA_Mutants_cDNA_P Parameter: Treatment Value: 100uM ABA vs. No Treatment
  misc_feature: MA Experiment ID: 20000169 Result: Up-regulated in Transcription
  misc_feature: MA Experiment 20000169 PARAMETER Experiment Name: At_100uM_ABA_P Parameter: Age (day) Value: 14
  misc_feature: MA Experiment 20000169 PARAMETER Experiment Name: At_100uM_ABA_P Parameter: Organism Value: A. thaliana
  misc_feature: MA Experiment 20000169 PARAMETER Experiment Name: At_100uM_ABA_P Parameter: Plant Line Value: WS
  misc_feature: MA Experiment 20000169 PARAMETER Experiment Name: At_100uM_ABA_P Parameter: Timepoint (hr) Value: 6
  misc_feature: MA Experiment 20000169 PARAMETER Experiment Name: At_100uM_ABA_P Parameter: Tissue Value: Aerial
  misc_feature: MA Experiment 20000169 PARAMETER Experiment Name: At_100uM_ABA_P Parameter: Treatment Value: 100uM ABA vs. No Treatment
  misc_feature: MA Experiment ID: 20000184 Result: Down-regulated in Transcription
  misc_feature: MA Experiment 20000184 PARAMETER Experiment Name: At_Shoots__P Parameter: Age (day) Value: 7
  misc_feature: MA Experiment 20000184 PARAMETER Experiment Name: At_Shoots__P Parameter: Tissue Value: Shoots vs. Whole Plant
  misc_feature: MA Experiment ID: 20000185 Result: Down-regulated in Transcription
  misc_feature: MA Experiment 20000185 PARAMETER Experiment Name: At_Roots__P Parameter: Age (day) Value: 7 vs. 21
  misc_feature: MA Experiment 20000185 PARAMETER Experiment Name: At_Roots__P Parameter: Organism Value: A. thaliana
  misc_feature: MA Experiment 20000185 PARAMETER Experiment Name: At_Roots__P Parameter: Tissue Value: Roots vs. Whole Plant
  misc_feature: MA Experiment ID: 20000234 Result: Down-regulated in Transcription
  misc_feature: MA Experiment 20000234 PARAMETER Experiment Name: At_Siliques_P Parameter: Age (day) Value: 21
  misc_feature: MA Experiment 20000234 PARAMETER Experiment Name: At_Siliques_P Parameter: Organism Value: A. thaliana
  misc_feature: MA Experiment 20000234 PARAMETER Experiment Name: At_Siliques_P Parameter: Plant Line Value: WS
  misc_feature: MA Experiment 20000234 PARAMETER Experiment Name: At_Siliques_P Parameter: Tissue Value: Less Than 5mm Siliques vs. Whole Plant
  misc_feature: MA Experiment ID: 20000235 Result: Down-regulated in Transcription
  misc_feature: MA Experiment 20000235 PARAMETER Experiment Name: At_Siliques_P Parameter: Age (day) Value: 21
  misc_feature: MA Experiment 20000235 PARAMETER Experiment Name: At_Siliques_P Parameter: Organism Value: A. thaliana
  misc_feature: MA Experiment 20000235 PARAMETER Experiment Name: At_Siliques_P Parameter: Plant Line Value: WS
  misc_feature: MA Experiment 20000235 PARAMETER Experiment Name: At_Siliques_P Parameter: Tissue Value: 5-10mm Siliques vs. Whole Plant
  misc_feature: MA Experiment ID: 20000265 Result: Down-regulated in Transcription
  misc_feature: MA Experiment 20000265 PARAMETER Experiment Name: At_Open_Flower_P Parameter: Age (day) Value: 21
  misc_feature: MA Experiment 20000265 PARAMETER Experiment Name: At_Open_Flower_P Parameter: Plant Line Value: WS
  misc_feature: MA Experiment 20000265 PARAMETER Experiment Name: At_Open_Flower_P Parameter: Tissue Value: Closed Flower vs. Whole Plant
  misc_feature: MA Experiment ID: 20000436 Result: Up-regulated in Transcription
  misc_feature: MA Experiment 20000436 PARAMETER Experiment Name: At_Drought_P Parameter: Age (day) Value: 7
  misc_feature: MA Experiment 20000436 PARAMETER Experiment Name: At_Drought_P Parameter: Organism Value: A. thaliana
  misc_feature: MA Experiment 20000436 PARAMETER Experiment Name: At_Drought_P Parameter: Plant Line Value: WS
  misc_feature: MA Experiment 20000436 PARAMETER Experiment Name: At_Drought_P Parameter: Timepoint (hr) Value: 12
  misc_feature: MA Experiment 20000436 PARAMETER Experiment Name: At_Drought_P Parameter: Tissue Value: Whole Plant
  misc_feature: MA Experiment 20000436 PARAMETER Experiment Name: At_Drought_P Parameter: Treatment Value: Drought vs. No Drought
  misc_feature: MA Experiment ID: 20000437 Result: Up-regulated in Transcription
  misc_feature: MA Experiment 20000437 PARAMETER Experiment Name: At_Drought_P Parameter: Age (day) Value: 8
  misc_feature: MA Experiment 20000437 PARAMETER Experiment Name: At_Drought_P Parameter: Organism Value: A. thaliana
  misc_feature: MA Experiment 20000437 PARAMETER Experiment Name: At_Drought_P Parameter: Plant Line Value: WS
  misc_feature: MA Experiment 20000437 PARAMETER Experiment Name: At_Drought_P Parameter: Timepoint (hr) Value: 24
  misc_feature: MA Experiment 20000437 PARAMETER Experiment Name: At_Drought_P Parameter: Tissue Value: Whole Plant
  misc_feature: MA Experiment 20000437 PARAMETER Experiment Name: At_Drought_P Parameter: Treatment Value: Drought vs. No Drought
  misc_feature: MA Experiment ID: 20000438 Result: Down-regulated in Transcription
  misc_feature: MA Experiment 20000438 PARAMETER Experiment Name: At_Shoots__P Parameter: Age (day) Value: 14
  misc_feature: MA Experiment 20000438 PARAMETER Experiment Name: At_Shoots__P Parameter: Tissue Value: Shoots vs. Whole Plant
  misc_feature: MA Experiment ID: 20000439 Result: Down-regulated in Transcription
  misc_feature: MA Experiment 20000439 PARAMETER Experiment Name: At_Roots__P Parameter: Age (day) Value: 14 vs. 21
  misc_feature: MA Experiment 20000439 PARAMETER Experiment Name: At_Roots__P Parameter: Organism Value: A. thaliana
  misc_feature: MA Experiment 20000439 PARAMETER Experiment Name: At_Roots__P Parameter: Tissue Value: Roots vs. Whole Plant
  misc_feature: MA Experiment ID: 20000453 Result: Up-regulated in Transcription
  misc_feature: MA Experiment 20000453 PARAMETER Experiment Name: At_100uM_ABA_P Parameter: Age (day) Value: 15
  misc_feature: MA Experiment 20000453 PARAMETER Experiment Name: At_100uM_ABA_P Parameter: Organism Value: A. thaliana
  misc_feature: MA Experiment 20000453 PARAMETER Experiment Name: At_100uM_ABA_P Parameter: Plant Line Value: WS
  misc_feature: MA Experiment 20000453 PARAMETER Experiment Name: At_100uM_ABA_P Parameter: Timepoint (hr) Value: 24
  misc_feature: MA Experiment 20000453 PARAMETER Experiment Name: At_100uM_ABA_P Parameter: Tissue Value: Aerial
  misc_feature: MA Experiment 20000453 PARAMETER Experiment Name: At_100uM_ABA_P Parameter: Treatment Value: 100uM ABA vs. No Treatment
  misc_feature: MA Experiment ID: 20000794 Result: Up-regulated in Transcription
  misc_feature: MA Experiment 20000794 PARAMETER Experiment Name: At_Petals_P Parameter: Age (day) Value: 23-25 days
  misc_feature: MA Experiment 20000794 PARAMETER Experiment Name: At_Petals_P Parameter: Plant Line Value: WS
  misc_feature: MA Experiment 20000794 PARAMETER Experiment Name: At_Petals_P Parameter: Tissue Value: Petals vs. Whole plant
  misc_feature: MA Experiment ID: 20001450 Result: Up-regulated in Transcription
  misc_feature: MA Experiment 20001450 PARAMETER Experiment Name: At_Far-red-induction_P Parameter: Age (day) Value: 7
  misc_feature: MA Experiment 20001450 PARAMETER Experiment Name: At_Far-red-induction_P Parameter: Light Value: Far-red vs. White
  misc_feature: MA Experiment 20001450 PARAMETER Experiment Name: At_Far-red-induction_P Parameter: Organism Value: A. thaliana
  misc_feature: MA Experiment 20001450 PARAMETER Experiment Name: At_Far-red-induction_P Parameter: Plant Line Value: Columbia
  misc_feature: MA Experiment 20001450 PARAMETER Experiment Name: At_Far-red-induction_P Parameter: Timepoint (hr) Value: 8
  misc_feature: MA Experiment 20001450 PARAMETER Experiment Name: At_Far-red-induction_P Parameter: Tissue Value: Whole Plant
  misc_feature: MA Experiment ID: 20001558 Result: Down-regulated in Transcription
  misc_feature: MA Experiment 20001558 PARAMETER Experiment Name: At_Drought_Soil_Dry_P Parameter: Age (day) Value: 27
  misc_feature: MA Experiment 20001558 PARAMETER Experiment Name: At_Drought_Soil_Dry_P Parameter: Organism Value: A. thaliana
  misc_feature: MA Experiment 20001558 PARAMETER Experiment Name: At_Drought_Soil_Dry_P Parameter: Plant Line Value: WS
  misc_feature: MA Experiment 20001558 PARAMETER Experiment Name: At_Drought_Soil_Dry_P Parameter: Post Timepoint (hr) Value: 6
  misc_feature: MA Experiment 20001558 PARAMETER Experiment Name: At_Drought_Soil_Dry_P Parameter: Post-Treatment Value: Re-Water vs. No Drought
  misc_feature: MA Experiment 20001558 PARAMETER Experiment Name: At_Drought_Soil_Dry_P Parameter: Timepoint (day) Value: 13
  misc_feature: MA Experiment 20001558 PARAMETER Experiment Name: At_Drought_Soil_Dry_P Parameter: Treatment Value: Drought vs. No Drought
  misc_feature: MA Experiment ID: 20001560 Result: Down-regulated in Transcription
  misc_feature: MA Experiment 20001560 PARAMETER Experiment Name: At_Drought_Soil_Dry_P Parameter: Age (day) Value: 28
  misc_feature: MA Experiment 20001560 PARAMETER Experiment Name: At_Drought_Soil_Dry_P Parameter: Organism Value: A. thaliana
  misc_feature: MA Experiment 20001560 PARAMETER Experiment Name: At_Drought_Soil_Dry_P Parameter: Plant Line Value: WS
  misc_feature: MA Experiment 20001560 PARAMETER Experiment Name: At_Drought_Soil_Dry_P Parameter: Post Timepoint (hr) Value: None
  misc_feature: MA Experiment 20001560 PARAMETER Experiment Name: At_Drought_Soil_Dry_P Parameter: Post-Treatment Value: None
  misc_feature: MA Experiment 20001560 PARAMETER Experiment Name: At_Drought_Soil_Dry_P Parameter: Timepoint (day) Value: 14
  misc_feature: MA Experiment 20001560 PARAMETER Experiment Name: At_Drought_Soil_Dry_P Parameter: Treatment Value: Drought vs. No Drought
  misc_feature: MA Experiment ID: 20001757 Result: Down-regulated in Transcription
  misc_feature: MA Experiment 20001757 PARAMETER Experiment Name: At_50mM_NH4NO3_L-to-H_P Parameter: Timepoint (hr) Value: 6
  misc_feature: MA Experiment 20001757 PARAMETER Experiment Name: At_50mM_NH4NO3_L-to-H_P Parameter: Tissue Value: Leaf
  misc_feature: MA Experiment 20001757 PARAMETER Experiment Name: At_50mM_NH4NO3_L-to-H_P Parameter: Treatment Value: 50mM NH4NO3 vs 100mM Mannitol
  misc_feature: MA Experiment ID: 20001911 Result: Up-regulated in Transcription
  misc_feature: MA Experiment 20001911 PARAMETER Experiment Name: At_Drought_Reproduction_P Parameter: Age (day) Value: 40
  misc_feature: MA Experiment 20001911 PARAMETER Experiment Name: At_Drought_Reproduction_P Parameter: Organism Value: A. thaliana
  misc_feature: MA Experiment 20001911 PARAMETER Experiment Name: At_Drought_Reproduction_P Parameter: Plant Line Value: WS
  misc_feature: MA Experiment 20001911 PARAMETER Experiment Name: At_Drought_Reproduction_P Parameter: Timepoint (day) Value: 10
  misc_feature: MA Experiment 20001911 PARAMETER Experiment Name: At_Drought_Reproduction_P Parameter: Tissue Value: Flowers
  misc_feature: MA Experiment 20001911 PARAMETER Experiment Name: At_Drought_Reproduction_P Parameter: Treatment Value: Drought vs. No Drought
aatttctcaataacgctctcagagagaccatttgatgaagcttctcgcttctggaatttgaaaaggaacttgttatggagataatctcactgaacgttgtgccccagtgctctgtggttacttggagtagtaaattagcaacgaaaagattggtcccaaatcggtcaagtttgttattctcaggggtcaaaaaatccagacttgtgattcgaagtggaaattccgatggttatgttgttggtgagaatgatgacttgggtcgtatagccagaagaggagaatcaacgtcaaaggttttgattcctggtttgcctgatgaatcaaatggtgaaattgctgctcgaatcagtcattctcactgcgagtggaagcccaagcttagagtacattatgagaaaagccggttgtgacaatctcgatgctcctgcggtgttgtttcttcctgggctttggcgttggttcatttcactatgagaagcagcttaccgatttgggaagggattatcgagtatgggctattgattttcttggacagggtttatctctccctactgaagatcctactaccatgactgaagaaaccagttcctcggaagataaggaaccattttggggatttggtgacaaaactgaaccgtgggctgatcaacttgtattctctctggatctctggagggatcaagttcagtattttgtagaagaggttatcggtgagcctgtgtacattgctgggaactcacttggagggtatgtagctctctactttgcagcaacccatcctcacctggttaagggtgttaccttgcttaatgcaacacctttctggggtttcttccctaatccagtaagatccccaaagctagcacgtctctttccatggcccggagcattccctctgccggaaagagtgaaaaaaatcacagaattggtgtggcaaaagataagtgatcctgaaagcatagctgagatacttaaacaggtctacacagaccattctaccaatgtggataaagtattctcacgtattgtggaggtcacacagcatccggctgctgcagcatcgtttgcttcaattatgcttgctcctggtggagagctatctttctccgaagctttatctaggtgtaaggaaaacaatgttcagatatgtctcatgtatggaagagaagatccatgggtgagaccgttatggggaaagaagataaagaaggaaatccccaacgctccatactacgagatcagcccagcgggtcactgcccacacgatgaagtccctgaggtggtgaactatctgatgcgcgggtggatcaagcacctggagtctggtggttttgaagcgctcccgcttttggaggacactgaagaagattgggaggagtccaggattggtagagaaattgagttcccgagagatggttggaaaaaagcagtgaatctgtggttatatgggtcaaactatacgtactggagaggagttagagaatctttcagatccagttttataagggtgtttggagggaagtctgcatagaagaagcatggaacagtcgtctagtgtaaattaattgtaatctatgttgcatccgatgctagctatataatgttgtctgtagaatcaagtttctaaaatgttcaaaaggaaaagttagaaaaatatcc

SEQ ID NO: 39830 - protein, 370 aa, Arabidopsis thaliana
  peptide (1)..(370): Ceres Seq. ID no. 13491258
  misc_feature (29)..(295): Pfam Name: alpha/beta hydrolase fold Pfam Description: alpha/beta hydrolase fold
  misc_feature (66)..(297): Homolog of NCBI NO: 23126297 NR Description: hypothetical protein [Nostoc punctiforme]
  misc_feature (10)..(42): Homolog of NCBI NO: 30690680 NR Description: hydrolase, alpha/beta fold family [Arabidopsis
  misc_feature (10)..(42): Homolog of NCBI NO: 15234433 NR Description: hydrolase, alpha/beta fold family [Arabidopsis
  misc_feature (66)..(314): Homolog of NCBI NO: 30690680 NR Description: hydrolase, alpha/beta fold family [Arabidopsis
  misc_feature (66)..(314): Homolog of NCBI NO: 15234433 NR Description: hydrolase, alpha/beta fold family [Arabidopsis
  misc_feature (10)..(42): Homolog of NCBI NO: 23040754 NR Description: hypothetical protein [Trichodesmium erythraeum
  misc_feature (66)..(297): Homolog of NCBI NO: 23040754 NR Description: hypothetical protein [Trichodesmium erythraeum
  misc_feature (10)..(40): Homolog of NCBI NO: 37521904 NR Description: hypothetical protein gll2335 [Gloeobacter
  misc_feature (60)..(300): Homolog of NCBI NO: 37521904 NR Description: hypothetical protein gll2335 [Gloeobacter
  misc_feature (7)..(370): Homolog of NCBI NO: 15240707 NR Description: hydrolase, alpha/beta fold family [Arabidopsis
MLLRCCFFLGFGVGSFHYEKQLTDLGRDYRVWAIDFLGQGLSLPTEDPTTMTEETSSSEDKEPFWGFGDKTEPWADQLVFSLDLWRDQVQYFVEEVIGEPVYIAGNSLGGYVALYFAATHPHLVKGVTLLNATPFWGFFPNPVRSPKLARLFPWPGAFPLPERVKKITELVWQKISDPESIAEILKQVYTDHSTNVDKVFSRIVEVTQHPAAAASFASIMLAPGGELSFSEALSRCKENNVQICLMYGREDPWVRPLWGKKIKKEIPNAPYYEISPAGHCPHDEVPEVVNYLMRGWIKHLESGGFEALPLLEDTEEDWEESRIGREIEFPRDGWKKAVNLWLYGSNYTYWRGVRESFRSSFIRVFGGKSA

SEQ ID NO: 39831 - protein, 320 aa, Arabidopsis thaliana
  peptide (1)..(320): Ceres Seq. ID no. 13491259
  misc_feature (1)..(245): Pfam Name: alpha/beta hydrolase fold Pfam Description: alpha/beta hydrolase fold
  misc_feature (16)..(250): Homolog of NCBI NO: 33864695 NR Description: conserved hypothetical protein [Synechococcus sp.
  misc_feature (15)..(251): Homolog of NCBI NO: 37523246 NR Description: hypothetical protein gll3677 [Gloeobacter
  misc_feature (16)..(247): Homolog of NCBI NO: 16330114 NR Description: unknown protein [Synechocystis sp. PCC 6803]
  misc_feature (16)..(247): Homolog of NCBI NO: 17229548 NR Description: hypothetical protein [Nostoc sp. PCC 7120]
  misc_feature (16)..(247): Homolog of NCBI NO: 23126297 NR Description: hypothetical protein [Nostoc punctiforme]
  misc_feature (16)..(264): Homolog of NCBI NO: 30690680 NR Description: hydrolase, alpha/beta fold family [Arabidopsis
  misc_feature (16)..(264): Homolog of NCBI NO: 15234433 NR Description: hydrolase, alpha/beta fold family [Arabidopsis
  misc_feature (16)..(247): Homolog of NCBI NO: 23040754 NR Description: hypothetical protein [Trichodesmium erythraeum
  misc_feature (10)..(250): Homolog of NCBI NO: 37521904 NR Description: hypothetical protein gll2335 [Gloeobacter
  misc_feature (1)..(320): Homolog of NCBI NO: 15240707 NR Description: hydrolase, alpha/beta fold family [Arabidopsis
MTEETSSSEDKEPFWGFGDKTEPWADQLVFSLDLWRDQVQYFVEEVIGEPVYIAGNSLGGYVALYFAATHPHLVKGVTLLNATPFWGFFPNPVRSPKLARLFPWPGAFPLPERVKKITELVWQKISDPESIAEILKQVYTDHSTNVDKVFSRIVEVTQHPAAAASFASIMLAPGGELSFSEALSRCKENNVQICLMYGREDPWVRPLWGKKIKKEIPNAPYYEISPAGHCPHDEVPEVVNYLMRGWIKHLESGGFEALPLLEDTEEDWEESRIGREIEFPRDGWKKAVNLWLYGSNYTYWRGVRESFRSSFIRVFGGKSA

SEQ ID NO: 39832 - DNA, 3209 bp, Arabidopsis thaliana
  misc_feature (1)..(3209): Ceres Seq. ID no. 12599971
  misc_feature: MA Experiment ID: 20000495 Result: Up-regulated in Transcription
  misc_feature: MA Experiment 20000495 PARAMETER Experiment Name: At_Guard_Cells_P Parameter: Harvest Date Value: 8/2/2002
  misc_feature: MA Experiment 20000495 PARAMETER Experiment Name: At_Guard_Cells_P Parameter: Organism Value: A. thaliana
  misc_feature: MA Experiment 20000495 PARAMETER Experiment Name: At_Guard_Cells_P Parameter: Tissue Value: Guard Cells vs. Leaves
  misc_feature: MA Experiment ID: 20000496 Result: Up-regulated in Transcription
  misc_feature: MA Experiment 20000496 PARAMETER Experiment Name: At_Guard_Cells_P Parameter: Harvest Date Value: 7/19/2002
  misc_feature: MA Experiment 20000496 PARAMETER Experiment Name: At_Guard_Cells_P Parameter: Organism Value: Canola
  misc_feature: MA Experiment 20000496 PARAMETER Experiment Name: At_Guard_Cells_P Parameter: Tissue Value: Guard Cells vs. Leaves
  misc_feature: MA Experiment ID: 20001557 Result: Up-regulated in Transcription
  misc_feature: MA Experiment 20001557 PARAMETER Experiment Name: At_Drought_Soil_Dry_P Parameter: Age (day) Value: 27
  misc_feature: MA Experiment 20001557 PARAMETER Experiment Name: At_Drought_Soil_Dry_P Parameter: Organism Value: A. thaliana
  misc_feature: MA Experiment 20001557 PARAMETER Experiment Name: At_Drought_Soil_Dry_P Parameter: Plant Line Value: WS
  misc_feature: MA Experiment 20001557 PARAMETER Experiment Name: At_Drought_Soil_Dry_P Parameter: Post Timepoint (hr) Value: 3
  misc_feature: MA Experiment 20001557 PARAMETER Experiment Name: At_Drought_Soil_Dry_P Parameter: Post-Treatment Value: Re-Water vs. No Drought
  misc_feature: MA Experiment 20001557 PARAMETER Experiment Name: At_Drought_Soil_Dry_P Parameter: Timepoint (day) Value: 13
  misc_feature: MA Experiment 20001557 PARAMETER Experiment Name: At_Drought_Soil_Dry_P Parameter: Treatment Value: Drought vs. No Drought
ctttctctctctctctctcgtgtgtgtgtgtgtgatcgagtggtgaaacgacagagaggggcgtcgttttgttgatttcttctgggtgaagatgtcaggtctcgaagatatcaagaacgagaccgttgatctggaaaaaattccgattgaggaagttttccagcagctaaaatgtacaagggaaggattgacaacgcaggaaggggaagacaggattgtgatatttggccccaacaagctcgaagagaagaaggaaagcaaaattctgaagtttctggggttcatgtggaatccgctttcatgggttatggaagctgcagctctcatggccattgctttggctaatggtgataatcgacctccggattggcaagattttgtgggtattatctgtctgcttgttatcaactccacaatcagtttcattgaagaaaacaacgccggaaatgctgcagctgctctcatggctggtcttgctcctaaaaccaaggttcttagggatggaaaatggagtgaacaagaggctgctatccttgtcccaggtgatattgttagcattaaacttggagacattatcccagccgatgcccgtcttcttgaaggagatcctttaaaggttgatcagtctgctctaactggagagtcccttcctgtgaccaagcaccctggtcaagaagttttctctggttcaacttgtaaacaaggagaaatcgaagcggttgttatagccactggagttcacaccttctttggtaaagctgctcaccttgtggacagcactaaccaagttgggcacttccagaaagttcttacatccattggaaacttctgtatctgttctattgctattggtatagcgattgaaatagtcgtcatgtaccctatccaacaccgaaagtacagagatggaattgacaatctcttggtcctcttgatcggtggtatccccattgctatgcccacggtcttgtctgtgactatggctatcgggtctcacaggttgtctcagcaaggtgctatcaccaaacgtatgacagccattgaagaaatggcgggaatggatgtcctttgcagtgacaaaaccgggacactaacccttaataaattgagtgtggataaaaacttggttgaggttttctgcaagggtgtggagaaagatcaagttctactatttgcagctatggcttctagggtggagaaccaggacgctattgatgcagccatggttggaatgcttgctgatccgaaagaggcccgagctggaatcagagaggttcacttccttccattcaaccctgtggataagagaactgctttgacttacatcgactctgatggtaactggcacagagtcagcaaaggtgctcccgagcagatccttgaccttgccaatgccaggcctgaccttaggaagaaggtactctcttgtattgacaagtacgctgagcgcggtcttaggtcgttggcagtagctcgtcaggtggtacccgagaaaacaaaagaaagcccaggtggaccatgggaatttgttggcttgttgcctctttttgaccctccaagacacgacagtgccgaaaccattcgtagggcgttgaatctaggtgttaatgtgaagatgatcactggtgatcaacttgctattggtaaggaaaccggtcgcaggcttggaatgggaaccaatatgtatccatctgcggctcttctcggtaccgacaaggactcgaacattgcatccatccctgttgaggagttgatcgagaaggctgatgggtttgccggcgtctttccagagcacaaatatgaaattgtgaaaaagctgcaggagaggaagcacattgttggtatgaccggtgatggtgttaatgatgcacccgctttgaagaaagcagatatcggtattgctgtggccgatgctacagatgctgctcgtggtgcttcagatatcgtcctcacggaacctgggctgagtgtcatcatcagtgccgttctcactagcagagctatcttccagagaatgaagaactacaccatttatgcagtctcaatcacaatccgtattgtgtttggtttcatgcttattgctttgatatgggaatttgacttctcagcgttcatggttctgattattgccatccttaatgatggtactatcatgacaatctcaaaggacagagtcaagccatctcccacacctgatagctggaagctcaaagaaattttcgccactggaattgtgctgggaggctaccaagccattatgagtgttattttcttctgggctgctcacaagaccgactttttctcggacaagttcggtgtgaggtcaatcagggacaataacgatgaactaatgggtgctgtgtatctacaagttagtatcatcagtcaagctctaatctttgtcaccaggtcaaggagttggtcatttgtcgaacgtcctggggcgcttctgatgattgcattcgtcattgcacaactggttgcaactttgatcgcagtgtatgccgactggacatttgcaaaggtgaagggtatcggttggggatgggcaggtgtgatttggatttacagtatcgtaacatacttcccacaggacattttgaagtttgccattcggtatatcttgagtggaaaggcttgggccagcttgtttgacaacaggaccgctttcacaaccaagaaagattacggtattggagaaagagaagctcaatgggcacaagctcaaaggacattgcacggtctgcagccaaaagaagatgttaatatcttcccagagaaaggaagttacagagagctgtctgagatcgcagagcaagccaagagaagggccgagatagctaggcttagggagcttcacacattgaagggacatgtggaatcagtcgcaaagctaaagggattggacattgatacagcaggacatcactacactgtgtagttggagttgcacaacaacacaaacatttaccgaaaaccaaccccatcatgactcatcttttgttttgtcttcacaaatctctctttaaaagtcattacagtagagggaagagaactcttgtgtattgccataactcttccaaaactcttttttctttttgttattgttagtcattgttcttaaaactcctactcgatatgagctttgcaaatttgcctttgaagaaacaaggccctttgcctttgaagagacaaggcactttgctttt

SEQ ID NO: 39833 - protein, 949 aa, Arabidopsis thaliana
  peptide (1)..(949): Ceres Seq. ID no. 12599972
  misc_feature (323)..(609): Pfam Name: haloacid dehalogenase-like hydrolase Pfam Description: haloacid dehalogenase-like hydrolase
  misc_feature (323)..(609): Pfam Name: haloacid dehalogenase-like hydrolase Pfam Description: haloacid dehalogenase-like hydrolase
  misc_feature (753)..(804): Homolog of NCBI NO: 16751320 NR Description: putative plasma membrane-type proton ATPase
  misc_feature (10)..(750): Homolog of NCBI NO: 16751320 NR Description: putative plasma membrane-type proton ATPase
  misc_feature (744)..(804): Homolog of NCBI NO: 1709665 NR Description: Plasma membrane ATPase (Proton pump)
  misc_feature (10)..(736): Homolog of NCBI NO: 1709665 NR Description: Plasma membrane ATPase (Proton pump)
  misc_feature (757)..(811): Homolog of NCBI NO: 1709666 NR Description: Plasma membrane ATPase (Proton pump)
  misc_feature (753)..(804): Homolog of NCBI NO: 16751320 NR Description: putative plasma membrane-type proton ATPase
  misc_feature (744)..(804): Homolog of NCBI NO: 1709665 NR Description: Plasma membrane ATPase (Proton pump)
  misc_feature (757)..(811): Homolog of NCBI NO: 1709666 NR Description: Plasma membrane ATPase (Proton pump)
  misc_feature (1)..(842): Homolog of NCBI NO: 3348073 NR Description: plasma membrane H(+)-ATPase 1 [Filobasidiella
  misc_feature (1)..(842): Homolog of NCBI NO: 6691153 NR Description: plasma membrane H(+)-ATPase [Filobasidiella
  misc_feature (1)..(845): Homolog of NCBI NO: 2652922 NR Description: plasma membrane (H+) ATPase [Uromyces fabae]
  misc_feature (10)..(848): Homolog of NCBI NO: 1709664 NR Description: Probable plasma membrane ATPase (Proton pump)
  misc_feature (10)..(748): Homolog of NCBI NO: 1709666 NR Description: Plasma membrane ATPase (Proton pump)
  misc_feature (10)..(736): Homolog of NCBI NO: 1709665 NR Description: Plasma membrane ATPase (Proton pump)
  misc_feature (10)..(750): Homolog of NCBI NO: 16751320 NR Description: putative plasma membrane-type proton ATPase
  misc_feature (10)..(748): Homolog of NCBI NO: 1709666 NR Description: Plasma membrane ATPase (Proton pump)
  misc_feature (10)..(848): Homolog of NCBI NO: 1709664 NR Description: Probable plasma membrane ATPase (Proton pump)
  misc_feature (1)..(845): Homolog of NCBI NO: 2652922 NR Description: plasma membrane (H+) ATPase [Uromyces fabae]
  misc_feature (1)..(842): Homolog of NCBI NO: 6691153 NR Description: plasma membrane H(+)-ATPase [Filobasidiella
  misc_feature (1)..(842): Homolog of NCBI NO: 3348073 NR Description: plasma membrane H(+)-ATPase 1 [Filobasidiella
MSGLEDIKNETVDLEKIPIEEVFQQLKCTREGLTTQEGEDRIVIFGPNKLEEKKESKILKFLGFMWNPLSWVMEAAALMAIALANGDNRPPDWQDFVGIICLLVINSTISFIEENNAGNAAAALMAGLAPKTKVLRDGKWSEQEAAILVPGDIVSIKLGDIIPADARLLEGDPLKVDQSALTGESLPVTKHPGQEVFSGSTCKQGEIEAVVIATGVHTFFGKAAHLVDSTNQVGHFQKVLTSIGNFCICSIAIGIAIEIVVMYPIQHRKYRDGIDNLLVLLIGGIPIAMPTVLSVTMAIGSHRLSQQGAITKRMTAIEEMAGMDVLCSDKTGTLTLNKLSVDKNLVEVFCKGVEKDQVLLFAAMASRVENQDAIDAAMVGMLADPKEARAGIREVHFLPFNPVDKRTALTYIDSDGNWHRVSKGAPEQILDLANARPDLRKKVLSCIDKYAERGLRSLAVARQVVPEKTKESPGGPWEFVGLLPLFDPPRHDSAETIRRALNLGVNVKMITGDQLAIGKETGRRLGMGTNMYPSAALLGTDKDSNIASIPVEELIEKADGFAGVFPEHKYEIVKKLQERKHIVGMTGDGVNDAPALKKADIGIAVADATDAARGASDIVLTEPGLSVIISAVLTSRAIFQRMKNYTIYAVSITIRIVFGFMLIALIWEFDFSAFMVLIIAILNDGTIMTISKDRVKPSPTPDSWKLKEIFATGIVLGGYQAIMSVIFFWAAHKTDFFSDKFGVRSIRDNNDELMGAVYLQVSIISQALIFVTRSRSWSFVERPGALLMIAFVIAQLVATLIAVYADWTFAKVKGIGWGWAGVIWIYSIVTYFPQDILKFAIRYILSGKAWASLFDNRTAFTTKKDYGIGEREAQWAQAQRTLHGLQPKEDVNIFPEKGSYRELSEIAEQAKRRAEIARLRELHTLKGHVESVAKLKGLDIDTAGHHYTV

SEQ ID NO: 39834 - protein, 885 aa, Arabidopsis thaliana
  peptide (1)..(885): Ceres Seq. ID no. 12599973
  misc_feature (259)..(545): Pfam Name: haloacid dehalogenase-like hydrolase Pfam Description: haloacid dehalogenase-like hydrolase
  misc_feature (259)..(545): Pfam Name: haloacid dehalogenase-like hydrolase Pfam Description: haloacid dehalogenase-like hydrolase
  misc_feature (689)..(740): Homolog of NCBI NO: 16751320 NR Description: putative plasma membrane-type proton ATPase
  misc_feature (1)..(686): Homolog of NCBI NO: 16751320 NR Description: putative plasma membrane-type proton ATPase
  misc_feature (680)..(740): Homolog of NCBI NO: 1709665 NR Description: Plasma membrane ATPase (Proton pump)
  misc_feature (1)..(672): Homolog of NCBI NO: 1709665 NR Description: Plasma membrane ATPase (Proton pump)
  misc_feature (693)..(747): Homolog of NCBI NO: 1709666 NR Description: Plasma membrane ATPase (Proton pump)
  misc_feature (689)..(740): Homolog of NCBI NO: 16751320 NR Description: putative plasma membrane-type proton ATPase
  misc_feature (680)..(740): Homolog of NCBI NO: 1709665 NR Description: Plasma membrane ATPase (Proton pump)
  misc_feature (693)..(747): Homolog of NCBI NO: 1709666 NR Description: Plasma membrane ATPase (Proton pump)
  misc_feature (1)..(778): Homolog of NCBI NO: 3348073 NR Description: plasma membrane H(+)-ATPase 1 [Filobasidiella
  misc_feature (1)..(778): Homolog of NCBI NO: 6691153 NR Description: plasma membrane H(+)-ATPase [Filobasidiella
  misc_feature (1)..(781): Homolog of NCBI NO: 2652922 NR Description: plasma membrane (H+) ATPase [Uromyces fabae]
  misc_feature (1)..(784): Homolog of NCBI NO: 1709664 NR Description: Probable plasma membrane ATPase (Proton pump)
  misc_feature (1)..(684): Homolog of NCBI NO: 1709666 NR Description: Plasma membrane ATPase (Proton pump)
  misc_feature (1)..(672): Homolog of NCBI NO: 1709665 NR Description: Plasma membrane ATPase (Proton pump)
  misc_feature (1)..(686): Homolog of NCBI NO: 16751320 NR Description: putative plasma membrane-type proton ATPase
  misc_feature (1)..(684): Homolog of NCBI NO: 1709666 NR Description: Plasma membrane ATPase (Proton pump)
  misc_feature (1)..(784): Homolog of NCBI NO: 1709664 NR Description: Probable plasma membrane ATPase (Proton pump)
  misc_feature (1)..(781): Homolog of NCBI NO: 2652922 NR Description: plasma membrane (H+) ATPase [Uromyces fabae]
  misc_feature (1)..(778): Homolog of NCBI NO: 6691153 NR Description: plasma membrane H(+)-ATPase [Filobasidiella
  misc_feature (1)..(778): Homolog of NCBI NO: 3348073 NR Description: plasma membrane H(+)-ATPase 1 [Filobasidiella
MWNPLSWVMEAAALMAIALANGDNRPPDWQDFVGIICLLVINSTISFIEENNAGNAAAALMAGLAPKTKVLRDGKWSEQEAAILVPGDIVSIKLGDIIPADARLLEGDPLKVDQSALTGESLPVTKHPGQEVFSGSTCKQGEIEAVVIATGVHTFFGKAAHLVDSTNQVGHFQKVLTSIGNFCICSIAIGIAIEIVVMYPIQHRKYRDGIDNLLVLLIGGIPIAMPTVLSVTMAIGSHRLSQQGAITKRMTAIEEMAGMDVLCSDKTGTLTLNKLSVDKNLVEVFCKGVEKDQVLLFAAMASRVENQDAIDAAMVGMLADPKEARAGIREVHFLPFNPVDKRTALTYIDSDGNWHRVSKGAPEQILDLANARPDLRKKVLSCIDKYAERGLRSLAVARQVVPEKTKESPGGPWEFVGLLPLFDPPRHDSAETIRRALNLGVNVKMITGDQLAIGKETGRRLGMGTNMYPSAALLGTDKDSNIASIPVEELIEKADGFAGVFPEHKYEIVKKLQERKHIVGMTGDGVNDAPALKKADIGIAVADATDAARGASDIVLTEPGLSVIISAVLTSRAIFQRMKNYTIYAVSITIRIVFGFMLIALIWEFDFSAFMVLIIAILNDGTIMTISKDRVKPSPTPDSWKLKEIFATGIVLGGYQAIMSVIFFWAAHKTDFFSDKFGVRSIRDNNDELMGAVYLQVSIISQALIFVTRSRSWSFVERPGALLMIAFVIAQLVATLIAVYADWTFAKVKGIGWGWAGVIWIYSIVTYFPQDILKFAIRYILSGKAWASLFDNRTAFTTKKDYGIGEREAQWAQAQRTLHGLQPKEDVNIFPEKGSYRELSEIAEQAKRRAEIARLRELHTLKGHVESVAKLKGLDIDTAGHHYTV

SEQ ID NO: 39835 - protein, 877 aa, Arabidopsis thaliana
  peptide (1)..(877): Ceres Seq. ID no. 12599974
  misc_feature (251)..(537): Pfam Name: haloacid dehalogenase-like hydrolase Pfam Description: haloacid dehalogenase-like hydrolase
  misc_feature (251)..(537): Pfam Name: haloacid dehalogenase-like hydrolase Pfam Description: haloacid dehalogenase-like hydrolase
  misc_feature (681)..(732): Homolog of NCBI NO: 16751320 NR Description: putative plasma membrane-type proton ATPase
  misc_feature (1)..(678): Homolog of NCBI NO: 16751320 NR Description: putative plasma membrane-type proton ATPase
  misc_feature (672)..(732): Homolog of NCBI NO: 1709665 NR Description: Plasma membrane ATPase (Proton pump)
  misc_feature (1)..(664): Homolog of NCBI NO: 1709665 NR Description: Plasma membrane ATPase (Proton pump)
  misc_feature (685)..(739): Homolog of NCBI NO: 1709666 NR Description: Plasma membrane ATPase (Proton pump)
  misc_feature (681)..(732): Homolog of NCBI NO: 16751320 NR Description: putative plasma membrane-type proton ATPase
  misc_feature (672)..(732): Homolog of NCBI NO: 1709665 NR Description: Plasma membrane ATPase (Proton pump)
  misc_feature (685)..(739): Homolog of NCBI NO: 1709666 NR Description: Plasma membrane ATPase (Proton pump)
  misc_feature (1)..(770): Homolog of NCBI NO: 3348073 NR Description: plasma membrane H(+)-ATPase 1 [Filobasidiella
  misc_feature (1)..(770): Homolog of NCBI NO: 6691153 NR Description: plasma membrane H(+)-ATPase [Filobasidiella
  misc_feature (1)..(773): Homolog of NCBI NO: 2652922 NR Description: plasma membrane (H+) ATPase [Uromyces fabae]
  misc_feature (1)..(776): Homolog of NCBI NO: 1709664 NR Description: Probable plasma membrane ATPase (Proton pump)
  misc_feature (1)..(676): Homolog of NCBI NO: 1709666 NR Description: Plasma membrane ATPase (Proton pump)
  misc_feature (1)..(664): Homolog of NCBI NO: 1709665 NR Description: Plasma membrane ATPase (Proton pump)
  misc_feature (1)..(678): Homolog of NCBI NO: 16751320 NR Description: putative plasma membrane-type proton ATPase
  misc_feature (1)..(676): Homolog of NCBI NO: 1709666 NR Description: Plasma membrane ATPase (Proton pump)
  misc_feature (1)..(776): Homolog of NCBI NO: 1709664 NR Description: Probable plasma membrane ATPase (Proton pump)
  misc_feature (1)..(773): Homolog of NCBI NO: 2652922 NR Description: plasma membrane (H+) ATPase [Uromyces fabae]
  misc_feature (1)..(770): Homolog of NCBI NO: 6691153 NR Description: plasma membrane H(+)-ATPase [Filobasidiella
  misc_feature (1)..(770): Homolog of NCBI NO: 3348073 NR Description: plasma membrane H(+)-ATPase 1 [Filobasidiella
MEAAALMAIALANGDNRPPDWQDFVGIICLLVINSTISFIEENNAGNAAAALMAGLAPKTKVLRDGKWSEQEAAILVPGDIVSIKLGDIIPADARLLEGDPLKVDQSALTGESLPVTKHPGQEVFSGSTCKQGEIEAVVIATGVHTFFGKAAHLVDSTNQVGHFQKVLTSIGNFCICSIAIGIAIEIVVMYPIQHRKYRDGIDNLLVLLIGGIPIAMPTVLSVTMAIGSHRLSQQGAITKRMTAIEEMAGMDVLCSDKTGTLTLNKLSVDKNLVEVFCKGVEKDQVLLFAAMASRVENQDAIDAAMVGMLADPKEARAGIREVHFLPFNPVDKRTALTYIDSDGNWHRVSKGAPEQILDLANARPDLRKKVLSCIDKYAERGLRSLAVARQVVPEKTKESPGGPWEFVGLLPLFDPPRHDSAETIRRALNLGVNVKMITGDQLAIGKETGRRLGMGTNMYPSAALLGTDKDSNIASIPVEELIEKADGFAGVFPEHKYEIVKKLQERKHIVGMTGDGVNDAPALKKADIGIAVADATDAARGASDIVLTEPGLSVIISAVLTSRAIFQRMKNYTIYAVSITIRIVFGFMLIALIWEFDFSAFMVLIIAILNDGTIMTISKDRVKPSPTPDSWKLKEIFATGIVLGGYQAIMSVIFFWAAHKTDFFSDKFGVRSIRDNNDELMGAVYLQVSIISQALIFVTRSRSWSFVERPGALLMIAFVIAQLVATLIAVYADWTFAKVKGIGWGWAGVIWIYSIVTYFPQDILKFAIRYILSGKAWASLFDNRTAFTTKKDYGIGEREAQWAQAQRTLHGLQPKEDVNIFPEKGSYRELSEIAEQAKRRAEIARLRELHTLKGHVESVAKLKGLDIDTAGHHYTV

SEQ ID NO: 39836 - DNA, 1812 bp, Arabidopsis thaliana
  misc_feature (1)..(1812): Ceres Seq. ID no. 13494298
  misc_feature: MA Experiment ID: 108434 Result: Up-regulated in Transcription
  misc_feature: MA Experiment 108434 PARAMETER Experiment Name: At_Root_Tips_cDNA_P Parameter: Tissue Value: Root Tips
  misc_feature: MA Experiment ID: 108585 Result: Up-regulated in Transcription
  misc_feature: MA Experiment 108585 PARAMETER Experiment Name: At_5mM_NaNP_cDNA_P Parameter: Timepoint (hr) Value: 6
  misc_feature: MA Experiment 108585 PARAMETER Experiment Name: At_5mM_NaNP_cDNA_P Parameter: Tissue Value: Aerial
  misc_feature: MA Experiment 108585 PARAMETER Experiment Name: At_5mM_NaNP_cDNA_P Parameter: Treatment Value: null
  misc_feature: MA Experiment ID: 20000069 Result: Down-regulated in Transcription
  misc_feature: MA Experiment 20000069 PARAMETER Experiment Name: At_100uM_ABA_Mutants_cDNA_P Parameter: Plant Line Value: CS23
  misc_feature: MA Experiment 20000069 PARAMETER Experiment Name: At_100uM_ABA_Mutants_cDNA_P Parameter: Timepoint (hr) Value: 6
  misc_feature: MA Experiment 20000069 PARAMETER Experiment Name: At_100uM_ABA_Mutants_cDNA_P Parameter: Tissue Value: Aerial
  misc_feature: MA Experiment 20000069 PARAMETER Experiment Name: At_100uM_ABA_Mutants_cDNA_P Parameter: Treatment Value: 100uM ABA vs. No Treatment
  misc_feature: MA Experiment ID: 20000113 Result: Down-regulated in Transcription
  misc_feature: MA Experiment 20000113 PARAMETER Experiment Name: At_42deg_Heat_cDNA_P Parameter: Temperature (deg C) Value: 42 vs. 22
  misc_feature: MA Experiment 20000113 PARAMETER Experiment Name: At_42deg_Heat_cDNA_P Parameter: Timepoint (hr) Value: 8
  misc_feature: MA Experiment 20000113 PARAMETER Experiment Name: At_42deg_Heat_cDNA_P Parameter: Tissue Value: Aerial
  misc_feature: MA Experiment ID: 20000224 Result: Down-regulated in Transcription
tggagagaaatcagcttcaagcttaagagagcttcgaaagcgaaagcgacgatttcttctccatcgtgagagcaaatctccagagccgttttctcttcttcttcttcctcctcgcgccgtctctgaaactccatcatcgtatcaatcaaattgcttcctcctccaaattgaaaaacaatggaattggattcggagaacaaattgttgaagacgggtttggttatagtggcgacacttgttatagccaaactcatcttctctttcttcacttctgattctaagaagaagcgtcttcctcctactcttaaagcttggcctccattggttggaagtcttatcaaattcttgaaaggacctattattatgcttagagaggaataccctaagcttggaagtgtgtttactgttaatcttgttcacaaaaagattacttttcttattggtcctgaagtctctgctcattttttcaaagcttctgaatctgatcttagtcagcaggaagtgtatcagttcaatgtccctacttttggtcctggagttgttttcgatgttgattattctgttcgtcaggagcagtttcggttcttcactgaggcacttagagttaacaagttgaagggttatgtggatatgatggttactgaagctgaggattacttctctaaatggggagagagtggtgaagttgatattaaggttgagctagagaggctcatcatcttgactgcaagtagatgtttactgggtcgagaagttcgtgatcagctttttgatgatgtctctgctttgttccatgaccttgacaatggaatgcttcccatcagtgttctcttcccatatctcccaattccagctcaccgccgtcgtgaccgtgcccgagaaaagctttcggagattttcgcaaaaatcattgggtcgagaaaacgctctggaaaaacagagaacgacatgctgcagtgtttcatcgaatcaaagtacaaagatggtagacagacaaccgaatctgaagtcactggtttgctcattgctgctctgtttgcaggacaacacacgagctctatcacttccacctggaccggtgcttatctgatgcgatacaaagagtacttctcagctgctcttgatgagcagaagaacctgattgcgaaacatggagacaagatcgatcatgatatcttatccgagatggatgttctctaccgctgcattaaggaagcgttgaggcttcaccctccactcatcatgttaatgagagcctcgcacagtgatttcagcgtgacagctcgggatggaaaaacttacgatatcccaaagggtcacatcgttgcaacctcccctgcatttgccaaccgcttaccgcacatcttcaaagaccccgacacctacgacccagaaagattctcccctggaagagaagaggacaaagccgcaggggcattctcgtacattgcattcggagggggaaggcacgggtgccttggagagccgtttgcttacctgcagatcaaagccatatggagtcatttgttgaggaacttcgagcttgagctagtttcaccgttccctgagattgactggaacgctatggtggttggagttaaaggcaatgtgatggtgcgttacaagaggcgccagctttcttaaagacaagtttaaggttattgcagctttggatttttctctctggtttctgctttgcttttgtccctctctggttttagttttgttgttgaataattcttctgtttttataaactgttgttactctttaattgacatttatttttaagcttctaagtttgttggttctgc

SEQ ID NO: 39837 - protein, 488 aa, Arabidopsis thaliana
  peptide (1)..(488): Ceres Seq. ID no. 13494299
  misc_feature (1)..(485): Homolog of NCBI NO: 6978751 NR Description: cytochrome P450, subfamily 51
  misc_feature (179)..(487): Homolog of NCBI NO: 7489685 NR Description: probable obtusifoliol 14-alpha-demethylase CYP51
  misc_feature (9)..(488): Homolog of NCBI NO: 15227817 NR Description: obtusifoliol 14-alpha demethylase, putative
  misc_feature (65)..(487): Homolog of NCBI NO: 4586676 NR Description: sterol 14-demethylase [Oryza sativa (japonica
  misc_feature (38)..(487): Homolog of NCBI NO: 6166036 NR Description: Cytochrome P450 51 (CYPL1) (P450-L1A1)
  misc_feature (6)..(487): Homolog of NCBI NO: 5921924 NR Description: Cytochrome P450 51 (CYPL1) (P450-L1A1)
  misc_feature (6)..(487): Homolog of NCBI NO: 27542762 NR Description: cytochrome P450-like protein [Sorghum bicolor]
  misc_feature (1)..(488): Homolog of NCBI NO: 27461067 NR Description: obtusifoliol-14-demethylase [Nicotiana tabacum]
  misc_feature (1)..(488): Homolog of NCBI NO: 18000074 NR Description: obtusifoliol-14-demethylase [Nicotiana tabacum]
  misc_feature (1)..(488): Homolog of NCBI NO: 15221075 NR Description: obtusifoliol 14-demethylase (CYP51) [Arabidopsis
MELDSENKLLKTGLVIVATLVIAKLIFSFFTSDSKKKRLPPTLKAWPPLVGSLIKFLKGPIIMLREEYPKLGSVFTVNLVHKKITFLIGPEVSAHFFKASESDLSQQEVYQFNVPTFGPGVVFDVDYSVRQEQFRFFTEALRVNKLKGYVDMMVTEAEDYFSKWGESGEVDIKVELERLIILTASRCLLGREVRDQLFDDVSALFHDLDNGMLPISVLFPYLPIPAHRRRDRAREKLSEIFAKIIGSRKRSGKTENDMLQCFIESKYKDGRQTTESEVTGLLIAALFAGQHTSSITSTWTGAYLMRYKEYFSAALDEQKNLIAKHGDKIDHDILSEMDVLYRCIKEALRLHPPLIMLMRASHSDFSVTARDGKTYDIPKGHIVATSPAFANRLPHIFKDPDTYDPERFSPGREEDKAAGAFSYIAFGGGRHGCLGEPFAYLQIKAIWSHLLRNFELELVSPFPEIDWNAMVVGVKGNVMVRYKRRQLS

SEQ ID NO: 39838 - protein, 426 aa, Arabidopsis thaliana
  peptide (1)..(426): Ceres Seq. ID no. 13494300
  misc_feature (1)..(423): Homolog of NCBI NO: 6978751 NR Description: cytochrome P450, subfamily 51
  misc_feature (117)..(425): Homolog of NCBI NO: 7489685 NR Description: probable obtusifoliol 14-alpha-demethylase CYP51
  misc_feature (1)..(426): Homolog of NCBI NO: 15227817 NR Description: obtusifoliol 14-alpha demethylase, putative
  misc_feature (3)..(425): Homolog of NCBI NO: 4586676 NR Description: sterol 14-demethylase [Oryza sativa (japonica
  misc_feature (1)..(425): Homolog of NCBI NO: 6166036 NR Description: Cytochrome P450 51 (CYPL1) (P450-L1A1)
  misc_feature (1)..(425): Homolog of NCBI NO: 5921924 NR Description: Cytochrome P450 51 (CYPL1) (P450-L1A1)
  misc_feature (1)..(425): Homolog of NCBI NO: 27542762 NR Description: cytochrome P450-like protein [Sorghum bicolor]
  misc_feature (1)..(426): Homolog of NCBI NO: 27461067 NR Description: obtusifoliol-14-demethylase [Nicotiana tabacum]
  misc_feature (1)..(426): Homolog of NCBI NO: 18000074 NR Description: obtusifoliol-14-demethylase [Nicotiana tabacum]
  misc_feature (1)..(426): Homolog of NCBI NO: 15221075 NR Description: obtusifoliol 14-demethylase (CYP51) [Arabidopsis
MLREEYPKLGSVFTVNLVHKKITFLIGPEVSAHFFKASESDLSQQEVYQFNVPTFGPGVVFDVDYSVRQEQFRFFTEALRVNKLKGYVDMMVTEAEDYFSKWGESGEVDIKVELERLIILTASRCLLGREVRDQLFDDVSALFHDLDNGMLPISVLFPYLPIPAHRRRDRAREKLSEIFAKIIGSRKRSGKTENDMLQCFIESKYKDGRQTTESEVTGLLIAALFAGQHTSSITSTWTGAYLMRYKEYFSAALDEQKNLIAKHGDKIDHDILSEMDVLYRCIKEALRLHPPLIMLMRASHSDFSVTARDGKTYDIPKGHIVATSPAFANRLPHIFKDPDTYDPERFSPGREEDKAAGAFSYIAFGGGRHGCLGEPFAYLQIKAIWSHLLRNFELELVSPFPEIDWNAMVVGVKGNVMVRYKRRQLS

SEQ ID NO: 39839 - protein, 337 aa, Arabidopsis thaliana
  peptide (1)..(337): Ceres Seq. ID no. 13494301
  misc_feature (1)..(334): Homolog of NCBI NO: 6978751 NR Description: cytochrome P450, subfamily 51
  misc_feature (28)..(336): Homolog of NCBI NO: 7489685 NR Description: probable obtusifoliol 14-alpha-demethylase CYP51
  misc_feature (1)..(337): Homolog of NCBI NO: 15227817 NR Description: obtusifoliol 14-alpha demethylase, putative
  misc_feature (1)..(336): Homolog of NCBI NO: 4586676 NR Description: sterol 14-demethylase [Oryza sativa (japonica
  misc_feature (1)..(336): Homolog of NCBI NO: 6166036 NR Description: Cytochrome P450 51 (CYPL1) (P450-L1A1)
  misc_feature (1)..(336): Homolog of NCBI NO: 5921924 NR Description: Cytochrome P450 51 (CYPL1) (P450-L1A1)
  misc_feature (1)..(336): Homolog of NCBI NO: 27542762 NR Description: cytochrome P450-like protein [Sorghum bicolor]
  misc_feature (1)..(337): Homolog of NCBI NO: 27461067 NR Description: obtusifoliol-14-demethylase [Nicotiana tabacum]
  misc_feature (1)..(337): Homolog of NCBI NO: 18000074 NR Description: obtusifoliol-14-demethylase [Nicotiana tabacum]
  misc_feature (1)..(337): Homolog of NCBI NO: 15221075 NR Description: obtusifoliol 14-demethylase (CYP51) [Arabidopsis
MMVTEAEDYFSKWGESGEVDIKVELERLIILTASRCLLGREVRDQLFDDVSALFHDLDNGMLPISVLFPYLPIPAHRRRDRAREKLSEIFAKIIGSRKRSGKTENDMLQCFIESKYKDGRQTTESEVTGLLIAALFAGQHTSSITSTWTGAYLMRYKEYFSAALDEQKNLIAKHGDKIDHDILSEMDVLYRCIKEALRLHPPLIMLMRASHSDFSVTARDGKTYDIPKGHIVATSPAFANRLPHIFKDPDTYDPERFSPGREEDKAAGAFSYIAFGGGRHGCLGEPFAYLQIKAIWSHLLRNFELELVSPFPEIDWNAMVVGVKGNVMVRYKRRQLS

SEQ ID NO: 39840 - DNA, 756 bp, Arabidopsis thaliana
  misc_feature (1)..(756): Ceres Seq. ID no. 12673930
  misc_feature: MA Experiment ID: 20000180 Result: Up-regulated in Transcription
  misc_feature: MA Experiment 20000180 PARAMETER Experiment Name: At_Germinating_Seeds_P Parameter: Age (hr) Value: 24 vs. 0
  misc_feature: MA Experiment 20000180 PARAMETER Experiment Name: At_Germinating_Seeds_P Parameter: Tissue Value: Germinating Seeds
  misc_feature: MA Experiment ID: 20000185 Result: Down-regulated in Transcription
  misc_feature: MA Experiment 20000185 PARAMETER Experiment Name: At_Roots__P Parameter: Age (day) Value: 7 vs. 21
  misc_feature: MA Experiment 20000185 PARAMETER Experiment Name: At_Roots__P Parameter: Organism Value: A. thaliana
  misc_feature: MA Experiment 20000185 PARAMETER Experiment Name: At_Roots__P Parameter: Tissue Value: Roots vs. Whole Plant
  misc_feature: MA Experiment ID: 20000264 Result: Down-regulated in Transcription
  misc_feature: MA Experiment 20000264 PARAMETER Experiment Name: At_Open_Flower_P Parameter: Age (day) Value: 21
  misc_feature: MA Experiment 20000264 PARAMETER Experiment Name: At_Open_Flower_P Parameter: Plant Line Value: WS
  misc_feature: MA Experiment 20000264 PARAMETER Experiment Name: At_Open_Flower_P Parameter: Tissue Value: Open Flower vs. Whole Plant
  misc_feature: MA Experiment ID: 20000286 Result: Down-regulated in Transcription
  misc_feature: MA Experiment 20000286 PARAMETER Experiment Name: At_Open_Flower_P Parameter: Age (day) Value: 21
  misc_feature: MA Experiment 20000286 PARAMETER Experiment Name: At_Open_Flower_P Parameter: Plant Line Value: WS
  misc_feature: MA Experiment 20000286 PARAMETER Experiment Name: At_Open_Flower_P Parameter: Tissue Value: Half Open vs. Whole Plant
  misc_feature: MA Experiment ID: 20000438 Result: Up-regulated in Transcription
  misc_feature: MA Experiment 20000438 PARAMETER Experiment Name: At_Shoots__P Parameter: Age (day) Value: 14
  misc_feature: MA Experiment 20000438 PARAMETER Experiment Name: At_Shoots__P Parameter: Tissue Value: Shoots vs. Whole Plant
  misc_feature: MA Experiment ID: 20000439 Result: Down-regulated in Transcription
  misc_feature: MA Experiment 20000439 PARAMETER Experiment Name: At_Roots__P Parameter: Age (day) Value: 14 vs. 21
  misc_feature: MA Experiment 20000439 PARAMETER Experiment Name: At_Roots__P Parameter: Organism Value: A. thaliana
  misc_feature: MA Experiment 20000439 PARAMETER Experiment Name: At_Roots__P Parameter: Tissue Value: Roots vs. Whole Plant
  misc_feature: MA Experiment ID: 20000794 Result: Down-regulated in Transcription
  misc_feature: MA Experiment 20000794 PARAMETER Experiment Name: At_Petals_P Parameter: Age (day) Value: 23-25 days
  misc_feature: MA Experiment 20000794 PARAMETER Experiment Name: At_Petals_P Parameter: Plant Line Value: WS
  misc_feature: MA Experiment 20000794 PARAMETER Experiment Name: At_Petals_P Parameter: Tissue Value: Petals vs. Whole plant
  misc_feature: MA Experiment ID: 20001451 Result: Down-regulated in Transcription
  misc_feature: MA Experiment 20001451 PARAMETER Experiment Name: At_Far-red-induction_P Parameter: Age (day) Value: 7
  misc_feature: MA Experiment 20001451 PARAMETER Experiment Name: At_Far-red-induction_P Parameter: Light Value: Far-red vs. White
  misc_feature: MA Experiment 20001451 PARAMETER Experiment Name: At_Far-red-induction_P Parameter: Organism Value: A. thaliana
  misc_feature: MA Experiment 20001451 PARAMETER Experiment Name: At_Far-red-induction_P Parameter: Plant Line Value: Columbia
  misc_feature: MA Experiment 20001451 PARAMETER Experiment Name: At_Far-red-induction_P Parameter: Timepoint (hr) Value: 24
  misc_feature: MA Experiment 20001451 PARAMETER Experiment Name: At_Far-red-induction_P Parameter: Tissue Value: Whole Plant
  misc_feature: MA Experiment ID: 20001557 Result: Down-regulated in Transcription
  misc_feature: MA Experiment 20001557 PARAMETER Experiment Name: At_Drought_Soil_Dry_P Parameter: Age (day) Value: 27
  misc_feature: MA Experiment 20001557 PARAMETER Experiment Name: At_Drought_Soil_Dry_P Parameter: Organism Value: A. thaliana
  misc_feature: MA Experiment 20001557 PARAMETER Experiment Name: At_Drought_Soil_Dry_P Parameter: Plant Line Value: WS
  misc_feature: MA Experiment 20001557 PARAMETER Experiment Name: At_Drought_Soil_Dry_P Parameter: Post Timepoint (hr) Value: 3
  misc_feature: MA Experiment 20001557 PARAMETER Experiment Name: At_Drought_Soil_Dry_P Parameter: Post-Treatment Value: Re-Water vs. No Drought
  misc_feature: MA Experiment 20001557 PARAMETER Experiment Name: At_Drought_Soil_Dry_P Parameter: Timepoint (day) Value: 13
  misc_feature: MA Experiment 20001557 PARAMETER Experiment Name: At_Drought_Soil_Dry_P Parameter: Treatment Value: Drought vs. No Drought
  misc_feature: MA Experiment ID: 20001757 Result: Up-regulated in Transcription
  misc_feature: MA Experiment 20001757 PARAMETER Experiment Name: At_50mM_NH4NO3_L-to-H_P Parameter: Timepoint (hr) Value: 6
  misc_feature: MA Experiment 20001757 PARAMETER Experiment Name: At_50mM_NH4NO3_L-to-H_P Parameter: Tissue Value: Leaf
  misc_feature: MA Experiment 20001757 PARAMETER Experiment Name: At_50mM_NH4NO3_L-to-H_P Parameter: Treatment Value: 50mM NH4NO3 vs 100mM Mannitol
  misc_feature: MA Experiment ID: 20001905 Result: Down-regulated in Transcription
  misc_feature: MA Experiment 20001905 PARAMETER Experiment Name: At_Drought_Reproduction_P Parameter: Age (day) Value: 40
  misc_feature: MA Experiment 20001905 PARAMETER Experiment Name: At_Drought_Reproduction_P Parameter: Organism Value: A. thaliana
  misc_feature: MA Experiment 20001905 PARAMETER Experiment Name: At_Drought_Reproduction_P Parameter: Plant Line Value: WS
  misc_feature: MA Experiment 20001905 PARAMETER Experiment Name: At_Drought_Reproduction_P Parameter: Timepoint (day) Value: 10
  misc_feature: MA Experiment 20001905 PARAMETER Experiment Name: At_Drought_Reproduction_P Parameter: Tissue Value: Rosettes
  misc_feature: MA Experiment 20001905 PARAMETER Experiment Name: At_Drought_Reproduction_P Parameter: Treatment Value: Drought vs. No Drought
  misc_feature: MA Experiment ID: 20001906 Result: Down-regulated in Transcription
  misc_feature: MA Experiment 20001906 PARAMETER Experiment Name: At_Drought_Reproduction_P Parameter: Age (day) Value: 35
  misc_feature: MA Experiment 20001906 PARAMETER Experiment Name: At_Drought_Reproduction_P Parameter: Organism Value: A. thaliana
  misc_feature: MA Experiment 20001906 PARAMETER Experiment Name: At_Drought_Reproduction_P Parameter: Plant Line Value: WS
  misc_feature: MA Experiment 20001906 PARAMETER Experiment Name: At_Drought_Reproduction_P Parameter: Timepoint (day) Value: 5
  misc_feature: MA Experiment 20001906 PARAMETER Experiment Name: At_Drought_Reproduction_P Parameter: Tissue Value: Siliques
  misc_feature: MA Experiment 20001906 PARAMETER Experiment Name: At_Drought_Reproduction_P Parameter: Treatment Value: Drought vs. No Drought
  misc_feature: MA Experiment ID: 20001908 Result: Down-regulated in Transcription
  misc_feature: MA Experiment 20001908 PARAMETER Experiment Name: At_Drought_Reproduction_P Parameter: Age (day) Value: 40
  misc_feature: MA Experiment 20001908 PARAMETER Experiment Name: At_Drought_Reproduction_P Parameter: Organism Value: A. thaliana
  misc_feature: MA Experiment 20001908 PARAMETER Experiment Name: At_Drought_Reproduction_P Parameter: Plant Line Value: WS
  misc_feature: MA Experiment 20001908 PARAMETER Experiment Name: At_Drought_Reproduction_P Parameter: Timepoint (day) Value: 10
  misc_feature: MA Experiment 20001908 PARAMETER Experiment Name: At_Drought_Reproduction_P Parameter: Tissue Value: Siliques
  misc_feature: MA Experiment 20001908 PARAMETER Experiment Name: At_Drought_Reproduction_P Parameter: Treatment Value: Drought vs. No Drought
agaatccaaaaccaaaccttcagatcataaatccaaaaccactcatttttctattactgaaatttttcttagagaagaagaagaagaagcaaaatggccacaagcgcatcagctttgctctcaccaaccacattctccactgcaatctcccacaaaaaccctaactccatctcattccatggccttcgtcccctccgtctaggtggctcctcctccgccctacccaaactatcaaccaccgggagaaaatcctcctccgctgtcgtgagagctgagctaagcccttccatcgtcataagtctcagcacaggtctctccctcttcctcggccgtttcgtcttcttcaacttccagagagagaacgtagcaaaacagggcttaccggagcagaacggaaaaacccatttcgaagctggagatgatcgtgctaaggagtacgtcagtctcttgaaatcgaacgatccaattggattcaacattgttgatgttcttgcttggggttctattggacacatcgttgcttactacatcttggctacttccagcaatggatacgacccaagcttctttggatgattcgtttcaatgtcaatctctcgtatatgtatatgtatatgtttgacttgtgttgcaagctatctaatctgttctctatctctgtttcttcttctgttgttgttgttgttgtctaagacttgtccctctttttgcaaatgttttatttctccatttacaaagattggtttgcagagtttt

SEQ ID NO: 39841 - protein, 160 aa, Arabidopsis thaliana
  peptide (1)..(160): Ceres Seq. ID no. 12673931
  misc_feature (61)..(156): Pfam Name: Photosystem I psaG / psaK Pfam Description: Photosystem I psaG / psaK
  misc_feature (61)..(99): Homolog of NCBI NO: 131193 NR Description: Photosystem I reaction center subunit V (PSI-G)
  misc_feature (55)..(151): Homolog of NCBI NO: 131191 NR Description: Photosystem I reaction center subunit V, precursor (PSI-G) (Light-harvesting complex I 10 kDa protein)
  misc_feature (52)..(155): Homolog of NCBI NO: 17369611 NR Description: Photosystem I reaction center subunit V,
  misc_feature (30)..(160): Homolog of NCBI NO: 131192 NR Description: Photosystem I reaction center subunit V,
  misc_feature (20)..(159): Homolog of NCBI NO: 131194 NR Description: Photosystem I reaction center subunit V,
  misc_feature (1)..(160): Homolog of NCBI NO: 15222757 NR Description: photosystem I subunit V precursor, putative
MATSASALLSPTTFSTAISHKNPNSISFHGLRPLRLGGSSSALPKLSTTGRKSSSAVVRAELSPSIVISLSTGLSLFLGRFVFFNFQRENVAKQGLPEQNGKTHFEAGDDRAKEYVSLLKSNDPIGFNIVDVLAWGSIGHIVAYYILATSSNGYDPSFFG

SEQ ID NO: 39842 - DNA, 1381 bp, Arabidopsis thaliana
  misc_feature (1)..(1381): Ceres Seq. ID no. 12329619
  misc_feature: MA Experiment ID: 108434 Result: Up-regulated in Transcription
  misc_feature: MA Experiment 108434 PARAMETER Experiment Name: At_Root_Tips_cDNA_P Parameter: Tissue Value: Root Tips
  misc_feature: MA Experiment ID: 20000113 Result: Up-regulated in Transcription
  misc_feature: MA Experiment 20000113 PARAMETER Experiment Name: At_42deg_Heat_cDNA_P Parameter: Temperature (deg C) Value: 42 vs. 22
  misc_feature: MA Experiment 20000113 PARAMETER Experiment Name: At_42deg_Heat_cDNA_P Parameter: Timepoint (hr) Value: 8
  misc_feature: MA Experiment 20000113 PARAMETER Experiment Name: At_42deg_Heat_cDNA_P Parameter: Tissue Value: Aerial
  misc_feature: MA Experiment ID: 20000185 Result: Up-regulated in Transcription
  misc_feature: MA Experiment 20000185 PARAMETER Experiment Name: At_Roots__P Parameter: Age (day) Value: 7 vs. 21
  misc_feature: MA Experiment 20000185 PARAMETER Experiment Name: At_Roots__P Parameter: Organism Value: A. thaliana
  misc_feature: MA Experiment 20000185 PARAMETER Experiment Name: At_Roots__P Parameter: Tissue Value: Roots vs. Whole Plant
agttccccacaaagctcgttgtcgtcatcgcgcgagcttgaaccaaaaaaccatgaacagtgataaggaagaggagccattggaagagatcggcgattcgaataatgttctcgatctcactagctatcagctccacagtctcgatacggtcgagttaccgccgaacctgattgagctggaccttacggcgaaccgtttgtcgggattggactcgaggatcgctcagctctccacgcttaagaagctttctctccgccaaaacctaattgatgattccgccgtcgaaccgttgtctcactgggacgccttgtccgatctcgaggagttagttctcagagataacaagctagcaaaagtaccagatgtcagcatattcacgaagcttttggtttacgacatatctttcaatgaaatcacttctttggaaggaatatccaaggcctctagcacactgaaggaactctatgtgtctaaaaatgaagttaacaagattatggagattgaacacttacacaacttgcagattcttgaactggggtctaatagattgcgggtgatggaaaatctggaaaacttcacaaaattagaagaactatggctcggaagaaaccgtataaaagttgttaacctgtgtgggctcaaatgcataaaaaagattagcttgcagagcaatcgattgacctctatgaaaggatttgaggaatgtgttgctcttgaagagttatatttgagccataatggtatctccaaaatggaaggcttgagtgcattggtcaacctacgggtattggacgtgtcgaacaacaagcttacttcagttgatgacattcagaacctcacaaagttggaagatttgtggcttaatgacaaccagatagaatcactggaagcaatcacagaagctgttacaggatctaaagagaagcttaccactatctacctcgaaaataacccttgtgccaagtcttctgattatgttgctgcggtcagacaaatcttcccgaatgtggagcaaattgattctaacatatttgcttagagatggatatattccttgtcgtgctgtttgtatgaatgtctgcttcctcatcccatgggcatgggcatcgaatttaggaaatcaggtacaacacggattcctcaaaatatacatgtgtctgctgtttatcataaagaagtgcaaatgagcaaattaaatcgctctcgtcatggatatttattaaaacgtttttgaaattctagtgttcccttgcaagtaaaccaattcttgtttttggtctgtaattgtatgtggactgtgtctgtaaaagggaatccccgagtctgaagttgtctttgtttcaagtttcaaccgagaacactaacttgaatactttgatcc

SEQ ID NO: 39843 - protein, 345 aa, Arabidopsis thaliana
  peptide (1)..(345): Ceres Seq. ID no. 12329620
  misc_feature (71)..(341): Homolog of NCBI NO: 23490241 NR Description: protein phosphatase-1 regulatory subunit 7 alpha2
  misc_feature (79)..(341): Homolog of NCBI NO: 40747368 NR Description: hypothetical protein AN0425.2 [Aspergillus
  misc_feature (48)..(343): Homolog of NCBI NO: 6684160 NR Description: putative mitotic protein phosphatase 1 regulator
  misc_feature (13)..(341): Homolog of NCBI NO: 6322655 NR Description: Interacts with and may be a positive regulator of
  misc_feature (47)..(341): Homolog of NCBI NO: 4633066 NR Description: protein phosphatase-1 regulatory subunit 7 alpha2
  misc_feature (20)..(341): Homolog of NCBI NO: 4506013 NR Description: protein phosphatase 1, regulatory subunit 7;
  misc_feature (47)..(341): Homolog of NCBI NO: 34877683 NR Description: similar to protein phosphatase 1, regulatory
  misc_feature (47)..(341): Homolog of NCBI NO: 12963569 NR Description: protein phosphatase-1 regulatory subunit 7
  misc_feature (18)..(345): Homolog of NCBI NO: 15241153 NR Description: putative protein
  misc_feature (18)..(345): Homolog of NCBI NO: 21536755 NR Description: unknown [Arabidopsis thaliana]
VPHKARCRHRASLNQKTMNSDKEEEPLEEIGDSNNVLDLTSYQLHSLDTVELPPNLIELDLTANRLSGLDSRIAQLSTLKKLSLRQNLIDDSAVEPLSHWDALSDLEELVLRDNKLAKVPDVSIFTKLLVYDISFNEITSLEGISKASSTLKELYVSKNEVNKIMEIEHLHNLQILELGSNRLRVMENLENFTKLEELWLGRNRIKVVNLCGLKCIKKISLQSNRLTSMKGFEECVALEELYLSHNGISKMEGLSALVNLRVLDVSNNKLTSVDDIQNLTKLEDLWLNDNQIESLEAITEAVTGSKEKLTTIYLENNPCAKSSDYVAAVRQIFPNVEQIDSNIFA

SEQ ID NO: 39844 - protein, 328 aa, Arabidopsis thaliana
  peptide (1)..(328): Ceres Seq. ID no. 12329621
  misc_feature (54)..(324): Homolog of NCBI NO: 23490241 NR Description: protein phosphatase-1 regulatory subunit 7 alpha2
  misc_feature (62)..(324): Homolog of NCBI NO: 40747368 NR Description: hypothetical protein AN0425.2 [Aspergillus
  misc_feature (31)..(326): Homolog of NCBI NO: 6684160 NR Description: putative mitotic protein phosphatase 1 regulator
  misc_feature (1)..(324): Homolog of NCBI NO: 6322655 NR Description: Interacts with and may be a positive regulator of
  misc_feature (30)..(324): Homolog of NCBI NO: 4633066 NR Description: protein phosphatase-1 regulatory subunit 7 alpha2
  misc_feature (3)..(324): Homolog of NCBI NO: 4506013 NR Description: protein phosphatase 1, regulatory subunit 7;
  misc_feature (30)..(324): Homolog of NCBI NO: 34877683 NR Description: similar to protein phosphatase 1, regulatory
  misc_feature (30)..(324): Homolog of NCBI NO: 12963569 NR Description: protein phosphatase-1 regulatory subunit 7
  misc_feature (1)..(328): Homolog of NCBI NO: 15241153 NR Description: putative protein
  misc_feature (1)..(328): Homolog of NCBI NO: 21536755 NR Description: unknown [Arabidopsis thaliana]
MNSDKEEEPLEEIGDSNNVLDLTSYQLHSLDTVELPPNLIELDLTANRLSGLDSRIAQLSTLKKLSLRQNLIDDSAVEPLSHWDALSDLEELVLRDNKLAKVPDVSIFTKLLVYDISFNEITSLEGISKASSTLKELYVSKNEVNKIMEIEHLHNLQILELGSNRLRVMENLENFTKLEELWLGRNRIKVVNLCGLKCIKKISLQSNRLTSMKGFEECVALEELYLSHNGISKMEGLSALVNLRVLDVSNNKLTSVDDIQNLTKLEDLWLNDNQIESLEAITEAVTGSKEKLTTIYLENNPCAKSSDYVAAVRQIFPNVEQIDSNIFA

SEQ ID NO: 39845 - protein, 181 aa, Arabidopsis thaliana
  peptide (1)..(181): Ceres Seq. ID no. 12329622
  misc_feature (1)..(177): Homolog of NCBI NO: 23490241 NR Description: protein phosphatase-1 regulatory subunit 7 alpha2
  misc_feature (1)..(177): Homolog of NCBI NO: 40747368 NR Description: hypothetical protein AN0425.2 [Aspergillus
  misc_feature (1)..(179): Homolog of NCBI NO: 6684160 NR Description: putative mitotic protein phosphatase 1 regulator
  misc_feature (1)..(177): Homolog of NCBI NO: 6322655 NR Description: Interacts with and may be a positive regulator of
  misc_feature (1)..(177): Homolog of NCBI NO: 4633066 NR Description: protein phosphatase-1 regulatory subunit 7 alpha2
  misc_feature (1)..(177): Homolog of NCBI NO: 4506013 NR Description: protein phosphatase 1, regulatory subunit 7;
  misc_feature (1)..(177): Homolog of NCBI NO: 34877683 NR Description: similar to protein phosphatase 1, regulatory
  misc_feature (1)..(177): Homolog of NCBI NO: 12963569 NR Description: protein phosphatase-1 regulatory subunit 7
  misc_feature (1)..(181): Homolog of NCBI NO: 15241153 NR Description: putative protein
  misc_feature (1)..(181): Homolog of NCBI NO: 21536755 NR Description: unknown [Arabidopsis thaliana]
MEIEHLHNLQILELGSNRLRVMENLENFTKLEELWLGRNRIKVVNLCGLKCIKKISLQSNRLTSMKGFEECVALEELYLSHNGISKMEGLSALVNLRVLDVSNNKLTSVDDIQNLTKLEDLWLNDNQIESLEAITEAVTGSKEKLTTIYLENNPCAKSSDYVAAVRQIFPNVEQIDSNIFA

SEQ ID NO: 39846 - DNA, 975 bp, Arabidopsis thaliana
  misc_feature (1)..(975): Ceres Seq. ID no. 12558382
  misc_feature: MA Experiment ID: 20000179 Result: Up-regulated in Transcription
  misc_feature: MA Experiment 20000179 PARAMETER Experiment Name: At_Germinating_Seeds_P Parameter: Age (hr) Value: 6 vs. 0
  misc_feature: MA Experiment 20000179 PARAMETER Experiment Name: At_Germinating_Seeds_P Parameter: Tissue Value: Germinating Seeds
  misc_feature: MA Experiment ID: 20000180 Result: Up-regulated in Transcription
  misc_feature: MA Experiment 20000180 PARAMETER Experiment Name: At_Germinating_Seeds_P Parameter: Age (hr) Value: 24 vs. 0
  misc_feature: MA Experiment 20000180 PARAMETER Experiment Name: At_Germinating_Seeds_P Parameter: Tissue Value: Germinating Seeds
  misc_feature: MA Experiment ID: 20000182 Result: Up-regulated in Transcription
  misc_feature: MA Experiment 20000182 PARAMETER Experiment Name: At_2mM_SA_P Parameter: Age (day) Value: 14
  misc_feature: MA Experiment 20000182 PARAMETER Experiment Name: At_2mM_SA_P Parameter: Organism Value: A. thaliana
  misc_feature: MA Experiment 20000182 PARAMETER Experiment Name: At_2mM_SA_P Parameter: Plant Line Value: WS
  misc_feature: MA Experiment 20000182 PARAMETER Experiment Name: At_2mM_SA_P Parameter: Timepoint (hr) Value: 6
  misc_feature: MA Experiment 20000182 PARAMETER Experiment Name: At_2mM_SA_P Parameter: Tissue Value: Aerial
  misc_feature: MA Experiment 20000182 PARAMETER Experiment Name: At_2mM_SA_P Parameter: Treatment Value: 2mM SA vs. No Treatment
  misc_feature: MA Experiment ID: 20000234 Result: Down-regulated in Transcription
  misc_feature: MA Experiment 20000234 PARAMETER Experiment Name: At_Siliques_P Parameter: Age (day) Value: 21
  misc_feature: MA Experiment 20000234 PARAMETER Experiment Name: At_Siliques_P Parameter: Organism Value: A. thaliana
  misc_feature: MA Experiment 20000234 PARAMETER Experiment Name: At_Siliques_P Parameter: Plant Line Value: WS
  misc_feature: MA Experiment 20000234 PARAMETER Experiment Name: At_Siliques_P Parameter: Tissue Value: Less Than 5mm Siliques vs. Whole Plant
  misc_feature: MA Experiment ID: 20000437 Result: Up-regulated in Transcription
  misc_feature: MA Experiment 20000437 PARAMETER Experiment Name: At_Drought_P Parameter: Age (day) Value: 8
  misc_feature: MA Experiment 20000437 PARAMETER Experiment Name: At_Drought_P Parameter: Organism Value: A. thaliana
  misc_feature: MA Experiment 20000437 PARAMETER Experiment Name: At_Drought_P Parameter: Plant Line Value: WS
  misc_feature: MA Experiment 20000437 PARAMETER Experiment Name: At_Drought_P Parameter: Timepoint (hr) Value: 24
  misc_feature: MA Experiment 20000437 PARAMETER Experiment Name: At_Drought_P Parameter: Tissue Value: Whole Plant
  misc_feature: MA Experiment 20000437 PARAMETER Experiment Name: At_Drought_P Parameter: Treatment Value: Drought vs. No Drought
  misc_feature: MA Experiment ID: 20000438 Result: Down-regulated in Transcription
  misc_feature: MA Experiment 20000438 PARAMETER Experiment Name: At_Shoots__P Parameter: Age (day) Value: 14
  misc_feature: MA Experiment 20000438 PARAMETER Experiment Name: At_Shoots__P Parameter: Tissue Value: Shoots vs. Whole Plant
  misc_feature: MA Experiment ID: 20000573 Result: Up-regulated in Transcription
  misc_feature: MA Experiment 20000573 PARAMETER Experiment Name: At_100uM_ABA_Mutants__P Parameter: Organism Value: A. thaliana
  misc_feature: MA Experiment 20000573 PARAMETER Experiment Name: At_100uM_ABA_Mutants__P Parameter: Plant Line Value: CS22 vs. Ler wt
  misc_feature: MA Experiment 20000573 PARAMETER Experiment Name: At_100uM_ABA_Mutants__P Parameter: Timepoint (hr) Value: N/A
  misc_feature: MA Experiment 20000573 PARAMETER Experiment Name: At_100uM_ABA_Mutants__P Parameter: Tissue Value: Whole Plant
  misc_feature: MA Experiment 20000573 PARAMETER Experiment Name: At_100uM_ABA_Mutants__P Parameter: Treatment Value: None
  misc_feature: MA Experiment ID: 20000574 Result: Up-regulated in Transcription
  misc_feature: MA Experiment 20000574 PARAMETER Experiment Name: At_100uM_ABA_Mutants__P Parameter: Organism Value: A. thaliana
  misc_feature: MA Experiment 20000574 PARAMETER Experiment Name: At_100uM_ABA_Mutants__P Parameter: Plant Line Value: CS23 vs. Ler wt
  misc_feature: MA Experiment 20000574 PARAMETER Experiment Name: At_100uM_ABA_Mutants__P Parameter: Timepoint (hr) Value: N/A
  misc_feature: MA Experiment 20000574 PARAMETER Experiment Name: At_100uM_ABA_Mutants__P Parameter: Tissue Value: Whole Plant
  misc_feature: MA Experiment 20000574 PARAMETER Experiment Name: At_100uM_ABA_Mutants__P Parameter: Treatment Value: None
atttttgattagtgtgaataaataaattttaagaacaacaagttacccaatcatttgaaaaaatgatactataattcgctaaacttttttataaaagaaaaattaagagcaattgggaacgagaacgtgttgaatagttggggacgagattacaagcaccaattcatcttcagcatcatctccaaattcttcttaaaattttcttcttcctcctttaccatctccagcaccggacctagtcaaaaagtctttcttctcaaatggatcaaaagcctcttggattgctcacgatccacgtcaagagagggattaatctcgccattcgcgaccatcgtagcagcgatccttacatcgttctcaacgtcgccgatcagacattgaagacacgtgtggtgaaaaaaaattgtaacccagtatggaatgaagaaatgactgttgctatcaaagatcctaatgtcccaatccgcttgacagtgtttgattgggacaagttcacaggagatgacaaaatgggagatgcgaacatagacattcaaccatacttagaggctttgaaaatggggatggagcttttgaggctacctaatgggtgtgctatcaaaagggttcaaccatcaaggcacaattgtttatctgatgagagtagcattgtttggaacaatggtaagatcacacaagacttgatccttagacttaacaatgtcgaatgtggcgagattgagatcatgcttgaatggcatgaaggtgctggttgcagaggtatcacttcctcttccaaaggtggaggctcttcctctacctaaacttattattgttctttctttctttctttttttgttgttgtgtatcaatctgttgttgttgtttccatatgtataagcaactcaagtatgttttcttgatgaccattttcaatggcataatcaagaagaaaagctggaaaatttgagactttcttttgtatgttttcatttg

SEQ ID NO: 39847 - protein, 180 aa, Arabidopsis thaliana
  peptide (1)..(180): Ceres Seq. ID no. 12558383
  misc_feature (9)..(88): Pfam Name: C2 domain Pfam Description: C2 domain
  misc_feature (1)..(159): Homolog of NCBI NO: 1808694 NR Description: hypothetical protein [Sporobolus stapfianus]
  misc_feature (1)..(168): Homolog of NCBI NO: 15223248 NR Description: unknown protein; protein id: At1g70800.1
  misc_feature (1)..(168): Homolog of NCBI NO: 30684739 NR Description: C2 domain-containing protein [Arabidopsis
  misc_feature (1)..(168): Homolog of NCBI NO: 25405940 NR Description: protein T1N15.21 [imported] - Arabidopsis
  misc_feature (1)..(168): Homolog of NCBI NO: 15221907 NR Description: unknown protein; protein id: At1g48590.1
  misc_feature (6)..(168): Homolog of NCBI NO: 15240322 NR Description: putative protein
  misc_feature (6)..(168): Homolog of NCBI NO: 13430460 NR Description: unknown protein [Arabidopsis thaliana]
  misc_feature (6)..(168): Homolog of NCBI NO: 18409682 NR Description: expressed protein
  misc_feature (1)..(168): Homolog of NCBI NO: 18409675 NR Description: zinc finger and C2 domain protein, putative
  misc_feature (1)..(180): Homolog of NCBI NO: 15226306 NR Description: hypothetical protein
MDQKPLGLLTIHVKRGINLAIRDHRSSDPYIVLNVADQTLKTRVVKKNCNPVWNEEMTVAIKDPNVPIRLTVFDWDKFTGDDKMGDANIDIQPYLEALKMGMELLRLPNGCAIKRVQPSRHNCLSDESSIVWNNGKITQDLILRLNNVECGEIEIMLEWHEGAGCRGITSSSKGGGSSST

SEQ ID NO: 39848 - protein, 124 aa, Arabidopsis thaliana
  peptide (1)..(124): Ceres Seq. ID no. 12558384
  misc_feature (1)..(103): Homolog of NCBI NO: 1808694 NR Description: hypothetical protein [Sporobolus stapfianus]
  misc_feature (1)..(112): Homolog of NCBI NO: 15223248 NR Description: unknown protein; protein id: At1g70800.1
  misc_feature (1)..(112): Homolog of NCBI NO: 30684739 NR Description: C2 domain-containing protein [Arabidopsis
  misc_feature (1)..(112): Homolog of NCBI NO: 25405940 NR Description: protein T1N15.21 [imported] - Arabidopsis
  misc_feature (1)..(112): Homolog of NCBI NO: 15221907 NR Description: unknown protein; protein id: At1g48590.1
  misc_feature (1)..(112): Homolog of NCBI NO: 15240322 NR Description: putative protein
  misc_feature (1)..(112): Homolog of NCBI NO: 13430460 NR Description: unknown protein [Arabidopsis thaliana]
  misc_feature (1)..(112): Homolog of NCBI NO: 18409682 NR Description: expressed protein
  misc_feature (1)..(112): Homolog of NCBI NO: 18409675 NR Description: zinc finger and C2 domain protein, putative
  misc_feature (1)..(124): Homolog of NCBI NO: 15226306 NR Description: hypothetical protein
MTVAIKDPNVPIRLTVFDWDKFTGDDKMGDANIDIQPYLEALKMGMELLRLPNGCAIKRVQPSRHNCLSDESSIVWNNGKITQDLILRLNNVECGEIEIMLEWHEGAGCRGITSSSKGGGSSST

SEQ ID NO: 39849 - protein, 97 aa, Arabidopsis thaliana
  peptide (1)..(97): Ceres Seq. ID no. 12558385
  misc_feature (1)..(76): Homolog of NCBI NO: 1808694 NR Description: hypothetical protein [Sporobolus stapfianus]
  misc_feature (1)..(85): Homolog of NCBI NO: 15223248 NR Description: unknown protein; protein id: At1g70800.1
  misc_feature (1)..(85): Homolog of NCBI NO: 30684739 NR Description: C2 domain-containing protein [Arabidopsis
  misc_feature (1)..(85): Homolog of NCBI NO: 25405940 NR Description: protein T1N15.21 [imported] - Arabidopsis
  misc_feature (1)..(85): Homolog of NCBI NO: 15221907 NR Description: unknown protein; protein id: At1g48590.1
  misc_feature (1)..(85): Homolog of NCBI NO: 15240322 NR Description: putative protein
  misc_feature (1)..(85): Homolog of NCBI NO: 13430460 NR Description: unknown protein [Arabidopsis thaliana]
  misc_feature (1)..(85): Homolog of NCBI NO: 18409682 NR Description: expressed protein
  misc_feature (1)..(85): Homolog of NCBI NO: 18409675 NR Description: zinc finger and C2 domain protein, putative
  misc_feature (1)..(97): Homolog of NCBI NO: 15226306 NR Description: hypothetical protein
MGDANIDIQPYLEALKMGMELLRLPNGCAIKRVQPSRHNCLSDESSIVWNNGKITQDLILRLNNVECGEIEIMLEWHEGAGCRGITSSSKGGGSSST

SEQ ID NO: 39850 - DNA, 1133 bp, Arabidopsis thaliana
  misc_feature (1)..(1133): Ceres Seq. ID no. 12331239
  misc_feature: MA Experiment ID: 108595 Result: Up-regulated in Transcription
  misc_feature: MA Experiment 108595 PARAMETER Experiment Name: At_Ler-pi_Ovule_cDNA_P Parameter: Plant Line Value: null
  misc_feature: MA Experiment ID: 20001556 Result: Up-regulated in Transcription
  misc_feature: MA Experiment 20001556 PARAMETER Experiment Name: At_Drought_Soil_Dry_P Parameter: Age (day) Value: 26
  misc_feature: MA Experiment 20001556 PARAMETER Experiment Name: At_Drought_Soil_Dry_P Parameter: Organism Value: A. thaliana
  misc_feature: MA Experiment 20001556 PARAMETER Experiment Name: At_Drought_Soil_Dry_P Parameter: Plant Line Value: WS
  misc_feature: MA Experiment 20001556 PARAMETER Experiment Name: At_Drought_Soil_Dry_P Parameter: Post Timepoint (hr) Value: None
  misc_feature: MA Experiment 20001556 PARAMETER Experiment Name: At_Drought_Soil_Dry_P Parameter: Post-Treatment Value: None
  misc_feature: MA Experiment 20001556 PARAMETER Experiment Name: At_Drought_Soil_Dry_P Parameter: Timepoint (day) Value: 12
  misc_feature: MA Experiment 20001556 PARAMETER Experiment Name: At_Drought_Soil_Dry_P Parameter: Treatment Value: Drought vs. No Drought
actttctctttgttttctttctaacctctttccacgaaaagtcacgatgggagataccgcagaggatcaggacgaccgagctatgatggaagctgaaggagtaacgagcttctccgaacttcttatgttctctgacggcgttctcagctcctcttccgaccaccaacctgagggtaatgtcggcgatggtggagaagacagtttaggttttgtattctccggcaaaactggctcaagaatgctctgttttagtggaggctatcaaaacgacgacgagtcactcttcctagaaccttctgttccaacctccggagtctctgatcttgacccttcatgcattaagattgattgcaggaactcaaacgacgcgtgtacggtcgataaatctactaaatcatcaaccaagaagagaaccggaacgggtaatgggcaagagtcggatcaaaatcgaaaaccgggcaagaaagggaaacgaaatcaagagaaatcatcagttggaattgcaaaggtcaggaaagaaaggttaggggaaagaattgcagcgttgcagcagttggtttctccatacggcaagacagatgcagcttctgtgttgcatgaagcgatgggttacatcaaattcttacaagatcagattcaagtcctttgctctccttatctaatcaaccattctctcgacggtggagttgtcaccggagatgtaatggcggcgatgaaagcgaaagacttgagaagcagaggattatgtctagtacctgtctcatccaccgtacacgtggaaaattccaacggtgctgatttctggtcacctgctactatgggtcacactacgtcaccgtcgttacctcaaggattttaattaaacggtcgtaggctgatatatattagtagtattttagtagccttttttcttgggttttgtttttggctgaagaactattactagtaaatgttacacccagacatttttttgggattatctgggtggtataaaaaggttggaatcttttgtgtttgtaaaattagattgtctaagttttcttaaagtttctttgatgtcactgtcacagttgcgacgagtagtgatggtacttactgaaaggctaagcttattcacgctcttaaagttttgc

SEQ ID NO: 39851 - protein, 285 aa, Arabidopsis thaliana
  peptide (1)..(285): Ceres Seq. ID no. 12331240
  misc_feature (169)..(208): Pfam Name: Helix-loop-helix DNA-binding domain Pfam Description: Helix-loop-helix DNA-binding domain
  misc_feature (132)..(270): Homolog of NCBI NO: 22093671 NR Description: similar to bHLH (Basic-helix-loop-helix)
  misc_feature (127)..(276): Homolog of NCBI NO: 9294343 NR Description: gene_id:F3H11.2~unknown protein [Arabidopsis
  misc_feature (127)..(276): Homolog of NCBI NO: 15232315 NR Description: hypothetical protein; protein id: At3g20640.1
  misc_feature (118)..(271): Homolog of NCBI NO: 21740790 NR Description: OSJNBb0091E11.4 [Oryza sativa (japonica
  misc_feature (168)..(279): Homolog of NCBI NO: 5669656 NR Description: ER33 protein [Lycopersicon esculentum]
  misc_feature (80)..(278): Homolog of NCBI NO: 14488370 NR Description: putative ethylene-responsive protein
  misc_feature (231)..(278): Homolog of NCBI NO: 15222826 NR Description: hypothetical protein; protein id: At1g49830.1
  misc_feature (30)..(177): Homolog of NCBI NO: 15222826 NR Description: hypothetical protein; protein id: At1g49830.1
  misc_feature (16)..(285): Homolog of NCBI NO: 21536756 NR Description: unknown [Arabidopsis thaliana]
  misc_feature (16)..(285): Homolog of NCBI NO: 18402256 NR Description: expressed protein
LSLCFLSNLFPRKVTMGDTAEDQDDRAMMEAEGVTSFSELLMFSDGVLSSSSDHQPEGNVGDGGEDSLGFVFSGKTGSRMLCFSGGYQNDDESLFLEPSVPTSGVSDLDPSCIKIDCRNSNDACTVDKSTKSSTKKRTGTGNGQESDQNRKPGKKGKRNQEKSSVGIAKVRKERLGERIAALQQLVSPYGKTDAASVLHEAMGYIKFLQDQIQVLCSPYLINHSLDGGVVTGDVMAAMKAKDLRSRGLCLVPVSSTVHVENSNGADFWSPATMGHTTSPSLPQGF

SEQ ID NO: 39852 - protein, 270 aa, Arabidopsis thaliana
  peptide (1)..(270): Ceres Seq. ID no. 12331241
  misc_feature (154)..(193): Pfam Name: Helix-loop-helix DNA-binding domain Pfam Description: Helix-loop-helix DNA-binding domain
  misc_feature (117)..(255): Homolog of NCBI NO: 22093671 NR Description: similar to bHLH (Basic-helix-loop-helix)
  misc_feature (112)..(261): Homolog of NCBI NO: 9294343 NR Description: gene_id:F3H11.2~unknown protein [Arabidopsis
  misc_feature (112)..(261): Homolog of NCBI NO: 15232315 NR Description: hypothetical protein; protein id: At3g20640.1
  misc_feature (103)..(256): Homolog of NCBI NO: 21740790 NR Description: OSJNBb0091E11.4 [Oryza sativa (japonica
  misc_feature (153)..(264): Homolog of NCBI NO: 5669656 NR Description: ER33 protein [Lycopersicon esculentum]
  misc_feature (65)..(263): Homolog of NCBI NO: 14488370 NR Description: putative ethylene-responsive protein
  misc_feature (216)..(263): Homolog of NCBI NO: 15222826 NR Description: hypothetical protein; protein id: At1g49830.1
  misc_feature (15)..(162): Homolog of NCBI NO: 15222826 NR Description: hypothetical protein; protein id: At1g49830.1
  misc_feature (1)..(270): Homolog of NCBI NO: 21536756 NR Description: unknown [Arabidopsis thaliana]
  misc_feature (1)..(270): Homolog of NCBI NO: 18402256 NR Description: expressed protein
MGDTAEDQDDRAMMEAEGVTSFSELLMFSDGVLSSSSDHQPEGNVGDGGEDSLGFVFSGKTGSRMLCFSGGYQNDDESLFLEPSVPTSGVSDLDPSCIKIDCRNSNDACTVDKSTKSSTKKRTGTGNGQESDQNRKPGKKGKRNQEKSSVGIAKVRKERLGERIAALQQLVSPYGKTDAASVLHEAMGYIKFLQDQIQVLCSPYLINHSLDGGVVTGDVMAAMKAKDLRSRGLCLVPVSSTVHVENSNGADFWSPATMGHTTSPSLPQGF

SEQ ID NO: 39853 - protein, 258 aa, Arabidopsis thaliana
  peptide (1)..(258): Ceres Seq. ID no. 12331242
  misc_feature (142)..(181): Pfam Name: Helix-loop-helix DNA-binding domain Pfam Description: Helix-loop-helix DNA-binding domain
  misc_feature (105)..(243): Homolog of NCBI NO: 22093671 NR Description: similar to bHLH (Basic-helix-loop-helix)
  misc_feature (100)..(249): Homolog of NCBI NO: 9294343 NR Description: gene_id:F3H11.2~unknown protein [Arabidopsis
  misc_feature (100)..(249): Homolog of NCBI NO: 15232315 NR Description: hypothetical protein; protein id: At3g20640.1
  misc_feature (91)..(244): Homolog of NCBI NO: 21740790 NR Description: OSJNBb0091E11.4 [Oryza sativa (japonica
  misc_feature (141)..(252): Homolog of NCBI NO: 5669656 NR Description: ER33 protein [Lycopersicon esculentum]
  misc_feature (53)..(251): Homolog of NCBI NO: 14488370 NR Description: putative ethylene-responsive protein
  misc_feature (204)..(251): Homolog of NCBI NO: 15222826 NR Description: hypothetical protein; protein id: At1g49830.1
  misc_feature (3)..(150): Homolog of NCBI NO: 15222826 NR Description: hypothetical protein; protein id: At1g49830.1
  misc_feature (1)..(258): Homolog of NCBI NO: 21536756 NR Description: unknown [Arabidopsis thaliana]
  misc_feature (1)..(258): Homolog of NCBI NO: 18402256 NR Description: expressed protein
MMEAEGVTSFSELLMFSDGVLSSSSDHQPEGNVGDGGEDSLGFVFSGKTGSRMLCFSGGYQNDDESLFLEPSVPTSGVSDLDPSCIKIDCRNSNDACTVDKSTKSSTKKRTGTGNGQESDQNRKPGKKGKRNQEKSSVGIAKVRKERLGERIAALQQLVSPYGKTDAASVLHEAMGYIKFLQDQIQVLCSPYLINHSLDGGVVTGDVMAAMKAKDLRSRGLCLVPVSSTVHVENSNGADFWSPATMGHTTSPSLPQGF

SEQ ID NO: 39854 - DNA, 659 bp, Arabidopsis thaliana
  misc_feature (1)..(659): Ceres Seq. ID no. 12337484
  misc_feature: MA Experiment ID: 20000169 Result: Down-regulated in Transcription
  misc_feature: MA Experiment 20000169 PARAMETER Experiment Name: At_100uM_ABA_P Parameter: Age (day) Value: 14
  misc_feature: MA Experiment 20000169 PARAMETER Experiment Name: At_100uM_ABA_P Parameter: Organism Value: A. thaliana
  misc_feature: MA Experiment 20000169 PARAMETER Experiment Name: At_100uM_ABA_P Parameter: Plant Line Value: WS
  misc_feature: MA Experiment 20000169 PARAMETER Experiment Name: At_100uM_ABA_P Parameter: Timepoint (hr) Value: 6
  misc_feature: MA Experiment 20000169 PARAMETER Experiment Name: At_100uM_ABA_P Parameter: Tissue Value: Aerial
  misc_feature: MA Experiment 20000169 PARAMETER Experiment Name: At_100uM_ABA_P Parameter: Treatment Value: 100uM ABA vs. No Treatment
  misc_feature: MA Experiment ID: 20000180 Result: Down-regulated in Transcription
  misc_feature: MA Experiment 20000180 PARAMETER Experiment Name: At_Germinating_Seeds_P Parameter: Age (hr) Value: 24 vs. 0
  misc_feature: MA Experiment 20000180 PARAMETER Experiment Name: At_Germinating_Seeds_P Parameter: Tissue Value: Germinating Seeds
  misc_feature: MA Experiment ID: 20000184 Result: Up-regulated in Transcription
  misc_feature: MA Experiment 20000184 PARAMETER Experiment Name: At_Shoots__P Parameter: Age (day) Value: 7
  misc_feature: MA Experiment 20000184 PARAMETER Experiment Name: At_Shoots__P Parameter: Tissue Value: Shoots vs. Whole Plant
  misc_feature: MA Experiment ID: 20000267 Result: Down-regulated in Transcription
  misc_feature: MA Experiment 20000267 PARAMETER Experiment Name: At_Drought_P Parameter: Age (day) Value: 7
  misc_feature: MA Experiment 20000267 PARAMETER Experiment Name: At_Drought_P Parameter: Organism Value: A. thaliana
  misc_feature: MA Experiment 20000267 PARAMETER Experiment Name: At_Drought_P Parameter: Plant Line Value: WS
  misc_feature: MA Experiment 20000267 PARAMETER Experiment Name: At_Drought_P Parameter: Timepoint (hr) Value: 6
  misc_feature: MA Experiment 20000267 PARAMETER Experiment Name: At_Drought_P Parameter: Tissue Value: Whole Plant
  misc_feature: MA Experiment 20000267 PARAMETER Experiment Name: At_Drought_P Parameter: Treatment Value: Drought vs. No Drought
  misc_feature: MA Experiment ID: 20000286 Result: Up-regulated in Transcription
  misc_feature: MA Experiment 20000286 PARAMETER Experiment Name: At_Open_Flower_P Parameter: Age (day) Value: 21
  misc_feature: MA Experiment 20000286 PARAMETER Experiment Name: At_Open_Flower_P Parameter: Plant Line Value: WS
  misc_feature: MA Experiment 20000286 PARAMETER Experiment Name: At_Open_Flower_P Parameter: Tissue Value: Half Open vs. Whole Plant
  misc_feature: MA Experiment ID: 20000436 Result: Down-regulated in Transcription
  misc_feature: MA Experiment 20000436 PARAMETER Experiment Name: At_Drought_P Parameter: Age (day) Value: 7
  misc_feature: MA Experiment 20000436 PARAMETER Experiment Name: At_Drought_P Parameter: Organism Value: A. thaliana
  misc_feature: MA Experiment 20000436 PARAMETER Experiment Name: At_Drought_P Parameter: Plant Line Value: WS
  misc_feature: MA Experiment 20000436 PARAMETER Experiment Name: At_Drought_P Parameter: Timepoint (hr) Value: 12
  misc_feature: MA Experiment 20000436 PARAMETER Experiment Name: At_Drought_P Parameter: Tissue Value: Whole Plant
  misc_feature: MA Experiment 20000436 PARAMETER Experiment Name: At_Drought_P Parameter: Treatment Value: Drought vs. No Drought
  misc_feature: MA Experiment ID: 20000437 Result: Down-regulated in Transcription
  misc_feature: MA Experiment 20000437 PARAMETER Experiment Name: At_Drought_P Parameter: Age (day) Value: 8
  misc_feature: MA Experiment 20000437 PARAMETER Experiment Name: At_Drought_P Parameter: Organism Value: A. thaliana
  misc_feature: MA Experiment 20000437 PARAMETER Experiment Name: At_Drought_P Parameter: Plant Line Value: WS
  misc_feature: MA Experiment 20000437 PARAMETER Experiment Name: At_Drought_P Parameter: Timepoint (hr) Value: 24
  misc_feature: MA Experiment 20000437 PARAMETER Experiment Name: At_Drought_P Parameter: Tissue Value: Whole Plant
  misc_feature: MA Experiment 20000437 PARAMETER Experiment Name: At_Drought_P Parameter: Treatment Value: Drought vs. No Drought
  misc_feature: MA Experiment ID: 20000438 Result: Up-regulated in Transcription
  misc_feature: MA Experiment 20000438 PARAMETER Experiment Name: At_Shoots__P Parameter: Age (day) Value: 14
  misc_feature: MA Experiment 20000438 PARAMETER Experiment Name: At_Shoots__P Parameter: Tissue Value: Shoots vs. Whole Plant
  misc_feature: MA Experiment ID: 20000451 Result: Up-regulated in Transcription
  misc_feature: MA Experiment 20000451 PARAMETER Experiment Name: At_CS6879_Shoots-Roots_P Parameter: Age (day) Value: 14
  misc_feature: MA Experiment 20000451 PARAMETER Experiment Name: At_CS6879_Shoots-Roots_P Parameter: Organism Value: A. thaliana
  misc_feature: MA Experiment 20000451 PARAMETER Experiment Name: At_CS6879_Shoots-Roots_P Parameter: Plant Line Value: CS6879 vs. WS
  misc_feature: MA Experiment 20000451 PARAMETER Experiment Name: At_CS6879_Shoots-Roots_P Parameter: Tissue Value: Roots
  misc_feature: MA Experiment ID: 20000453 Result: Down-regulated in Transcription
  misc_feature: MA Experiment 20000453 PARAMETER Experiment Name: At_100uM_ABA_P Parameter: Age (day) Value: 15
  misc_feature: MA Experiment 20000453 PARAMETER Experiment Name: At_100uM_ABA_P Parameter: Organism Value: A. thaliana
  misc_feature: MA Experiment 20000453 PARAMETER Experiment Name: At_100uM_ABA_P Parameter: Plant Line Value: WS
  misc_feature: MA Experiment 20000453 PARAMETER Experiment Name: At_100uM_ABA_P Parameter: Timepoint (hr) Value: 24
  misc_feature: MA Experiment 20000453 PARAMETER Experiment Name: At_100uM_ABA_P Parameter: Tissue Value: Aerial
  misc_feature: MA Experiment 20000453 PARAMETER Experiment Name: At_100uM_ABA_P Parameter: Treatment Value: 100uM ABA vs. No Treatment
  misc_feature: MA Experiment ID: 20000573 Result: Down-regulated in Transcription
  misc_feature: MA Experiment 20000573 PARAMETER Experiment Name: At_100uM_ABA_Mutants__P Parameter: Organism Value: A. thaliana
  misc_feature: MA Experiment 20000573 PARAMETER Experiment Name: At_100uM_ABA_Mutants__P Parameter: Plant Line Value: CS22 vs. Ler wt
  misc_feature: MA Experiment 20000573 PARAMETER Experiment Name: At_100uM_ABA_Mutants__P Parameter: Timepoint (hr) Value: N/A
  misc_feature: MA Experiment 20000573 PARAMETER Experiment Name: At_100uM_ABA_Mutants__P Parameter: Tissue Value: Whole Plant
  misc_feature: MA Experiment 20000573 PARAMETER Experiment Name: At_100uM_ABA_Mutants__P Parameter: Treatment Value: None
  misc_feature: MA Experiment ID: 20001248 Result: Up-regulated in Transcription
  misc_feature: MA Experiment 20001248 PARAMETER Experiment Name: At_Far-red-induction_P Parameter: Age (day) Value: 7
  misc_feature: MA Experiment 20001248 PARAMETER Experiment Name: At_Far-red-induction_P Parameter: Light Value: Far-red vs. White
  misc_feature: MA Experiment 20001248 PARAMETER Experiment Name: At_Far-red-induction_P Parameter: Organism Value: A. thaliana
  misc_feature: MA Experiment 20001248 PARAMETER Experiment Name: At_Far-red-induction_P Parameter: Plant Line Value: Columbia
  misc_feature: MA Experiment 20001248 PARAMETER Experiment Name: At_Far-red-induction_P Parameter: Timepoint (hr) Value: 4
  misc_feature: MA Experiment 20001248 PARAMETER Experiment Name: At_Far-red-induction_P Parameter: Tissue Value: Whole Plant
  misc_feature: MA Experiment ID: 20001450 Result: Up-regulated in Transcription
  misc_feature: MA Experiment 20001450 PARAMETER Experiment Name: At_Far-red-induction_P Parameter: Age (day) Value: 7
  misc_feature: MA Experiment 20001450 PARAMETER Experiment Name: At_Far-red-induction_P Parameter: Light Value: Far-red vs. White
  misc_feature: MA Experiment 20001450 PARAMETER Experiment Name: At_Far-red-induction_P Parameter: Organism Value: A. thaliana
  misc_feature: MA Experiment 20001450 PARAMETER Experiment Name: At_Far-red-induction_P Parameter: Plant Line Value: Columbia
  misc_feature: MA Experiment 20001450 PARAMETER Experiment Name: At_Far-red-induction_P Parameter: Timepoint (hr) Value: 8
  misc_feature: MA Experiment 20001450 PARAMETER Experiment Name: At_Far-red-induction_P Parameter: Tissue Value: Whole Plant
  misc_feature: MA Experiment ID: 20001554 Result: Down-regulated in Transcription
  misc_feature: MA Experiment 20001554 PARAMETER Experiment Name: At_Drought_Soil_Dry_P Parameter: Age (day) Value: 21
  misc_feature: MA Experiment 20001554 PARAMETER Experiment Name: At_Drought_Soil_Dry_P Parameter: Organism Value: A. thaliana
  misc_feature: MA Experiment 20001554 PARAMETER Experiment Name: At_Drought_Soil_Dry_P Parameter: Plant Line Value: WS
  misc_feature: MA Experiment 20001554 PARAMETER Experiment Name: At_Drought_Soil_Dry_P Parameter: Post Timepoint (hr) Value: None
  misc_feature: MA Experiment 20001554 PARAMETER Experiment Name: At_Drought_Soil_Dry_P Parameter: Post-Treatment Value: None
  misc_feature: MA Experiment 20001554 PARAMETER Experiment Name: At_Drought_Soil_Dry_P Parameter: Timepoint (day) Value: 7
  misc_feature: MA Experiment 20001554 PARAMETER Experiment Name: At_Drought_Soil_Dry_P Parameter: Treatment Value: Drought vs. No Drought
  misc_feature: MA Experiment ID: 20001555 Result: Down-regulated in Transcription
  misc_feature: MA Experiment 20001555 PARAMETER Experiment Name: At_Drought_Soil_Dry_P Parameter: Age (day) Value: 24
  misc_feature: MA Experiment 20001555 PARAMETER Experiment Name: At_Drought_Soil_Dry_P Parameter: Organism Value: A. thaliana
  misc_feature: MA Experiment 20001555 PARAMETER Experiment Name: At_Drought_Soil_Dry_P Parameter: Plant Line Value: WS
  misc_feature: MA Experiment 20001555 PARAMETER Experiment Name: At_Drought_Soil_Dry_P Parameter: Post Timepoint (hr) Value: None
  misc_feature: MA Experiment 20001555 PARAMETER Experiment Name: At_Drought_Soil_Dry_P Parameter: Post-Treatment Value: None
  misc_feature: MA Experiment 20001555 PARAMETER Experiment Name: At_Drought_Soil_Dry_P Parameter: Timepoint (day) Value: 10
  misc_feature: MA Experiment 20001555 PARAMETER Experiment Name: At_Drought_Soil_Dry_P Parameter: Treatment Value: Drought vs. No Drought
  misc_feature: MA Experiment ID: 20001556 Result: Down-regulated in Transcription
  misc_feature: MA Experiment 20001556 PARAMETER Experiment Name: At_Drought_Soil_Dry_P Parameter: Age (day) Value: 26
  misc_feature: MA Experiment 20001556 PARAMETER Experiment Name: At_Drought_Soil_Dry_P Parameter: Organism Value: A. thaliana
  misc_feature: MA Experiment 20001556 PARAMETER Experiment Name: At_Drought_Soil_Dry_P Parameter: Plant Line Value: WS
  misc_feature: MA Experiment 20001556 PARAMETER Experiment Name: At_Drought_Soil_Dry_P Parameter: Post Timepoint (hr) Value: None
  misc_feature: MA Experiment 20001556 PARAMETER Experiment Name: At_Drought_Soil_Dry_P Parameter: Post-Treatment Value: None
  misc_feature: MA Experiment 20001556 PARAMETER Experiment Name: At_Drought_Soil_Dry_P Parameter: Timepoint (day) Value: 12
  misc_feature: MA Experiment 20001556 PARAMETER Experiment Name: At_Drought_Soil_Dry_P Parameter: Treatment Value: Drought vs. No Drought
  misc_feature: MA Experiment ID: 20001557 Result: Up-regulated in Transcription
  misc_feature: MA Experiment 20001557 PARAMETER Experiment Name: At_Drought_Soil_Dry_P Parameter: Age (day) Value: 27
  misc_feature: MA Experiment 20001557 PARAMETER Experiment Name: At_Drought_Soil_Dry_P Parameter: Organism Value: A. thaliana
  misc_feature: MA Experiment 20001557 PARAMETER Experiment Name: At_Drought_Soil_Dry_P Parameter: Plant Line Value: WS
  misc_feature: MA Experiment 20001557 PARAMETER Experiment Name: At_Drought_Soil_Dry_P Parameter: Post Timepoint (hr) Value: 3
  misc_feature: MA Experiment 20001557 PARAMETER Experiment Name: At_Drought_Soil_Dry_P Parameter: Post-Treatment Value: Re-Water vs. No Drought
  misc_feature: MA Experiment 20001557 PARAMETER Experiment Name: At_Drought_Soil_Dry_P Parameter: Timepoint (day) Value: 13
  misc_feature: MA Experiment 20001557 PARAMETER Experiment Name: At_Drought_Soil_Dry_P Parameter: Treatment Value: Drought vs. No Drought
  misc_feature: MA Experiment ID: 20001558 Result: Up-regulated in Transcription
  misc_feature: MA Experiment 20001558 PARAMETER Experiment Name: At_Drought_Soil_Dry_P Parameter: Age (day) Value: 27
  misc_feature: MA Experiment 20001558 PARAMETER Experiment Name: At_Drought_Soil_Dry_P Parameter: Organism Value: A. thaliana
  misc_feature: MA Experiment 20001558 PARAMETER Experiment Name: At_Drought_Soil_Dry_P Parameter: Plant Line Value: WS
  misc_feature: MA Experiment 20001558 PARAMETER Experiment Name: At_Drought_Soil_Dry_P Parameter: Post Timepoint (hr) Value: 6
  misc_feature: MA Experiment 20001558 PARAMETER Experiment Name: At_Drought_Soil_Dry_P Parameter: Post-Treatment Value: Re-Water vs. No Drought
  misc_feature: MA Experiment 20001558 PARAMETER Experiment Name: At_Drought_Soil_Dry_P Parameter: Timepoint (day) Value: 13
  misc_feature: MA Experiment 20001558 PARAMETER Experiment Name: At_Drought_Soil_Dry_P Parameter: Treatment Value: Drought vs. No Drought
  misc_feature: MA Experiment ID: 20001559 Result: Down-regulated in Transcription
  misc_feature: MA Experiment 20001559 PARAMETER Experiment Name: At_Drought_Soil_Dry_P Parameter: Age (day) Value: 28
  misc_feature: MA Experiment 20001559 PARAMETER Experiment Name: At_Drought_Soil_Dry_P Parameter: Organism Value: A. thaliana
  misc_feature: MA Experiment 20001559 PARAMETER Experiment Name: At_Drought_Soil_Dry_P Parameter: Plant Line Value: WS
  misc_feature: MA Experiment 20001559 PARAMETER Experiment Name: At_Drought_Soil_Dry_P Parameter: Post Timepoint (hr) Value: 29
  misc_feature: MA Experiment 20001559 PARAMETER Experiment Name: At_Drought_Soil_Dry_P Parameter: Post-Treatment Value: Re-Water vs. No Drought
  misc_feature: MA Experiment 20001559 PARAMETER Experiment Name: At_Drought_Soil_Dry_P Parameter: Timepoint (day) Value: 14
  misc_feature: MA Experiment 20001559 PARAMETER Experiment Name: At_Drought_Soil_Dry_P Parameter: Treatment Value: Drought vs. No Drought
  misc_feature: MA Experiment ID: 20001757 Result: Up-regulated in Transcription
  misc_feature: MA Experiment 20001757 PARAMETER Experiment Name: At_50mM_NH4NO3_L-to-H_P Parameter: Timepoint (hr) Value: 6
  misc_feature: MA Experiment 20001757 PARAMETER Experiment Name: At_50mM_NH4NO3_L-to-H_P Parameter: Tissue Value: Leaf
  misc_feature: MA Experiment 20001757 PARAMETER Experiment Name: At_50mM_NH4NO3_L-to-H_P Parameter: Treatment Value: 50mM NH4NO3 vs 100mM Mannitol
  misc_feature: MA Experiment ID: 20001905 Result: Down-regulated in Transcription
  misc_feature: MA Experiment 20001905 PARAMETER Experiment Name: At_Drought_Reproduction_P Parameter: Age (day) Value: 40
  misc_feature: MA Experiment 20001905 PARAMETER Experiment Name: At_Drought_Reproduction_P Parameter: Organism Value: A. thaliana
  misc_feature: MA Experiment 20001905 PARAMETER Experiment Name: At_Drought_Reproduction_P Parameter: Plant Line Value: WS
  misc_feature: MA Experiment 20001905 PARAMETER Experiment Name: At_Drought_Reproduction_P Parameter: Timepoint (day) Value: 10
  misc_feature: MA Experiment 20001905 PARAMETER Experiment Name: At_Drought_Reproduction_P Parameter: Tissue Value: Rosettes
  misc_feature: MA Experiment 20001905 PARAMETER Experiment Name: At_Drought_Reproduction_P Parameter: Treatment Value: Drought vs. No Drought
  misc_feature: MA Experiment ID: 20001906 Result: Down-regulated in Transcription
  misc_feature: MA Experiment 20001906 PARAMETER Experiment Name: At_Drought_Reproduction_P Parameter: Age (day) Value: 35
  misc_feature: MA Experiment 20001906 PARAMETER Experiment Name: At_Drought_Reproduction_P Parameter: Organism Value: A. thaliana
  misc_feature: MA Experiment 20001906 PARAMETER Experiment Name: At_Drought_Reproduction_P Parameter: Plant Line Value: WS
  misc_feature: MA Experiment 20001906 PARAMETER Experiment Name: At_Drought_Reproduction_P Parameter: Timepoint (day) Value: 5
  misc_feature: MA Experiment 20001906 PARAMETER Experiment Name: At_Drought_Reproduction_P Parameter: Tissue Value: Siliques
  misc_feature: MA Experiment 20001906 PARAMETER Experiment Name: At_Drought_Reproduction_P Parameter: Treatment Value: Drought vs. No Drought
  misc_feature: MA Experiment ID: 20001908 Result: Down-regulated in Transcription
  misc_feature: MA Experiment 20001908 PARAMETER Experiment Name: At_Drought_Reproduction_P Parameter: Age (day) Value: 40
  misc_feature: MA Experiment 20001908 PARAMETER Experiment Name: At_Drought_Reproduction_P Parameter: Organism Value: A. thaliana
  misc_feature: MA Experiment 20001908 PARAMETER Experiment Name: At_Drought_Reproduction_P Parameter: Plant Line Value: WS
  misc_feature: MA Experiment 20001908 PARAMETER Experiment Name: At_Drought_Reproduction_P Parameter: Timepoint (day) Value: 10
  misc_feature: MA Experiment 20001908 PARAMETER Experiment Name: At_Drought_Reproduction_P Parameter: Tissue Value: Siliques
  misc_feature: MA Experiment 20001908 PARAMETER Experiment Name: At_Drought_Reproduction_P Parameter: Treatment Value: Drought vs. No Drought
  misc_feature: MA Experiment ID: 20001911 Result: Down-regulated in Transcription
  misc_feature: MA Experiment 20001911 PARAMETER Experiment Name: At_Drought_Reproduction_P Parameter: Age (day) Value: 40
  misc_feature: MA Experiment 20001911 PARAMETER Experiment Name: At_Drought_Reproduction_P Parameter: Organism Value: A. thaliana
  misc_feature: MA Experiment 20001911 PARAMETER Experiment Name: At_Drought_Reproduction_P Parameter: Plant Line Value: WS
  misc_feature: MA Experiment 20001911 PARAMETER Experiment Name: At_Drought_Reproduction_P Parameter: Timepoint (day) Value: 10
  misc_feature: MA Experiment 20001911 PARAMETER Experiment Name: At_Drought_Reproduction_P Parameter: Tissue Value: Flowers
  misc_feature: MA Experiment 20001911 PARAMETER Experiment Name: At_Drought_Reproduction_P Parameter: Treatment Value: Drought vs. No Drought
tgaacatttctcagtcccacagggtcgcagagctattgagcttgtagcgggtaaagagagtgccatcgctcaagtggttcggactgtcattgggaagacttacgtgctgtcttttgcggttgtagacgccaacaatgcttgcaaaggatcaatggtggttgaggcttttgcaggaaaagatacacttaaggtcccttacgagtcgaaaggcacaggagggtttaaacgagcttctattcgatttgtggcggtttcgacccgatcaagaattatgttctacagcactttctatgccatgaggagcgatgatttctcgtcattgtgtgggcctgtgatcgatgatgtcaagcttataagcgttcgtaaaccatagatgaatcaccaatcctattacaagaaaatgcatcgtgtggtcttcttttattttccttaaactgtctttggtgtgtgttggattttattgaaacgagaaggtgaaaaaaacagagttttatttacgagagttagggttttatataggcagatgggcctttgcttatattgtattttcttgtatgagaaggcaaaagaaacgttgcctatatcttatgtatctaggccttttaatttttatggaagagttacaaaacttacaataaagttgtatgcatattttactt

SEQ ID NO: 39855 - protein, 123 aa, Arabidopsis thaliana
  peptide (1)..(123): Ceres Seq. ID no. 12337485
  misc_feature (1)..(121): Pfam Name: Protein of unknown function, DUF642 Pfam Description: Protein of unknown function, DUF642
  misc_feature (2)..(122): Homolog of NCBI NO: 7488741 NR Description: hypothetical protein precursor - alfalfa
  misc_feature (1)..(123): Homolog of NCBI NO: 18418018 NR Description: putative protein
  misc_feature (1)..(123): Homolog of NCBI NO: 7486632 NR Description: hypothetical protein F8B4.160 - Arabidopsis
  misc_feature (1)..(123): Homolog of NCBI NO: 7488898 NR Description: hypothetical protein - castor bean
  misc_feature (1)..(123): Homolog of NCBI NO: 23397043 NR Description: unknown protein [Arabidopsis thaliana]
  misc_feature (1)..(123): Homolog of NCBI NO: 21554402 NR Description: unknown [Arabidopsis thaliana]
  misc_feature (1)..(123): Homolog of NCBI NO: 15239049 NR Description: putative protein
  misc_feature (1)..(123): Homolog of NCBI NO: 21537379 NR Description: unknown [Arabidopsis thaliana]
  misc_feature (1)..(123): Homolog of NCBI NO: 15809822 NR Description: AT5g25460/F18G18_200 [Arabidopsis thaliana]
  misc_feature (1)..(123): Homolog of NCBI NO: 15239438 NR Description: putative protein
EHFSVPQGRRAIELVAGKESAIAQVVRTVIGKTYVLSFAVVDANNACKGSMVVEAFAGKDTLKVPYESKGTGGFKRASIRFVAVSTRSRIMFYSTFYAMRSDDFSSLCGPVIDDVKLISVRKP

SEQ ID NO: 39856 - protein, 73 aa, Arabidopsis thaliana
  peptide (1)..(73): Ceres Seq. ID no. 12337486
  misc_feature (1)..(71): Pfam Name: Protein of unknown function, DUF642 Pfam Description: Protein of unknown function, DUF642
  misc_feature (1)..(72): Homolog of NCBI NO: 7488741 NR Description: hypothetical protein precursor - alfalfa
  misc_feature (1)..(73): Homolog of NCBI NO: 18418018 NR Description: putative protein
  misc_feature (1)..(73): Homolog of NCBI NO: 7486632 NR Description: hypothetical protein F8B4.160 - Arabidopsis
  misc_feature (1)..(73): Homolog of NCBI NO: 7488898 NR Description: hypothetical protein - castor bean
  misc_feature (1)..(73): Homolog of NCBI NO: 23397043 NR Description: unknown protein [Arabidopsis thaliana]
  misc_feature (1)..(73): Homolog of NCBI NO: 21554402 NR Description: unknown [Arabidopsis thaliana]
  misc_feature (1)..(73): Homolog of NCBI NO: 15239049 NR Description: putative protein
  misc_feature (1)..(73): Homolog of NCBI NO: 21537379 NR Description: unknown [Arabidopsis thaliana]
  misc_feature (1)..(73): Homolog of NCBI NO: 15809822 NR Description: AT5g25460/F18G18_200 [Arabidopsis thaliana]
  misc_feature (1)..(73): Homolog of NCBI NO: 15239438 NR Description: putative protein
MVVEAFAGKDTLKVPYESKGTGGFKRASIRFVAVSTRSRIMFYSTFYAMRSDDFSSLCGPVIDDVKLISVRKP

SEQ ID NO: 39857 - DNA, 2108 bp, Arabidopsis thaliana
  misc_feature (1)..(2108): Ceres Seq. ID no. 13592781
  misc_feature: MA Experiment ID: 20000184 Result: Down-regulated in Transcription
  misc_feature: MA Experiment 20000184 PARAMETER Experiment Name: At_Shoots__P Parameter: Age (day) Value: 7
  misc_feature: MA Experiment 20000184 PARAMETER Experiment Name: At_Shoots__P Parameter: Tissue Value: Shoots vs. Whole Plant
  misc_feature: MA Experiment ID: 20000214 Result: Down-regulated in Transcription
  misc_feature: MA Experiment 20000214 PARAMETER Experiment Name: At_4deg_Cold_P Parameter: Timepoint (hr) Value: 6
  misc_feature: MA Experiment ID: 20000496 Result: Up-regulated in Transcription
  misc_feature: MA Experiment 20000496 PARAMETER Experiment Name: At_Guard_Cells_P Parameter: Harvest Date Value: 7/19/2002
  misc_feature: MA Experiment 20000496 PARAMETER Experiment Name: At_Guard_Cells_P Parameter: Organism Value: Canola
  misc_feature: MA Experiment 20000496 PARAMETER Experiment Name: At_Guard_Cells_P Parameter: Tissue Value: Guard Cells vs. Leaves
  misc_feature: MA Experiment ID: 20001450 Result: Up-regulated in Transcription
  misc_feature: MA Experiment 20001450 PARAMETER Experiment Name: At_Far-red-induction_P Parameter: Age (day) Value: 7
  misc_feature: MA Experiment 20001450 PARAMETER Experiment Name: At_Far-red-induction_P Parameter: Light Value: Far-red vs. White
  misc_feature: MA Experiment 20001450 PARAMETER Experiment Name: At_Far-red-induction_P Parameter: Organism Value: A. thaliana
  misc_feature: MA Experiment 20001450 PARAMETER Experiment Name: At_Far-red-induction_P Parameter: Plant Line Value: Columbia
  misc_feature: MA Experiment 20001450 PARAMETER Experiment Name: At_Far-red-induction_P Parameter: Timepoint (hr) Value: 8
  misc_feature: MA Experiment 20001450 PARAMETER Experiment Name: At_Far-red-induction_P Parameter: Tissue Value: Whole Plant
  misc_feature: MA Experiment ID: 20001905 Result: Up-regulated in Transcription
  misc_feature: MA Experiment 20001905 PARAMETER Experiment Name: At_Drought_Reproduction_P Parameter: Age (day) Value: 40
  misc_feature: MA Experiment 20001905 PARAMETER Experiment Name: At_Drought_Reproduction_P Parameter: Organism Value: A. thaliana
  misc_feature: MA Experiment 20001905 PARAMETER Experiment Name: At_Drought_Reproduction_P Parameter: Plant Line Value: WS
  misc_feature: MA Experiment 20001905 PARAMETER Experiment Name: At_Drought_Reproduction_P Parameter: Timepoint (day) Value: 10
  misc_feature: MA Experiment 20001905 PARAMETER Experiment Name: At_Drought_Reproduction_P Parameter: Tissue Value: Rosettes
  misc_feature: MA Experiment 20001905 PARAMETER Experiment Name: At_Drought_Reproduction_P Parameter: Treatment Value: Drought vs. No Drought
ctttctaacctacaacatcctaatcgaaaagttgttgtcctaaaattatggttcttccttgtgaatattgcttgatctaggaaactaatcaggatctggtgagaaatcaataagatgttggagaaagagtttttcacggagtatggtgaagcaagtcaatatcagatccaagaagttgttggcaaaggaagctacggagttgttgcttctgcggaatgtccacacacgggaggcaaagtagccatcaagaagatgacaaatgtgtttgaacatgtctcagatgctattcgtatcctcagagagatcaagcttctcaggcttcttcgacatcctgatatcgtggagatcaagcatatcatgcttcctccttgtcgcaaggaattcaaagatatatatgttgtttttgagttgatggagtctgatcttcaccacgttcttaaggtaaatgacgacctcactcctcagcatcatcaattcttcttgtaccaacttcttcgtggcttaaaattcatgcactcaggtaaggtttctttgttcccttgttgttttctctagctcttacattttcatctgaagatatattgtgtgtttttctttgaatcttgcttcttatcatattttgttcttgtattatagctcatgtgttccatagagatctgaagcctaagaacatcctcgctaatgctgattgcaaaatcaagatctgtgatttaggacttgctcgtgtctcctttactgattccccttctgctgtgttttggactgactacgttgctacaagatggtaccgtgcgccagagctctgtggttccttctattctaactacacgccggcgattgacatgtggagtgttgggtgcatatttgcagagatgctaactggaaaacctttgtttcctggcaaaaacgttgtgcaccagctagaactcgtgactgatctgcttggaactccgtcgccgataactctatccagggtttgttttgtttttatttttcccggaagctaaactaactctcccaatacagaggcttctctctctctatctccgagagatagacttgctttgaatgcaagtgtgtttttattagctttgtgtgtcatgaagttgtttataatgaatctgtgtagattcggaatgagaaggctagaaagtatttgggaaacatgaggcgaaaggatcctgtacctttcacccataaattccccaatatcgatcctgtggcgctgaagttacttcagcgtttgatcgcttttgacccaaaggaccgtccctctgcaaaagaggcattggctgatccgtattttcaaggattggcaaatgtggactatgaaccatcgaggcaacctatctcgaaacttgagtttgagtttgagaggaggaaattgactcgcgatgacgtgagggaactcatgtacagagagattttggagtatcatccacagatgttgcaagagtatctacaaggagaagagaacataaactctcattttctatacccaagcggagttgatcagttcaaacaagagtttgcccgactcgaagaacacaacgacgatgaagaggaacacaactccccaccacatcagagaaagtacacttcactcccytagagaacgggtgtgctcatcagaagacgaaggttctgattcagttcatgctcaatcgtcttcagcttcagtggtgtttacacctccacagactccaaacacagcaactggcttatcatcacagaaggcgtcacaagtagataaagcagcaactccggtaaaacggtctgcatgtctaatgaggagtgatagtatctgtgcttcaagatgtgttggtgtctcctctgcagtgtcatagtcagaaaaaaattgatttctcaagttgtttagcagcaaaccattgattattgtgttctgcctattgtatcatgatgtctctcctgagtgttttcattgttgtaactctcttcttcttcttcttactctctgctcatattggaatctcgtgtgtaatggtttctcttggaacttgaaattcatatatatattcttattaccaaaaaaaaaaaaaaaaaagcttatcakrtaccgtcgacctcgaggggggggccccggtacc

SEQ ID NO: 39858 - protein, 148 aa, Arabidopsis thaliana
  peptide (1)..(148): Ceres Seq. ID no. 15221147
  misc_feature (1)..(148): Homolog of NCBI NO: 37594657 NR Description: mitogen activated protein kinase 6 [Zea mays]
  misc_feature (1)..(148): Homolog of NCBI NO: 25406284 NR Description: probable MAP kinase F25P22.9 [imported] -
  misc_feature (1)..(128): Homolog of NCBI NO: 15220976 NR Description: mitogen-activated protein kinase (MAPK), putative
  misc_feature (1)..(148): Homolog of NCBI NO: 6689924 NR Description: MAP kinase homolog [Oryza sativa]
  misc_feature (1)..(148): Homolog of NCBI NO: 5815410 NR Description: blast and wounding induced mitogen-activated
  misc_feature (1)..(148): Homolog of NCBI NO: 7106544 NR Description: ATMPK9 [Arabidopsis thaliana]
  misc_feature (1)..(148): Homolog of NCBI NO: 18401750 NR Description: mitogen-activated protein kinase (MAPK), putative
  misc_feature (1)..(148): Homolog of NCBI NO: 9294059 NR Description: MAP kinase [Arabidopsis thaliana]
  misc_feature (1)..(112): Homolog of NCBI NO: 25410906 NR Description: probable MAP kinase [imported] - Arabidopsis
  misc_feature (1)..(148): Homolog of NCBI NO: 30677926 NR Description: mitogen-activated protein kinase (MAPK), putative
  misc_feature (148)..(148): Xaa is any aa, unknown or other
MRRKDPVPFTHKFPNIDPVALKLLQRLIAFDPKDRPSAKEALADPYFQGLANVDYEPSRQPISKLEFEFERRKLTRDDVRELMYREILEYHPQMLQEYLQGEENINSHFLYPSGVDQFKQEFARLEEHNDDEEEHNSPPHQRKYTSLX

SEQ ID NO: 39859 - protein, 146 aa, Arabidopsis thaliana
  peptide (1)..(146): Ceres Seq. ID no. 15221148
  misc_feature (16)..(138): Pfam Name: Protein kinase domain Pfam Description: Protein kinase domain
  misc_feature (3)..(138): Homolog of NCBI NO: 37594657 NR Description: mitogen activated protein kinase 6 [Zea mays]
  misc_feature (5)..(138): Homolog of NCBI NO: 25406284 NR Description: probable MAP kinase F25P22.9 [imported] -
  misc_feature (1)..(138): Homolog of NCBI NO: 15220976 NR Description: mitogen-activated protein kinase (MAPK), putative
  misc_feature (5)..(138): Homolog of NCBI NO: 6689924 NR Description: MAP kinase homolog [Oryza sativa]
  misc_feature (5)..(138): Homolog of NCBI NO: 5815410 NR Description: blast and wounding induced mitogen-activated
  misc_feature (2)..(138): Homolog of NCBI NO: 7106544 NR Description: ATMPK9 [Arabidopsis thaliana]
  misc_feature (2)..(138): Homolog of NCBI NO: 18401750 NR Description: mitogen-activated protein kinase (MAPK), putative
  misc_feature (2)..(138): Homolog of NCBI NO: 9294059 NR Description: MAP kinase [Arabidopsis thaliana]
  misc_feature (1)..(138): Homolog of NCBI NO: 25410906 NR Description: probable MAP kinase [imported] - Arabidopsis
  misc_feature (1)..(138): Homolog of NCBI NO: 30677926 NR Description: mitogen-activated protein kinase (MAPK), putative
MLEKEFFTEYGEASQYQIQEVVGKGSYGVVASAECPHTGGKVAIKKMTNVFEHVSDAIRILREIKLLRLLRHPDIVEIKHIMLPPCRKEFKDIYVVFELMESDLHHVLKVNDDLTPQHHQFFLYQLLRGLKFMHSGKVSLFPCCFL

SEQ ID NO: 39860 - protein, 100 aa, Arabidopsis thaliana
  peptide (1)..(100): Ceres Seq. ID no. 15221149
  misc_feature (1)..(92): Pfam Name: Protein kinase domain Pfam Description: Protein kinase domain
  misc_feature (1)..(92): Homolog of NCBI NO: 37594657 NR Description: mitogen activated protein kinase 6 [Zea mays]
  misc_feature (1)..(92): Homolog of NCBI NO: 25406284 NR Description: probable MAP kinase F25P22.9 [imported] -
  misc_feature (1)..(92): Homolog of NCBI NO: 15220976 NR Description: mitogen-activated protein kinase (MAPK), putative
  misc_feature (1)..(92): Homolog of NCBI NO: 6689924 NR Description: MAP kinase homolog [Oryza sativa]
  misc_feature (1)..(92): Homolog of NCBI NO: 5815410 NR Description: blast and wounding induced mitogen-activated
  misc_feature (1)..(92): Homolog of NCBI NO: 7106544 NR Description: ATMPK9 [Arabidopsis thaliana]
  misc_feature (1)..(92): Homolog of NCBI NO: 18401750 NR Description: mitogen-activated protein kinase (MAPK), putative
  misc_feature (1)..(92): Homolog of NCBI NO: 9294059 NR Description: MAP kinase [Arabidopsis thaliana]
  misc_feature (1)..(92): Homolog of NCBI NO: 25410906 NR Description: probable MAP kinase [imported] - Arabidopsis
  misc_feature (1)..(92): Homolog of NCBI NO: 30677926 NR Description: mitogen-activated protein kinase (MAPK), putative
MTNVFEHVSDAIRILREIKLLRLLRHPDIVEIKHIMLPPCRKEFKDIYVVFELMESDLHHVLKVNDDLTPQHHQFFLYQLLRGLKFMHSGKVSLFPCCFL

SEQ ID NO: 39861 - DNA, 945 bp, Arabidopsis thaliana
  misc_feature (1)..(945): Ceres Seq. ID no. 13646055
  misc_feature: MA Experiment ID: 20000184 Result: Up-regulated in Transcription
  misc_feature: MA Experiment 20000184 PARAMETER Experiment Name: At_Shoots__P Parameter: Age (day) Value: 7
  misc_feature: MA Experiment 20000184 PARAMETER Experiment Name: At_Shoots__P Parameter: Tissue Value: Shoots vs. Whole Plant
  misc_feature: MA Experiment ID: 20000185 Result: Down-regulated in Transcription
  misc_feature: MA Experiment 20000185 PARAMETER Experiment Name: At_Roots__P Parameter: Age (day) Value: 7 vs. 21
  misc_feature: MA Experiment 20000185 PARAMETER Experiment Name: At_Roots__P Parameter: Organism Value: A. thaliana
  misc_feature: MA Experiment 20000185 PARAMETER Experiment Name: At_Roots__P Parameter: Tissue Value: Roots vs. Whole Plant
  misc_feature: MA Experiment ID: 20000439 Result: Down-regulated in Transcription
  misc_feature: MA Experiment 20000439 PARAMETER Experiment Name: At_Roots__P Parameter: Age (day) Value: 14 vs. 21
  misc_feature: MA Experiment 20000439 PARAMETER Experiment Name: At_Roots__P Parameter: Organism Value: A. thaliana
  misc_feature: MA Experiment 20000439 PARAMETER Experiment Name: At_Roots__P Parameter: Tissue Value: Roots vs. Whole Plant
  misc_feature: MA Experiment ID: 20000495 Result: Down-regulated in Transcription
  misc_feature: MA Experiment 20000495 PARAMETER Experiment Name: At_Guard_Cells_P Parameter: Harvest Date Value: 8/2/2002
  misc_feature: MA Experiment 20000495 PARAMETER Experiment Name: At_Guard_Cells_P Parameter: Organism Value: A. thaliana
  misc_feature: MA Experiment 20000495 PARAMETER Experiment Name: At_Guard_Cells_P Parameter: Tissue Value: Guard Cells vs. Leaves
  misc_feature: MA Experiment ID: 20000496 Result: Down-regulated in Transcription
  misc_feature: MA Experiment 20000496 PARAMETER Experiment Name: At_Guard_Cells_P Parameter: Harvest Date Value: 7/19/2002
  misc_feature: MA Experiment 20000496 PARAMETER Experiment Name: At_Guard_Cells_P Parameter: Organism Value: Canola
  misc_feature: MA Experiment 20000496 PARAMETER Experiment Name: At_Guard_Cells_P Parameter: Tissue Value: Guard Cells vs. Leaves
  misc_feature: MA Experiment ID: 20000794 Result: Down-regulated in Transcription
  misc_feature: MA Experiment 20000794 PARAMETER Experiment Name: At_Petals_P Parameter: Age (day) Value: 23-25 days
  misc_feature: MA Experiment 20000794 PARAMETER Experiment Name: At_Petals_P Parameter: Plant Line Value: WS
  misc_feature: MA Experiment 20000794 PARAMETER Experiment Name: At_Petals_P Parameter: Tissue Value: Petals vs. Whole plant
  misc_feature: MA Experiment ID: 20001451 Result: Down-regulated in Transcription
  misc_feature: MA Experiment 20001451 PARAMETER Experiment Name: At_Far-red-induction_P Parameter: Age (day) Value: 7
  misc_feature: MA Experiment 20001451 PARAMETER Experiment Name: At_Far-red-induction_P Parameter: Light Value: Far-red vs. White
  misc_feature: MA Experiment 20001451 PARAMETER Experiment Name: At_Far-red-induction_P Parameter: Organism Value: A. thaliana
  misc_feature: MA Experiment 20001451 PARAMETER Experiment Name: At_Far-red-induction_P Parameter: Plant Line Value: Columbia
  misc_feature: MA Experiment 20001451 PARAMETER Experiment Name: At_Far-red-induction_P Parameter: Timepoint (hr) Value: 24
  misc_feature: MA Experiment 20001451 PARAMETER Experiment Name: At_Far-red-induction_P Parameter: Tissue Value: Whole Plant
  misc_feature: MA Experiment ID: 20001757 Result: Up-regulated in Transcription
  misc_feature: MA Experiment 20001757 PARAMETER Experiment Name: At_50mM_NH4NO3_L-to-H_P Parameter: Timepoint (hr) Value: 6
  misc_feature: MA Experiment 20001757 PARAMETER Experiment Name: At_50mM_NH4NO3_L-to-H_P Parameter: Tissue Value: Leaf
  misc_feature: MA Experiment 20001757 PARAMETER Experiment Name: At_50mM_NH4NO3_L-to-H_P Parameter: Treatment Value: 50mM NH4NO3 vs 100mM Mannitol
atcttctcaagctttcttcttctacaacacatctagagctttgcaacaatggaggcgagtgcgaatgaaccagctatgaaaagcttgaaatccaatccttcaggaccgataccgaactttttcgtatcgctctcttcggcatttacgcaaacacctcttgtgcgttcgaacaaacccaatttgcttcttctaccaccagttgcagactccgtcaaattgattcaagactttcatcagtctctgatttctgctactgagaaatttaaaggattcctccattcgctcgcctctaagaaccctctctttcaggaagcggttcgcctatcttccgaatttcacattttgtgcgacgagattcgtttgagaaacactacaagggtgaggtttgcgatgtctaatcacggatttgcagcggttctgcctggagattcagttgcaggattggtggttgctaatggtttgatcaatttcctcaacatatataacaccatccttgtcgtccgtctagtactcacctggttcccgagtgctcctcctgccattgttaaccccctcagcactttatgtgatccatacttgaacattttccggggattcataccgcctcttggaggattagatttgtctcccattttggcgttccttgttctcaacgccttcaccagctcggctatggcacttccttgcgaactcccgtcagctgatggagccgtttctccagcttctagtgagacaaagtgggtgagaaggagaaggttgagcagccacaaagaccacagaccgagctcagcttctatgacctgaacctgtctaaaatatctactcttttctgcgcttcaaatgtaaaatctacctttcgagtaattttattactctgtatctttggatttctgagttttgtataaattttctttagaaaatgaataaaagagttgtgttcctgac

SEQ ID NO: 39862 - protein, 251 aa, Arabidopsis thaliana
  peptide (1)..(251): Ceres Seq. ID no. 13646056
  misc_feature (111)..(206): Homolog of NCBI NO: 21617923 NR Description: unknown [Arabidopsis thaliana]
  misc_feature (111)..(206): Homolog of NCBI NO: 18397948 NR Description: expressed protein [Arabidopsis thaliana]
  misc_feature (142)..(202): Homolog of NCBI NO: 33240375 NR Description: Uncharacterized YGGT family conserved membrane
  misc_feature (142)..(202): Homolog of NCBI NO: 33861467 NR Description: conserved hypothetical membrane protein
  misc_feature (138)..(210): Homolog of NCBI NO: 16329433 NR Description: hypothetical protein [Synechocystis sp. PCC 6803]
  misc_feature (134)..(201): Homolog of NCBI NO: 37523109 NR Description: hypothetical protein [Gloeobacter violaceus]
  misc_feature (138)..(220): Homolog of NCBI NO: 17229553 NR Description: hypothetical protein [Nostoc sp. PCC 7120]
  misc_feature (121)..(201): Homolog of NCBI NO: 22298077 NR Description: ORF_ID:tsr0534~hypothetical protein
  misc_feature (103)..(236): Homolog of NCBI NO: 27436744 NR Description: Hypothetical protein [Oryza sativa (japonica
  misc_feature (1)..(251): Homolog of NCBI NO: 22326932 NR Description: expressed protein [Arabidopsis thaliana]
MEASANEPAMKSLKSNPSGPIPNFFVSLSSAFTQTPLVRSNKPNLLLLPPVADSVKLIQDFHQSLISATEKFKGFLHSLASKNPLFQEAVRLSSEFHILCDEIRLRNTTRVRFAMSNHGFAAVLPGDSVAGLVVANGLINFLNIYNTILVVRLVLTWFPSAPPAIVNPLSTLCDPYLNIFRGFIPPLGGLDLSPILAFLVLNAFTSSAMALPCELPSADGAVSPASSETKWVRRRRLSSHKDHRPSSASMT

SEQ ID NO: 39863 - protein, 242 aa, Arabidopsis thaliana
  peptide (1)..(242): Ceres Seq. ID no. 13646057
  misc_feature (102)..(197): Homolog of NCBI NO: 21617923 NR Description: unknown [Arabidopsis thaliana]
  misc_feature (102)..(197): Homolog of NCBI NO: 18397948 NR Description: expressed protein [Arabidopsis thaliana]
  misc_feature (133)..(193): Homolog of NCBI NO: 33240375 NR Description: Uncharacterized YGGT family conserved membrane
  misc_feature (133)..(193): Homolog of NCBI NO: 33861467 NR Description: conserved hypothetical membrane protein
  misc_feature (129)..(201): Homolog of NCBI NO: 16329433 NR Description: hypothetical protein [Synechocystis sp. PCC 6803]
  misc_feature (125)..(192): Homolog of NCBI NO: 37523109 NR Description: hypothetical protein [Gloeobacter violaceus]
  misc_feature (129)..(211): Homolog of NCBI NO: 17229553 NR Description: hypothetical protein [Nostoc sp. PCC 7120]
  misc_feature (112)..(192): Homolog of NCBI NO: 22298077 NR Description: ORF_ID:tsr0534~hypothetical protein
  misc_feature (94)..(227): Homolog of NCBI NO: 27436744 NR Description: Hypothetical protein [Oryza sativa (japonica
  misc_feature (1)..(242): Homolog of NCBI NO: 22326932 NR Description: expressed protein [Arabidopsis thaliana]
MKSLKSNPSGPIPNFFVSLSSAFTQTPLVRSNKPNLLLLPPVADSVKLIQDFHQSLISATEKFKGFLHSLASKNPLFQEAVRLSSEFHILCDEIRLRNTTRVRFAMSNHGFAAVLPGDSVAGLVVANGLINFLNIYNTILVVRLVLTWFPSAPPAIVNPLSTLCDPYLNIFRGFIPPLGGLDLSPILAFLVLNAFTSSAMALPCELPSADGAVSPASSETKWVRRRRLSSHKDHRPSSASMT

SEQ ID NO: 39864 - protein, 137 aa, Arabidopsis thaliana
  peptide (1)..(137): Ceres Seq. ID no. 13646058
  misc_feature (1)..(92): Homolog of NCBI NO: 21617923 NR Description: unknown [Arabidopsis thaliana]
  misc_feature (1)..(92): Homolog of NCBI NO: 18397948 NR Description: expressed protein [Arabidopsis thaliana]
  misc_feature (28)..(88): Homolog of NCBI NO: 33240375 NR Description: Uncharacterized YGGT family conserved membrane
  misc_feature (28)..(88): Homolog of NCBI NO: 33861467 NR Description: conserved hypothetical membrane protein
  misc_feature (24)..(96): Homolog of NCBI NO: 16329433 NR Description: hypothetical protein [Synechocystis sp. PCC 6803]
  misc_feature (20)..(87): Homolog of NCBI NO: 37523109 NR Description: hypothetical protein [Gloeobacter violaceus]
  misc_feature (24)..(106): Homolog of NCBI NO: 17229553 NR Description: hypothetical protein [Nostoc sp. PCC 7120]
  misc_feature (7)..(87): Homolog of NCBI NO: 22298077 NR Description: ORF_ID:tsr0534~hypothetical protein
  misc_feature (1)..(122): Homolog of NCBI NO: 27436744 NR Description: Hypothetical protein [Oryza sativa (japonica
  misc_feature (1)..(137): Homolog of NCBI NO: 22326932 NR Description: expressed protein [Arabidopsis thaliana]
MSNHGFAAVLPGDSVAGLVVANGLINFLNIYNTILVVRLVLTWFPSAPPAIVNPLSTLCDPYLNIFRGFIPPLGGLDLSPILAFLVLNAFTSSAMALPCELPSADGAVSPASSETKWVRRRRLSSHKDHRPSSASMT

SEQ ID NO: 39865 - DNA, 1226 bp, Arabidopsis thaliana
  misc_feature (1)..(1226): Ceres Seq. ID no. 12328962
  misc_feature: MA Experiment ID: 108488 Result: Down-regulated in Transcription
  misc_feature: MA Experiment ID: 108569 Result: Down-regulated in Transcription
  misc_feature: MA Experiment 108569 PARAMETER Experiment Name: At_0.001%_MeJA__cDNA_P Parameter: Timepoint (hr) Value: 6
  misc_feature: MA Experiment 108569 PARAMETER Experiment Name: At_0.001%_MeJA__cDNA_P Parameter: Tissue Value: Aerial
  misc_feature: MA Experiment 108569 PARAMETER Experiment Name: At_0.001%_MeJA__cDNA_P Parameter: Treatment Value: 0.001% MeJA vs. No Treatment
  misc_feature: MA Experiment ID: 108585 Result: Up-regulated in Transcription
  misc_feature: MA Experiment 108585 PARAMETER Experiment Name: At_5mM_NaNP_cDNA_P Parameter: Timepoint (hr) Value: 6
  misc_feature: MA Experiment 108585 PARAMETER Experiment Name: At_5mM_NaNP_cDNA_P Parameter: Tissue Value: Aerial
  misc_feature: MA Experiment 108585 PARAMETER Experiment Name: At_5mM_NaNP_cDNA_P Parameter: Treatment Value: null
  misc_feature: MA Experiment ID: 108594 Result: Up-regulated in Transcription
  misc_feature: MA Experiment 108594 PARAMETER Experiment Name: At_Ler-rhl_Root_cDNA_P Parameter: Plant Line Value: null
  misc_feature: MA Experiment ID: 108607 Result: Up-regulated in Transcription
  misc_feature: MA Experiment 108607 PARAMETER Experiment Name: At_100uM_ABA_cDNA_P Parameter: Timepoint (hr) Value: 4
  misc_feature: MA Experiment 108607 PARAMETER Experiment Name: At_100uM_ABA_cDNA_P Parameter: Tissue Value: Aerial
  misc_feature: MA Experiment 108607 PARAMETER Experiment Name: At_100uM_ABA_cDNA_P Parameter: Treatment Value: 100uM ABA vs. No Treatment
  misc_feature: MA Experiment ID: 108668 Result: Up-regulated in Transcription
  misc_feature: MA Experiment 108668 PARAMETER Experiment Name: At_2mM_SA_cDNA_P Parameter: Plant Line Value: WS
  misc_feature: MA Experiment 108668 PARAMETER Experiment Name: At_2mM_SA_cDNA_P Parameter: Timepoint (hr) Value: 6
  misc_feature: MA Experiment 108668 PARAMETER Experiment Name: At_2mM_SA_cDNA_P Parameter: Treatment Value: 2mM SA vs. No Treatment
  misc_feature: MA Experiment ID: 20000111 Result: Down-regulated in Transcription
  misc_feature: MA Experiment 20000111 PARAMETER Experiment Name: At_42deg_Heat_cDNA_P Parameter: Temperature (deg C) Value: 42 vs. 22
  misc_feature: MA Experiment 20000111 PARAMETER Experiment Name: At_42deg_Heat_cDNA_P Parameter: Timepoint (hr) Value: 6
  misc_feature: MA Experiment 20000111 PARAMETER Experiment Name: At_42deg_Heat_cDNA_P Parameter: Tissue Value: Aerial
  misc_feature: MA Experiment ID: 20000265 Result: Up-regulated in Transcription
  misc_feature: MA Experiment 20000265 PARAMETER Experiment Name: At_Open_Flower_P Parameter: Age (day) Value: 21
  misc_feature: MA Experiment 20000265 PARAMETER Experiment Name: At_Open_Flower_P Parameter: Plant Line Value: WS
  misc_feature: MA Experiment 20000265 PARAMETER Experiment Name: At_Open_Flower_P Parameter: Tissue Value: Closed Flower vs. Whole Plant
  misc_feature: MA Experiment ID: 20000437 Result: Up-regulated in Transcription
  misc_feature: MA Experiment 20000437 PARAMETER Experiment Name: At_Drought_P Parameter: Age (day) Value: 8
  misc_feature: MA Experiment 20000437 PARAMETER Experiment Name: At_Drought_P Parameter: Organism Value: A. thaliana
  misc_feature: MA Experiment 20000437 PARAMETER Experiment Name: At_Drought_P Parameter: Plant Line Value: WS
  misc_feature: MA Experiment 20000437 PARAMETER Experiment Name: At_Drought_P Parameter: Timepoint (hr) Value: 24
  misc_feature: MA Experiment 20000437 PARAMETER Experiment Name: At_Drought_P Parameter: Tissue Value: Whole Plant
  misc_feature: MA Experiment 20000437 PARAMETER Experiment Name: At_Drought_P Parameter: Treatment Value: Drought vs. No Drought
  misc_feature: MA Experiment ID: 20001905 Result: Up-regulated in Transcription
  misc_feature: MA Experiment 20001905 PARAMETER Experiment Name: At_Drought_Reproduction_P Parameter: Age (day) Value: 40
  misc_feature: MA Experiment 20001905 PARAMETER Experiment Name: At_Drought_Reproduction_P Parameter: Organism Value: A. thaliana
  misc_feature: MA Experiment 20001905 PARAMETER Experiment Name: At_Drought_Reproduction_P Parameter: Plant Line Value: WS
  misc_feature: MA Experiment 20001905 PARAMETER Experiment Name: At_Drought_Reproduction_P Parameter: Timepoint (day) Value: 10
  misc_feature: MA Experiment 20001905 PARAMETER Experiment Name: At_Drought_Reproduction_P Parameter: Tissue Value: Rosettes
  misc_feature: MA Experiment 20001905 PARAMETER Experiment Name: At_Drought_Reproduction_P Parameter: Treatment Value: Drought vs. No Drought
gttcacatgcacccccaaaaaaaaaaactaattttttttcttttttcttctcctcatcttcagagttttgagatttgtgattgcctccatgcaagagctgaattagccgaatctggatgtcttattctgaaaaaacgacggtggatccacttctgagagatttggatgagaagaaagagagtttccggcgaaacgtggtgtctctggctacggagctgaagcaagtgaggggccgtttggtttctcaagaacaatcttttcttaaagagaccattactagaaaagaagcagagaaaaggggaaagaatatggaaatggagatttgtaaattgcagaagagattggaagaaaggaattgtcagcttgaagcttctgcatctgctgctgataagtttatcaaagagttggaggaatttagattaaagcttgatacaaccaagcaaaccgcagaggcaagtgctgattctgctcaatctacaaagatccaatgctcaatgctaaagcaacaacttgacgacaaaacacgttctctcagagaacaagaagaccgtatgactcagcttggtcatcagcttgatgatctacagagaggtctgagcttgagagagtgctcagaaaagcagcttagagaagaagttaggagaatcgagcgtgaggttactgaggccattgcaaaagcgggaataggtggcatggacagcgagctccagaaacttctagaagatgtgtctccaatgaaatttgagaggatgaataggctagttgaagtaaaagacgaagagattacaaaactgaaagatgagataaggttaatgtcaggtcaatggaaacataagactaaggaactcgaatctcagctggagaaacagagaagaactgatcaagatttgaagaagaaggtattgaagctagagttctgtttacaagaagctcgaagccagacaagaaagctgcaaaggaaaggggaaagaagggacatggagatcaaagagataagagatcttatatcggagaagcaaaaccttaacaatgagtcttgggataaacagaagttctgggacaattcagggttcaagattgttgtatcaatgtctatgttgatgttagtggtagtctccaagagatgatgaattttgtaatgtataaatttagttgcagatagttgatgaggataatctaactcatgtatgtgtcgtcttcaggtctaatataacagccatgtactt

SEQ ID NO: 39866 - protein, 336 aa, Arabidopsis thaliana
  peptide (1)..(336): Ceres Seq. ID no. 12328963
  misc_feature (6)..(320): Pfam Name: Myosin tail Pfam Description: Myosin tail
  misc_feature (6)..(299): Homolog of NCBI NO: 31144 NR Description: myosin heavy chain (1167 AA) [Homo sapiens]
  misc_feature (6)..(320): Homolog of NCBI NO: 4249699 NR Description: myosin heavy chain [Rana catesbeiana]
  misc_feature (210)..(336): Homolog of NCBI NO: 34894370 NR Description: unnamed protein product [Oryza sativa (japonica
  misc_feature (233)..(326): Homolog of NCBI NO: 22329441 NR Description: similar to contains similarity to myosin heavy
  misc_feature (10)..(335): Homolog of NCBI NO: 25402551 NR Description: hypothetical protein [imported] - Arabidopsis
  misc_feature (10)..(336): Homolog of NCBI NO: 22329439 NR Description: hypothetical protein; protein id: At1g09470.1
  misc_feature (1)..(329): Homolog of NCBI NO: 7485248 NR Description: hypothetical protein A_IG002P16.20 - Arabidopsis
  misc_feature (1)..(336): Homolog of NCBI NO: 18421042 NR Description: putative protein
  misc_feature (4)..(336): Homolog of NCBI NO: 4097950 NR Description: plant IF-like protein [Arabidopsis thaliana]
  misc_feature (1)..(336): Homolog of NCBI NO: 18397379 NR Description: expressed protein
MSYSEKTTVDPLLRDLDEKKESFRRNVVSLATELKQVRGRLVSQEQSFLKETITRKEAEKRGKNMEMEICKLQKRLEERNCQLEASASAADKFIKELEEFRLKLDTTKQTAEASADSAQSTKIQCSMLKQQLDDKTRSLREQEDRMTQLGHQLDDLQRGLSLRECSEKQLREEVRRIEREVTEAIAKAGIGGMDSELQKLLEDVSPMKFERMNRLVEVKDEEITKLKDEIRLMSGQWKHKTKELESQLEKQRRTDQDLKKKVLKLEFCLQEARSQTRKLQRKGERRDMEIKEIRDLISEKQNLNNESWDKQKFWDNSGFKIVVSMSMLMLVVVSKR

SEQ ID NO: 39867 - protein, 272 aa, Arabidopsis thaliana
  peptide (1)..(272): Ceres Seq. ID no. 12328964
  misc_feature (1)..(256): Pfam Name: Myosin tail Pfam Description: Myosin tail
  misc_feature (1)..(235): Homolog of NCBI NO: 31144 NR Description: myosin heavy chain (1167 AA) [Homo sapiens]
  misc_feature (1)..(256): Homolog of NCBI NO: 4249699 NR Description: myosin heavy chain [Rana catesbeiana]
  misc_feature (146)..(272): Homolog of NCBI NO: 34894370 NR Description: unnamed protein product [Oryza sativa (japonica
  misc_feature (169)..(262): Homolog of NCBI NO: 22329441 NR Description: similar to contains similarity to myosin heavy
  misc_feature (1)..(271): Homolog of NCBI NO: 25402551 NR Description: hypothetical protein [imported] - Arabidopsis
  misc_feature (1)..(272): Homolog of NCBI NO: 22329439 NR Description: hypothetical protein; protein id: At1g09470.1
  misc_feature (1)..(265): Homolog of NCBI NO: 7485248 NR Description: hypothetical protein A_IG002P16.20 - Arabidopsis
  misc_feature (1)..(272): Homolog of NCBI NO: 18421042 NR Description: putative protein
  misc_feature (1)..(272): Homolog of NCBI NO: 4097950 NR Description: plant IF-like protein [Arabidopsis thaliana]
  misc_feature (1)..(272): Homolog of NCBI NO: 18397379 NR Description: expressed protein
MEMEICKLQKRLEERNCQLEASASAADKFIKELEEFRLKLDTTKQTAEASADSAQSTKIQCSMLKQQLDDKTRSLREQEDRMTQLGHQLDDLQRGLSLRECSEKQLREEVRRIEREVTEAIAKAGIGGMDSELQKLLEDVSPMKFERMNRLVEVKDEEITKLKDEIRLMSGQWKHKTKELESQLEKQRRTDQDLKKKVLKLEFCLQEARSQTRKLQRKGERRDMEIKEIRDLISEKQNLNNESWDKQKFWDNSGFKIVVSMSMLMLVVVSKR

SEQ ID NO: 39868 - protein, 270 aa, Arabidopsis thaliana
  peptide (1)..(270): Ceres Seq. ID no. 12328965
  misc_feature (1)..(254): Pfam Name: Myosin tail Pfam Description: Myosin tail
  misc_feature (1)..(233): Homolog of NCBI NO: 31144 NR Description: myosin heavy chain (1167 AA) [Homo sapiens]
  misc_feature (1)..(254): Homolog of NCBI NO: 4249699 NR Description: myosin heavy chain [Rana catesbeiana]
  misc_feature (144)..(270): Homolog of NCBI NO: 34894370 NR Description: unnamed protein product [Oryza sativa (japonica
  misc_feature (167)..(260): Homolog of NCBI NO: 22329441 NR Description: similar to contains similarity to myosin heavy
  misc_feature (1)..(269): Homolog of NCBI NO: 25402551 NR Description: hypothetical protein [imported] - Arabidopsis
  misc_feature (1)..(270): Homolog of NCBI NO: 22329439 NR Description: hypothetical protein; protein id: At1g09470.1
  misc_feature (1)..(263): Homolog of NCBI NO: 7485248 NR Description: hypothetical protein A_IG002P16.20 - Arabidopsis
  misc_feature (1)..(270): Homolog of NCBI NO: 18421042 NR Description: putative protein
  misc_feature (1)..(270): Homolog of NCBI NO: 4097950 NR Description: plant IF-like protein [Arabidopsis thaliana]
  misc_feature (1)..(270): Homolog of NCBI NO: 18397379 NR Description: expressed protein
MEICKLQKRLEERNCQLEASASAADKFIKELEEFRLKLDTTKQTAEASADSAQSTKIQCSMLKQQLDDKTRSLREQEDRMTQLGHQLDDLQRGLSLRECSEKQLREEVRRIEREVTEAIAKAGIGGMDSELQKLLEDVSPMKFERMNRLVEVKDEEITKLKDEIRLMSGQWKHKTKELESQLEKQRRTDQDLKKKVLKLEFCLQEARSQTRKLQRKGERRDMEIKEIRDLISEKQNLNNESWDKQKFWDNSGFKIVVSMSMLMLVVVSKR

SEQ ID NO: 39869 - DNA, 2397 bp, Arabidopsis thaliana
  misc_feature (1)..(2397): Ceres Seq. ID no. 13580402
  misc_feature: MA Experiment ID: 108434 Result: Up-regulated in Transcription
  misc_feature: MA Experiment 108434 PARAMETER Experiment Name: At_Root_Tips_cDNA_P Parameter: Tissue Value: Root Tips
  misc_feature: MA Experiment ID: 108464 Result: Down-regulated in Transcription
  misc_feature: MA Experiment 108464 PARAMETER Experiment Name: At_Germinating_Seeds_cDNA_P Parameter: Age (day) Value: 4 vs. 0
  misc_feature: MA Experiment 108464 PARAMETER Experiment Name: At_Germinating_Seeds_cDNA_P Parameter: Tissue Value: Germinating Seeds
  misc_feature: MA Experiment ID: 108561 Result: Down-regulated in Transcription
  misc_feature: MA Experiment 108561 PARAMETER Experiment Name: At_100uM_ABA_cDNA_P Parameter: Timepoint (hr) Value: 6
  misc_feature: MA Experiment 108561 PARAMETER Experiment Name: At_100uM_ABA_cDNA_P Parameter: Tissue Value: Aerial
  misc_feature: MA Experiment 108561 PARAMETER Experiment Name: At_100uM_ABA_cDNA_P Parameter: Treatment Value: 100uM ABA vs. No Treatment
  misc_feature: MA Experiment ID: 108573 Result: Down-regulated in Transcription
  misc_feature: MA Experiment 108573 PARAMETER Experiment Name: At_Drought_cDNA_P Parameter: Timepoint (hr) Value: 6
  misc_feature: MA Experiment 108573 PARAMETER Experiment Name: At_Drought_cDNA_P Parameter: Tissue Value: Aerial
  misc_feature: MA Experiment 108573 PARAMETER Experiment Name: At_Drought_cDNA_P Parameter: Treatment Value: Drought vs. No Drought
  misc_feature: MA Experiment ID: 20000072 Result: Down-regulated in Transcription
  misc_feature: MA Experiment 20000072 PARAMETER Experiment Name: At_100uM_ABA_Mutants_cDNA_P Parameter: Plant Line Value: CS8105
  misc_feature: MA Experiment 20000072 PARAMETER Experiment Name: At_100uM_ABA_Mutants_cDNA_P Parameter: Timepoint (hr) Value: 6
  misc_feature: MA Experiment 20000072 PARAMETER Experiment Name: At_100uM_ABA_Mutants_cDNA_P Parameter: Tissue Value: Aerial
  misc_feature: MA Experiment 20000072 PARAMETER Experiment Name: At_100uM_ABA_Mutants_cDNA_P Parameter: Treatment Value: 100uM ABA vs. No Treatment
  misc_feature: MA Experiment ID: 20000087 Result: Down-regulated in Transcription
  misc_feature: MA Experiment 20000087 PARAMETER Experiment Name: At_100uM_ABA_Mutants_cDNA_P Parameter: Plant Line Value: WS
  misc_feature: MA Experiment 20000087 PARAMETER Experiment Name: At_100uM_ABA_Mutants_cDNA_P Parameter: Timepoint (hr) Value: 6
  misc_feature: MA Experiment 20000087 PARAMETER Experiment Name: At_100uM_ABA_Mutants_cDNA_P Parameter: Tissue Value: Aerial
  misc_feature: MA Experiment 20000087 PARAMETER Experiment Name: At_100uM_ABA_Mutants_cDNA_P Parameter: Treatment Value: 100uM ABA vs. No Treatment
  misc_feature: MA Experiment ID: 20000111 Result: Down-regulated in Transcription
  misc_feature: MA Experiment 20000111 PARAMETER Experiment Name: At_42deg_Heat_cDNA_P Parameter: Temperature (deg C) Value: 42 vs. 22
  misc_feature: MA Experiment 20000111 PARAMETER Experiment Name: At_42deg_Heat_cDNA_P Parameter: Timepoint (hr) Value: 6
  misc_feature: MA Experiment 20000111 PARAMETER Experiment Name: At_42deg_Heat_cDNA_P Parameter: Tissue Value: Aerial
  misc_feature: MA Experiment ID: 20000113 Result: Down-regulated in Transcription
  misc_feature: MA Experiment 20000113 PARAMETER Experiment Name: At_42deg_Heat_cDNA_P Parameter: Temperature (deg C) Value: 42 vs. 22
  misc_feature: MA Experiment 20000113 PARAMETER Experiment Name: At_42deg_Heat_cDNA_P Parameter: Timepoint (hr) Value: 8
  misc_feature: MA Experiment 20000113 PARAMETER Experiment Name: At_42deg_Heat_cDNA_P Parameter: Tissue Value: Aerial
  misc_feature: MA Experiment ID: 20000171 Result: Down-regulated in Transcription
  misc_feature: MA Experiment 20000171 PARAMETER Experiment Name: At_42deg_Heat_P Parameter: Age (day) Value: 14
  misc_feature: MA Experiment 20000171 PARAMETER Experiment Name: At_42deg_Heat_P Parameter: Organism Value: A. thaliana
  misc_feature: MA Experiment 20000171 PARAMETER Experiment Name: At_42deg_Heat_P Parameter: Plant Line Value: WS
  misc_feature: MA Experiment 20000171 PARAMETER Experiment Name: At_42deg_Heat_P Parameter: Temperature (deg C) Value: 42 vs. 22
  misc_feature: MA Experiment 20000171 PARAMETER Experiment Name: At_42deg_Heat_P Parameter: Timepoint (hr) Value: 1
  misc_feature: MA Experiment 20000171 PARAMETER Experiment Name: At_42deg_Heat_P Parameter: Tissue Value: Aerial
  misc_feature: MA Experiment ID: 20000173 Result: Down-regulated in Transcription
  misc_feature: MA Experiment 20000173 PARAMETER Experiment Name: At_42deg_Heat_P Parameter: Age (day) Value: 14
  misc_feature: MA Experiment 20000173 PARAMETER Experiment Name: At_42deg_Heat_P Parameter: Organism Value: A. thaliana
  misc_feature: MA Experiment 20000173 PARAMETER Experiment Name: At_42deg_Heat_P Parameter: Plant Line Value: WS
  misc_feature: MA Experiment 20000173 PARAMETER Experiment Name: At_42deg_Heat_P Parameter: Temperature (deg C) Value: 42 vs. 22
  misc_feature: MA Experiment 20000173 PARAMETER Experiment Name: At_42deg_Heat_P Parameter: Timepoint (hr) Value: 6
  misc_feature: MA Experiment 20000173 PARAMETER Experiment Name: At_42deg_Heat_P Parameter: Tissue Value: Aerial
  misc_feature: MA Experiment ID: 20000184 Result: Up-regulated in Transcription
  misc_feature: MA Experiment 20000184 PARAMETER Experiment Name: At_Shoots__P Parameter: Age (day) Value: 7
  misc_feature: MA Experiment 20000184 PARAMETER Experiment Name: At_Shoots__P Parameter: Tissue Value: Shoots vs. Whole Plant
  misc_feature: MA Experiment ID: 20000224 Result: Up-regulated in Transcription
  misc_feature: MA Experiment ID: 20000234 Result: Up-regulated in Transcription
  misc_feature: MA Experiment 20000234 PARAMETER Experiment Name: At_Siliques_P Parameter: Age (day) Value: 21
  misc_feature: MA Experiment 20000234 PARAMETER Experiment Name: At_Siliques_P Parameter: Organism Value: A. thaliana
  misc_feature: MA Experiment 20000234 PARAMETER Experiment Name: At_Siliques_P Parameter: Plant Line Value: WS
  misc_feature: MA Experiment 20000234 PARAMETER Experiment Name: At_Siliques_P Parameter: Tissue Value: Less Than 5mm Siliques vs. Whole Plant
  misc_feature: MA Experiment ID: 20000264 Result: Up-regulated in Transcription
  misc_feature: MA Experiment 20000264 PARAMETER Experiment Name: At_Open_Flower_P Parameter: Age (day) Value: 21
  misc_feature: MA Experiment 20000264 PARAMETER Experiment Name: At_Open_Flower_P Parameter: Plant Line Value: WS
  misc_feature: MA Experiment 20000264 PARAMETER Experiment Name: At_Open_Flower_P Parameter: Tissue Value: Open Flower vs. Whole Plant
  misc_feature: MA Experiment ID: 20000265 Result: Up-regulated in Transcription
  misc_feature: MA Experiment 20000265 PARAMETER Experiment Name: At_Open_Flower_P Parameter: Age (day) Value: 21
  misc_feature: MA Experiment 20000265 PARAMETER Experiment Name: At_Open_Flower_P Parameter: Plant Line Value: WS
  misc_feature: MA Experiment 20000265 PARAMETER Experiment Name: At_Open_Flower_P Parameter: Tissue Value: Closed Flower vs. Whole Plant
  misc_feature: MA Experiment ID: 20000286 Result: Up-regulated in Transcription
  misc_feature: MA Experiment 20000286 PARAMETER Experiment Name: At_Open_Flower_P Parameter: Age (day) Value: 21
  misc_feature: MA Experiment 20000286 PARAMETER Experiment Name: At_Open_Flower_P Parameter: Plant Line Value: WS
  misc_feature: MA Experiment 20000286 PARAMETER Experiment Name: At_Open_Flower_P Parameter: Tissue Value: Half Open vs. Whole Plant
  misc_feature: MA Experiment ID: 20000437 Result: Down-regulated in Transcription
  misc_feature: MA Experiment 20000437 PARAMETER Experiment Name: At_Drought_P Parameter: Age (day) Value: 8
  misc_feature: MA Experiment 20000437 PARAMETER Experiment Name: At_Drought_P Parameter: Organism Value: A. thaliana
  misc_feature: MA Experiment 20000437 PARAMETER Experiment Name: At_Drought_P Parameter: Plant Line Value: WS
  misc_feature: MA Experiment 20000437 PARAMETER Experiment Name: At_Drought_P Parameter: Timepoint (hr) Value: 24
  misc_feature: MA Experiment 20000437 PARAMETER Experiment Name: At_Drought_P Parameter: Tissue Value: Whole Plant
  misc_feature: MA Experiment 20000437 PARAMETER Experiment Name: At_Drought_P Parameter: Treatment Value: Drought vs. No Drought
  misc_feature: MA Experiment ID: 20000438 Result: Up-regulated in Transcription
  misc_feature: MA Experiment 20000438 PARAMETER Experiment Name: At_Shoots__P Parameter: Age (day) Value: 14
  misc_feature: MA Experiment 20000438 PARAMETER Experiment Name: At_Shoots__P Parameter: Tissue Value: Shoots vs. Whole Plant
  misc_feature: MA Experiment ID: 20000794 Result: Up-regulated in Transcription
  misc_feature: MA Experiment 20000794 PARAMETER Experiment Name: At_Petals_P Parameter: Age (day) Value: 23-25 days
  misc_feature: MA Experiment 20000794 PARAMETER Experiment Name: At_Petals_P Parameter: Plant Line Value: WS
  misc_feature: MA Experiment 20000794 PARAMETER Experiment Name: At_Petals_P Parameter: Tissue Value: Petals vs. Whole plant
  misc_feature: MA Experiment ID: 20001247 Result: Down-regulated in Transcription
  misc_feature: MA Experiment 20001247 PARAMETER Experiment Name: At_Far-red-induction_P Parameter: Age (day) Value: 7
  misc_feature: MA Experiment 20001247 PARAMETER Experiment Name: At_Far-red-induction_P Parameter: Light Value: Far-red vs. White
  misc_feature: MA Experiment 20001247 PARAMETER Experiment Name: At_Far-red-induction_P Parameter: Organism Value: A. thaliana
  misc_feature: MA Experiment 20001247 PARAMETER Experiment Name: At_Far-red-induction_P Parameter: Plant Line Value: Columbia
  misc_feature: MA Experiment 20001247 PARAMETER Experiment Name: At_Far-red-induction_P Parameter: Timepoint (hr) Value: 1
  misc_feature: MA Experiment 20001247 PARAMETER Experiment Name: At_Far-red-induction_P Parameter: Tissue Value: Whole Plant
  misc_feature: MA Experiment ID: 20001248 Result: Down-regulated in Transcription
  misc_feature: MA Experiment 20001248 PARAMETER Experiment Name: At_Far-red-induction_P Parameter: Age (day) Value: 7
  misc_feature: MA Experiment 20001248 PARAMETER Experiment Name: At_Far-red-induction_P Parameter: Light Value: Far-red vs. White
  misc_feature: MA Experiment 20001248 PARAMETER Experiment Name: At_Far-red-induction_P Parameter: Organism Value: A. thaliana
  misc_feature: MA Experiment 20001248 PARAMETER Experiment Name: At_Far-red-induction_P Parameter: Plant Line Value: Columbia
  misc_feature: MA Experiment 20001248 PARAMETER Experiment Name: At_Far-red-induction_P Parameter: Timepoint (hr) Value: 4
  misc_feature: MA Experiment 20001248 PARAMETER Experiment Name: At_Far-red-induction_P Parameter: Tissue Value: Whole Plant
  misc_feature: MA Experiment ID: 20001450 Result: Down-regulated in Transcription
  misc_feature: MA Experiment 20001450 PARAMETER Experiment Name: At_Far-red-induction_P Parameter: Age (day) Value: 7
  misc_feature: MA Experiment 20001450 PARAMETER Experiment Name: At_Far-red-induction_P Parameter: Light Value: Far-red vs. White
  misc_feature: MA Experiment 20001450 PARAMETER Experiment Name: At_Far-red-induction_P Parameter: Organism Value: A. thaliana
  misc_feature: MA Experiment 20001450 PARAMETER Experiment Name: At_Far-red-induction_P Parameter: Plant Line Value: Columbia
  misc_feature: MA Experiment 20001450 PARAMETER Experiment Name: At_Far-red-induction_P Parameter: Timepoint (hr) Value: 8
  misc_feature: MA Experiment 20001450 PARAMETER Experiment Name: At_Far-red-induction_P Parameter: Tissue Value: Whole Plant
  misc_feature: MA Experiment ID: 20001451 Result: Down-regulated in Transcription
  misc_feature: MA Experiment 20001451 PARAMETER Experiment Name: At_Far-red-induction_P Parameter: Age (day) Value: 7
  misc_feature: MA Experiment 20001451 PARAMETER Experiment Name: At_Far-red-induction_P Parameter: Light Value: Far-red vs. White
  misc_feature: MA Experiment 20001451 PARAMETER Experiment Name: At_Far-red-induction_P Parameter: Organism Value: A. thaliana
  misc_feature: MA Experiment 20001451 PARAMETER Experiment Name: At_Far-red-induction_P Parameter: Plant Line Value: Columbia
  misc_feature: MA Experiment 20001451 PARAMETER Experiment Name: At_Far-red-induction_P Parameter: Timepoint (hr) Value: 24
  misc_feature: MA Experiment 20001451 PARAMETER Experiment Name: At_Far-red-induction_P Parameter: Tissue Value: Whole Plant
  misc_feature: MA Experiment ID: 20001911 Result: Down-regulated in Transcription
  misc_feature: MA Experiment 20001911 PARAMETER Experiment Name: At_Drought_Reproduction_P Parameter: Age (day) Value: 40
  misc_feature: MA Experiment 20001911 PARAMETER Experiment Name: At_Drought_Reproduction_P Parameter: Organism Value: A. thaliana
  misc_feature: MA Experiment 20001911 PARAMETER Experiment Name: At_Drought_Reproduction_P Parameter: Plant Line Value: WS
  misc_feature: MA Experiment 20001911 PARAMETER Experiment Name: At_Drought_Reproduction_P Parameter: Timepoint (day) Value: 10
  misc_feature: MA Experiment 20001911 PARAMETER Experiment Name: At_Drought_Reproduction_P Parameter: Tissue Value: Flowers
  misc_feature: MA Experiment 20001911 PARAMETER Experiment Name: At_Drought_Reproduction_P Parameter: Treatment Value: Drought vs. No Drought
acaatcacatggccttttcaaaaaatcaatcttttagttctctatcgatgcgtaggcttgaagcatgatgacgacagtcgccgccgatctccaccgttatcttttcctgattaccgtttttcttttcttcctctgcgacaaaacctctcttgctctgaccacagacggtgttcttcttctctctttccgttactcaatcgttgacgatcctctttacgtttttcggagctggagattcgacgacgagactccttgctcttggcgtggtgtcacgtgcgatgcatcttcccggcacgtgactgttctgtcacttccaagctcgaaccttaccggcacactaccttcaaatttgggttcactcaattcacttcaaagacttgatctttccaacaattccatcaatgggtctttcccggtttcgcttctcaacgcgacggagcttcgatttcttgatctgtccgataatcacatctccggtgcactaccggcgagttttggcgcgctttcgaacctccaagtgttgaatctctccgataattccttcgtcggcgaattaccgaacacattaggatggaaccggaacttaacggagatttcacttcagaaaaactatttatccggcgggattccgggaggttttaagtcgacggagtatcttgatctctcgtcaaatttgatcaaaggctcgttgccgtcacatttcagagggaatcgtctacgctatttcaacgcttcgtacaacagaatctccggcgagattccgtcaggtttcgccgacgaaatcccggaagacgccaccgttgatctctcattcaaccaacttacaggtcaaatcccgggttttcgggttctcgataaccaagaatccaactctttctccggtaacccgggtctctgcggatccgaccatgcaaaacacccttgtcgtgacggtgaagcaacctctccacctccatcgccgactccaaattctcctcctgcattagctgctataccaaatactattggcttaaccaatcacccaattagctccaaaaccggtccgaaatcaaaatgggatcataaaccggtgcttatcattggcattgttgtcggtgacttagccggtttagcaatcctcgggattgtgtttttctacatttaccagtcgagaaaacggaagaccgtaacggctacgtcaaaatggtccacgtcatcaacagattccaaggtctcaaaatggtactgtttacgcaaatccgtttacgttgacggtgactgcgaagaagaagaagaggaatctgagacatcggaatccgaatccgacgaagagaacccggtcggaccaaatcgacggtcaggattagacgatcaagaaaaaaagggaacgttagtgaatctcgattcagagaaagagcttgaaatcgaaacgcttctcaaagcatcagcttatattttgggagccaccggttcgagcataatgtataaagcggtgcttcaagacggaacagctgtggcggttcgacgaatagctgaatgcggtttagaccggtttagagatttcgaagctcaggttcgagccatggctaagttaatacatccaaacctggtacgaattcgcggtttctattggggatccgacgagaaacttgtcatttacgattttgtccctaacggcagcctcgctaacgcccgttaccggaaagtgggctcctctccttgtcatttaccttgggacgctcggctcaagatagcaaaaggcatagctcgcgggctaacatacgtacacgacaaaaagtacgtgcatggtaacctcaagcctagcaatatccttttgggcttatggagcctaaagttgcggatttcggtcttgagaagcttttgattggggacatgagttatagaaccggtggatcggctccaatattcggaagcaagagatccacaacgtctcttgagtttgggccgagtccaagcccaagtccaagttcagtcgggttaccctacaatgctccagaatctcttcggagtattaagccgaattcgaaatgggatgtgtactcgttcggagttattctgcttgagctactaacgggaaagatcgtggtggtcgacgagcttggacaggttaatgggcttgtgattgatgacggtgagcgggcaattcggatggcggactctgctatacgggctgagttagaaggcaaagaagaagctgtgttggcatgtttgaaaatgggcctagcttgtgcgtctccaataccacagagaaggcccaatatcaaagaggctttgcaagttctcgagagattccctgttcattctagtcaacagtaatgataataattaagaccaagaaagagttaaataacttgactgtgtgtacttagagttagattgataggcaagtttgatctt

SEQ ID NO: 39870 - protein, 599 aa, Arabidopsis thaliana
  peptide (1)..(599): Ceres Seq. ID no. 13580403
  misc_feature (69)..(584): Homolog of NCBI NO: 7488258 NR Description: protein kinase homolog F28A23.20 - Arabidopsis
  misc_feature (69)..(584): Homolog of NCBI NO: 18418404 NR Description: leucine-rich repeat transmembrane protein kinase,
  misc_feature (436)..(585): Homolog of NCBI NO: 15226197 NR Description: leucine-rich repeat transmembrane protein kinase,
  misc_feature (16)..(391): Homolog of NCBI NO: 15226197 NR Description: leucine-rich repeat transmembrane protein kinase,
  misc_feature (13)..(482): Homolog of NCBI NO: 7488258 NR Description: protein kinase homolog F28A23.20 - Arabidopsis
  misc_feature (13)..(482): Homolog of NCBI NO: 18418404 NR Description: leucine-rich repeat transmembrane protein kinase,
  misc_feature (15)..(585): Homolog of NCBI NO: 30690913 NR Description: leucine rich repeat protein family [Arabidopsis
  misc_feature (15)..(585): Homolog of NCBI NO: 25387059 NR Description: receptor kinase-like protein [imported] -
  misc_feature (15)..(585): Homolog of NCBI NO: 18086496 NR Description: AT4g37250/C7A10_110 [Arabidopsis thaliana]
  misc_feature (14)..(585): Homolog of NCBI NO: 15227808 NR Description: leucine-rich repeat transmembrane protein kinase,
MMTTVAADLHRYLFLITVFLFFLCDKTSLALTTDGVLLLSFRYSIVDDPLYVFRSWRFDDETPCSWRGVTCDASSRHVTVLSLPSSNLTGTLPSNLGSLNSLQRLDLSNNSINGSFPVSLLNATELRFLDLSDNHISGALPASFGALSNLQVLNLSDNSFVGELPNTLGWNRNLTEISLQKNYLSGGIPGGFKSTEYLDLSSNLIKGSLPSHFRGNRLRYFNASYNRISGEIPSGFADEIPEDATVDLSFNQLTGQIPGFRVLDNQESNSFSGNPGLCGSDHAKHPCRDGEATSPPPSPTPNSPPALAAIPNTIGLTNHPISSKTGPKSKWDHKPVLIIGIVVGDLAGLAILGIVFFYIYQSRKRKTVTATSKWSTSSTDSKVSKWYCLRKSVYVDGDCEEEEEESETSESESDEENPVGPNRRSGLDDQEKKGTLVNLDSEKELEIETLLKASAYILGATGSSIMYKAVLQDGTAVAVRRIAECGLDRFRDFEAQVRAMAKLIHPNLVRIRGFYWGSDEKLVIYDFVPNGSLANARYRKVGSSPCHLPWDARLKIAKGIARGLTYVHDKKYVHGNLKPSNILLGLWSLKLRISVLRSF

SEQ ID NO: 39871 - protein, 598 aa, Arabidopsis thaliana
  peptide (1)..(598): Ceres Seq. ID no. 13580404
  misc_feature (68)..(583): Homolog of NCBI NO: 7488258 NR Description: protein kinase homolog F28A23.20 - Arabidopsis
  misc_feature (68)..(583): Homolog of NCBI NO: 18418404 NR Description: leucine-rich repeat transmembrane protein kinase,
  misc_feature (435)..(584): Homolog of NCBI NO: 15226197 NR Description: leucine-rich repeat transmembrane protein kinase,
  misc_feature (15)..(390): Homolog of NCBI NO: 15226197 NR Description: leucine-rich repeat transmembrane protein kinase,
  misc_feature (12)..(481): Homolog of NCBI NO: 7488258 NR Description: protein kinase homolog F28A23.20 - Arabidopsis
  misc_feature (12)..(481): Homolog of NCBI NO: 18418404 NR Description: leucine-rich repeat transmembrane protein kinase,
  misc_feature (14)..(584): Homolog of NCBI NO: 30690913 NR Description: leucine rich repeat protein family [Arabidopsis
  misc_feature (14)..(584): Homolog of NCBI NO: 25387059 NR Description: receptor kinase-like protein [imported] -
  misc_feature (14)..(584): Homolog of NCBI NO: 18086496 NR Description: AT4g37250/C7A10_110 [Arabidopsis thaliana]
  misc_feature (13)..(584): Homolog of NCBI NO: 15227808 NR Description: leucine-rich repeat transmembrane protein kinase,
MTTVAADLHRYLFLITVFLFFLCDKTSLALTTDGVLLLSFRYSIVDDPLYVFRSWRFDDETPCSWRGVTCDASSRHVTVLSLPSSNLTGTLPSNLGSLNSLQRLDLSNNSINGSFPVSLLNATELRFLDLSDNHISGALPASFGALSNLQVLNLSDNSFVGELPNTLGWNRNLTEISLQKNYLSGGIPGGFKSTEYLDLSSNLIKGSLPSHFRGNRLRYFNASYNRISGEIPSGFADEIPEDATVDLSFNQLTGQIPGFRVLDNQESNSFSGNPGLCGSDHAKHPCRDGEATSPPPSPTPNSPPALAAIPNTIGLTNHPISSKTGPKSKWDHKPVLIIGIVVGDLAGLAILGIVFFYIYQSRKRKTVTATSKWSTSSTDSKVSKWYCLRKSVYVDGDCEEEEEESETSESESDEENPVGPNRRSGLDDQEKKGTLVNLDSEKELEIETLLKASAYILGATGSSIMYKAVLQDGTAVAVRRIAECGLDRFRDFEAQVRAMAKLIHPNLVRIRGFYWGSDEKLVIYDFVPNGSLANARYRKVGSSPCHLPWDARLKIAKGIARGLTYVHDKKYVHGNLKPSNILLGLWSLKLRISVLRSF

SEQ ID NO: 39872 - DNA, 1340 bp, Arabidopsis thaliana
  misc_feature (1)..(1340): Ceres Seq. ID no. 13488820
  misc_feature: MA Experiment ID: 108573 Result: Down-regulated in Transcription
  misc_feature: MA Experiment 108573 PARAMETER Experiment Name: At_Drought_cDNA_P Parameter: Timepoint (hr) Value: 6
  misc_feature: MA Experiment 108573 PARAMETER Experiment Name: At_Drought_cDNA_P Parameter: Tissue Value: Aerial
  misc_feature: MA Experiment 108573 PARAMETER Experiment Name: At_Drought_cDNA_P Parameter: Treatment Value: Drought vs. No Drought
  misc_feature: MA Experiment ID: 108668 Result: Down-regulated in Transcription
  misc_feature: MA Experiment 108668 PARAMETER Experiment Name: At_2mM_SA_cDNA_P Parameter: Plant Line Value: WS
  misc_feature: MA Experiment 108668 PARAMETER Experiment Name: At_2mM_SA_cDNA_P Parameter: Timepoint (hr) Value: 6
  misc_feature: MA Experiment 108668 PARAMETER Experiment Name: At_2mM_SA_cDNA_P Parameter: Treatment Value: 2mM SA vs. No Treatment
  misc_feature: MA Experiment ID: 20000173 Result: Down-regulated in Transcription
  misc_feature: MA Experiment 20000173 PARAMETER Experiment Name: At_42deg_Heat_P Parameter: Age (day) Value: 14
  misc_feature: MA Experiment 20000173 PARAMETER Experiment Name: At_42deg_Heat_P Parameter: Organism Value: A. thaliana
  misc_feature: MA Experiment 20000173 PARAMETER Experiment Name: At_42deg_Heat_P Parameter: Plant Line Value: WS
  misc_feature: MA Experiment 20000173 PARAMETER Experiment Name: At_42deg_Heat_P Parameter: Temperature (deg C) Value: 42 vs. 22
  misc_feature: MA Experiment 20000173 PARAMETER Experiment Name: At_42deg_Heat_P Parameter: Timepoint (hr) Value: 6
  misc_feature: MA Experiment 20000173 PARAMETER Experiment Name: At_42deg_Heat_P Parameter: Tissue Value: Aerial
  misc_feature: MA Experiment ID: 20000235 Result: Up-regulated in Transcription
  misc_feature: MA Experiment 20000235 PARAMETER Experiment Name: At_Siliques_P Parameter: Age (day) Value: 21
  misc_feature: MA Experiment 20000235 PARAMETER Experiment Name: At_Siliques_P Parameter: Organism Value: A. thaliana
  misc_feature: MA Experiment 20000235 PARAMETER Experiment Name: At_Siliques_P Parameter: Plant Line Value: WS
  misc_feature: MA Experiment 20000235 PARAMETER Experiment Name: At_Siliques_P Parameter: Tissue Value: 5-10mm Siliques vs. Whole Plant
  misc_feature: MA Experiment ID: 20000264 Result: Up-regulated in Transcription
  misc_feature: MA Experiment 20000264 PARAMETER Experiment Name: At_Open_Flower_P Parameter: Age (day) Value: 21
  misc_feature: MA Experiment 20000264 PARAMETER Experiment Name: At_Open_Flower_P Parameter: Plant Line Value: WS
  misc_feature: MA Experiment 20000264 PARAMETER Experiment Name: At_Open_Flower_P Parameter: Tissue Value: Open Flower vs. Whole Plant
  misc_feature: MA Experiment ID: 20000265 Result: Up-regulated in Transcription
  misc_feature: MA Experiment 20000265 PARAMETER Experiment Name: At_Open_Flower_P Parameter: Age (day) Value: 21
  misc_feature: MA Experiment 20000265 PARAMETER Experiment Name: At_Open_Flower_P Parameter: Plant Line Value: WS
  misc_feature: MA Experiment 20000265 PARAMETER Experiment Name: At_Open_Flower_P Parameter: Tissue Value: Closed Flower vs. Whole Plant
  misc_feature: MA Experiment ID: 20000495 Result: Up-regulated in Transcription
  misc_feature: MA Experiment 20000495 PARAMETER Experiment Name: At_Guard_Cells_P Parameter: Harvest Date Value: 8/2/2002
  misc_feature: MA Experiment 20000495 PARAMETER Experiment Name: At_Guard_Cells_P Parameter: Organism Value: A. thaliana
  misc_feature: MA Experiment 20000495 PARAMETER Experiment Name: At_Guard_Cells_P Parameter: Tissue Value: Guard Cells vs. Leaves
  misc_feature: MA Experiment ID: 20001248 Result: Down-regulated in Transcription
  misc_feature: MA Experiment 20001248 PARAMETER Experiment Name: At_Far-red-induction_P Parameter: Age (day) Value: 7
  misc_feature: MA Experiment 20001248 PARAMETER Experiment Name: At_Far-red-induction_P Parameter: Light Value: Far-red vs. White
  misc_feature: MA Experiment 20001248 PARAMETER Experiment Name: At_Far-red-induction_P Parameter: Organism Value: A. thaliana
  misc_feature: MA Experiment 20001248 PARAMETER Experiment Name: At_Far-red-induction_P Parameter: Plant Line Value: Columbia
  misc_feature: MA Experiment 20001248 PARAMETER Experiment Name: At_Far-red-induction_P Parameter: Timepoint (hr) Value: 4
  misc_feature: MA Experiment 20001248 PARAMETER Experiment Name: At_Far-red-induction_P Parameter: Tissue Value: Whole Plant
tgtatcaattctacaatcatttttgcttccctttctttgaaaacattccattttcctttctatttttttgcttatctctgtactaagaaccaaactaacccacagtagaactaaattacacttctctttcaatcatttgcgtctcaccggctaatctcattcctctgtcatttttacagttcttcgatcgaaaaccggatgtgagaagcctcgaggttcaaggatttgcagaggctcaaagctttgctttcaaagaaaaagaggaagaaggcttacaagatacagttccatttctacagatgctgcaaagtgaagacccctcatcgtttttttcaatcaaagagccaaactttctgacgctactgtctcttcaaaccctcaaggagccttgggaactcgaaagatatctttcacttgaggattcacaatttcattcaccggtccaatctgagaccaaccgcttcatggaaggagccaatcaagctgtgtcaagccaagaaattccctttagccaagcaaacatgacactcccttcttctacctcatcaccactcagtgcacattcaagacgaaagcgcaaaatcaaccacttgctgcctcaagaaatgactagagaaaagagaaagaggaggaaaacaaaaccaagtaaaaacaatgaagagattgagaatcaaagaataaaccacattgctgttgaacgaaacagaagacgtcaaatgaacgaacatatcaactctctccgggcccttctcccaccttcctacatccaacgaggagaccaagcttccatagtaggaggagcaataaactacgtgaaggtcctcgagcaaatcatacaatctctcgaatcgcaaaagagaacgcaacaacaaagtaacagtgaggtagtagaaaacgcacttaatcatctctcaggcatttcgtcgaacgacctgtggacaactcttgaagatcaaacttgtatccccaaaatcgaagctacagtgatacaaaaccatgtcagccttaaagttcaatgtgagaagaaacaaggacaacttctcaaaggaatcatatcacttgaaaagcttaaactcactgttcttcatctcaatatcactacttcgtctcattcctctgtttcttattccttcaacctcaagatggaagatgagtgcgacttagagtcagccgacgagattacggcggctgttcatcggattttcgatattccgacaatttgattaaacacatataattccaaaaatattaacagctgacaaaatggtatcttttttttttttcctacttgtaccaattttttaagaattaagagaataaaaaaatttcgtttttcgttc

SEQ ID NO: 39873 - protein, 307 aa, Arabidopsis thaliana
  peptide (1)..(307): Ceres Seq. ID no. 13488821
  misc_feature (125)..(176): Pfam Name: Helix-loop-helix DNA-binding domain Pfam Description: Helix-loop-helix DNA-binding domain
  misc_feature (222)..(301): Homolog of NCBI NO: 34902426 NR Description: Unknown protein [Oryza sativa (japonica
  misc_feature (107)..(194): Homolog of NCBI NO: 34902426 NR Description: Unknown protein [Oryza sativa (japonica
  misc_feature (107)..(186): Homolog of NCBI NO: 37533680 NR Description: putative helix-loop-helix DNA-binding protein
  misc_feature (222)..(303): Homolog of NCBI NO: 37533680 NR Description: putative helix-loop-helix DNA-binding protein
  misc_feature (45)..(303): Homolog of NCBI NO: 15234187 NR Description: bHLH protein family [Arabidopsis thaliana]
  misc_feature (1)..(303): Homolog of NCBI NO: 15226442 NR Description: bHLH protein family [Arabidopsis thaliana]
  misc_feature (1)..(307): Homolog of NCBI NO: 30695519 NR Description: bHLH protein family [Arabidopsis thaliana]
  misc_feature (1)..(307): Homolog of NCBI NO: 21618009 NR Description: unknown [Arabidopsis thaliana]
  misc_feature (1)..(307): Homolog of NCBI NO: 11282339 NR Description: hypothetical protein F21F14.120 - Arabidopsis
  misc_feature (1)..(307): Homolog of NCBI NO: 18412203 NR Description: bHLH protein family [Arabidopsis thaliana]
MLQSEDPSSFFSIKEPNFLTLLSLQTLKEPWELERYLSLEDSQFHSPVQSETNRFMEGANQAVSSQEIPFSQANMTLPSSTSSPLSAHSRRKRKINHLLPQEMTREKRKRRKTKPSKNNEEIENQRINHIAVERNRRRQMNEHINSLRALLPPSYIQRGDQASIVGGAINYVKVLEQIIQSLESQKRTQQQSNSEVVENALNHLSGISSNDLWTTLEDQTCIPKIEATVIQNHVSLKVQCEKKQGQLLKGIISLEKLKLTVLHLNITTSSHSSVSYSFNLKMEDECDLESADEITAAVHRIFDIPTI

SEQ ID NO: 39874 - protein, 252 aa, Arabidopsis thaliana
  peptide (1)..(252): Ceres Seq. ID no. 13488822
  misc_feature (70)..(121): Pfam Name: Helix-loop-helix DNA-binding domain Pfam Description: Helix-loop-helix DNA-binding domain
  misc_feature (167)..(246): Homolog of NCBI NO: 34902426 NR Description: Unknown protein [Oryza sativa (japonica
  misc_feature (52)..(139): Homolog of NCBI NO: 34902426 NR Description: Unknown protein [Oryza sativa (japonica
  misc_feature (52)..(131): Homolog of NCBI NO: 37533680 NR Description: putative helix-loop-helix DNA-binding protein
  misc_feature (167)..(248): Homolog of NCBI NO: 37533680 NR Description: putative helix-loop-helix DNA-binding protein
  misc_feature (1)..(248): Homolog of NCBI NO: 15234187 NR Description: bHLH protein family [Arabidopsis thaliana]
  misc_feature (1)..(248): Homolog of NCBI NO: 15226442 NR Description: bHLH protein family [Arabidopsis thaliana]
  misc_feature (1)..(252): Homolog of NCBI NO: 30695519 NR Description: bHLH protein family [Arabidopsis thaliana]
  misc_feature (1)..(252): Homolog of NCBI NO: 21618009 NR Description: unknown [Arabidopsis thaliana]
  misc_feature (1)..(252): Homolog of NCBI NO: 11282339 NR Description: hypothetical protein F21F14.120 - Arabidopsis
  misc_feature (1)..(252): Homolog of NCBI NO: 18412203 NR Description: bHLH protein family [Arabidopsis thaliana]
MEGANQAVSSQEIPFSQANMTLPSSTSSPLSAHSRRKRKINHLLPQEMTREKRKRRKTKPSKNNEEIENQRINHIAVERNRRRQMNEHINSLRALLPPSYIQRGDQASIVGGAINYVKVLEQIIQSLESQKRTQQQSNSEVVENALNHLSGISSNDLWTTLEDQTCIPKIEATVIQNHVSLKVQCEKKQGQLLKGIISLEKLKLTVLHLNITTSSHSSVSYSFNLKMEDECDLESADEITAAVHRIFDIPTI

SEQ ID NO: 39875 - protein, 233 aa, Arabidopsis thaliana
  peptide (1)..(233): Ceres Seq. ID no. 13488823
  misc_feature (51)..(102): Pfam Name: Helix-loop-helix DNA-binding domain Pfam Description: Helix-loop-helix DNA-binding domain
  misc_feature (148)..(227): Homolog of NCBI NO: 34902426 NR Description: Unknown protein [Oryza sativa (japonica
  misc_feature (33)..(120): Homolog of NCBI NO: 34902426 NR Description: Unknown protein [Oryza sativa (japonica
  misc_feature (33)..(112): Homolog of NCBI NO: 37533680 NR Description: putative helix-loop-helix DNA-binding protein
  misc_feature (148)..(229): Homolog of NCBI NO: 37533680 NR Description: putative helix-loop-helix DNA-binding protein
  misc_feature (1)..(229): Homolog of NCBI NO: 15234187 NR Description: bHLH protein family [Arabidopsis thaliana]
  misc_feature (1)..(229): Homolog of NCBI NO: 15226442 NR Description: bHLH protein family [Arabidopsis thaliana]
  misc_feature (1)..(233): Homolog of NCBI NO: 30695519 NR Description: bHLH protein family [Arabidopsis thaliana]
  misc_feature (1)..(233): Homolog of NCBI NO: 21618009 NR Description: unknown [Arabidopsis thaliana]
  misc_feature (1)..(233): Homolog of NCBI NO: 11282339 NR Description: hypothetical protein F21F14.120 - Arabidopsis
  misc_feature (1)..(233): Homolog of NCBI NO: 18412203 NR Description: bHLH protein family [Arabidopsis thaliana]
MTLPSSTSSPLSAHSRRKRKINHLLPQEMTREKRKRRKTKPSKNNEEIENQRINHIAVERNRRRQMNEHINSLRALLPPSYIQRGDQASIVGGAINYVKVLEQIIQSLESQKRTQQQSNSEVVENALNHLSGISSNDLWTTLEDQTCIPKIEATVIQNHVSLKVQCEKKQGQLLKGIISLEKLKLTVLHLNITTSSHSSVSYSFNLKMEDECDLESADEITAAVHRIFDIPTI

SEQ ID NO: 39876 - DNA, 2349 bp, Arabidopsis thaliana
  misc_feature (1)..(2349): Ceres Seq. ID no. 12337988
  misc_feature: MA Experiment ID: 20001557 Result: Up-regulated in Transcription
  misc_feature: MA Experiment 20001557 PARAMETER Experiment Name: At_Drought_Soil_Dry_P Parameter: Age (day) Value: 27
  misc_feature: MA Experiment 20001557 PARAMETER Experiment Name: At_Drought_Soil_Dry_P Parameter: Organism Value: A. thaliana
  misc_feature: MA Experiment 20001557 PARAMETER Experiment Name: At_Drought_Soil_Dry_P Parameter: Plant Line Value: WS
  misc_feature: MA Experiment 20001557 PARAMETER Experiment Name: At_Drought_Soil_Dry_P Parameter: Post Timepoint (hr) Value: 3
  misc_feature: MA Experiment 20001557 PARAMETER Experiment Name: At_Drought_Soil_Dry_P Parameter: Post-Treatment Value: Re-Water vs. No Drought
  misc_feature: MA Experiment 20001557 PARAMETER Experiment Name: At_Drought_Soil_Dry_P Parameter: Timepoint (day) Value: 13
  misc_feature: MA Experiment 20001557 PARAMETER Experiment Name: At_Drought_Soil_Dry_P Parameter: Treatment Value: Drought vs. No Drought
atatttttggcttaaggtcattttgaagattaataacatgtctattttatcgcgttgtgtccgatccagaaggttctctatttttcgtggataagaagataaagttattgtttattgataagttttctgctgggaagttgcaactttttctagatttaggacgttacaaatttcaatcatgagtgcatcatgggcagatgtggctgattcagagaaggccgtttctcagtcaaagcctccttatgttcccccacacctacggaacaggccatcagagcctgttgctgctcctttgccacaaaatgatcatgcagggtatggtggtcaaccagctgggtctcgttgggctcctcctagcagtgggggtggtggtgccagcggcggtggctataggaatgatggagggcgcactggctatggttatggtgctggaggaggaggtggtggtggtggtggctggaacaacagaagtggagggtgggaccgtagggaacgtgaagtaaacccatttggagatgatgctgagttagaaccggtctttacagagcaggagaatactggcattaattttgatgcctatgaagatattccagttgagaccagtgggggagacgtgccccctcctgttaacacatttgctgacatagatcttggggatgcattaaatctgaacatccggaggtgcaagtatgtgaggccaacaccggtacagcgtcatgctattccaatactgcttgcagagagagatttgatggcctgtgcccagactgggtctgggaagactgctgctttttgctttccaataattagtggaatcatgaaagatcagcatgtagaaagaccccgtggttcacgggcggtttacccttttgcagtcatcctctcaccaacaagggaattggcatgccagatacatgatgaagccaaaaaattctcctaccaaactggtgtgaaggttgttgttgcttatggaggaacacccattcaccagcagctcagggaactcgagaggggatgtgatatccttgtggcaactcctggccggttaaatgatttgcttgaaagagctagagtctcaatgcagatgattaggtttttagctctagatgaggcagacaggatgctggacatgggttttgagccacagattagaaagattgttgagcagatggacatgcctccacgtggggtgagacagacaatgctgttcagtgctacatttccaagtcagattcagagacttgcagctgatttcatgtcaaactatatatttttggctgtgggaagagttggttcaagcactgatttaattacccaaagggttgagtttgtccaagagtctgacaagagaagccatctcatggacctgcttcacgcgcaaagagagacccaagacaagcaatcattgacattagtttttgtggagacaaagaggggagctgatactttggaaaattggctgtgcatgaatgagtttccagcaacctccattcatggcgatagaacacaacaggaaagagaagtggcactgaggtccttcaaaactgggaggacacctattttggttgcaacagacgtggcagcacgtggtcttgacattccccacgtggctcatgttgtaaacttcgatctaccaaatgacattgatgactatgtccaccgtatcggacgaacaggacgtgcaggcaaatctggaatagcaactgccttcttcaacgagaacaatgcacaactggctaggtcgcttgctgagctaatgcaagaagccaatcaagaggtccccgagtggctcacacgatatgcttcacgtgcttcatttggtggtggtaagaaacggtctggtggtcggtttggtggccgtgacttcagaagggaaggctcttacagtagaggaggaggcggcggcggcggaggaggcggcagtgattactatggcggaggaggctatggtggtggtggatacggtggtgctccaagcggtgggtatggtgctggagtgaccagtgcttgggattagccaattaggctccccaatttttcctctttttaacctgactatttatttcttctcttctacattcccaagagagcacgtgtatttgcccccacctttgagatctctcattcaagagatggatttaactaatcttgctattaggtggatctctctgttttttcaggctatttttaggatttgtcctaaaagatagacagtagtttttccgattttgatcttgttcttggtttcttctaacaatttcatttgttagtttgaaatccaatttgtctttttgtttccctttgttgttgacaatctttcttggtgaaatacaatctctctttatatct

SEQ ID NO: 39877 - protein, 612 aa, Arabidopsis thaliana; identical to SEQ ID NO: 37449
  peptide (1)..(612): Ceres Seq. ID no. 12337989
  misc_feature (164)..(381): Pfam Name: DEAD/DEAH box helicase Pfam Description: DEAD/DEAH box helicase
  misc_feature (40)..(100): Homolog of NCBI NO: 19528473 NR Description: RE28061p [Drosophila melanogaster]
  misc_feature (40)..(100): Homolog of NCBI NO: 17985987 NR Description: belle CG9748-PA
  misc_feature (22)..(104): Homolog of NCBI NO: 19528473 NR Description: RE28061p [Drosophila melanogaster]
  misc_feature (50)..(606): Homolog of NCBI NO: 19528473 NR Description: RE28061p [Drosophila melanogaster]
  misc_feature (22)..(104): Homolog of NCBI NO: 17985987 NR Description: belle CG9748-PA
  misc_feature (50)..(606): Homolog of NCBI NO: 17985987 NR Description: belle CG9748-PA
  misc_feature (192)..(612): Homolog of NCBI NO: 17064740 NR Description: ATP-dependent RNA helicase-like protein
  misc_feature (2)..(604): Homolog of NCBI NO: 15231074 NR Description: DEAD/DEAH box RNA helicase protein, putative
  misc_feature (1)..(612): Homolog of NCBI NO: 28393424 NR Description: putative DEAD/DEAH box RNA helicase [Arabidopsis
  misc_feature (1)..(612): Homolog of NCBI NO: 15227951 NR Description: DEAD/DEAH box RNA helicase, putative; protein id:

SEQ ID NO: 39878 - protein, 421 aa, Arabidopsis thaliana; identical to SEQ ID NO: 37450
  peptide (1)..(421): Ceres Seq. ID no. 12337990
  misc_feature (1)..(190): Pfam Name: DEAD/DEAH box helicase Pfam Description: DEAD/DEAH box helicase
  misc_feature (1)..(418): Homolog of NCBI NO: 14861844 NR Description: PL10 protein [Mus musculus]
  misc_feature (1)..(420): Homolog of NCBI NO: 18859239 NR Description: pl10; p110 [Danio rerio]
  misc_feature (1)..(415): Homolog of NCBI NO: 32412764 NR Description: hypothetical protein [Neurospora crassa]
  misc_feature (1)..(415): Homolog of NCBI NO: 11267519 NR Description: probable ATP-dependent RNA helicase DED1
  misc_feature (1)..(415): Homolog of NCBI NO: 19528473 NR Description: RE28061p [Drosophila melanogaster]
  misc_feature (1)..(415): Homolog of NCBI NO: 17985987 NR Description: belle CG9748-PA
  misc_feature (1)..(421): Homolog of NCBI NO: 17064740 NR Description: ATP-dependent RNA helicase-like protein
  misc_feature (1)..(413): Homolog of NCBI NO: 15231074 NR Description: DEAD/DEAH box RNA helicase protein, putative
  misc_feature (1)..(421): Homolog of NCBI NO: 28393424 NR Description: putative DEAD/DEAH box RNA helicase [Arabidopsis
  misc_feature (1)..(421): Homolog of NCBI NO: 15227951 NR Description: DEAD/DEAH box RNA helicase, putative; protein id:

SEQ ID NO: 39879 - protein, 399 aa, Arabidopsis thaliana; identical to SEQ ID NO: 37451
  peptide (1)..(399): Ceres Seq. ID no. 12337991
  misc_feature (1)..(168): Pfam Name: DEAD/DEAH box helicase Pfam Description: DEAD/DEAH box helicase
  misc_feature (1)..(396): Homolog of NCBI NO: 14861844 NR Description: PL10 protein [Mus musculus]
  misc_feature (1)..(398): Homolog of NCBI NO: 18859239 NR Description: pl10; p110 [Danio rerio]
  misc_feature (1)..(393): Homolog of NCBI NO: 32412764 NR Description: hypothetical protein [Neurospora crassa]
  misc_feature (1)..(393): Homolog of NCBI NO: 11267519 NR Description: probable ATP-dependent RNA helicase DED1
  misc_feature (1)..(393): Homolog of NCBI NO: 19528473 NR Description: RE28061p [Drosophila melanogaster]
  misc_feature (1)..(393): Homolog of NCBI NO: 17985987 NR Description: belle CG9748-PA
  misc_feature (1)..(399): Homolog of NCBI NO: 17064740 NR Description: ATP-dependent RNA helicase-like protein
  misc_feature (1)..(391): Homolog of NCBI NO: 15231074 NR Description: DEAD/DEAH box RNA helicase protein, putative
  misc_feature (1)..(399): Homolog of NCBI NO: 28393424 NR Description: putative DEAD/DEAH box RNA helicase [Arabidopsis
  misc_feature (1)..(399): Homolog of NCBI NO: 15227951 NR Description: DEAD/DEAH box RNA helicase, putative; protein id:

SEQ ID NO: 39880 - DNA, 2224 bp, Arabidopsis thaliana
  misc_feature (1)..(2224): Ceres Seq. ID no. 12371951
  misc_feature: MA Experiment ID: 108461 Result: Up-regulated in Transcription
  misc_feature: MA Experiment 108461 PARAMETER Experiment Name: At_Germinating_Seeds_cDNA_P Parameter: Age (day) Value: 1 vs. 0
  misc_feature: MA Experiment 108461 PARAMETER Experiment Name: At_Germinating_Seeds_cDNA_P Parameter: Tissue Value: Germinating Seeds
  misc_feature: MA Experiment ID: 20000227 Result: Up-regulated in Transcription
  misc_feature: MA Experiment 20000227 PARAMETER Experiment Name: At_Root-Tips-vs-Tops_P Parameter: Tissue Value: Root Tips vs. Root Tops
  misc_feature: MA Experiment ID: 20001557 Result: Up-regulated in Transcription
  misc_feature: MA Experiment 20001557 PARAMETER Experiment Name: At_Drought_Soil_Dry_P Parameter: Age (day) Value: 27
  misc_feature: MA Experiment 20001557 PARAMETER Experiment Name: At_Drought_Soil_Dry_P Parameter: Organism Value: A. thaliana
  misc_feature: MA Experiment 20001557 PARAMETER Experiment Name: At_Drought_Soil_Dry_P Parameter: Plant Line Value: WS
  misc_feature: MA Experiment 20001557 PARAMETER Experiment Name: At_Drought_Soil_Dry_P Parameter: Post Timepoint (hr) Value: 3
  misc_feature: MA Experiment 20001557 PARAMETER Experiment Name: At_Drought_Soil_Dry_P Parameter: Post-Treatment Value: Re-Water vs. No Drought
  misc_feature: MA Experiment 20001557 PARAMETER Experiment Name: At_Drought_Soil_Dry_P Parameter: Timepoint (day) Value: 13
  misc_feature: MA Experiment 20001557 PARAMETER Experiment Name: At_Drought_Soil_Dry_P Parameter: Treatment Value: Drought vs. No Drought
  misc_feature: MA Experiment ID: 20001905 Result: Down-regulated in Transcription
  misc_feature: MA Experiment 20001905 PARAMETER Experiment Name: At_Drought_Reproduction_P Parameter: Age (day) Value: 40
  misc_feature: MA Experiment 20001905 PARAMETER Experiment Name: At_Drought_Reproduction_P Parameter: Organism Value: A. thaliana
  misc_feature: MA Experiment 20001905 PARAMETER Experiment Name: At_Drought_Reproduction_P Parameter: Plant Line Value: WS
  misc_feature: MA Experiment 20001905 PARAMETER Experiment Name: At_Drought_Reproduction_P Parameter: Timepoint (day) Value: 10
  misc_feature: MA Experiment 20001905 PARAMETER Experiment Name: At_Drought_Reproduction_P Parameter: Tissue Value: Rosettes
  misc_feature: MA Experiment 20001905 PARAMETER Experiment Name: At_Drought_Reproduction_P Parameter: Treatment Value: Drought vs. No Drought
  misc_feature: MA Experiment ID: 20001911 Result: Down-regulated in Transcription
  misc_feature: MA Experiment 20001911 PARAMETER Experiment Name: At_Drought_Reproduction_P Parameter: Age (day) Value: 40
  misc_feature: MA Experiment 20001911 PARAMETER Experiment Name: At_Drought_Reproduction_P Parameter: Organism Value: A. thaliana
  misc_feature: MA Experiment 20001911 PARAMETER Experiment Name: At_Drought_Reproduction_P Parameter: Plant Line Value: WS
  misc_feature: MA Experiment 20001911 PARAMETER Experiment Name: At_Drought_Reproduction_P Parameter: Timepoint (day) Value: 10
  misc_feature: MA Experiment 20001911 PARAMETER Experiment Name: At_Drought_Reproduction_P Parameter: Tissue Value: Flowers
  misc_feature: MA Experiment 20001911 PARAMETER Experiment Name: At_Drought_Reproduction_P Parameter: Treatment Value: Drought vs. No Drought
actaaattaaatgaatagttttatttgtatattttaggcaagatggattatatataatgattaaataaattaaggtgtgtattcttcactaaatgtttgagatctatccgtcacactccagaggttaaactcagtcatctgtctttggggaggacaagcaagaacctcaccgacgattccataccaaacaaattcccgatctggaaacaactgacctgtgaaggtgaagtgtatcgctggaaatggcggtggccttccgtggaggccggggaggcgtcggatccggccaatctaccggacttcgtagtttcttctcctaccggatctttatctccgctttgttctcttttctcttcctcgccactttctccgtcgttcttaactcctctcgtcatcagcctcatcaggatcatacattgccgagtatgggcaacgcatatatgcagaggacgtttttggctttgcaatcggatccattgaaaactaggttggatctgatacacaagcaagccattgatcatttgacactggtgaatgcgtatgctgcttacgctaggaagctaaagcttgatgcttctaagcagcttaagctcttcgaagatttggctatcaacttctcggatttgcagtcaaaacctggtttgaaatctgctgtgtctgataatggtaatgctcttgaggaggattcgtttaggcagcttgagaaagaagtgaaggataaggtgaagacagcgaggatgatgatcgttgagtctaaagagagttatgatacacagcttaaaatccagaagttgaaagatacaatctttgctgtccaagaacagttgacaaaggctaagaaaaacggtgcggttgctagcttgatttcagccaagtcggttcctaaaagtcttcattgtttggccatgaggcttgtaggagagaggatctctaatcctgagaagtacaaggatgctccacctgacccagccgcagaggatccaactctttaccactatgcgattttctctgataatgtcattgctgtgtctgttgtggtgagatcggttgtgatgaacgctgaggagccatggaagcatgtcttccatgtggtgacagatcggatgaatctcgcagccatgaaggtgtggtttaagatgcgtcctttggaccgtggtgcccatgttgagattaaatccgtggaggatttcaagttcttaaactcttcctatgcgccggtcttgaggcagcttgagtctgccaagttgcagaagttttactttgagaatcaagctgagaacgcaactaaagattcacataacctcaagttcaagaaccccaagtatctctcgatgttgaaccatctcagattttacttaccagagatgtatccgaagctgaataagattttgttcttggacgatgatgttgtggtgcagaaagacgtgactggtttatggaaaatcaacttggatggcaaggtgaatggagccgttgagacatgttttggttcttttcatcgatatggtcaatacttaaacttctctcatcctttgatcaaagagaactttaaccccagtgcctgtgcttgggcctttggaatgaacatattcgatctcaatgcctggagacgcgagaagtgcaccgatcaataccattactggcagaacctgaatgaagacagaactctctggaaattgggaactctacctccgggattgatcacattctattcaaagacgaaatcattggacaaatcatggcatgtacttgggttaggctataacccgggagtgagcatggacgaaatcagaaatgcaggagtgattcattacaatggaaacatgaaaccgtggctagacattgcgatgaaccaatacaagtctctctggactaaatatgttgataacgaaatggagtttgtgcagatgtgcaattttggtctctaaagagagaacgatgaaaacaaacaaaccggaaagaggaaaaaatagggagaagaggtaacctcggatcgatgtgtttctgtctttctcggcattctttaactgatgatacgtttatctttatatagggttacaaaaaaaaagaagcattttgcttgttatttctgtcatagttttggtctttatttttattttgtaaactcttcacagcaatatgttctcccaagctacaatgtcttgttgtctttatttcatacttgtctgccttaagaatcatatagaagaaactctaaaggttt

SEQ ID NO: 39881 - protein, 561 aa, Arabidopsis thaliana
  peptide (1)..(561): Ceres Seq. ID no. 12371952
  misc_feature (152)..(557): Homolog of NCBI NO: 37533460 NR Description: hypothetical protein [Oryza sativa (japonica
  misc_feature (142)..(558): Homolog of NCBI NO: 38423965 NR Description: putative glycosyltransferase
  misc_feature (102)..(558): Homolog of NCBI NO: 18422837 NR Description: putative protein
  misc_feature (102)..(558): Homolog of NCBI NO: 10177914 NR Description: emb|CAB71043.1~gene_id:MCA23.10~strong similarity
  misc_feature (153)..(558): Homolog of NCBI NO: 30691875 NR Description: glycosyltransferase family 8 [Arabidopsis
  misc_feature (153)..(558): Homolog of NCBI NO: 7485958 NR Description: hypothetical protein F22I13.40 - Arabidopsis
  misc_feature (106)..(557): Homolog of NCBI NO: 7271113 NR Description: 68 kDa protein [Cicer arietinum]
  misc_feature (124)..(558): Homolog of NCBI NO: 15233046 NR Description: putative protein
  misc_feature (9)..(561): Homolog of NCBI NO: 15230806 NR Description: glycosyl transferase, putative
  misc_feature (1)..(561): Homolog of NCBI NO: 18396159 NR Description: expressed protein
MAVAFRGGRGGVGSGQSTGLRSFFSYRIFISALFSFLFLATFSVVLNSSRHQPHQDHTLPSMGNAYMQRTFLALQSDPLKTRLDLIHKQAIDHLTLVNAYAAYARKLKLDASKQLKLFEDLAINFSDLQSKPGLKSAVSDNGNALEEDSFRQLEKEVKDKVKTARMMIVESKESYDTQLKIQKLKDTIFAVQEQLTKAKKNGAVASLISAKSVPKSLHCLAMRLVGERISNPEKYKDAPPDPAAEDPTLYHYAIFSDNVIAVSVVVRSVVMNAEEPWKHVFHVVTDRMNLAAMKVWFKMRPLDRGAHVEIKSVEDFKFLNSSYAPVLRQLESAKLQKFYFENQAENATKDSHNLKFKNPKYLSMLNHLRFYLPEMYPKLNKILFLDDDVVVQKDVTGLWKINLDGKVNGAVETCFGSFHRYGQYLNFSHPLIKENFNPSACAWAFGMNIFDLNAWRREKCTDQYHYWQNLNEDRTLWKLGTLPPGLITFYSKTKSLDKSWHVLGLGYNPGVSMDEIRNAGVIHYNGNMKPWLDIAMNQYKSLWTKYVDNEMEFVQMCNFGL

SEQ ID NO: 39882 - protein, 500 aa, Arabidopsis thaliana
  peptide (1)..(500): Ceres Seq. ID no. 12371953
  misc_feature (91)..(496): Homolog of NCBI NO: 37533460 NR Description: hypothetical protein [Oryza sativa (japonica
  misc_feature (81)..(497): Homolog of NCBI NO: 38423965 NR Description: putative glycosyltransferase
  misc_feature (41)..(497): Homolog of NCBI NO: 18422837 NR Description: putative protein
  misc_feature (41)..(497): Homolog of NCBI NO: 10177914 NR Description: emb|CAB71043.1~gene_id:MCA23.10~strong similarity
  misc_feature (92)..(497): Homolog of NCBI NO: 30691875 NR Description: glycosyltransferase family 8 [Arabidopsis
  misc_feature (92)..(497): Homolog of NCBI NO: 7485958 NR Description: hypothetical protein F22I13.40 - Arabidopsis
  misc_feature (45)..(496): Homolog of NCBI NO: 7271113 NR Description: 68 kDa protein [Cicer arietinum]
  misc_feature (63)..(497): Homolog of NCBI NO: 15233046 NR Description: putative protein
  misc_feature (1)..(500): Homolog of NCBI NO: 15230806 NR Description: glycosyl transferase, putative
  misc_feature (1)..(500): Homolog of NCBI NO: 18396159 NR Description: expressed protein
MGNAYMQRTFLALQSDPLKTRLDLIHKQAIDHLTLVNAYAAYARKLKLDASKQLKLFEDLAINFSDLQSKPGLKSAVSDNGNALEEDSFRQLEKEVKDKVKTARMMIVESKESYDTQLKIQKLKDTIFAVQEQLTKAKKNGAVASLISAKSVPKSLHCLAMRLVGERISNPEKYKDAPPDPAAEDPTLYHYAIFSDNVIAVSVVVRSVVMNAEEPWKHVFHVVTDRMNLAAMKVWFKMRPLDRGAHVEIKSVEDFKFLNSSYAPVLRQLESAKLQKFYFENQAENATKDSHNLKFKNPKYLSMLNHLRFYLPEMYPKLNKILFLDDDVVVQKDVTGLWKINLDGKVNGAVETCFGSFHRYGQYLNFSHPLIKENFNPSACAWAFGMNIFDLNAWRREKCTDQYHYWQNLNEDRTLWKLGTLPPGLITFYSKTKSLDKSWHVLGLGYNPGVSMDEIRNAGVIHYNGNMKPWLDIAMNQYKSLWTKYVDNEMEFVQMCNFGL

SEQ ID NO: 39883 - protein, 495 aa, Arabidopsis thaliana
  peptide (1)..(495): Ceres Seq. ID no. 12371954
  misc_feature (86)..(491): Homolog of NCBI NO: 37533460 NR Description: hypothetical protein [Oryza sativa (japonica
  misc_feature (76)..(492): Homolog of NCBI NO: 38423965 NR Description: putative glycosyltransferase
  misc_feature (36)..(492): Homolog of NCBI NO: 18422837 NR Description: putative protein
  misc_feature (36)..(492): Homolog of NCBI NO: 10177914 NR Description: emb|CAB71043.1~gene_id:MCA23.10~strong similarity
  misc_feature (87)..(492): Homolog of NCBI NO: 30691875 NR Description: glycosyltransferase family 8 [Arabidopsis
  misc_feature (87)..(492): Homolog of NCBI NO: 7485958 NR Description: hypothetical protein F22I13.40 - Arabidopsis
  misc_feature (40)..(491): Homolog of NCBI NO: 7271113 NR Description: 68 kDa protein [Cicer arietinum]
  misc_feature (58)..(492): Homolog of NCBI NO: 15233046 NR Description: putative protein
  misc_feature (1)..(495): Homolog of NCBI NO: 15230806 NR Description: glycosyl transferase, putative
  misc_feature (1)..(495): Homolog of NCBI NO: 18396159 NR Description: expressed protein
MQRTFLALQSDPLKTRLDLIHKQAIDHLTLVNAYAAYARKLKLDASKQLKLFEDLAINFSDLQSKPGLKSAVSDNGNALEEDSFRQLEKEVKDKVKTARMMIVESKESYDTQLKIQKLKDTIFAVQEQLTKAKKNGAVASLISAKSVPKSLHCLAMRLVGERISNPEKYKDAPPDPAAEDPTLYHYAIFSDNVIAVSVVVRSVVMNAEEPWKHVFHVVTDRMNLAAMKVWFKMRPLDRGAHVEIKSVEDFKFLNSSYAPVLRQLESAKLQKFYFENQAENATKDSHNLKFKNPKYLSMLNHLRFYLPEMYPKLNKILFLDDDVVVQKDVTGLWKINLDGKVNGAVETCFGSFHRYGQYLNFSHPLIKENFNPSACAWAFGMNIFDLNAWRREKCTDQYHYWQNLNEDRTLWKLGTLPPGLITFYSKTKSLDKSWHVLGLGYNPGVSMDEIRNAGVIHYNGNMKPWLDIAMNQYKSLWTKYVDNEMEFVQMCNFGL

SEQ ID NO: 39884 - DNA, 2001 bp, Arabidopsis thaliana
  misc_feature (1)..(2001): Ceres Seq. ID no. 12579750
  misc_feature: MA Experiment ID: 20000184 Result: Down-regulated in Transcription
  misc_feature: MA Experiment 20000184 PARAMETER Experiment Name: At_Shoots__P Parameter: Age (day) Value: 7
  misc_feature: MA Experiment 20000184 PARAMETER Experiment Name: At_Shoots__P Parameter: Tissue Value: Shoots vs. Whole Plant
  misc_feature: MA Experiment ID: 20000185 Result: Up-regulated in Transcription
  misc_feature: MA Experiment 20000185 PARAMETER Experiment Name: At_Roots__P Parameter: Age (day) Value: 7 vs. 21
  misc_feature: MA Experiment 20000185 PARAMETER Experiment Name: At_Roots__P Parameter: Organism Value: A. thaliana
  misc_feature: MA Experiment 20000185 PARAMETER Experiment Name: At_Roots__P Parameter: Tissue Value: Roots vs. Whole Plant
  misc_feature: MA Experiment ID: 20000264 Result: Up-regulated in Transcription
  misc_feature: MA Experiment 20000264 PARAMETER Experiment Name: At_Open_Flower_P Parameter: Age (day) Value: 21
  misc_feature: MA Experiment 20000264 PARAMETER Experiment Name: At_Open_Flower_P Parameter: Plant Line Value: WS
  misc_feature: MA Experiment 20000264 PARAMETER Experiment Name: At_Open_Flower_P Parameter: Tissue Value: Open Flower vs. Whole Plant
  misc_feature: MA Experiment ID: 20000439 Result: Up-regulated in Transcription
  misc_feature: MA Experiment 20000439 PARAMETER Experiment Name: At_Roots__P Parameter: Age (day) Value: 14 vs. 21
  misc_feature: MA Experiment 20000439 PARAMETER Experiment Name: At_Roots__P Parameter: Organism Value: A. thaliana
  misc_feature: MA Experiment 20000439 PARAMETER Experiment Name: At_Roots__P Parameter: Tissue Value: Roots vs. Whole Plant
  misc_feature: MA Experiment ID: 20000794 Result: Up-regulated in Transcription
  misc_feature: MA Experiment 20000794 PARAMETER Experiment Name: At_Petals_P Parameter: Age (day) Value: 23-25 days
  misc_feature: MA Experiment 20000794 PARAMETER Experiment Name: At_Petals_P Parameter: Plant Line Value: WS
  misc_feature: MA Experiment 20000794 PARAMETER Experiment Name: At_Petals_P Parameter: Tissue Value: Petals vs. Whole plant
  misc_feature: MA Experiment ID: 20001451 Result: Down-regulated in Transcription
  misc_feature: MA Experiment 20001451 PARAMETER Experiment Name: At_Far-red-induction_P Parameter: Age (day) Value: 7
  misc_feature: MA Experiment 20001451 PARAMETER Experiment Name: At_Far-red-induction_P Parameter: Light Value: Far-red vs. White
  misc_feature: MA Experiment 20001451 PARAMETER Experiment Name: At_Far-red-induction_P Parameter: Organism Value: A. thaliana
  misc_feature: MA Experiment 20001451 PARAMETER Experiment Name: At_Far-red-induction_P Parameter: Plant Line Value: Columbia
  misc_feature: MA Experiment 20001451 PARAMETER Experiment Name: At_Far-red-induction_P Parameter: Timepoint (hr) Value: 24
  misc_feature: MA Experiment 20001451 PARAMETER Experiment Name: At_Far-red-induction_P Parameter: Tissue Value: Whole Plant
  misc_feature: MA Experiment ID: 20001910 Result: Up-regulated in Transcription
  misc_feature: MA Experiment 20001910 PARAMETER Experiment Name: At_Drought_Reproduction_P Parameter: Age (day) Value: 37
  misc_feature: MA Experiment 20001910 PARAMETER Experiment Name: At_Drought_Reproduction_P Parameter: Organism Value: A. thaliana
  misc_feature: MA Experiment 20001910 PARAMETER Experiment Name: At_Drought_Reproduction_P Parameter: Plant Line Value: WS
  misc_feature: MA Experiment 20001910 PARAMETER Experiment Name: At_Drought_Reproduction_P Parameter: Timepoint (day) Value: 7
  misc_feature: MA Experiment 20001910 PARAMETER Experiment Name: At_Drought_Reproduction_P Parameter: Tissue Value: Flowers
  misc_feature: MA Experiment 20001910 PARAMETER Experiment Name: At_Drought_Reproduction_P Parameter: Treatment Value: Drought vs. No Drought
ccaaacaatcttctttgctaccaaatttctggaatctagggttcgattatatctcttttagattatccattatttttgtaattcgttttagtttcgtttttatttccttttttagattaagaagagttcatattttagaataattaaaaaaaatggattctgcaagaagttggtttcacaagtttcaaccacgagataagcctcggaaaaaggatatgttctccggaagcacttacggcggtggcgtgacagaaaccaccgtccccgacggaggaaatgatacagaaacggcaacgaaacttccaccactaggcggtgacggagaagcactctcaaattcaacaaaacagaaagttgctgcagccaaacagtacattgagaatcattataaggaacagatgaagaacctcaacgagaggaaagagagacgaacaacgttagagaagaagctagcggatgcagatgtatgtgaagaagaccaaaccaatcttatgaagtttcttgagaagaaagaaacagagtacatgagactccaaaggcataaaatgggtgctgatgacttcgaactcttaactatgatcggtaaaggtgcttttgggttcgagttgttagagagatcaacacaggtcatgtttttgctatgaagaaactcaagaaatcagaaatgcttcgcagaggccaggtggagcatgtaagagcagagaggaatctattggcagaagtagatagtaactgtatagtgaagctttactgttcttttcaagacaatgagtatctttatctgataatggagtatttgcccggtggcgatatgatgactcttctgatgaggaaagacactttaagtgaagatgaagctaagttctatatcgccgaatctgttctcgctatagaatctatccataaccgcaactatatccacagagacataaagccggataacttgttgcttgatagatatggacatttaaggttatctgattttggactatgtaagccattggattgtagtgttattgacggagaagatttcacggtaggaaatgcgggtagcggaggaggttcagagagcgtatcaaccactcctaaacgctcgcagcaagaacagttggaacattggcagaagaatcgaagaatgcttgcttactcaaccgttggtacaccagactacattgcacctgaagtcttgttaaagaaaggatacggcatggaatgtgactggtggtcactaggagctataatgtacgaaatgctggttgggtatccacccttttacgccgacgacccaatgtctacttgtagaaagatagtgaattggaaaacacatttgaagttccctgaagaatcaaggctatcacgaggggcaagagatcttattggtaagctcttgtgtagcgttaaccaacgactaggctctactggtgcctcccaaattaaggcacatccttggttcgaaggtgtacaatgggaaaagatttaccaaatggaagctgcgttcattcctgaggtcaacgacgatttggatactcaaaactttgagaagttcgatgaggaagataatcaaactcaagcaccttctagaacagggccatggagaaaaatgttatcttcaaaagacataaattttgtcggctacacatacaaaaactttgaaatcgtcaacgattatcaagtccccggtatagccgaactaaaaaagaaagagtcaaaatcaaagagaccatcggttaagtcactattcgagagcgaatcagactcgtcatcttctggttcggagcaacagaccattaaccggagctattctaatccgacgcctcgtggaatggaacccaacctgagacgtctagattctgagtagatatatatctgttatgcctatgtatatgtaaaccaaattaaaccggaaaataatgagcttaaatgtactaaaaacgtaagtaaactgaagataactaactacactcttctttctttaatacaaagaaaaatagattgcaagtc

SEQ ID NO: 39885 - protein, 405 aa, Arabidopsis thaliana
  peptide (1)..(405): Ceres Seq. ID no. 12579751
  misc_feature (1)..(271): Pfam Name: Protein kinase domain Pfam Description: Protein kinase domain
  misc_feature (1)..(384): Homolog of NCBI NO: 25287694 NR Description: protein kinase [imported] - Arabidopsis thaliana
  misc_feature (1)..(367): Homolog of NCBI NO: 37535354 NR Description: putative protein kinase [Oryza sativa (japonica
  misc_feature (1)..(379): Homolog of NCBI NO: 22331282 NR Description: putative protein kinase
  misc_feature (1)..(384): Homolog of NCBI NO: 30682806 NR Description: protein kinase [Arabidopsis thaliana]
  misc_feature (1)..(396): Homolog of NCBI NO: 541816 NR Description: protein kinase (EC 2.7.1.-) - common ice plant
  misc_feature (1)..(348): Homolog of NCBI NO: 15225358 NR Description: putative protein kinase; protein id: At2g20470.1
  misc_feature (1)..(374): Homolog of NCBI NO: 1076632 NR Description: protein kinase PKTL7 (EC 2.7.1.-) - common
  misc_feature (1)..(396): Homolog of NCBI NO: 7339534 NR Description: protein kinase MK6 [Mesembryanthemum crystallinum]
  misc_feature (1)..(405): Homolog of NCBI NO: 25287691 NR Description: hypothetical protein [imported] - Arabidopsis
  misc_feature (1)..(405): Homolog of NCBI NO: 15219591 NR Description: putative protein kinase
MKKLKKSEMLRRGQVEHVRAERNLLAEVDSNCIVKLYCSFQDNEYLYLIMEYLPGGDMMTLLMRKDTLSEDEAKFYIAESVLAIESIHNRNYIHRDIKPDNLLLDRYGHLRLSDFGLCKPLDCSVIDGEDFTVGNAGSGGGSESVSTTPKRSQQEQLEHWQKNRRMLAYSTVGTPDYIAPEVLLKKGYGMECDWWSLGAIMYEMLVGYPPFYADDPMSTCRKIVNWKTHLKFPEESRLSRGARDLIGKLLCSVNQRLGSTGASQIKAHPWFEGVQWEKIYQMEAAFIPEVNDDLDTQNFEKFDEEDNQTQAPSRTGPWRKMLSSKDINFVGYTYKNFEIVNDYQVPGIAELKKKESKSKRPSVKSLFESESDSSSSGSEQQTINRSYSNPTPRGMEPNLRRLDSE

SEQ ID NO: 39886 - protein, 397 aa, Arabidopsis thaliana
  peptide (1)..(397): Ceres Seq. ID no. 12579752
  misc_feature (1)..(263): Pfam Name: Protein kinase domain Pfam Description: Protein kinase domain
  misc_feature (1)..(376): Homolog of NCBI NO: 25287694 NR Description: protein kinase [imported] - Arabidopsis thaliana
  misc_feature (1)..(359): Homolog of NCBI NO: 37535354 NR Description: putative protein kinase [Oryza sativa (japonica
  misc_feature (1)..(371): Homolog of NCBI NO: 22331282 NR Description: putative protein kinase
  misc_feature (1)..(376): Homolog of NCBI NO: 30682806 NR Description: protein kinase [Arabidopsis thaliana]
  misc_feature (1)..(388): Homolog of NCBI NO: 541816 NR Description: protein kinase (EC 2.7.1.-) - common ice plant
  misc_feature (1)..(340): Homolog of NCBI NO: 15225358 NR Description: putative protein kinase; protein id: At2g20470.1
  misc_feature (1)..(366): Homolog of NCBI NO: 1076632 NR Description: protein kinase PKTL7 (EC 2.7.1.-) - common
  misc_feature (1)..(388): Homolog of NCBI NO: 7339534 NR Description: protein kinase MK6 [Mesembryanthemum crystallinum]
  misc_feature (1)..(397): Homolog of NCBI NO: 25287691 NR Description: hypothetical protein [imported] - Arabidopsis
  misc_feature (1)..(397): Homolog of NCBI NO: 15219591 NR Description: putative protein kinase
MLRRGQVEHVRAERNLLAEVDSNCIVKLYCSFQDNEYLYLIMEYLPGGDMMTLLMRKDTLSEDEAKFYIAESVLAIESIHNRNYIHRDIKPDNLLLDRYGHLRLSDFGLCKPLDCSVIDGEDFTVGNAGSGGGSESVSTTPKRSQQEQLEHWQKNRRMLAYSTVGTPDYIAPEVLLKKGYGMECDWWSLGAIMYEMLVGYPPFYADDPMSTCRKIVNWKTHLKFPEESRLSRGARDLIGKLLCSVNQRLGSTGASQIKAHPWFEGVQWEKIYQMEAAFIPEVNDDLDTQNFEKFDEEDNQTQAPSRTGPWRKMLSSKDINFVGYTYKNFEIVNDYQVPGIAELKKKESKSKRPSVKSLFESESDSSSSGSEQQTINRSYSNPTPRGMEPNLRRLDSE

SEQ ID NO: 39887 - protein, 356 aa, Arabidopsis thaliana
  peptide (1)..(356): Ceres Seq. ID no. 12579753
  misc_feature (1)..(222): Pfam Name: Protein kinase domain Pfam Description: Protein kinase domain
  misc_feature (1)..(335): Homolog of NCBI NO: 25287694 NR Description: protein kinase [imported] - Arabidopsis thaliana
  misc_feature (1)..(318): Homolog of NCBI NO: 37535354 NR Description: putative protein kinase [Oryza sativa (japonica
  misc_feature (1)..(330): Homolog of NCBI NO: 22331282 NR Description: putative protein kinase
  misc_feature (1)..(335): Homolog of NCBI NO: 30682806 NR Description: protein kinase [Arabidopsis thaliana]
  misc_feature (1)..(347): Homolog of NCBI NO: 541816 NR Description: protein kinase (EC 2.7.1.-) - common ice plant
  misc_feature (1)..(299): Homolog of NCBI NO: 15225358 NR Description: putative protein kinase; protein id: At2g20470.1
  misc_feature (1)..(325): Homolog of NCBI NO: 1076632 NR Description: protein kinase PKTL7 (EC 2.7.1.-) - common
  misc_feature (1)..(347): Homolog of NCBI NO: 7339534 NR Description: protein kinase MK6 [Mesembryanthemum crystallinum]
  misc_feature (1)..(356): Homolog of NCBI NO: 25287691 NR Description: hypothetical protein [imported] - Arabidopsis
  misc_feature (1)..(356): Homolog of NCBI NO: 15219591 NR Description: putative protein kinase
MEYLPGGDMMTLLMRKDTLSEDEAKFYIAESVLAIESIHNRNYIHRDIKPDNLLLDRYGHLRLSDFGLCKPLDCSVIDGEDFTVGNAGSGGGSESVSTTPKRSQQEQLEHWQKNRRMLAYSTVGTPDYIAPEVLLKKGYGMECDWWSLGAIMYEMLVGYPPFYADDPMSTCRKIVNWKTHLKFPEESRLSRGARDLIGKLLCSVNQRLGSTGASQIKAHPWFEGVQWEKIYQMEAAFIPEVNDDLDTQNFEKFDEEDNQTQAPSRTGPWRKMLSSKDINFVGYTYKNFEIVNDYQVPGIAELKKKESKSKRPSVKSLFESESDSSSSGSEQQTINRSYSNPTPRGMEPNLRRLDSE

SEQ ID NO: 39888 - DNA, 2451 bp, Arabidopsis thaliana
  misc_feature (1)..(2451): Ceres Seq. ID no. 13504744
  misc_feature: MA Experiment ID: 20000185 Result: Up-regulated in Transcription
  misc_feature: MA Experiment 20000185 PARAMETER Experiment Name: At_Roots__P Parameter: Age (day) Value: 7 vs. 21
  misc_feature: MA Experiment 20000185 PARAMETER Experiment Name: At_Roots__P Parameter: Organism Value: A. thaliana
  misc_feature: MA Experiment 20000185 PARAMETER Experiment Name: At_Roots__P Parameter: Tissue Value: Roots vs. Whole Plant
  misc_feature: MA Experiment ID: 20000224 Result: Up-regulated in Transcription
atgagattactggtatttgttaatccgggccggaccgggccgtatctgaattatgaacactttcctaatgtcatagaatcgttcgtgccgtcgtcgctgcgatctgaccaaaatcaaaagtgttacgattcggtatcatcgtctctctcatttgtgattttgtcaaaccctgctctcttttctccaagtgctctcatggtgcttccgctcttccggcgcgctgcgatcgcccggacttcctcgcttctcagagctcgtcttttcgctcctgcctccgaattccattctcgcttttctaatggactataccacttggacgacaaaattagtagcagtaatggtgtgaggtctgcctctatagacttgattacaagaatggatgatagttctccaaagcccattctgcgatttggcgtgcaaaacttttcatctacaggacccatatcacagacggttcttgcaatgccagccttgtctcctactatgagtcatggaaatgttgtaaaatggatgaagaaagaaggtgacaaggtagaggtgggtgatgtactatgtgagatagagacagacaaagccactgtagaatttgagagtcaagaggaaggatttctggccaagattttagtcactgaaggatcaaaggatatccctgttaatgaaccgattgcaataatggttgaggaggaagacgacattaaaaacgttcctgctaccatagagggtggacgagatggtaaagaggaaacatcagctcatcaagtgatgaaacctgacgaaagcacacaacaaaaaagttccattcagcccgatgcatcagatcttcccccacatgtcgtcttagaaatgccagcactttctcctacaatgaaccaaggtaatattgccaaatggtggaaaaaagagggtgacaagattgaagtgggtgatgtcataggtgagatcgagactgacaaagccactctggaatttgaaagccttgaagaggggtacttagctaagattctaattcctgaaggttccaaggatgtggcggtgggaaagccgattgccctaatagttgaagatgctgaaagtattgaagccatcaagtcttcttccgcaggtagttctgaggttgatacagttaaagaagtccctgacagtgttgtagataaacctacagagaggaaagcaggcttcacaaagatcagtcctgctgcaaagctattgattttagaacatggattggaggcatcatcaattgaggcatcgggtccctatggtacattattgaaatcagacgttgtggccgcaattgcttctggaaaagcttctaaatcatctgcgtctacgaagaagaagcaaccatcaaaggagaccccgtctaaatcctcctccacatcgaagccttctgtgacacagtcagataataattatgaagattttccaaatagtcaaattcgcaagattatagcaaaacgtttattggaatcaaaacagaagataccccatttgtatttacaatcagatgttgtattggatcctcttcttgcatttagaaaagaacttcaagaaaaccatggcgttaaagtgtctgtcaatgacatagttattaaagcagtggcagtcgcactgaggaatgtacgacaagctaatgctttctgggatgctgagaaaggagatatcgttatgtgtgacagtgttgacatatcaattgcagttgcaactgagaagggcttaatgactccaattatcaagaatgcagaccagaaatctatttctgctatttccttagaggttaaggagctggcacaaaaggctcgatctggaaagcttgctcctcatgagtttcaaggagggacattcagcatatcaaatctaggaatgtatcctgtggataatttctgcgcaatcattaacccccctcaggctgggattctagcagttggtagaggaaacaaagtggttgagccagttattggactagatggaattgagaagccttctgttgtgacaaaaatgaatgtaacgttatccgctgatcatcggatctttgatggacaagttggagcttcgtttatgtctgaattgcgttcaaactttgaggatgttcgaagacttcttctgtgagaaagatccaactgtttaccaaatgaatcttggattactacataataaacctcggaccaacccacgtgcacatccagaaccagaactgctggtctacattgttaactctgatcacatgtttcatttttttccatttggttcatatacttaccaaaatttgttttggtctttaacaattcgtcttatagattggtaacttcctgaggtattttttgtctggtctgtcctctgcaaaataaataatttcagctgtcaatccgcaactggtgaaataatttaaaaagtattttaccctcaaaaaaaaaaaaaaaaacccgaattcctgcagcccgggggatccac

SEQ ID NO: 39889 - protein, 702 aa, Arabidopsis thaliana
  peptide (1)..(702): Ceres Seq. ID no. 13504745
  misc_feature (469)..(702): Pfam Name: 2-oxoacid dehydrogenases acyltransferase Pfam Description: 2-oxoacid dehydrogenases acyltransferase
  misc_feature (260)..(702): Homolog of NCBI NO: 5669871 NR Description: dihydrolipoamide S-acetyltransferase [Zea mays]
  misc_feature (271)..(702): Homolog of NCBI NO: 18400212 NR Description: acetyltransferase -related [Arabidopsis thaliana]
  misc_feature (147)..(702): Homolog of NCBI NO: 14587786 NR Description: dihydrolipoamide acetyltransferase [Sus scrofa]
  misc_feature (147)..(702): Homolog of NCBI NO: 16580128 NR Description: dihydrolipoamide S-acetyltransferase precursor
  misc_feature (147)..(702): Homolog of NCBI NO: 266685 NR Description: DIHYDROLIPOAMIDE ACETYLTRANSFERASE COMPONENT OF DEHYDROGENASE COMPLEX (E2) (PDC-E2) (70 KDA MITOCHONDRIAL
  misc_feature (147)..(702): Homolog of NCBI NO: 34863356 NR Description: dihydrolipoamide acetyltransferase [Rattus
  misc_feature (147)..(702): Homolog of NCBI NO: 20805283 NR Description: dihydrolipoamide acetyltransferase precursor
  misc_feature (147)..(702): Homolog of NCBI NO: 27762280 NR Description: dihydrolipoamide S-acetyltransferase [Danio rerio]
  misc_feature (147)..(702): Homolog of NCBI NO: 21594641 NR Description: dihydrolipoamide S-acetyltransferase (E2
  misc_feature (93)..(702): Homolog of NCBI NO: 1076318 NR Description: dihydrolipoamide S-acetyltransferase (EC
MRLLVFVNPGRTGPYLNYEHFPNVIESFVPSSLRSDQNQKCYDSVSSSLSFVILSNPALFSPSALMVLPLFRRAAIARTSSLLRARLFAPASEFHSRFSNGLYHLDDKISSSNGVRSASIDLITRMDDSSPKPILRFGVQNFSSTGPISQTVLAMPALSPTMSHGNVVKWMKKEGDKVEVGDVLCEIETDKATVEFESQEEGFLAKILVTEGSKDIPVNEPIAIMVEEEDDIKNVPATIEGGRDGKEETSAHQVMKPDESTQQKSSIQPDASDLPPHVVLEMPALSPTMNQGNIAKWWKKEGDKIEVGDVIGEIETDKATLEFESLEEGYLAKILIPEGSKDVAVGKPIALIVEDAESIEAIKSSSAGSSEVDTVKEVPDSVVDKPTERKAGFTKISPAAKLLILEHGLEASSIEASGPYGTLLKSDVVAAIASGKASKSSASTKKKQPSKETPSKSSSTSKPSVTQSDNNYEDFPNSQIRKIIAKRLLESKQKIPHLYLQSDVVLDPLLAFRKELQENHGVKVSVNDIVIKAVAVALRNVRQANAFWDAEKGDIVMCDSVDISIAVATEKGLMTPIIKNADQKSISAISLEVKELAQKARSGKLAPHEFQGGTFSISNLGMYPVDNFCAIINPPQAGILAVGRGNKVVEPVIGLDGIEKPSVVTKMNVTLSADHRIFDGQVGASFMSELRSNFEDVRRLLL

SEQ ID NO: 39890 - protein, 637 aa, Arabidopsis thaliana
  peptide (1)..(637): Ceres Seq. ID no. 13504746
  misc_feature (404)..(637): Pfam Name: 2-oxoacid dehydrogenases acyltransferase Pfam Description: 2-oxoacid dehydrogenases acyltransferase
  misc_feature (195)..(637): Homolog of NCBI NO: 5669871 NR Description: dihydrolipoamide S-acetyltransferase [Zea mays]
  misc_feature (206)..(637): Homolog of NCBI NO: 18400212 NR Description: acetyltransferase -related [Arabidopsis thaliana]
  misc_feature (82)..(637): Homolog of NCBI NO: 14587786 NR Description: dihydrolipoamide acetyltransferase [Sus scrofa]
  misc_feature (82)..(637): Homolog of NCBI NO: 16580128 NR Description: dihydrolipoamide S-acetyltransferase precursor
  misc_feature (82)..(637): Homolog of NCBI NO: 266685 NR Description: DIHYDROLIPOAMIDE ACETYLTRANSFERASE COMPONENT OF DEHYDROGENASE COMPLEX (E2) (PDC-E2) (70 KDA MITOCHONDRIAL
  misc_feature (82)..(637): Homolog of NCBI NO: 34863356 NR Description: dihydrolipoamide acetyltransferase [Rattus
  misc_feature (82)..(637): Homolog of NCBI NO: 20805283 NR Description: dihydrolipoamide acetyltransferase precursor
  misc_feature (82)..(637): Homolog of NCBI NO: 27762280 NR Description: dihydrolipoamide S-acetyltransferase [Danio rerio]
  misc_feature (82)..(637): Homolog of NCBI NO: 21594641 NR Description: dihydrolipoamide S-acetyltransferase (E2
  misc_feature (28)..(637): Homolog of NCBI NO: 1076318 NR Description: dihydrolipoamide S-acetyltransferase (EC
MVLPLFRRAAIARTSSLLRARLFAPASEFHSRFSNGLYHLDDKISSSNGVRSASIDLITRMDDSSPKPILRFGVQNFSSTGPISQTVLAMPALSPTMSHGNVVKWMKKEGDKVEVGDVLCEIETDKATVEFESQEEGFLAKILVTEGSKDIPVNEPIAIMVEEEDDIKNVPATIEGGRDGKEETSAHQVMKPDESTQQKSSIQPDASDLPPHVVLEMPALSPTMNQGNIAKWWKKEGDKIEVGDVIGEIETDKATLEFESLEEGYLAKILIPEGSKDVAVGKPIALIVEDAESIEAIKSSSAGSSEVDTVKEVPDSVVDKPTERKAGFTKISPAAKLLILEHGLEASSIEASGPYGTLLKSDVVAAIASGKASKSSASTKKKQPSKETPSKSSSTSKPSVTQSDNNYEDFPNSQIRKIIAKRLLESKQKIPHLYLQSDVVLDPLLAFRKELQENHGVKVSVNDIVIKAVAVALRNVRQANAFWDAEKGDIVMCDSVDISIAVATEKGLMTPIIKNADQKSISAISLEVKELAQKARSGKLAPHEFQGGTFSISNLGMYPVDNFCAIINPPQAGILAVGRGNKVVEPVIGLDGIEKPSVVTKMNVTLSADHRIFDGQVGASFMSELRSNFEDVRRLLL

SEQ ID NO: 39891 - protein, 577 aa, Arabidopsis thaliana
  peptide (1)..(577): Ceres Seq. ID no. 13504747
  misc_feature (344)..(577): Pfam Name: 2-oxoacid dehydrogenases acyltransferase Pfam Description: 2-oxoacid dehydrogenases acyltransferase
  misc_feature (135)..(577): Homolog of NCBI NO: 5669871 NR Description: dihydrolipoamide S-acetyltransferase [Zea mays]
  misc_feature (146)..(577): Homolog of NCBI NO: 18400212 NR Description: acetyltransferase -related [Arabidopsis thaliana]
  misc_feature (22)..(577): Homolog of NCBI NO: 14587786 NR Description: dihydrolipoamide acetyltransferase [Sus scrofa]
  misc_feature (22)..(577): Homolog of NCBI NO: 16580128 NR Description: dihydrolipoamide S-acetyltransferase precursor
  misc_feature (22)..(577): Homolog of NCBI NO: 266685 NR Description: DIHYDROLIPOAMIDE ACETYLTRANSFERASE COMPONENT OF DEHYDROGENASE COMPLEX (E2) (PDC-E2) (70 KDA MITOCHONDRIAL
  misc_feature (22)..(577): Homolog of NCBI NO: 34863356 NR Description: dihydrolipoamide acetyltransferase [Rattus
  misc_feature (22)..(577): Homolog of NCBI NO: 20805283 NR Description: dihydrolipoamide acetyltransferase precursor
  misc_feature (22)..(577): Homolog of NCBI NO: 27762280 NR Description: dihydrolipoamide S-acetyltransferase [Danio rerio]
  misc_feature (22)..(577): Homolog of NCBI NO: 21594641 NR Description: dihydrolipoamide S-acetyltransferase (E2
  misc_feature (1)..(577): Homolog of NCBI NO: 1076318 NR Description: dihydrolipoamide S-acetyltransferase (EC
MDDSSPKPILRFGVQNFSSTGPISQTVLAMPALSPTMSHGNVVKWMKKEGDKVEVGDVLCEIETDKATVEFESQEEGFLAKILVTEGSKDIPVNEPIAIMVEEEDDIKNVPATIEGGRDGKEETSAHQVMKPDESTQQKSSIQPDASDLPPHVVLEMPALSPTMNQGNIAKWWKKEGDKIEVGDVIGEIETDKATLEFESLEEGYLAKILIPEGSKDVAVGKPIALIVEDAESIEAIKSSSAGSSEVDTVKEVPDSVVDKPTERKAGFTKISPAAKLLILEHGLEASSIEASGPYGTLLKSDVVAAIASGKASKSSASTKKKQPSKETPSKSSSTSKPSVTQSDNNYEDFPNSQIRKIIAKRLLESKQKIPHLYLQSDVVLDPLLAFRKELQENHGVKVSVNDIVIKAVAVALRNVRQANAFWDAEKGDIVMCDSVDISIAVATEKGLMTPIIKNADQKSISAISLEVKELAQKARSGKLAPHEFQGGTFSISNLGMYPVDNFCAIINPPQAGILAVGRGNKVVEPVIGLDGIEKPSVVTKMNVTLSADHRIFDGQVGASFMSELRSNFEDVRRLLL

SEQ ID NO: 39892 - DNA, 1126 bp, Arabidopsis thaliana
  misc_feature (1)..(1126): Ceres Seq. ID no. 12348411
  misc_feature: MA Experiment ID: 108434 Result: Down-regulated in Transcription
  misc_feature: MA Experiment 108434 PARAMETER Experiment Name: At_Root_Tips_cDNA_P Parameter: Tissue Value: Root Tips
  misc_feature: MA Experiment ID: 108462 Result: Up-regulated in Transcription
  misc_feature: MA Experiment 108462 PARAMETER Experiment Name: At_Germinating_Seeds_cDNA_P Parameter: Age (day) Value: 2 vs. 0
  misc_feature: MA Experiment 108462 PARAMETER Experiment Name: At_Germinating_Seeds_cDNA_P Parameter: Tissue Value: Germinating Seeds
  misc_feature: MA Experiment ID: 108463 Result: Up-regulated in Transcription
  misc_feature: MA Experiment 108463 PARAMETER Experiment Name: At_Germinating_Seeds_cDNA_P Parameter: Age (day) Value: 3 vs. 0
  misc_feature: MA Experiment 108463 PARAMETER Experiment Name: At_Germinating_Seeds_cDNA_P Parameter: Tissue Value: Germinating Seeds
  misc_feature: MA Experiment ID: 108464 Result: Up-regulated in Transcription
  misc_feature: MA Experiment 108464 PARAMETER Experiment Name: At_Germinating_Seeds_cDNA_P Parameter: Age (day) Value: 4 vs. 0
  misc_feature: MA Experiment 108464 PARAMETER Experiment Name: At_Germinating_Seeds_cDNA_P Parameter: Tissue Value: Germinating Seeds
  misc_feature: MA Experiment ID: 108668 Result: Up-regulated in Transcription
  misc_feature: MA Experiment 108668 PARAMETER Experiment Name: At_2mM_SA_cDNA_P Parameter: Plant Line Value: WS
  misc_feature: MA Experiment 108668 PARAMETER Experiment Name: At_2mM_SA_cDNA_P Parameter: Timepoint (hr) Value: 6
  misc_feature: MA Experiment 108668 PARAMETER Experiment Name: At_2mM_SA_cDNA_P Parameter: Treatment Value: 2mM SA vs. No Treatment
  misc_feature: MA Experiment ID: 20000182 Result: Up-regulated in Transcription
  misc_feature: MA Experiment 20000182 PARAMETER Experiment Name: At_2mM_SA_P Parameter: Age (day) Value: 14
  misc_feature: MA Experiment 20000182 PARAMETER Experiment Name: At_2mM_SA_P Parameter: Organism Value: A. thaliana
  misc_feature: MA Experiment 20000182 PARAMETER Experiment Name: At_2mM_SA_P Parameter: Plant Line Value: WS
  misc_feature: MA Experiment 20000182 PARAMETER Experiment Name: At_2mM_SA_P Parameter: Timepoint (hr) Value: 6
  misc_feature: MA Experiment 20000182 PARAMETER Experiment Name: At_2mM_SA_P Parameter: Tissue Value: Aerial
  misc_feature: MA Experiment 20000182 PARAMETER Experiment Name: At_2mM_SA_P Parameter: Treatment Value: 2mM SA vs. No Treatment
  misc_feature: MA Experiment ID: 20000184 Result: Up-regulated in Transcription
  misc_feature: MA Experiment 20000184 PARAMETER Experiment Name: At_Shoots__P Parameter: Age (day) Value: 7
  misc_feature: MA Experiment 20000184 PARAMETER Experiment Name: At_Shoots__P Parameter: Tissue Value: Shoots vs. Whole Plant
  misc_feature: MA Experiment ID: 20000185 Result: Up-regulated in Transcription
  misc_feature: MA Experiment 20000185 PARAMETER Experiment Name: At_Roots__P Parameter: Age (day) Value: 7 vs. 21
  misc_feature: MA Experiment 20000185 PARAMETER Experiment Name: At_Roots__P Parameter: Organism Value: A. thaliana
  misc_feature: MA Experiment 20000185 PARAMETER Experiment Name: At_Roots__P Parameter: Tissue Value: Roots vs. Whole Plant
  misc_feature: MA Experiment ID: 20000264 Result: Down-regulated in Transcription
  misc_feature: MA Experiment 20000264 PARAMETER Experiment Name: At_Open_Flower_P Parameter: Age (day) Value: 21
  misc_feature: MA Experiment 20000264 PARAMETER Experiment Name: At_Open_Flower_P Parameter: Plant Line Value: WS
  misc_feature: MA Experiment 20000264 PARAMETER Experiment Name: At_Open_Flower_P Parameter: Tissue Value: Open Flower vs. Whole Plant
  misc_feature: MA Experiment ID: 20000265 Result: Down-regulated in Transcription
  misc_feature: MA Experiment 20000265 PARAMETER Experiment Name: At_Open_Flower_P Parameter: Age (day) Value: 21
  misc_feature: MA Experiment 20000265 PARAMETER Experiment Name: At_Open_Flower_P Parameter: Plant Line Value: WS
  misc_feature: MA Experiment 20000265 PARAMETER Experiment Name: At_Open_Flower_P Parameter: Tissue Value: Closed Flower vs. Whole Plant
  misc_feature: MA Experiment ID: 20000286 Result: Down-regulated in Transcription
  misc_feature: MA Experiment 20000286 PARAMETER Experiment Name: At_Open_Flower_P Parameter: Age (day) Value: 21
  misc_feature: MA Experiment 20000286 PARAMETER Experiment Name: At_Open_Flower_P Parameter: Plant Line Value: WS
  misc_feature: MA Experiment 20000286 PARAMETER Experiment Name: At_Open_Flower_P Parameter: Tissue Value: Half Open vs. Whole Plant
  misc_feature: MA Experiment ID: 20000439 Result: Up-regulated in Transcription
  misc_feature: MA Experiment 20000439 PARAMETER Experiment Name: At_Roots__P Parameter: Age (day) Value: 14 vs. 21
  misc_feature: MA Experiment 20000439 PARAMETER Experiment Name: At_Roots__P Parameter: Organism Value: A. thaliana
  misc_feature: MA Experiment 20000439 PARAMETER Experiment Name: At_Roots__P Parameter: Tissue Value: Roots vs. Whole Plant
  misc_feature: MA Experiment ID: 20000527 Result: Down-regulated in Transcription
  misc_feature: MA Experiment 20000527 PARAMETER Experiment Name: At_10percent_PEG_P Parameter: Age (day) Value: 20
  misc_feature: MA Experiment 20000527 PARAMETER Experiment Name: At_10percent_PEG_P Parameter: Organism Value: A. thaliana
  misc_feature: MA Experiment 20000527 PARAMETER Experiment Name: At_10percent_PEG_P Parameter: Plant Line Value: WS
  misc_feature: MA Experiment 20000527 PARAMETER Experiment Name: At_10percent_PEG_P Parameter: Timepoint (day) Value: 20
  misc_feature: MA Experiment 20000527 PARAMETER Experiment Name: At_10percent_PEG_P Parameter: Tissue Value: Whole Plant
  misc_feature: MA Experiment 20000527 PARAMETER Experiment Name: At_10percent_PEG_P Parameter: Treatment Value: 10percent PEG vs. No Treatment
  misc_feature: MA Experiment ID: 20000794 Result: Down-regulated in Transcription
  misc_feature: MA Experiment 20000794 PARAMETER Experiment Name: At_Petals_P Parameter: Age (day) Value: 23-25 days
  misc_feature: MA Experiment 20000794 PARAMETER Experiment Name: At_Petals_P Parameter: Plant Line Value: WS
  misc_feature: MA Experiment 20000794 PARAMETER Experiment Name: At_Petals_P Parameter: Tissue Value: Petals vs. Whole plant
  misc_feature: MA Experiment ID: 20001555 Result: Down-regulated in Transcription
  misc_feature: MA Experiment 20001555 PARAMETER Experiment Name: At_Drought_Soil_Dry_P Parameter: Age (day) Value: 24
  misc_feature: MA Experiment 20001555 PARAMETER Experiment Name: At_Drought_Soil_Dry_P Parameter: Organism Value: A. thaliana
  misc_feature: MA Experiment 20001555 PARAMETER Experiment Name: At_Drought_Soil_Dry_P Parameter: Plant Line Value: WS
  misc_feature: MA Experiment 20001555 PARAMETER Experiment Name: At_Drought_Soil_Dry_P Parameter: Post Timepoint (hr) Value: None
  misc_feature: MA Experiment 20001555 PARAMETER Experiment Name: At_Drought_Soil_Dry_P Parameter: Post-Treatment Value: None
  misc_feature: MA Experiment 20001555 PARAMETER Experiment Name: At_Drought_Soil_Dry_P Parameter: Timepoint (day) Value: 10
  misc_feature: MA Experiment 20001555 PARAMETER Experiment Name: At_Drought_Soil_Dry_P Parameter: Treatment Value: Drought vs. No Drought
  misc_feature: MA Experiment ID: 20001556 Result: Down-regulated in Transcription
  misc_feature: MA Experiment 20001556 PARAMETER Experiment Name: At_Drought_Soil_Dry_P Parameter: Age (day) Value: 26
  misc_feature: MA Experiment 20001556 PARAMETER Experiment Name: At_Drought_Soil_Dry_P Parameter: Organism Value: A. thaliana
  misc_feature: MA Experiment 20001556 PARAMETER Experiment Name: At_Drought_Soil_Dry_P Parameter: Plant Line Value: WS
  misc_feature: MA Experiment 20001556 PARAMETER Experiment Name: At_Drought_Soil_Dry_P Parameter: Post Timepoint (hr) Value: None
  misc_feature: MA Experiment 20001556 PARAMETER Experiment Name: At_Drought_Soil_Dry_P Parameter: Post-Treatment Value: None
  misc_feature: MA Experiment 20001556 PARAMETER Experiment Name: At_Drought_Soil_Dry_P Parameter: Timepoint (day) Value: 12
  misc_feature: MA Experiment 20001556 PARAMETER Experiment Name: At_Drought_Soil_Dry_P Parameter: Treatment Value: Drought vs. No Drought
  misc_feature: MA Experiment ID: 20001558 Result: Down-regulated in Transcription
  misc_feature: MA Experiment 20001558 PARAMETER Experiment Name: At_Drought_Soil_Dry_P Parameter: Age (day) Value: 27
  misc_feature: MA Experiment 20001558 PARAMETER Experiment Name: At_Drought_Soil_Dry_P Parameter: Organism Value: A. thaliana
  misc_feature: MA Experiment 20001558 PARAMETER Experiment Name: At_Drought_Soil_Dry_P Parameter: Plant Line Value: WS
  misc_feature: MA Experiment 20001558 PARAMETER Experiment Name: At_Drought_Soil_Dry_P Parameter: Post Timepoint (hr) Value: 6
  misc_feature: MA Experiment 20001558 PARAMETER Experiment Name: At_Drought_Soil_Dry_P Parameter: Post-Treatment Value: Re-Water vs. No Drought
  misc_feature: MA Experiment 20001558 PARAMETER Experiment Name: At_Drought_Soil_Dry_P Parameter: Timepoint (day) Value: 13
  misc_feature: MA Experiment 20001558 PARAMETER Experiment Name: At_Drought_Soil_Dry_P Parameter: Treatment Value: Drought vs. No Drought
  misc_feature: MA Experiment ID: 20001905 Result: Down-regulated in Transcription
  misc_feature: MA Experiment 20001905 PARAMETER Experiment Name: At_Drought_Reproduction_P Parameter: Age (day) Value: 40
  misc_feature: MA Experiment 20001905 PARAMETER Experiment Name: At_Drought_Reproduction_P Parameter: Organism Value: A. thaliana
  misc_feature: MA Experiment 20001905 PARAMETER Experiment Name: At_Drought_Reproduction_P Parameter: Plant Line Value: WS
  misc_feature: MA Experiment 20001905 PARAMETER Experiment Name: At_Drought_Reproduction_P Parameter: Timepoint (day) Value: 10
  misc_feature: MA Experiment 20001905 PARAMETER Experiment Name: At_Drought_Reproduction_P Parameter: Tissue Value: Rosettes
  misc_feature: MA Experiment 20001905 PARAMETER Experiment Name: At_Drought_Reproduction_P Parameter: Treatment Value: Drought vs. No Drought
ctgccaaacatatacatcaaagcttgactctctttttctctcccatggaatcgacaaagaagcaagtctcgctggagctacttccatggttagttgtccacaccgatggaacggtagagagactagcgggaaccgaggtttgtcctcccggtttggatccaataaccggggttttctctaaagatatcattatcgaaccgaaaaccggtttatctgcccgaatctatcgacccttctcgattcaacccggtcagaagattcctctcatgctctattttcatggcggtgcatttctcatctcctccacttccttcccctcttaccacaccagtcttaacaaaattgtcaatcaggctaacgtcatagccgtctctgtcaattacagactagcaccagaacatccacttcctacagcgtacgaagactcatggactgcgctaaatactatccaagccataaacgagccgtggatcaacgactacgccgacttggacagtatattcctagtgggagatagcgccggagctaatatctcgcaccacctcgcatttcgagccaaacaatctgaccaaaccgtgaaaataaaaggcattggaatgatccacccatatttttggggaacacaacctatcggagcagagatcaaagacgaagcgatgaaacaaatggtggacggatggtgggaatttgtgtgcccctccaagaaaggatctgatgacccgtggattaatccgtttgcggacgggtcaccggatcttggagggttagggtgtgagagagtgatgattactgtggcggagaaagatatattgaatgagagagggaagatgtattttgaaagattggtgaagagtgagtggaaaggaaaggttgagattatggagacgaaagagaaagatcatgtttttcatatttttgagcccgattgtgatgaagctatggagatggtacgatgcttggctctctttataaaccaagttgaagcttgatattatttgttttgcctaaatttgatggcttttttaatgtttgtataatttttacatgtttgttaatgttgttgttattgtcttttcttttaaatttgtgtattacatttatatgtggttaaatttgtgttttttcc

SEQ ID NO: 39893 - protein, 328 aa, Arabidopsis thaliana
  peptide (1)..(328): Ceres Seq. ID no. 12348412
  misc_feature (74)..(131): Pfam Name: Carboxylesterase Pfam Description: Carboxylesterase
  misc_feature (18)..(323): Homolog of NCBI NO: 21537287 NR Description: putative esterase [Arabidopsis thaliana]
  misc_feature (21)..(323): Homolog of NCBI NO: 18086341 NR Description: AT3g48690/T8P19_200 [Arabidopsis thaliana]
  misc_feature (19)..(323): Homolog of NCBI NO: 15222795 NR Description: unknown protein; protein id: At1g49660.1
  misc_feature (27)..(323): Homolog of NCBI NO: 15222791 NR Description: hypothetical protein; protein id: At1g49640.1
  misc_feature (21)..(323): Homolog of NCBI NO: 15228425 NR Description: putative protein
  misc_feature (22)..(325): Homolog of NCBI NO: 28393060 NR Description: putative esterase [Arabidopsis thaliana]
  misc_feature (22)..(325): Homolog of NCBI NO: 15227669 NR Description: putative esterase; protein id: At2g03550.1
  misc_feature (21)..(323): Homolog of NCBI NO: 15228426 NR Description: putative protein; protein id: At3g48700.1
  misc_feature (15)..(328): Homolog of NCBI NO: 18401743 NR Description: expressed protein
  misc_feature (15)..(328): Homolog of NCBI NO: 21536771 NR Description: unknown [Arabidopsis thaliana]
AKHIHQSLTLFFSPMESTKKQVSLELLPWLVVHTDGTVERLAGTEVCPPGLDPITGVFSKDIIIEPKTGLSARIYRPFSIQPGQKIPLMLYFHGGAFLISSTSFPSYHTSLNKIVNQANVIAVSVNYRLAPEHPLPTAYEDSWTALNTIQAINEPWINDYADLDSIFLVGDSAGANISHHLAFRAKQSDQTVKIKGIGMIHPYFWGTQPIGAEIKDEAMKQMVDGWWEFVCPSKKGSDDPWINPFADGSPDLGGLGCERVMITVAEKDILNERGKMYFERLVKSEWKGKVEIMETKEKDHVFHIFEPDCDEAMEMVRCLALFINQVEA

SEQ ID NO: 39894 - protein, 314 aa, Arabidopsis thaliana
  peptide (1)..(314): Ceres Seq. ID no. 12348413
  misc_feature (60)..(117): Pfam Name: Carboxylesterase Pfam Description: Carboxylesterase
  misc_feature (4)..(309): Homolog of NCBI NO: 21537287 NR Description: putative esterase [Arabidopsis thaliana]
  misc_feature (7)..(309): Homolog of NCBI NO: 18086341 NR Description: AT3g48690/T8P19_200 [Arabidopsis thaliana]
  misc_feature (5)..(309): Homolog of NCBI NO: 15222795 NR Description: unknown protein; protein id: At1g49660.1
  misc_feature (13)..(309): Homolog of NCBI NO: 15222791 NR Description: hypothetical protein; protein id: At1g49640.1
  misc_feature (7)..(309): Homolog of NCBI NO: 15228425 NR Description: putative protein
  misc_feature (8)..(311): Homolog of NCBI NO: 28393060 NR Description: putative esterase [Arabidopsis thaliana]
  misc_feature (8)..(311): Homolog of NCBI NO: 15227669 NR Description: putative esterase; protein id: At2g03550.1
  misc_feature (7)..(309): Homolog of NCBI NO: 15228426 NR Description: putative protein; protein id: At3g48700.1
  misc_feature (1)..(314): Homolog of NCBI NO: 18401743 NR Description: expressed protein
  misc_feature (1)..(314): Homolog of NCBI NO: 21536771 NR Description: unknown [Arabidopsis thaliana]
MESTKKQVSLELLPWLVVHTDGTVERLAGTEVCPPGLDPITGVFSKDIIIEPKTGLSARIYRPFSIQPGQKIPLMLYFHGGAFLISSTSFPSYHTSLNKIVNQANVIAVSVNYRLAPEHPLPTAYEDSWTALNTIQAINEPWINDYADLDSIFLVGDSAGANISHHLAFRAKQSDQTVKIKGIGMIHPYFWGTQPIGAEIKDEAMKQMVDGWWEFVCPSKKGSDDPWINPFADGSPDLGGLGCERVMITVAEKDILNERGKMYFERLVKSEWKGKVEIMETKEKDHVFHIFEPDCDEAMEMVRCLALFINQVEA

SEQ ID NO: 39895 - protein, 240 aa, Arabidopsis thaliana
  peptide (1)..(240): Ceres Seq. ID no. 12348414
  misc_feature (1)..(43): Pfam Name: Carboxylesterase Pfam Description: Carboxylesterase
  misc_feature (1)..(235): Homolog of NCBI NO: 21537287 NR Description: putative esterase [Arabidopsis thaliana]
  misc_feature (1)..(235): Homolog of NCBI NO: 18086341 NR Description: AT3g48690/T8P19_200 [Arabidopsis thaliana]
  misc_feature (1)..(235): Homolog of NCBI NO: 15222795 NR Description: unknown protein; protein id: At1g49660.1
  misc_feature (1)..(235): Homolog of NCBI NO: 15222791 NR Description: hypothetical protein; protein id: At1g49640.1
  misc_feature (1)..(235): Homolog of NCBI NO: 15228425 NR Description: putative protein
  misc_feature (1)..(237): Homolog of NCBI NO: 28393060 NR Description: putative esterase [Arabidopsis thaliana]
  misc_feature (1)..(237): Homolog of NCBI NO: 15227669 NR Description: putative esterase; protein id: At2g03550.1
  misc_feature (1)..(235): Homolog of NCBI NO: 15228426 NR Description: putative protein; protein id: At3g48700.1
  misc_feature (1)..(240): Homolog of NCBI NO: 18401743 NR Description: expressed protein
  misc_feature (1)..(240): Homolog of NCBI NO: 21536771 NR Description: unknown [Arabidopsis thaliana]
MLYFHGGAFLISSTSFPSYHTSLNKIVNQANVIAVSVNYRLAPEHPLPTAYEDSWTALNTIQAINEPWINDYADLDSIFLVGDSAGANISHHLAFRAKQSDQTVKIKGIGMIHPYFWGTQPIGAEIKDEAMKQMVDGWWEFVCPSKKGSDDPWINPFADGSPDLGGLGCERVMITVAEKDILNERGKMYFERLVKSEWKGKVEIMETKEKDHVFHIFEPDCDEAMEMVRCLALFINQVEA

SEQ ID NO: 39896 - DNA, 1194 bp, Arabidopsis thaliana
  misc_feature (1)..(1194): Ceres Seq. ID no. 12330308
  misc_feature: MA Experiment ID: 108572 Result: Up-regulated in Transcription
  misc_feature: MA Experiment 108572 PARAMETER Experiment Name: At_Drought_cDNA_P Parameter: Timepoint (hr) Value: 1
  misc_feature: MA Experiment 108572 PARAMETER Experiment Name: At_Drought_cDNA_P Parameter: Tissue Value: Aerial
  misc_feature: MA Experiment 108572 PARAMETER Experiment Name: At_Drought_cDNA_P Parameter: Treatment Value: Drought vs. No Drought
  misc_feature: MA Experiment ID: 20000234 Result: Up-regulated in Transcription
  misc_feature: MA Experiment 20000234 PARAMETER Experiment Name: At_Siliques_P Parameter: Age (day) Value: 21
  misc_feature: MA Experiment 20000234 PARAMETER Experiment Name: At_Siliques_P Parameter: Organism Value: A. thaliana
  misc_feature: MA Experiment 20000234 PARAMETER Experiment Name: At_Siliques_P Parameter: Plant Line Value: WS
  misc_feature: MA Experiment 20000234 PARAMETER Experiment Name: At_Siliques_P Parameter: Tissue Value: Less Than 5mm Siliques vs. Whole Plant
  misc_feature: MA Experiment ID: 20000235 Result: Up-regulated in Transcription
  misc_feature: MA Experiment 20000235 PARAMETER Experiment Name: At_Siliques_P Parameter: Age (day) Value: 21
  misc_feature: MA Experiment 20000235 PARAMETER Experiment Name: At_Siliques_P Parameter: Organism Value: A. thaliana
  misc_feature: MA Experiment 20000235 PARAMETER Experiment Name: At_Siliques_P Parameter: Plant Line Value: WS
  misc_feature: MA Experiment 20000235 PARAMETER Experiment Name: At_Siliques_P Parameter: Tissue Value: 5-10mm Siliques vs. Whole Plant
  misc_feature: MA Experiment ID: 20001760 Result: Up-regulated in Transcription
  misc_feature: MA Experiment 20001760 PARAMETER Experiment Name: At_50mM_NH4NO3_L-to-H_P Parameter: Timepoint (hr) Value: 2
  misc_feature: MA Experiment 20001760 PARAMETER Experiment Name: At_50mM_NH4NO3_L-to-H_P Parameter: Tissue Value: Siliques
  misc_feature: MA Experiment 20001760 PARAMETER Experiment Name: At_50mM_NH4NO3_L-to-H_P Parameter: Treatment Value: 50mM NH4NO3 vs 100mM Mannitol
gtcataacagtaaatgatttccacctcgctcttaattgtctacaaatcatctctttcttcacctaacgacgatggatctccgattcttggcgtccttgacccttcttctcggtctattcttcgtcaatacaaatccaacagttggacaagtcggcgtttgctatggaagaaacggcaacaacctcccttcaccggcagaaaccattgcgctcttcaaacagaaaaacatccaacgagttaggctatacagtccggaccacgacgttctagccgccctacgtggctccaacatcgaggtaacgctgggtcttcccaactcttacctacagagcgtggcctcgagccaatcacaagctaacgcgtgggtacaaacctacgtcatgaactacgcgaatggcgtcaggttccgttacatatctgttgggaatgaagttaaaatctccgactcttacgcacagttcctagtccctgccatggaaaacattgaccgggcggttttagcagccggactcggtggtcgtatcaaggtatccacatcggtagatatgggagtgcttggagagtcttatccaccatcgaaaggttcgtttaggggagacgttatggtggtaatggaaccaatcatacgtttcttggtaagcaagaactctcctttactcttaaacctctacacttacttcagctacgcgggcaatataggccaaatccggctcgattacgctctcttcacggctccttcaggaatcgtttcggaccctcctagatcttatcaaaacctatttgatgcgatgctcgatgcgatgtactcagccctagagaaattcggtggcgcatcattggaaatagttgtggcggagactggatggccaacgggaggaggagtcgatacaaatatagagaatgcgagaatctataacaataatttgattaagcatgtgaagaatgggacaccgaagagaccagggaaagaaatcgagacatatttatttgccatttatgacgagaatcaaaagccgactcctccttatgttgagaagttttggggattgttctatcccaacaagcagcctaagtatgatattaacttttattgagccgaaccaatattctatcaagggaatggtatatttatatttgaaaactaatatagatattggtactatcattcattatacaataaataaagtttgaggc

SEQ ID NO: 39897 - protein, 340 aa, Arabidopsis thaliana
  peptide (1)..(340): Ceres Seq. ID no. 12330309
  misc_feature (27)..(339): Pfam Name: Glycosyl hydrolases family 17 Pfam Description: Glycosyl hydrolases family 17
  misc_feature (6)..(339): Homolog of NCBI NO: 16903142 NR Description: beta-1,3-glucanase [Prunus persica]
  misc_feature (6)..(339): Homolog of NCBI NO: 1706548 NR Description: Glucan endo-1,3-beta-glucosidase, basic isoform
  misc_feature (6)..(339): Homolog of NCBI NO: 7801384 NR Description: beta 1-3 glucanase [Vitis vinifera]
  misc_feature (6)..(340): Homolog of NCBI NO: 22550395 NR Description: beta-1,3-glucanase [Vitis vinifera]
  misc_feature (6)..(339): Homolog of NCBI NO: 1706546 NR Description: GLUCAN ENDO-1,3-BETA-GLUCOSIDASE PRECURSOR ((1-
  misc_feature (6)..(339): Homolog of NCBI NO: 7447980 NR Description: glucan endo-1,3-beta-D-glucosidase (EC 3.2.1.39)
  misc_feature (6)..(338): Homolog of NCBI NO: 11279332 NR Description: beta-1,3 glucanase (EC 3.2.1.-)
  misc_feature (6)..(339): Homolog of NCBI NO: 16903144 NR Description: beta-1,3-glucanase [Prunus persica]
  misc_feature (1)..(340): Homolog of NCBI NO: 15230263 NR Description: glycosyl hydrolase family 17
  misc_feature (1)..(340): Homolog of NCBI NO: 21536773 NR Description: glucan endo-1,3-beta-D-glucosidase-like protein
MDLRFLASLTLLLGLFFVNTNPTVGQVGVCYGRNGNNLPSPAETIALFKQKNIQRVRLYSPDHDVLAALRGSNIEVTLGLPNSYLQSVASSQSQANAWVQTYVMNYANGVRFRYISVGNEVKISDSYAQFLVPAMENIDRAVLAAGLGGRIKVSTSVDMGVLGESYPPSKGSFRGDVMVVMEPIIRFLVSKNSPLLLNLYTYFSYAGNIGQIRLDYALFTAPSGIVSDPPRSYQNLFDAMLDAMYSALEKFGGASLEIVVAETGWPTGGGVDTNIENARIYNNNLIKHVKNGTPKRPGKEIETYLFAIYDENQKPTPPYVEKFWGLFYPNKQPKYDINFY

SEQ ID NO: 39898 - protein, 237 aa, Arabidopsis thaliana
  peptide (1)..(237): Ceres Seq. ID no. 12330310
  misc_feature (1)..(236): Pfam Name: Glycosyl hydrolases family 17 Pfam Description: Glycosyl hydrolases family 17
  misc_feature (1)..(236): Homolog of NCBI NO: 16903142 NR Description: beta-1,3-glucanase [Prunus persica]
  misc_feature (1)..(236): Homolog of NCBI NO: 1706548 NR Description: Glucan endo-1,3-beta-glucosidase, basic isoform
  misc_feature (1)..(236): Homolog of NCBI NO: 7801384 NR Description: beta 1-3 glucanase [Vitis vinifera]
  misc_feature (1)..(237): Homolog of NCBI NO: 22550395 NR Description: beta-1,3-glucanase [Vitis vinifera]
  misc_feature (1)..(236): Homolog of NCBI NO: 1706546 NR Description: GLUCAN ENDO-1,3-BETA-GLUCOSIDASE PRECURSOR ((1-
  misc_feature (1)..(236): Homolog of NCBI NO: 7447980 NR Description: glucan endo-1,3-beta-D-glucosidase (EC 3.2.1.39)
  misc_feature (1)..(235): Homolog of NCBI NO: 11279332 NR Description: beta-1,3 glucanase (EC 3.2.1.-)
  misc_feature (1)..(236): Homolog of NCBI NO: 16903144 NR Description: beta-1,3-glucanase [Prunus persica]
  misc_feature (1)..(237): Homolog of NCBI NO: 15230263 NR Description: glycosyl hydrolase family 17
  misc_feature (1)..(237): Homolog of NCBI NO: 21536773 NR Description: glucan endo-1,3-beta-D-glucosidase-like protein
MNYANGVRFRYISVGNEVKISDSYAQFLVPAMENIDRAVLAAGLGGRIKVSTSVDMGVLGESYPPSKGSFRGDVMVVMEPIIRFLVSKNSPLLLNLYTYFSYAGNIGQIRLDYALFTAPSGIVSDPPRSYQNLFDAMLDAMYSALEKFGGASLEIVVAETGWPTGGGVDTNIENARIYNNNLIKHVKNGTPKRPGKEIETYLFAIYDENQKPTPPYVEKFWGLFYPNKQPKYDINFY

SEQ ID NO: 39899 - protein, 206 aa, Arabidopsis thaliana
  peptide (1)..(206): Ceres Seq. ID no. 12330311
  misc_feature (1)..(205): Pfam Name: Glycosyl hydrolases family 17 Pfam Description: Glycosyl hydrolases family 17
  misc_feature (1)..(205): Homolog of NCBI NO: 16903142 NR Description: beta-1,3-glucanase [Prunus persica]
  misc_feature (1)..(205): Homolog of NCBI NO: 1706548 NR Description: Glucan endo-1,3-beta-glucosidase, basic isoform
  misc_feature (1)..(205): Homolog of NCBI NO: 7801384 NR Description: beta 1-3 glucanase [Vitis vinifera]
  misc_feature (1)..(206): Homolog of NCBI NO: 22550395 NR Description: beta-1,3-glucanase [Vitis vinifera]
  misc_feature (1)..(205): Homolog of NCBI NO: 1706546 NR Description: GLUCAN ENDO-1,3-BETA-GLUCOSIDASE PRECURSOR ((1-
  misc_feature (1)..(205): Homolog of NCBI NO: 7447980 NR Description: glucan endo-1,3-beta-D-glucosidase (EC 3.2.1.39)
  misc_feature (1)..(204): Homolog of NCBI NO: 11279332 NR Description: beta-1,3 glucanase (EC 3.2.1.-)
  misc_feature (1)..(205): Homolog of NCBI NO: 16903144 NR Description: beta-1,3-glucanase [Prunus persica]
  misc_feature (1)..(206): Homolog of NCBI NO: 15230263 NR Description: glycosyl hydrolase family 17
  misc_feature (1)..(206): Homolog of NCBI NO: 21536773 NR Description: glucan endo-1,3-beta-D-glucosidase-like protein
MENIDRAVLAAGLGGRIKVSTSVDMGVLGESYPPSKGSFRGDVMVVMEPIIRFLVSKNSPLLLNLYTYFSYAGNIGQIRLDYALFTAPSGIVSDPPRSYQNLFDAMLDAMYSALEKFGGASLEIVVAETGWPTGGGVDTNIENARIYNNNLIKHVKNGTPKRPGKEIETYLFAIYDENQKPTPPYVEKFWGLFYPNKQPKYDINFY

SEQ ID NO: 39900 - DNA, 1564 bp, Arabidopsis thaliana
  misc_feature (1)..(1564): Ceres Seq. ID no. 12329690
  misc_feature: MA Experiment ID: 108573 Result: Up-regulated in Transcription
  misc_feature: MA Experiment 108573 PARAMETER Experiment Name: At_Drought_cDNA_P Parameter: Timepoint (hr) Value: 6
  misc_feature: MA Experiment 108573 PARAMETER Experiment Name: At_Drought_cDNA_P Parameter: Tissue Value: Aerial
  misc_feature: MA Experiment 108573 PARAMETER Experiment Name: At_Drought_cDNA_P Parameter: Treatment Value: Drought vs. No Drought
  misc_feature: MA Experiment ID: 108668 Result: Down-regulated in Transcription
  misc_feature: MA Experiment 108668 PARAMETER Experiment Name: At_2mM_SA_cDNA_P Parameter: Plant Line Value: WS
  misc_feature: MA Experiment 108668 PARAMETER Experiment Name: At_2mM_SA_cDNA_P Parameter: Timepoint (hr) Value: 6
  misc_feature: MA Experiment 108668 PARAMETER Experiment Name: At_2mM_SA_cDNA_P Parameter: Treatment Value: 2mM SA vs. No Treatment
  misc_feature: MA Experiment ID: 20000093 Result: Up-regulated in Transcription
  misc_feature: MA Experiment 20000093 PARAMETER Experiment Name: At_42deg_Heat_cDNA_P Parameter: Temperature (deg C) Value: 42 vs. 22
  misc_feature: MA Experiment 20000093 PARAMETER Experiment Name: At_42deg_Heat_cDNA_P Parameter: Timepoint (hr) Value: 0.5
  misc_feature: MA Experiment 20000093 PARAMETER Experiment Name: At_42deg_Heat_cDNA_P Parameter: Tissue Value: Aerial
  misc_feature: MA Experiment ID: 20000180 Result: Down-regulated in Transcription
  misc_feature: MA Experiment 20000180 PARAMETER Experiment Name: At_Germinating_Seeds_P Parameter: Age (hr) Value: 24 vs. 0
  misc_feature: MA Experiment 20000180 PARAMETER Experiment Name: At_Germinating_Seeds_P Parameter: Tissue Value: Germinating Seeds
  misc_feature: MA Experiment ID: 20000235 Result: Up-regulated in Transcription
  misc_feature: MA Experiment 20000235 PARAMETER Experiment Name: At_Siliques_P Parameter: Age (day) Value: 21
  misc_feature: MA Experiment 20000235 PARAMETER Experiment Name: At_Siliques_P Parameter: Organism Value: A. thaliana
  misc_feature: MA Experiment 20000235 PARAMETER Experiment Name: At_Siliques_P Parameter: Plant Line Value: WS
  misc_feature: MA Experiment 20000235 PARAMETER Experiment Name: At_Siliques_P Parameter: Tissue Value: 5-10mm Siliques vs. Whole Plant
  misc_feature: MA Experiment ID: 20000438 Result: Up-regulated in Transcription
  misc_feature: MA Experiment 20000438 PARAMETER Experiment Name: At_Shoots__P Parameter: Age (day) Value: 14
  misc_feature: MA Experiment 20000438 PARAMETER Experiment Name: At_Shoots__P Parameter: Tissue Value: Shoots vs. Whole Plant
  misc_feature: MA Experiment ID: 20000794 Result: Up-regulated in Transcription
  misc_feature: MA Experiment 20000794 PARAMETER Experiment Name: At_Petals_P Parameter: Age (day) Value: 23-25 days
  misc_feature: MA Experiment 20000794 PARAMETER Experiment Name: At_Petals_P Parameter: Plant Line Value: WS
  misc_feature: MA Experiment 20000794 PARAMETER Experiment Name: At_Petals_P Parameter: Tissue Value: Petals vs. Whole plant
  misc_feature: MA Experiment ID: 20001905 Result: Up-regulated in Transcription
  misc_feature: MA Experiment 20001905 PARAMETER Experiment Name: At_Drought_Reproduction_P Parameter: Age (day) Value: 40
  misc_feature: MA Experiment 20001905 PARAMETER Experiment Name: At_Drought_Reproduction_P Parameter: Organism Value: A. thaliana
  misc_feature: MA Experiment 20001905 PARAMETER Experiment Name: At_Drought_Reproduction_P Parameter: Plant Line Value: WS
  misc_feature: MA Experiment 20001905 PARAMETER Experiment Name: At_Drought_Reproduction_P Parameter: Timepoint (day) Value: 10
  misc_feature: MA Experiment 20001905 PARAMETER Experiment Name: At_Drought_Reproduction_P Parameter: Tissue Value: Rosettes
  misc_feature: MA Experiment 20001905 PARAMETER Experiment Name: At_Drought_Reproduction_P Parameter: Treatment Value: Drought vs. No Drought
attccctttcgatacatatatatttgagtctcttcctccaaatctgaaccgtttatacctctgattccaccgcttgttgcttattcatcggaatttctgttccttttgtgccaaatgctcaagaaatcgaaaagtattgtgtaattttcgttgttgattttgaaagtttcaatcttttgtagggtgagaattgagttttatcgaacaagatggatttcgtgaacaatcttgataccgacacgtcgctatcaattctctcttgtctagatgatccatcagatattgtccgtgccagtgctgtctcacgctcctggcgacaatttgtggttaagtatagtctctccaagaatctatgcttgaagttgttccatcagctatctaatgtggatcatataattgaaacaagtaatgatagaaatggagagtcatctgaagctgggtcaagcagtctcatggatacaaggctacttgaaaaagagcaccgggcttttgccttgttggctagagggtgcatgtcttcacctattgaaagctgtatagctgatgccattagagcttccagtactgataattacccagtagaaagcatcttaaacacactcgagaagagagatcggattggtcgaaccccttcttattggtcgagtactgggcaacacaaaactacggtgcccgaatcacttctttacaagttgattggtgatttgtgtctcattactgaagtcagcatccatcctttccaagcttattttcagcgcggtcatccgatatactcttcacattatgttcgtttccggttgggtcacgaaaaggacaattcacctcactacaacaattcacaggataaaaaaggtgagccaggaaagagttcaattgaaagcaactatgtatggacttacacttcacaagagttttcgatggctcaggaaaatcgattgcagagctttcagcttccagaacctgttctttgcattggtgggtatctgctagtcgagtttctaggtcgagttcagacacaagaaatggatggccaatactatatatgcgtgtcacatgtcaaagtggagggaagatctctagcaaaatcatttcgagttgagaatgtggatgacaatggaaagtttggattgaaggtgttgagttacaatgatccgaaaaaaatggaggagatggatgcagaggccgggcaggacatggatgcagaggcgggccaaagtcagctgagaaaccttgaacagctcttgaatttgttgcacaggcatcctctcgatgttgtcgactatgtttggcctgatgagtcagacgacgagtatgctgaatcagaagatgaggctgagccttagtcactgaattactactattcccagttatttcttctttttggttttaattttaaagaatctttaggtgttttttgtcatcttttgtgagcgtttttaaaagcttgtactccagccatcgttgttaaacattgtgtgtgttacagaccttaacagaaagttaacagccattttgggctctctcttatctgtcggtgattccagagaatcaaagcagtctttcg

SEQ ID NO: 39901 - protein, 377 aa, Arabidopsis thaliana
  peptide (1)..(377): Ceres Seq. ID no. 12329691
  misc_feature (4)..(50): Pfam Name: F-box domain Pfam Description: F-box domain
  misc_feature (230)..(287): Homolog of NCBI NO: 28850404 NR Description: hypothetical protein [Dictyostelium discoideum]
  misc_feature (117)..(209): Homolog of NCBI NO: 28850404 NR Description: hypothetical protein [Dictyostelium discoideum]
  misc_feature (231)..(297): Homolog of NCBI NO: 18308222 NR Description: unknown protein [Oryza sativa]
  misc_feature (133)..(377): Homolog of NCBI NO: 28393062 NR Description: putative F-box protein [Arabidopsis thaliana]
  misc_feature (279)..(377): Homolog of NCBI NO: 7452420 NR Description: hypothetical protein A_TM018A10.10 - Arabidopsis
  misc_feature (1)..(216): Homolog of NCBI NO: 7452420 NR Description: hypothetical protein A_TM018A10.10 - Arabidopsis
  misc_feature (1)..(377): Homolog of NCBI NO: 18411435 NR Description: F-box protein family
MDFVNNLDTDTSLSILSCLDDPSDIVRASAVSRSWRQFVVKYSLSKNLCLKLFHQLSNVDHIIETSNDRNGESSEAGSSSLMDTRLLEKEHRAFALLARGCMSSPIESCIADAIRASSTDNYPVESILNTLEKRDRIGRTPSYWSSTGQHKTTVPESLLYKLIGDLCLITEVSIHPFQAYFQRGHPIYSSHYVRFRLGHEKDNSPHYNNSQDKKGEPGKSSIESNYVWTYTSQEFSMAQENRLQSFQLPEPVLCIGGYLLVEFLGRVQTQEMDGQYYICVSHVKVEGRSLAKSFRVENVDDNGKFGLKVLSYNDPKKMEEMDAEAGQDMDAEAGQSQLRNLEQLLNLLHRHPLDVVDYVWPDESDDEYAESEDEAEP

SEQ ID NO: 39902 - protein, 296 aa, Arabidopsis thaliana; identical to SEQ ID NO: 26676
  peptide (1)..(296): Ceres Seq. ID no. 12329692
  misc_feature (149)..(206): Homolog of NCBI NO: 28850404 NR Description: hypothetical protein [Dictyostelium discoideum]
  misc_feature (36)..(128): Homolog of NCBI NO: 28850404 NR Description: hypothetical protein [Dictyostelium discoideum]
  misc_feature (150)..(216): Homolog of NCBI NO: 18308222 NR Description: unknown protein [Oryza sativa]
  misc_feature (52)..(296): Homolog of NCBI NO: 28393062 NR Description: putative F-box protein [Arabidopsis thaliana]
  misc_feature (198)..(296): Homolog of NCBI NO: 7452420 NR Description: hypothetical protein A_TM018A10.10 - Arabidopsis
  misc_feature (1)..(135): Homolog of NCBI NO: 7452420 NR Description: hypothetical protein A_TM018A10.10 - Arabidopsis
  misc_feature (1)..(296): Homolog of NCBI NO: 18411435 NR Description: F-box protein family

SEQ ID NO: 39903 - protein, 276 aa, Arabidopsis thaliana; identical to SEQ ID NO: 26677
  peptide (1)..(276): Ceres Seq. ID no. 12329693
  misc_feature (129)..(186): Homolog of NCBI NO: 28850404 NR Description: hypothetical protein [Dictyostelium discoideum]
  misc_feature (16)..(108): Homolog of NCBI NO: 28850404 NR Description: hypothetical protein [Dictyostelium discoideum]
  misc_feature (130)..(196): Homolog of NCBI NO: 18308222 NR Description: unknown protein [Oryza sativa]
  misc_feature (32)..(276): Homolog of NCBI NO: 28393062 NR Description: putative F-box protein [Arabidopsis thaliana]
  misc_feature (178)..(276): Homolog of NCBI NO: 7452420 NR Description: hypothetical protein A_TM018A10.10 - Arabidopsis
  misc_feature (1)..(115): Homolog of NCBI NO: 7452420 NR Description: hypothetical protein A_TM018A10.10 - Arabidopsis
  misc_feature (1)..(276): Homolog of NCBI NO: 18411435 NR Description: F-box protein family

SEQ ID NO: 39904 - DNA, 2142 bp, Arabidopsis thaliana
  misc_feature (1)..(2142): Ceres Seq. ID no. 13489235
  misc_feature: MA Experiment ID: 108435 Result: Down-regulated in Transcription
  misc_feature: MA Experiment 108435 PARAMETER Experiment Name: At_stm_Mutants_cDNA_P Parameter: Plant Line Value: wt Landsburg vs stm
  misc_feature: MA Experiment 108435 PARAMETER Experiment Name: At_stm_Mutants_cDNA_P Parameter: Tissue Value: Shoot Apical Meristem Region
  misc_feature: MA Experiment ID: 108463 Result: Up-regulated in Transcription
  misc_feature: MA Experiment 108463 PARAMETER Experiment Name: At_Germinating_Seeds_cDNA_P Parameter: Age (day) Value: 3 vs. 0
  misc_feature: MA Experiment 108463 PARAMETER Experiment Name: At_Germinating_Seeds_cDNA_P Parameter: Tissue Value: Germinating Seeds
  misc_feature: MA Experiment ID: 108464 Result: Up-regulated in Transcription
  misc_feature: MA Experiment 108464 PARAMETER Experiment Name: At_Germinating_Seeds_cDNA_P Parameter: Age (day) Value: 4 vs. 0
  misc_feature: MA Experiment 108464 PARAMETER Experiment Name: At_Germinating_Seeds_cDNA_P Parameter: Tissue Value: Germinating Seeds
  misc_feature: MA Experiment ID: 108469 Result: Down-regulated in Transcription
  misc_feature: MA Experiment ID: 108569 Result: Up-regulated in Transcription
  misc_feature: MA Experiment 108569 PARAMETER Experiment Name: At_0.001%_MeJA__cDNA_P Parameter: Timepoint (hr) Value: 6
  misc_feature: MA Experiment 108569 PARAMETER Experiment Name: At_0.001%_MeJA__cDNA_P Parameter: Tissue Value: Aerial
  misc_feature: MA Experiment 108569 PARAMETER Experiment Name: At_0.001%_MeJA__cDNA_P Parameter: Treatment Value: 0.001% MeJA vs. No Treatment
  misc_feature: MA Experiment ID: 108573 Result: Up-regulated in Transcription
  misc_feature: MA Experiment 108573 PARAMETER Experiment Name: At_Drought_cDNA_P Parameter: Timepoint (hr) Value: 6
  misc_feature: MA Experiment 108573 PARAMETER Experiment Name: At_Drought_cDNA_P Parameter: Tissue Value: Aerial
  misc_feature: MA Experiment 108573 PARAMETER Experiment Name: At_Drought_cDNA_P Parameter: Treatment Value: Drought vs. No Drought
  misc_feature: MA Experiment ID: 108574 Result: Up-regulated in Transcription
  misc_feature: MA Experiment 108574 PARAMETER Experiment Name: At_Wounding__cDNA_P Parameter: Timepoint (hr) Value: 1
  misc_feature: MA Experiment 108574 PARAMETER Experiment Name: At_Wounding__cDNA_P Parameter: Tissue Value: Aerial
  misc_feature: MA Experiment 108574 PARAMETER Experiment Name: At_Wounding__cDNA_P Parameter: Treatment Value: Wounding vs. No Wounding
  misc_feature: MA Experiment ID: 108576 Result: Down-regulated in Transcription
  misc_feature: MA Experiment 108576 PARAMETER Experiment Name: At_42deg_Heat_cDNA_P Parameter: Temperature (deg C) Value: 42 vs. 22
  misc_feature: MA Experiment 108576 PARAMETER Experiment Name: At_42deg_Heat_cDNA_P Parameter: Timepoint (hr) Value: 1
  misc_feature: MA Experiment 108576 PARAMETER Experiment Name: At_42deg_Heat_cDNA_P Parameter: Tissue Value: Aerial
  misc_feature: MA Experiment ID: 108577 Result: Up-regulated in Transcription
  misc_feature: MA Experiment 108577 PARAMETER Experiment Name: At_42deg_Heat_cDNA_P Parameter: Temperature (deg C) Value: 42 vs. 22
  misc_feature: MA Experiment 108577 PARAMETER Experiment Name: At_42deg_Heat_cDNA_P Parameter: Timepoint (hr) Value: 6
  misc_feature: MA Experiment 108577 PARAMETER Experiment Name: At_42deg_Heat_cDNA_P Parameter: Tissue Value: Aerial
  misc_feature: MA Experiment ID: 108595 Result: Down-regulated in Transcription
  misc_feature: MA Experiment 108595 PARAMETER Experiment Name: At_Ler-pi_Ovule_cDNA_P Parameter: Plant Line Value: null
  misc_feature: MA Experiment ID: 20000069 Result: Down-regulated in Transcription
  misc_feature: MA Experiment 20000069 PARAMETER Experiment Name: At_100uM_ABA_Mutants_cDNA_P Parameter: Plant Line Value: CS23
  misc_feature: MA Experiment 20000069 PARAMETER Experiment Name: At_100uM_ABA_Mutants_cDNA_P Parameter: Timepoint (hr) Value: 6
  misc_feature: MA Experiment 20000069 PARAMETER Experiment Name: At_100uM_ABA_Mutants_cDNA_P Parameter: Tissue Value: Aerial
  misc_feature: MA Experiment 20000069 PARAMETER Experiment Name: At_100uM_ABA_Mutants_cDNA_P Parameter: Treatment Value: 100uM ABA vs. No Treatment
  misc_feature: MA Experiment ID: 20000072 Result: Down-regulated in Transcription
  misc_feature: MA Experiment 20000072 PARAMETER Experiment Name: At_100uM_ABA_Mutants_cDNA_P Parameter: Plant Line Value: CS8105
  misc_feature: MA Experiment 20000072 PARAMETER Experiment Name: At_100uM_ABA_Mutants_cDNA_P Parameter: Timepoint (hr) Value: 6
  misc_feature: MA Experiment 20000072 PARAMETER Experiment Name: At_100uM_ABA_Mutants_cDNA_P Parameter: Tissue Value: Aerial
  misc_feature: MA Experiment 20000072 PARAMETER Experiment Name: At_100uM_ABA_Mutants_cDNA_P Parameter: Treatment Value: 100uM ABA vs. No Treatment
  misc_feature: MA Experiment ID: 20000086 Result: Down-regulated in Transcription
  misc_feature: MA Experiment 20000086 PARAMETER Experiment Name: At_100uM_ABA_Mutants_cDNA_P Parameter: Plant Line Value: CS22
  misc_feature: MA Experiment 20000086 PARAMETER Experiment Name: At_100uM_ABA_Mutants_cDNA_P Parameter: Timepoint (hr) Value: 6
  misc_feature: MA Experiment 20000086 PARAMETER Experiment Name: At_100uM_ABA_Mutants_cDNA_P Parameter: Tissue Value: Aerial
  misc_feature: MA Experiment 20000086 PARAMETER Experiment Name: At_100uM_ABA_Mutants_cDNA_P Parameter: Treatment Value: 100uM ABA vs. No Treatment
  misc_feature: MA Experiment ID: 20000087 Result: Down-regulated in Transcription
  misc_feature: MA Experiment 20000087 PARAMETER Experiment Name: At_100uM_ABA_Mutants_cDNA_P Parameter: Plant Line Value: WS
  misc_feature: MA Experiment 20000087 PARAMETER Experiment Name: At_100uM_ABA_Mutants_cDNA_P Parameter: Timepoint (hr) Value: 6
  misc_feature: MA Experiment 20000087 PARAMETER Experiment Name: At_100uM_ABA_Mutants_cDNA_P Parameter: Tissue Value: Aerial
  misc_feature: MA Experiment 20000087 PARAMETER Experiment Name: At_100uM_ABA_Mutants_cDNA_P Parameter: Treatment Value: 100uM ABA vs. No Treatment
  misc_feature: MA Experiment ID: 20000089 Result: Down-regulated in Transcription
  misc_feature: MA Experiment ID: 20000090 Result: Down-regulated in Transcription
  misc_feature: MA Experiment ID: 20000111 Result: Up-regulated in Transcription
  misc_feature: MA Experiment 20000111 PARAMETER Experiment Name: At_42deg_Heat_cDNA_P Parameter: Temperature (deg C) Value: 42 vs. 22
  misc_feature: MA Experiment 20000111 PARAMETER Experiment Name: At_42deg_Heat_cDNA_P Parameter: Timepoint (hr) Value: 6
  misc_feature: MA Experiment 20000111 PARAMETER Experiment Name: At_42deg_Heat_cDNA_P Parameter: Tissue Value: Aerial
  misc_feature: MA Experiment ID: 20000113 Result: Up-regulated in Transcription
  misc_feature: MA Experiment 20000113 PARAMETER Experiment Name: At_42deg_Heat_cDNA_P Parameter: Temperature (deg C) Value: 42 vs. 22
  misc_feature: MA Experiment 20000113 PARAMETER Experiment Name: At_42deg_Heat_cDNA_P Parameter: Timepoint (hr) Value: 8
  misc_feature: MA Experiment 20000113 PARAMETER Experiment Name: At_42deg_Heat_cDNA_P Parameter: Tissue Value: Aerial
  misc_feature: MA Experiment ID: 20000144 Result: Down-regulated in Transcription
  misc_feature: MA Experiment 20000144 PARAMETER Experiment Name: At_42deg_Heat_cDNA_P Parameter: Temperature (deg C) Value: 42 vs. 22
  misc_feature: MA Experiment 20000144 PARAMETER Experiment Name: At_42deg_Heat_cDNA_P Parameter: Timepoint (hr) Value: 1
  misc_feature: MA Experiment 20000144 PARAMETER Experiment Name: At_42deg_Heat_cDNA_P Parameter: Tissue Value: Aerial
  misc_feature: MA Experiment ID: 20000171 Result: Down-regulated in Transcription
  misc_feature: MA Experiment 20000171 PARAMETER Experiment Name: At_42deg_Heat_P Parameter: Age (day) Value: 14
  misc_feature: MA Experiment 20000171 PARAMETER Experiment Name: At_42deg_Heat_P Parameter: Organism Value: A. thaliana
  misc_feature: MA Experiment 20000171 PARAMETER Experiment Name: At_42deg_Heat_P Parameter: Plant Line Value: WS
  misc_feature: MA Experiment 20000171 PARAMETER Experiment Name: At_42deg_Heat_P Parameter: Temperature (deg C) Value: 42 vs. 22
  misc_feature: MA Experiment 20000171 PARAMETER Experiment Name: At_42deg_Heat_P Parameter: Timepoint (hr) Value: 1
  misc_feature: MA Experiment 20000171 PARAMETER Experiment Name: At_42deg_Heat_P Parameter: Tissue Value: Aerial
  misc_feature: MA Experiment ID: 20000173 Result: Up-regulated in Transcription
  misc_feature: MA Experiment 20000173 PARAMETER Experiment Name: At_42deg_Heat_P Parameter: Age (day) Value: 14
  misc_feature: MA Experiment 20000173 PARAMETER Experiment Name: At_42deg_Heat_P Parameter: Organism Value: A. thaliana
  misc_feature: MA Experiment 20000173 PARAMETER Experiment Name: At_42deg_Heat_P Parameter: Plant Line Value: WS
  misc_feature: MA Experiment 20000173 PARAMETER Experiment Name: At_42deg_Heat_P Parameter: Temperature (deg C) Value: 42 vs. 22
  misc_feature: MA Experiment 20000173 PARAMETER Experiment Name: At_42deg_Heat_P Parameter: Timepoint (hr) Value: 6
  misc_feature: MA Experiment 20000173 PARAMETER Experiment Name: At_42deg_Heat_P Parameter: Tissue Value: Aerial
  misc_feature: MA Experiment ID: 20000180 Result: Up-regulated in Transcription
  misc_feature: MA Experiment 20000180 PARAMETER Experiment Name: At_Germinating_Seeds_P Parameter: Age (hr) Value: 24 vs. 0
  misc_feature: MA Experiment 20000180 PARAMETER Experiment Name: At_Germinating_Seeds_P Parameter: Tissue Value: Germinating Seeds
  misc_feature: MA Experiment ID: 20000184 Result: Up-regulated in Transcription
  misc_feature: MA Experiment 20000184 PARAMETER Experiment Name: At_Shoots__P Parameter: Age (day) Value: 7
  misc_feature: MA Experiment 20000184 PARAMETER Experiment Name: At_Shoots__P Parameter: Tissue Value: Shoots vs. Whole Plant
  misc_feature: MA Experiment ID: 20000185 Result: Down-regulated in Transcription
  misc_feature: MA Experiment 20000185 PARAMETER Experiment Name: At_Roots__P Parameter: Age (day) Value: 7 vs. 21
  misc_feature: MA Experiment 20000185 PARAMETER Experiment Name: At_Roots__P Parameter: Organism Value: A. thaliana
  misc_feature: MA Experiment 20000185 PARAMETER Experiment Name: At_Roots__P Parameter: Tissue Value: Roots vs. Whole Plant
  misc_feature: MA Experiment ID: 20000224 Result: Up-regulated in Transcription
  misc_feature: MA Experiment ID: 20000264 Result: Up-regulated in Transcription
  misc_feature: MA Experiment 20000264 PARAMETER Experiment Name: At_Open_Flower_P Parameter: Age (day) Value: 21
  misc_feature: MA Experiment 20000264 PARAMETER Experiment Name: At_Open_Flower_P Parameter: Plant Line Value: WS
  misc_feature: MA Experiment 20000264 PARAMETER Experiment Name: At_Open_Flower_P Parameter: Tissue Value: Open Flower vs. Whole Plant
  misc_feature: MA Experiment ID: 20000438 Result: Up-regulated in Transcription
  misc_feature: MA Experiment 20000438 PARAMETER Experiment Name: At_Shoots__P Parameter: Age (day) Value: 14
  misc_feature: MA Experiment 20000438 PARAMETER Experiment Name: At_Shoots__P Parameter: Tissue Value: Shoots vs. Whole Plant
  misc_feature: MA Experiment ID: 20000439 Result: Down-regulated in Transcription
  misc_feature: MA Experiment 20000439 PARAMETER Experiment Name: At_Roots__P Parameter: Age (day) Value: 14 vs. 21
  misc_feature: MA Experiment 20000439 PARAMETER Experiment Name: At_Roots__P Parameter: Organism Value: A. thaliana
  misc_feature: MA Experiment 20000439 PARAMETER Experiment Name: At_Roots__P Parameter: Tissue Value: Roots vs. Whole Plant
  misc_feature: MA Experiment ID: 20000443 Result: Up-regulated in Transcription
  misc_feature: MA Experiment 20000443 PARAMETER Experiment Name: At_1uM_BR-BRZ__P Parameter: Tissue Value: Shoot Apices
  misc_feature: MA Experiment 20000443 PARAMETER Experiment Name: At_1uM_BR-BRZ__P Parameter: Treatment Value: 1uM BRZ vs. No Treatment
  misc_feature: MA Experiment ID: 20000495 Result: Down-regulated in Transcription
  misc_feature: MA Experiment 20000495 PARAMETER Experiment Name: At_Guard_Cells_P Parameter: Harvest Date Value: 8/2/2002
  misc_feature: MA Experiment 20000495 PARAMETER Experiment Name: At_Guard_Cells_P Parameter: Organism Value: A. thaliana
  misc_feature: MA Experiment 20000495 PARAMETER Experiment Name: At_Guard_Cells_P Parameter: Tissue Value: Guard Cells vs. Leaves
  misc_feature: MA Experiment ID: 20000573 Result: Down-regulated in Transcription
  misc_feature: MA Experiment 20000573 PARAMETER Experiment Name: At_100uM_ABA_Mutants__P Parameter: Organism Value: A. thaliana
  misc_feature: MA Experiment 20000573 PARAMETER Experiment Name: At_100uM_ABA_Mutants__P Parameter: Plant Line Value: CS22 vs. Ler wt
  misc_feature: MA Experiment 20000573 PARAMETER Experiment Name: At_100uM_ABA_Mutants__P Parameter: Timepoint (hr) Value: N/A
  misc_feature: MA Experiment 20000573 PARAMETER Experiment Name: At_100uM_ABA_Mutants__P Parameter: Tissue Value: Whole Plant
  misc_feature: MA Experiment 20000573 PARAMETER Experiment Name: At_100uM_ABA_Mutants__P Parameter: Treatment Value: None
  misc_feature: MA Experiment ID: 20000574 Result: Down-regulated in Transcription
  misc_feature: MA Experiment 20000574 PARAMETER Experiment Name: At_100uM_ABA_Mutants__P Parameter: Organism Value: A. thaliana
  misc_feature: MA Experiment 20000574 PARAMETER Experiment Name: At_100uM_ABA_Mutants__P Parameter: Plant Line Value: CS23 vs. Ler wt
  misc_feature: MA Experiment 20000574 PARAMETER Experiment Name: At_100uM_ABA_Mutants__P Parameter: Timepoint (hr) Value: N/A
  misc_feature: MA Experiment 20000574 PARAMETER Experiment Name: At_100uM_ABA_Mutants__P Parameter: Tissue Value: Whole Plant
  misc_feature: MA Experiment 20000574 PARAMETER Experiment Name: At_100uM_ABA_Mutants__P Parameter: Treatment Value: None
  misc_feature: MA Experiment ID: 20000794 Result: Up-regulated in Transcription
  misc_feature: MA Experiment 20000794 PARAMETER Experiment Name: At_Petals_P Parameter: Age (day) Value: 23-25 days
  misc_feature: MA Experiment 20000794 PARAMETER Experiment Name: At_Petals_P Parameter: Plant Line Value: WS
  misc_feature: MA Experiment 20000794 PARAMETER Experiment Name: At_Petals_P Parameter: Tissue Value: Petals vs. Whole plant
  misc_feature: MA Experiment ID: 20001248 Result: Down-regulated in Transcription
  misc_feature: MA Experiment 20001248 PARAMETER Experiment Name: At_Far-red-induction_P Parameter: Age (day) Value: 7
  misc_feature: MA Experiment 20001248 PARAMETER Experiment Name: At_Far-red-induction_P Parameter: Light Value: Far-red vs. White
  misc_feature: MA Experiment 20001248 PARAMETER Experiment Name: At_Far-red-induction_P Parameter: Organism Value: A. thaliana
  misc_feature: MA Experiment 20001248 PARAMETER Experiment Name: At_Far-red-induction_P Parameter: Plant Line Value: Columbia
  misc_feature: MA Experiment 20001248 PARAMETER Experiment Name: At_Far-red-induction_P Parameter: Timepoint (hr) Value: 4
  misc_feature: MA Experiment 20001248 PARAMETER Experiment Name: At_Far-red-induction_P Parameter: Tissue Value: Whole Plant
  misc_feature: MA Experiment ID: 20001451 Result: Up-regulated in Transcription
  misc_feature: MA Experiment 20001451 PARAMETER Experiment Name: At_Far-red-induction_P Parameter: Age (day) Value: 7
  misc_feature: MA Experiment 20001451 PARAMETER Experiment Name: At_Far-red-induction_P Parameter: Light Value: Far-red vs. White
  misc_feature: MA Experiment 20001451 PARAMETER Experiment Name: At_Far-red-induction_P Parameter: Organism Value: A. thaliana
  misc_feature: MA Experiment 20001451 PARAMETER Experiment Name: At_Far-red-induction_P Parameter: Plant Line Value: Columbia
  misc_feature: MA Experiment 20001451 PARAMETER Experiment Name: At_Far-red-induction_P Parameter: Timepoint (hr) Value: 24
  misc_feature: MA Experiment 20001451 PARAMETER Experiment Name: At_Far-red-induction_P Parameter: Tissue Value: Whole Plant
atctctcttcacatgcccatttgaatcgtatctcctctcatttcttcttttgttttgttggagttagataaaatcaaaggtctaataaaagtgtcaaaacccttatcgctataacctccactaccatcttaaacttctccttataactcacgcttctctgctttcttctctcagagtctaactgctcaaataagaaaatggttcatgtgtcatcatctcatggagccaaagatggctctgaagaagcctatgattacagaggaaacccaccagataagtctaaaaccggtggatggttaggcgccggtttaattttagggagcgagctatcagagagaatatgcgtgatgggcatatcaatgaatctagtgacgtaccttgttggagatttacacatctcatcagctaaatcagcgaccatagtcaccaacttcatgggaactcttaaccttctagggcttctcggtggttttttggctgacgctaaactcggtcgctacaagatggttgcaatctcagcttctgtcacagctctgggagtgttgcttttgacggtggctacaactatctcaagcatgagaccaccaatatgtgacgatttcaggagacttcatcatcagtgcatagaagcaaacggacaccagttggctcttctctatgttgctctctataccatagctctaggcggaggaggaatcaaatccaacgtctctggttttgggtctgaccagttcgatactagtgatcctaaagaagagaaacagatgattttcttcttcaacagattctatttctccatcagcgttggctctctcttcgccgtgattgctcttgtttacgttcaggacaacgtcgggagaggctggggttacgggatctctgccgcgactatggtggttgcagccattgttttactctgcggaacgaaacggtaccgtttcaagaaacctaaaggaagcccttttacaacaatatggagggttggtttcttggcttggaagaaaagaaaggagagttaccctgcgcatccaagtcttttgaacggttatgacaacaccacggttccacacacagagatgcttaagtgtttagacaaagccgcaatttccaagaacgagagctctcctagctcgaaggacttcgaagagaaggatccgtggatcgtttcgactgttacacaagtcgaagaagtgaaactcgtgatgaaattggtaccgatttgggcaacgaacattcttttctggacgatttactcccaaatgacgactttcacggtcgaacaagcgacgtttatggaccgaaaactcggatctttcactgttcctgcaggctcttactctgctttcctcatactcacaattctcctcttcacttcccttaacgagagagtctttgttcctttaacaagaaggctcacaaaaaagcctcaaggaatcacaagcctacagagaatcggagtagggctagtattctcaatggctgcaatggctgtagccgcggttatagagaacgctagacgcgaggcagcggttaacaacgataagaaaataagcgcgttttggttggttccacaatatttcttagtcggtgcgggtgaggcctttgcttacgttggacagcttgagttctttataagagaagcaccagagaggatgaaatcgatgagcaccggattgtttctaagcacgatatcgatgggattcttcgtgagtagcttgcttgtttcgcttgttgatagggttacagacaaaagctggcttagaagtaaccttaacaaagcgagattgaactacttctactggttacttgttgtcttgggagcattgaacttcttgatttttattgtgtttgccatgaaacatcagtataaagctgatgtgattactgttgttgtgactgatgatgattcagtggagaaggaagtgacgaagaaagagagctctgaatttgagcttaaggacattccttgaaaccagatttagaagaagaaaaaaaacctctggttttgttatttgctttgaagatttcattttgtctttgtatttttagtatattgtgtgtatgaaatagaaagattactatatggtttggattgtatttttttttgtaagatttttaaaaatttagttactatagtttttg

SEQ ID NO: 39905 - protein, 590 aa, Arabidopsis thaliana
  peptide (1)..(590): Ceres Seq. ID no. 13489236
  misc_feature (101)..(498): Pfam Name: POT family Pfam Description: POT family
  misc_feature (1)..(558): Homolog of NCBI NO: 30696666 NR Description: oligopeptide transporter -related [Arabidopsis
  misc_feature (16)..(558): Homolog of NCBI NO: 18391353 NR Description: putative NPK1-related protein kinase 2
  misc_feature (16)..(558): Homolog of NCBI NO: 602292 NR Description: RCH2 protein
  misc_feature (16)..(583): Homolog of NCBI NO: 20466668 NR Description: putative nitrate transporter [Arabidopsis
  misc_feature (16)..(583): Homolog of NCBI NO: 30683214 NR Description: nitrate transporter -related [Arabidopsis
  misc_feature (16)..(583): Homolog of NCBI NO: 25407841 NR Description: probable nitrate transporter [imported] -
  misc_feature (8)..(584): Homolog of NCBI NO: 21741984 NR Description: OSJNBa0060P14.5 [Oryza sativa (japonica
  misc_feature (24)..(590): Homolog of NCBI NO: 25456097 NR Description: probable nitrate transporter ntp3
  misc_feature (1)..(590): Homolog of NCBI NO: 21536775 NR Description: nitrate transporter [Arabidopsis thaliana]
  misc_feature (1)..(590): Homolog of NCBI NO: 15233123 NR Description: nitrate transporter [Arabidopsis thaliana]
MVHVSSSHGAKDGSEEAYDYRGNPPDKSKTGGWLGAGLILGSELSERICVMGISMNLVTYLVGDLHISSAKSATIVTNFMGTLNLLGLLGGFLADAKLGRYKMVAISASVTALGVLLLTVATTISSMRPPICDDFRRLHHQCIEANGHQLALLYVALYTIALGGGGIKSNVSGFGSDQFDTSDPKEEKQMIFFFNRFYFSISVGSLFAVIALVYVQDNVGRGWGYGISAATMVVAAIVLLCGTKRYRFKKPKGSPFTTIWRVGFLAWKKRKESYPAHPSLLNGYDNTTVPHTEMLKCLDKAAISKNESSPSSKDFEEKDPWIVSTVTQVEEVKLVMKLVPIWATNILFWTIYSQMTTFTVEQATFMDRKLGSFTVPAGSYSAFLILTILLFTSLNERVFVPLTRRLTKKPQGITSLQRIGVGLVFSMAAMAVAAVIENARREAAVNNDKKISAFWLVPQYFLVGAGEAFAYVGQLEFFIREAPERMKSMSTGLFLSTISMGFFVSSLLVSLVDRVTDKSWLRSNLNKARLNYFYWLLVVLGALNFLIFIVFAMKHQYKADVITVVVTDDDSVEKEVTKKESSEFELKDIP

SEQ ID NO: 39906 - protein, 540 aa, Arabidopsis thaliana
  peptide (1)..(540): Ceres Seq. ID no. 13489237
  misc_feature (51)..(448): Pfam Name: POT family Pfam Description: POT family
  misc_feature (1)..(508): Homolog of NCBI NO: 30696666 NR Description: oligopeptide transporter -related [Arabidopsis
  misc_feature (1)..(508): Homolog of NCBI NO: 18391353 NR Description: putative NPK1-related protein kinase 2
  misc_feature (1)..(508): Homolog of NCBI NO: 602292 NR Description: RCH2 protein
  misc_feature (1)..(533): Homolog of NCBI NO: 20466668 NR Description: putative nitrate transporter [Arabidopsis
  misc_feature (1)..(533): Homolog of NCBI NO: 30683214 NR Description: nitrate transporter -related [Arabidopsis
  misc_feature (1)..(533): Homolog of NCBI NO: 25407841 NR Description: probable nitrate transporter [imported] -
  misc_feature (1)..(534): Homolog of NCBI NO: 21741984 NR Description: OSJNBa0060P14.5 [Oryza sativa (japonica
  misc_feature (1)..(540): Homolog of NCBI NO: 25456097 NR Description: probable nitrate transporter ntp3
  misc_feature (1)..(540): Homolog of NCBI NO: 21536775 NR Description: nitrate transporter [Arabidopsis thaliana]
  misc_feature (1)..(540): Homolog of NCBI NO: 15233123 NR Description: nitrate transporter [Arabidopsis thaliana]
MGISMNLVTYLVGDLHISSAKSATIVTNFMGTLNLLGLLGGFLADAKLGRYKMVAISASVTALGVLLLTVATTISSMRPPICDDFRRLHHQCIEANGHQLALLYVALYTIALGGGGIKSNVSGFGSDQFDTSDPKEEKQMIFFFNRFYFSISVGSLFAVIALVYVQDNVGRGWGYGISAATMVVAAIVLLCGTKRYRFKKPKGSPFTTIWRVGFLAWKKRKESYPAHPSLLNGYDNTTVPHTEMLKCLDKAAISKNESSPSSKDFEEKDPWIVSTVTQVEEVKLVMKLVPIWATNILFWTIYSQMTTFTVEQATFMDRKLGSFTVPAGSYSAFLILTILLFTSLNERVFVPLTRRLTKKPQGITSLQRIGVGLVFSMAAMAVAAVIENARREAAVNNDKKISAFWLVPQYFLVGAGEAFAYVGQLEFFIREAPERMKSMSTGLFLSTISMGFFVSSLLVSLVDRVTDKSWLRSNLNKARLNYFYWLLVVLGALNFLIFIVFAMKHQYKADVITVVVTDDDSVEKEVTKKESSEFELKDIP

SEQ ID NO: 39907 - protein, 536 aa, Arabidopsis thaliana
  peptide (1)..(536): Ceres Seq. ID no. 13489238
  misc_feature (47)..(444): Pfam Name: POT family Pfam Description: POT family
  misc_feature (1)..(504): Homolog of NCBI NO: 30696666 NR Description: oligopeptide transporter -related [Arabidopsis
  misc_feature (1)..(504): Homolog of NCBI NO: 18391353 NR Description: putative NPK1-related protein kinase 2
  misc_feature (1)..(504): Homolog of NCBI NO: 602292 NR Description: RCH2 protein
  misc_feature (1)..(529): Homolog of NCBI NO: 20466668 NR Description: putative nitrate transporter [Arabidopsis
  misc_feature (1)..(529): Homolog of NCBI NO: 30683214 NR Description: nitrate transporter -related [Arabidopsis
  misc_feature (1)..(529): Homolog of NCBI NO: 25407841 NR Description: probable nitrate transporter [imported] -
  misc_feature (1)..(530): Homolog of NCBI NO: 21741984 NR Description: OSJNBa0060P14.5 [Oryza sativa (japonica
  misc_feature (1)..(536): Homolog of NCBI NO: 25456097 NR Description: probable nitrate transporter ntp3
  misc_feature (1)..(536): Homolog of NCBI NO: 21536775 NR Description: nitrate transporter [Arabidopsis thaliana]
  misc_feature (1)..(536): Homolog of NCBI NO: 15233123 NR Description: nitrate transporter [Arabidopsis thaliana]
MNLVTYLVGDLHISSAKSATIVTNFMGTLNLLGLLGGFLADAKLGRYKMVAISASVTALGVLLLTVATTISSMRPPICDDFRRLHHQCIEANGHQLALLYVALYTIALGGGGIKSNVSGFGSDQFDTSDPKEEKQMIFFFNRFYFSISVGSLFAVIALVYVQDNVGRGWGYGISAATMVVAAIVLLCGTKRYRFKKPKGSPFTTIWRVGFLAWKKRKESYPAHPSLLNGYDNTTVPHTEMLKCLDKAAISKNESSPSSKDFEEKDPWIVSTVTQVEEVKLVMKLVPIWATNILFWTIYSQMTTFTVEQATFMDRKLGSFTVPAGSYSAFLILTILLFTSLNERVFVPLTRRLTKKPQGITSLQRIGVGLVFSMAAMAVAAVIENARREAAVNNDKKISAFWLVPQYFLVGAGEAFAYVGQLEFFIREAPERMKSMSTGLFLSTISMGFFVSSLLVSLVDRVTDKSWLRSNLNKARLNYFYWLLVVLGALNFLIFIVFAMKHQYKADVITVVVTDDDSVEKEVTKKESSEFELKDIP

SEQ ID NO: 39908 - DNA, 1307 bp, Arabidopsis thaliana
  misc_feature (1)..(1307): Ceres Seq. ID no. 13487221
  misc_feature: MA Experiment ID: 20000315 Result: Up-regulated in Transcription
  misc_feature: MA Experiment 20000315 PARAMETER Experiment Name: At_14day_Shoots-Roots_Sub_P Parameter: Age (day) Value: 14
  misc_feature: MA Experiment 20000315 PARAMETER Experiment Name: At_14day_Shoots-Roots_Sub_P Parameter: Organism Value: A. thaliana
  misc_feature: MA Experiment 20000315 PARAMETER Experiment Name: At_14day_Shoots-Roots_Sub_P Parameter: Plant Line Value: WS
  misc_feature: MA Experiment 20000315 PARAMETER Experiment Name: At_14day_Shoots-Roots_Sub_P Parameter: Tissue Value: Shoots vs. Whole Plant
  misc_feature: MA Experiment ID: 20000328 Result: Up-regulated in Transcription
  misc_feature: MA Experiment 20000328 PARAMETER Experiment Name: At_42deg_Heat_Sub_P Parameter: Age (day) Value: 14
  misc_feature: MA Experiment 20000328 PARAMETER Experiment Name: At_42deg_Heat_Sub_P Parameter: Organism Value: A. thaliana
  misc_feature: MA Experiment 20000328 PARAMETER Experiment Name: At_42deg_Heat_Sub_P Parameter: Plant Line Value: WS
  misc_feature: MA Experiment 20000328 PARAMETER Experiment Name: At_42deg_Heat_Sub_P Parameter: Temperature (deg C) Value: 42 vs. 22
  misc_feature: MA Experiment 20000328 PARAMETER Experiment Name: At_42deg_Heat_Sub_P Parameter: Timepoint (hr) Value: 6
  misc_feature: MA Experiment 20000328 PARAMETER Experiment Name: At_42deg_Heat_Sub_P Parameter: Tissue Value: Aerial
  misc_feature: MA Experiment ID: 20000329 Result: Up-regulated in Transcription
  misc_feature: MA Experiment 20000329 PARAMETER Experiment Name: At_4deg_Cold_Sub_P Parameter: Age (day) Value: 14
  misc_feature: MA Experiment 20000329 PARAMETER Experiment Name: At_4deg_Cold_Sub_P Parameter: Organism Value: A. thaliana
  misc_feature: MA Experiment 20000329 PARAMETER Experiment Name: At_4deg_Cold_Sub_P Parameter: Plant Line Value: WS
  misc_feature: MA Experiment 20000329 PARAMETER Experiment Name: At_4deg_Cold_Sub_P Parameter: Temperature (deg C) Value: 4 vs. 22
  misc_feature: MA Experiment 20000329 PARAMETER Experiment Name: At_4deg_Cold_Sub_P Parameter: Timepoint (hr) Value: 6
  misc_feature: MA Experiment 20000329 PARAMETER Experiment Name: At_4deg_Cold_Sub_P Parameter: Tissue Value: Aerial
  misc_feature: MA Experiment ID: 20000347 Result: Up-regulated in Transcription
  misc_feature: MA Experiment 20000347 PARAMETER Experiment Name: At_2mM_SA_Sub_P Parameter: Age (day) Value: 14
  misc_feature: MA Experiment 20000347 PARAMETER Experiment Name: At_2mM_SA_Sub_P Parameter: Organism Value: A. thaliana
  misc_feature: MA Experiment 20000347 PARAMETER Experiment Name: At_2mM_SA_Sub_P Parameter: Plant Line Value: WS
  misc_feature: MA Experiment 20000347 PARAMETER Experiment Name: At_2mM_SA_Sub_P Parameter: Timepoint (hr) Value: 6
  misc_feature: MA Experiment 20000347 PARAMETER Experiment Name: At_2mM_SA_Sub_P Parameter: Tissue Value: Aerial
  misc_feature: MA Experiment 20000347 PARAMETER Experiment Name: At_2mM_SA_Sub_P Parameter: Treatment Value: 2mM SA vs. No Treatment
gtcgacccacgcgtccgctcaccatcaaacaactacaacatctgcggttagtatgttgaaagtagagagtaactgggcacaagcctgtgatacatgccgatcagccgcctgcaccgtgtactgccgggctgattctgcctacttgtgctccagttgtgatgctcaagttcatgctgccaatcgtcttgcttcccgccatgaacgtgttcgagtctgtcaatcatgtgagcgagccccggctgcctttttctgcaaggcagatgctgcatctctatgcacaacctgtgattcagagattcattccgcaaacccacttgctagacgccatcaacgagttccaattctgcccatttctgagtactcttacagttccacggccactaaccattcatgtgagacaacagtgacagatccagagaacagacttgtgcttggtcaagaagaagaggatgaagatgaagcagaggcggcttcatggttgttgcctaattcagggaaaaacagtggtaacaacaatggcttctcgattggggatgagtttctgaaccttgttgattatagttcgagtgataagcaattcacagatcaatccaatcagtatcaactagactgcaacgtacctcagaggagctatggggaagatggagttgttccacttcaaattgaagtatcaaagggcatgtaccaagagcaacagaactttcagctgagtatcaactgtggctcctggggagctcttcgaagctccaatggttccctcagtcatatggtgaatgtttcatctatggacctgggagttgtgccggagtcaacaacgagtgacgcaacagtatcaaacccaagatcgcccaaagcggtaacagaccaaccaccttaccctccagctcagatgctcagtccaagggacagagaagctagagtcctgagatacagagagaagaagaagatgaggaaatttgagaagacgataagatatgcttcaaggaaagcgtatgcagagaaaagaccacggatcaagggccggtttgcaaagaagaaagatgtcgatgaagaggcaaaccaagctttctccacaatgataacatttgacaccggatatggaattgttccatcattctgatgctgctatggcaaaactagactgcatgcttgtaaattacttctggtttgaaattcctgcaagttattaccacggttttatgcatatagggtctgtagtttactagttttgcctaactagtacgagttaattagatatacactcatacttagctgctgtaagttaatacaaattttgcccacttggt

SEQ ID NO: 39909 - protein, 372 aa, Arabidopsis thaliana
  peptide (1)..(372): Ceres Seq. ID no. 13487222
  misc_feature (24)..(71): Pfam Name: B-box zinc finger Pfam Description: B-box zinc finger
  misc_feature (18)..(372): Homolog of NCBI NO: 22854942 NR Description: COL1 protein [Brassica nigra]
  misc_feature (18)..(372): Homolog of NCBI NO: 22854982 NR Description: COL1 protein [Brassica nigra]
  misc_feature (18)..(372): Homolog of NCBI NO: 22854930 NR Description: COL1 protein [Brassica nigra]
  misc_feature (18)..(372): Homolog of NCBI NO: 22854928 NR Description: COL1 protein [Brassica nigra]
  misc_feature (18)..(372): Homolog of NCBI NO: 22854934 NR Description: COL1 protein [Brassica nigra]
  misc_feature (18)..(372): Homolog of NCBI NO: 22854916 NR Description: COL1 protein [Brassica nigra]
  misc_feature (18)..(372): Homolog of NCBI NO: 22854910 NR Description: COL1 protein [Brassica nigra]
  misc_feature (18)..(372): Homolog of NCBI NO: 22854908 NR Description: COL1 protein [Brassica nigra]
  misc_feature (18)..(372): Homolog of NCBI NO: 22854906 NR Description: COL1 protein [Brassica nigra]
  misc_feature (18)..(372): Homolog of NCBI NO: 15242403 NR Description: Zinc finger protein CONSTANS-LIKE 1 (COL1)
STHASAHHQTTTTSAVSMLKVESNWAQACDTCRSAACTVYCRADSAYLCSSCDAQVHAANRLASRHERVRVCQSCERAPAAFFCKADAASLCTTCDSEIHSANPLARRHQRVPILPISEYSYSSTATNHSCETTVTDPENRLVLGQEEEDEDEAEAASWLLPNSGKNSGNNNGFSIGDEFLNLVDYSSSDKQFTDQSNQYQLDCNVPQRSYGEDGVVPLQIEVSKGMYQEQQNFQLSINCGSWGALRSSNGSLSHMVNVSSMDLGVVPESTTSDATVSNPRSPKAVTDQPPYPPAQMLSPRDREARVLRYREKKKMRKFEKTIRYASRKAYAEKRPRIKGRFAKKKDVDEEANQAFSTMITFDTGYGIVPSF

SEQ ID NO: 39910 - protein, 355 aa, Arabidopsis thaliana
  peptide (1)..(355): Ceres Seq. ID no. 13487223
  misc_feature (7)..(54): Pfam Name: B-box zinc finger Pfam Description: B-box zinc finger
  misc_feature (1)..(355): Homolog of NCBI NO: 22854942 NR Description: COL1 protein [Brassica nigra]
  misc_feature (1)..(355): Homolog of NCBI NO: 22854982 NR Description: COL1 protein [Brassica nigra]
  misc_feature (1)..(355): Homolog of NCBI NO: 22854930 NR Description: COL1 protein [Brassica nigra]
  misc_feature (1)..(355): Homolog of NCBI NO: 22854928 NR Description: COL1 protein [Brassica nigra]
  misc_feature (1)..(355): Homolog of NCBI NO: 22854934 NR Description: COL1 protein [Brassica nigra]
  misc_feature (1)..(355): Homolog of NCBI NO: 22854916 NR Description: COL1 protein [Brassica nigra]
  misc_feature (1)..(355): Homolog of NCBI NO: 22854910 NR Description: COL1 protein [Brassica nigra]
  misc_feature (1)..(355): Homolog of NCBI NO: 22854908 NR Description: COL1 protein [Brassica nigra]
  misc_feature (1)..(355): Homolog of NCBI NO: 22854906 NR Description: COL1 protein [Brassica nigra]
  misc_feature (1)..(355): Homolog of NCBI NO: 15242403 NR Description: Zinc finger protein CONSTANS-LIKE 1 (COL1)
MLKVESNWAQACDTCRSAACTVYCRADSAYLCSSCDAQVHAANRLASRHERVRVCQSCERAPAAFFCKADAASLCTTCDSEIHSANPLARRHQRVPILPISEYSYSSTATNHSCETTVTDPENRLVLGQEEEDEDEAEAASWLLPNSGKNSGNNNGFSIGDEFLNLVDYSSSDKQFTDQSNQYQLDCNVPQRSYGEDGVVPLQIEVSKGMYQEQQNFQLSINCGSWGALRSSNGSLSHMVNVSSMDLGVVPESTTSDATVSNPRSPKAVTDQPPYPPAQMLSPRDREARVLRYREKKKMRKFEKTIRYASRKAYAEKRPRIKGRFAKKKDVDEEANQAFSTMITFDTGYGIVPSF

SEQ ID NO: 39911 - DNA, 1969 bp, Arabidopsis thaliana
  misc_feature (1)..(1969): Ceres Seq. ID no. 13497298
  misc_feature: MA Experiment ID: 108434 Result: Down-regulated in Transcription
  misc_feature: MA Experiment 108434 PARAMETER Experiment Name: At_Root_Tips_cDNA_P Parameter: Tissue Value: Root Tips
  misc_feature: MA Experiment ID: 108573 Result: Up-regulated in Transcription
  misc_feature: MA Experiment 108573 PARAMETER Experiment Name: At_Drought_cDNA_P Parameter: Timepoint (hr) Value: 6
  misc_feature: MA Experiment 108573 PARAMETER Experiment Name: At_Drought_cDNA_P Parameter: Tissue Value: Aerial
  misc_feature: MA Experiment 108573 PARAMETER Experiment Name: At_Drought_cDNA_P Parameter: Treatment Value: Drought vs. No Drought
  misc_feature: MA Experiment ID: 108579 Result: Down-regulated in Transcription
  misc_feature: MA Experiment 108579 PARAMETER Experiment Name: At_4deg_Cold_cDNA_P Parameter: Temperature (deg C) Value: 4 vs. 22
  misc_feature: MA Experiment 108579 PARAMETER Experiment Name: At_4deg_Cold_cDNA_P Parameter: Timepoint (hr) Value: 6
  misc_feature: MA Experiment 108579 PARAMETER Experiment Name: At_4deg_Cold_cDNA_P Parameter: Tissue Value: Aerial
  misc_feature: MA Experiment ID: 108585 Result: Up-regulated in Transcription
  misc_feature: MA Experiment 108585 PARAMETER Experiment Name: At_5mM_NaNP_cDNA_P Parameter: Timepoint (hr) Value: 6
  misc_feature: MA Experiment 108585 PARAMETER Experiment Name: At_5mM_NaNP_cDNA_P Parameter: Tissue Value: Aerial
  misc_feature: MA Experiment 108585 PARAMETER Experiment Name: At_5mM_NaNP_cDNA_P Parameter: Treatment Value: null
  misc_feature: MA Experiment ID: 20000087 Result: Down-regulated in Transcription
  misc_feature: MA Experiment 20000087 PARAMETER Experiment Name: At_100uM_ABA_Mutants_cDNA_P Parameter: Plant Line Value: WS
  misc_feature: MA Experiment 20000087 PARAMETER Experiment Name: At_100uM_ABA_Mutants_cDNA_P Parameter: Timepoint (hr) Value: 6
  misc_feature: MA Experiment 20000087 PARAMETER Experiment Name: At_100uM_ABA_Mutants_cDNA_P Parameter: Tissue Value: Aerial
  misc_feature: MA Experiment 20000087 PARAMETER Experiment Name: At_100uM_ABA_Mutants_cDNA_P Parameter: Treatment Value: 100uM ABA vs. No Treatment
  misc_feature: MA Experiment ID: 20000794 Result: Up-regulated in Transcription
  misc_feature: MA Experiment 20000794 PARAMETER Experiment Name: At_Petals_P Parameter: Age (day) Value: 23-25 days
  misc_feature: MA Experiment 20000794 PARAMETER Experiment Name: At_Petals_P Parameter: Plant Line Value: WS
  misc_feature: MA Experiment 20000794 PARAMETER Experiment Name: At_Petals_P Parameter: Tissue Value: Petals vs. Whole plant
  misc_feature: MA Experiment ID: 20001247 Result: Up-regulated in Transcription
  misc_feature: MA Experiment 20001247 PARAMETER Experiment Name: At_Far-red-induction_P Parameter: Age (day) Value: 7
  misc_feature: MA Experiment 20001247 PARAMETER Experiment Name: At_Far-red-induction_P Parameter: Light Value: Far-red vs. White
  misc_feature: MA Experiment 20001247 PARAMETER Experiment Name: At_Far-red-induction_P Parameter: Organism Value: A. thaliana
  misc_feature: MA Experiment 20001247 PARAMETER Experiment Name: At_Far-red-induction_P Parameter: Plant Line Value: Columbia
  misc_feature: MA Experiment 20001247 PARAMETER Experiment Name: At_Far-red-induction_P Parameter: Timepoint (hr) Value: 1
  misc_feature: MA Experiment 20001247 PARAMETER Experiment Name: At_Far-red-induction_P Parameter: Tissue Value: Whole Plant
  misc_feature: MA Experiment ID: 20001248 Result: Up-regulated in Transcription
  misc_feature: MA Experiment 20001248 PARAMETER Experiment Name: At_Far-red-induction_P Parameter: Age (day) Value: 7
  misc_feature: MA Experiment 20001248 PARAMETER Experiment Name: At_Far-red-induction_P Parameter: Light Value: Far-red vs. White
  misc_feature: MA Experiment 20001248 PARAMETER Experiment Name: At_Far-red-induction_P Parameter: Organism Value: A. thaliana
  misc_feature: MA Experiment 20001248 PARAMETER Experiment Name: At_Far-red-induction_P Parameter: Plant Line Value: Columbia
  misc_feature: MA Experiment 20001248 PARAMETER Experiment Name: At_Far-red-induction_P Parameter: Timepoint (hr) Value: 4
  misc_feature: MA Experiment 20001248 PARAMETER Experiment Name: At_Far-red-induction_P Parameter: Tissue Value: Whole Plant
  misc_feature: MA Experiment ID: 20001450 Result: Up-regulated in Transcription
  misc_feature: MA Experiment 20001450 PARAMETER Experiment Name: At_Far-red-induction_P Parameter: Age (day) Value: 7
  misc_feature: MA Experiment 20001450 PARAMETER Experiment Name: At_Far-red-induction_P Parameter: Light Value: Far-red vs. White
  misc_feature: MA Experiment 20001450 PARAMETER Experiment Name: At_Far-red-induction_P Parameter: Organism Value: A. thaliana
  misc_feature: MA Experiment 20001450 PARAMETER Experiment Name: At_Far-red-induction_P Parameter: Plant Line Value: Columbia
  misc_feature: MA Experiment 20001450 PARAMETER Experiment Name: At_Far-red-induction_P Parameter: Timepoint (hr) Value: 8
  misc_feature: MA Experiment 20001450 PARAMETER Experiment Name: At_Far-red-induction_P Parameter: Tissue Value: Whole Plant
  misc_feature: MA Experiment ID: 20001451 Result: Up-regulated in Transcription
  misc_feature: MA Experiment 20001451 PARAMETER Experiment Name: At_Far-red-induction_P Parameter: Age (day) Value: 7
  misc_feature: MA Experiment 20001451 PARAMETER Experiment Name: At_Far-red-induction_P Parameter: Light Value: Far-red vs. White
  misc_feature: MA Experiment 20001451 PARAMETER Experiment Name: At_Far-red-induction_P Parameter: Organism Value: A. thaliana
  misc_feature: MA Experiment 20001451 PARAMETER Experiment Name: At_Far-red-induction_P Parameter: Plant Line Value: Columbia
  misc_feature: MA Experiment 20001451 PARAMETER Experiment Name: At_Far-red-induction_P Parameter: Timepoint (hr) Value: 24
  misc_feature: MA Experiment 20001451 PARAMETER Experiment Name: At_Far-red-induction_P Parameter: Tissue Value: Whole Plant
agagaaagacttttttagtgtttctttgtcattttcgttcctcaaaaaaaccttttcgaatttgacccttattgttatcctgattcttctgctcggttctcgccggagagaagacacggagaagagggttttcgaaaaggaggatgagaggttccaataacaccgatctatttgaccctaagacggagatggattccaatttctctcgccatggttcttcctccgaaggtgattttggtttcgctttcaatgacagtaacttctccgatcgtttgctccggatcgagatcttgggtgggccttcggattctaggtctgatgctgaaggatgtacgagtattgccgattgggctcgtcatcgcaagaggagaagagaggacaacaagaaggacaatggtgttgcgatttcagacattgtggcatgtgctgaagaacagattttaaccgataacaaccaacctgatatggatgatgctcctggtggtgataatcttgacgatgaaggagaggcaatggttgaagaggctttatcaggtgatgatgatgcatctagtgagccaaactggggtattgattgttctactgttgttagagttaaagaactgcatattagttctcctatcttggccgcaaaaagcccctttttctacaagctgttttctaatggaatgagggaatcagaacaaagacatgtaacccttagaattagtgcacaagaggaaggtgctttgatggagcttttaaactttatgtatagcaactctctaagtgtcacaacagcacccgctttattagatgttcttatggctgctgacaagtttgaggttgcttcctgtatgaggtattgtagtagactactgcgaaatatgcccatgacccctgattctgctttgctctatcttgagctgccctctagtgttttaatggctgaagcagtgcaacctctaaccgatgcagcaaagcagttccttgcctcgcgctacaaggatattaccaagtttcatgatgaggttatggccttaccattggctggaatagaggcgatactatcgagcgatgatctccaaattgcttctgaggatgctgtttatgattttgtcttgaaatgggcaaggggacagtatagttcattggaagatcgtagagagattctgggttcacgccttgcactctacatccgcttcccatacatgacgtgtcgaaagctgaaaaaggtactaacgtgcagtgattttgagcatgaagtagcatcaaagcaagtattagaagcgctcttcttcaaagcagaagccccacacaggcaacgcatcctcgcagctgaaggatcggactccatgaaccgccgtttcatagagagggcttacaaatacagacccgtaaaagtggtggagtttgagcttcctcgcccgcaatgtgtagtgtacctggacttgaagcgagaggaatgcgcaggactattcccttcaggaagagtctattctcaggctttccacttaggaggtcaaggtttcttcctctcagcacactgcaacatggaccagcaaagctcgttccactgctttgggctattcctcggaatgcaagagaaaggggctgtgagttttggtgtggactacgaatttgcggcaagagataaaagtacaaaggaagaatacgtaagcaaatacaaaggaaactacacattcacaggggggaaagcggttggttacagaaaccttttcgggattccatggacttcgttcatagccgaggacagtcaacatttcatcaatggcattctccatctcagagccgagctcaccattaaacgttcctcagacctgcactgactgttttcttctctctctctctctatgtcgtcacatttaagttgtataatctcgttatgtagcagctctaaccacgagtgtcctttgtacaataattgcctaaggagcaaaagtatggcttaaagagtacctcattctgt

SEQ ID NO: 39912 - protein, 561 aa, Arabidopsis thaliana
  peptide (1)..(561): Ceres Seq. ID no. 13497299
  misc_feature (142)..(390): Homolog of NCBI NO: 21728394 NR Description: actinfilin [Rattus norvegicus]
  misc_feature (142)..(390): Homolog of NCBI NO: 38194229 NR Description: actinfilin [Homo sapiens]
  misc_feature (281)..(526): Homolog of NCBI NO: 27948452 NR Description: GAMYB-binding protein [Hordeum vulgare subsp.
  misc_feature (25)..(555): Homolog of NCBI NO: 15234082 NR Description: POZ domain protein family [Arabidopsis thaliana]
  misc_feature (16)..(559): Homolog of NCBI NO: 11282344 NR Description: hypothetical protein F2A19.200 - Arabidopsis
  misc_feature (1)..(556): Homolog of NCBI NO: 18412063 NR Description: POZ domain protein family [Arabidopsis thaliana]
  misc_feature (1)..(559): Homolog of NCBI NO: 30695452 NR Description: POZ domain protein family [Arabidopsis thaliana]
  misc_feature (16)..(561): Homolog of NCBI NO: 21536778 NR Description: unknown [Arabidopsis thaliana]
  misc_feature (16)..(561): Homolog of NCBI NO: 25352317 NR Description: hypothetical protein At2g46260 [imported] -
  misc_feature (1)..(561): Homolog of NCBI NO: 18407023 NR Description: POZ domain protein family [Arabidopsis thaliana]
MRGSNNTDLFDPKTEMDSNFSRHGSSSEGDFGFAFNDSNFSDRLLRIEILGGPSDSRSDAEGCTSIADWARHRKRRREDNKKDNGVAISDIVACAEEQILTDNNQPDMDDAPGGDNLDDEGEAMVEEALSGDDDASSEPNWGIDCSTVVRVKELHISSPILAAKSPFFYKLFSNGMRESEQRHVTLRISAQEEGALMELLNFMYSNSLSVTTAPALLDVLMAADKFEVASCMRYCSRLLRNMPMTPDSALLYLELPSSVLMAEAVQPLTDAAKQFLASRYKDITKFHDEVMALPLAGIEAILSSDDLQIASEDAVYDFVLKWARGQYSSLEDRREILGSRLALYIRFPYMTCRKLKKVLTCSDFEHEVASKQVLEALFFKAEAPHRQRILAAEGSDSMNRRFIERAYKYRPVKVVEFELPRPQCVVYLDLKREECAGLFPSGRVYSQAFHLGGQGFFLSAHCNMDQQSSFHCFGLFLGMQEKGAVSFGVDYEFAARDKSTKEEYVSKYKGNYTFTGGKAVGYRNLFGIPWTSFIAEDSQHFINGILHLRAELTIKRSSDLH

SEQ ID NO: 39913 - protein, 546 aa, Arabidopsis thaliana
  peptide (1)..(546): Ceres Seq. ID no. 13497300
  misc_feature (127)..(375): Homolog of NCBI NO: 21728394 NR Description: actinfilin [Rattus norvegicus]
  misc_feature (127)..(375): Homolog of NCBI NO: 38194229 NR Description: actinfilin [Homo sapiens]
  misc_feature (266)..(511): Homolog of NCBI NO: 27948452 NR Description: GAMYB-binding protein [Hordeum vulgare subsp.
  misc_feature (10)..(540): Homolog of NCBI NO: 15234082 NR Description: POZ domain protein family [Arabidopsis thaliana]
  misc_feature (1)..(544): Homolog of NCBI NO: 11282344 NR Description: hypothetical protein F2A19.200 - Arabidopsis
  misc_feature (1)..(541): Homolog of NCBI NO: 18412063 NR Description: POZ domain protein family [Arabidopsis thaliana]
  misc_feature (1)..(544): Homolog of NCBI NO: 30695452 NR Description: POZ domain protein family [Arabidopsis thaliana]
  misc_feature (1)..(546): Homolog of NCBI NO: 21536778 NR Description: unknown [Arabidopsis thaliana]
  misc_feature (1)..(546): Homolog of NCBI NO: 25352317 NR Description: hypothetical protein At2g46260 [imported] -
  misc_feature (1)..(546): Homolog of NCBI NO: 18407023 NR Description: POZ domain protein family [Arabidopsis thaliana]
MDSNFSRHGSSSEGDFGFAFNDSNFSDRLLRIEILGGPSDSRSDAEGCTSIADWARHRKRRREDNKKDNGVAISDIVACAEEQILTDNNQPDMDDAPGGDNLDDEGEAMVEEALSGDDDASSEPNWGIDCSTVVRVKELHISSPILAAKSPFFYKLFSNGMRESEQRHVTLRISAQEEGALMELLNFMYSNSLSVTTAPALLDVLMAADKFEVASCMRYCSRLLRNMPMTPDSALLYLELPSSVLMAEAVQPLTDAAKQFLASRYKDITKFHDEVMALPLAGIEAILSSDDLQIASEDAVYDFVLKWARGQYSSLEDRREILGSRLALYIRFPYMTCRKLKKVLTCSDFEHEVASKQVLEALFFKAEAPHRQRILAAEGSDSMNRRFIERAYKYRPVKVVEFELPRPQCVVYLDLKREECAGLFPSGRVYSQAFHLGGQGFFLSAHCNMDQQSSFHCFGLFLGMQEKGAVSFGVDYEFAARDKSTKEEYVSKYKGNYTFTGGKAVGYRNLFGIPWTSFIAEDSQHFINGILHLRAELTIKRSSDLH

SEQ ID NO: 39914 - protein, 454 aa, Arabidopsis thaliana
  peptide (1)..(454): Ceres Seq. ID no. 13497301
  misc_feature (35)..(283): Homolog of NCBI NO: 21728394 NR Description: actinfilin [Rattus norvegicus]
  misc_feature (35)..(283): Homolog of NCBI NO: 38194229 NR Description: actinfilin [Homo sapiens]
  misc_feature (174)..(419): Homolog of NCBI NO: 27948452 NR Description: GAMYB-binding protein [Hordeum vulgare subsp.
  misc_feature (1)..(448): Homolog of NCBI NO: 15234082 NR Description: POZ domain protein family [Arabidopsis thaliana]
  misc_feature (1)..(452): Homolog of NCBI NO: 11282344 NR Description: hypothetical protein F2A19.200 - Arabidopsis
  misc_feature (1)..(449): Homolog of NCBI NO: 18412063 NR Description: POZ domain protein family [Arabidopsis thaliana]
  misc_feature (1)..(452): Homolog of NCBI NO: 30695452 NR Description: POZ domain protein family [Arabidopsis thaliana]
  misc_feature (1)..(454): Homolog of NCBI NO: 21536778 NR Description: unknown [Arabidopsis thaliana]
  misc_feature (1)..(454): Homolog of NCBI NO: 25352317 NR Description: hypothetical protein At2g46260 [imported] -
  misc_feature (1)..(454): Homolog of NCBI NO: 18407023 NR Description: POZ domain protein family [Arabidopsis thaliana]
MDDAPGGDNLDDEGEAMVEEALSGDDDASSEPNWGIDCSTVVRVKELHISSPILAAKSPFFYKLFSNGMRESEQRHVTLRISAQEEGALMELLNFMYSNSLSVTTAPALLDVLMAADKFEVASCMRYCSRLLRNMPMTPDSALLYLELPSSVLMAEAVQPLTDAAKQFLASRYKDITKFHDEVMALPLAGIEAILSSDDLQIASEDAVYDFVLKWARGQYSSLEDRREILGSRLALYIRFPYMTCRKLKKVLTCSDFEHEVASKQVLEALFFKAEAPHRQRILAAEGSDSMNRRFIERAYKYRPVKVVEFELPRPQCVVYLDLKREECAGLFPSGRVYSQAFHLGGQGFFLSAHCNMDQQSSFHCFGLFLGMQEKGAVSFGVDYEFAARDKSTKEEYVSKYKGNYTFTGGKAVGYRNLFGIPWTSFIAEDSQHFINGILHLRAELTIKRSSDLH

SEQ ID NO: 39915 - DNA, 1046 bp, Arabidopsis thaliana
  misc_feature (1)..(1046): Ceres Seq. ID no. 13494184
  misc_feature: MA Experiment ID: 108434 Result: Up-regulated in Transcription
  misc_feature: MA Experiment 108434 PARAMETER Experiment Name: At_Root_Tips_cDNA_P Parameter: Tissue Value: Root Tips
  misc_feature: MA Experiment ID: 108573 Result: Up-regulated in Transcription
  misc_feature: MA Experiment 108573 PARAMETER Experiment Name: At_Drought_cDNA_P Parameter: Timepoint (hr) Value: 6
  misc_feature: MA Experiment 108573 PARAMETER Experiment Name: At_Drought_cDNA_P Parameter: Tissue Value: Aerial
  misc_feature: MA Experiment 108573 PARAMETER Experiment Name: At_Drought_cDNA_P Parameter: Treatment Value: Drought vs. No Drought
  misc_feature: MA Experiment ID: 108577 Result: Down-regulated in Transcription
  misc_feature: MA Experiment 108577 PARAMETER Experiment Name: At_42deg_Heat_cDNA_P Parameter: Temperature (deg C) Value: 42 vs. 22
  misc_feature: MA Experiment 108577 PARAMETER Experiment Name: At_42deg_Heat_cDNA_P Parameter: Timepoint (hr) Value: 6
  misc_feature: MA Experiment 108577 PARAMETER Experiment Name: At_42deg_Heat_cDNA_P Parameter: Tissue Value: Aerial
  misc_feature: MA Experiment ID: 108579 Result: Down-regulated in Transcription
  misc_feature: MA Experiment 108579 PARAMETER Experiment Name: At_4deg_Cold_cDNA_P Parameter: Temperature (deg C) Value: 4 vs. 22
  misc_feature: MA Experiment 108579 PARAMETER Experiment Name: At_4deg_Cold_cDNA_P Parameter: Timepoint (hr) Value: 6
  misc_feature: MA Experiment 108579 PARAMETER Experiment Name: At_4deg_Cold_cDNA_P Parameter: Tissue Value: Aerial
  misc_feature: MA Experiment ID: 20001247 Result: Up-regulated in Transcription
  misc_feature: MA Experiment 20001247 PARAMETER Experiment Name: At_Far-red-induction_P Parameter: Age (day) Value: 7
  misc_feature: MA Experiment 20001247 PARAMETER Experiment Name: At_Far-red-induction_P Parameter: Light Value: Far-red vs. White
  misc_feature: MA Experiment 20001247 PARAMETER Experiment Name: At_Far-red-induction_P Parameter: Organism Value: A. thaliana
  misc_feature: MA Experiment 20001247 PARAMETER Experiment Name: At_Far-red-induction_P Parameter: Plant Line Value: Columbia
  misc_feature: MA Experiment 20001247 PARAMETER Experiment Name: At_Far-red-induction_P Parameter: Timepoint (hr) Value: 1
  misc_feature: MA Experiment 20001247 PARAMETER Experiment Name: At_Far-red-induction_P Parameter: Tissue Value: Whole Plant
  misc_feature: MA Experiment ID: 20001248 Result: Up-regulated in Transcription
  misc_feature: MA Experiment 20001248 PARAMETER Experiment Name: At_Far-red-induction_P Parameter: Age (day) Value: 7
  misc_feature: MA Experiment 20001248 PARAMETER Experiment Name: At_Far-red-induction_P Parameter: Light Value: Far-red vs. White
  misc_feature: MA Experiment 20001248 PARAMETER Experiment Name: At_Far-red-induction_P Parameter: Organism Value: A. thaliana
  misc_feature: MA Experiment 20001248 PARAMETER Experiment Name: At_Far-red-induction_P Parameter: Plant Line Value: Columbia
  misc_feature: MA Experiment 20001248 PARAMETER Experiment Name: At_Far-red-induction_P Parameter: Timepoint (hr) Value: 4
  misc_feature: MA Experiment 20001248 PARAMETER Experiment Name: At_Far-red-induction_P Parameter: Tissue Value: Whole Plant
  misc_feature: MA Experiment ID: 20001450 Result: Up-regulated in Transcription
  misc_feature: MA Experiment 20001450 PARAMETER Experiment Name: At_Far-red-induction_P Parameter: Age (day) Value: 7
  misc_feature: MA Experiment 20001450 PARAMETER Experiment Name: At_Far-red-induction_P Parameter: Light Value: Far-red vs. White
  misc_feature: MA Experiment 20001450 PARAMETER Experiment Name: At_Far-red-induction_P Parameter: Organism Value: A. thaliana
  misc_feature: MA Experiment 20001450 PARAMETER Experiment Name: At_Far-red-induction_P Parameter: Plant Line Value: Columbia
  misc_feature: MA Experiment 20001450 PARAMETER Experiment Name: At_Far-red-induction_P Parameter: Timepoint (hr) Value: 8
  misc_feature: MA Experiment 20001450 PARAMETER Experiment Name: At_Far-red-induction_P Parameter: Tissue Value: Whole Plant
  misc_feature: MA Experiment ID: 20001451 Result: Up-regulated in Transcription
  misc_feature: MA Experiment 20001451 PARAMETER Experiment Name: At_Far-red-induction_P Parameter: Age (day) Value: 7
  misc_feature: MA Experiment 20001451 PARAMETER Experiment Name: At_Far-red-induction_P Parameter: Light Value: Far-red vs. White
  misc_feature: MA Experiment 20001451 PARAMETER Experiment Name: At_Far-red-induction_P Parameter: Organism Value: A. thaliana
  misc_feature: MA Experiment 20001451 PARAMETER Experiment Name: At_Far-red-induction_P Parameter: Plant Line Value: Columbia
  misc_feature: MA Experiment 20001451 PARAMETER Experiment Name: At_Far-red-induction_P Parameter: Timepoint (hr) Value: 24
  misc_feature: MA Experiment 20001451 PARAMETER Experiment Name: At_Far-red-induction_P Parameter: Tissue Value: Whole Plant
gttaaaataaaatagaataaaaataaaggaagaagaagaagaagaagaagaagaaaggattcgtcttccttcttccacaccctttctgacacctcatctcccctcccaccttctccgtcccgttccgtttctccatcagatcctcgattccgatccaacagttcgaattcagtttccgattctgatctgatcgaaccaatactcactgagatttgatcggcgattatggagtctatatctccggtatcgaatcagcttcttcagccgacgacgacgagctctaattccgatcgctctcgtcgtaagcgtaagaagaaatcatcgccatcatcggttgagaaatctccatctccgtcaatatcgttggagaaatggagatcggagaagcagcaacagatctactcaacgaagctagttcatgctttaagagagctacgaatcagccaacaaccatcttcatcatcatcttcttcgattccacgtggaggtagagccgtacgtgaagtcgccgatagagctttagcagttgcggcgagaggtaaaacgttatggagtcgagcgatactttcaaaagctgtaaaactcaaattcaggaaacacaaacgccagagaatctctaatccgacgacgacgacgttaaccaccgggagtatcaggtcaaagaaacagagagcgacggttttgaggcttaaggctaaaggtttgccagctgtacagaggaaagtgaaagtactgagccggttagttcccggttgccgtaaacaatcattaccggtggttttagaagaaaccactgattatatagctgccatggagatgcagattcgtactatgactgcgattctctccgccgttagttcttctcctccgccgccaacgccaggtcacgaagggggacaaacacacatgcttggttagttggccaaactgtccttttatttttttccaattttaaaaaccaaaaaaaaaactgttttttttatcatattattattcttctcactgtattgtttgttgtttgaatattttactattcaactttattt

SEQ ID NO: 39916 - protein, 230 aa, Arabidopsis thaliana
  peptide (1)..(230): Ceres Seq. ID no. 13494185
  misc_feature (88)..(217): Homolog of NCBI NO: 34912942 NR Description: OSJNBb0035I14.10 [Oryza sativa (japonica
  misc_feature (32)..(218): Homolog of NCBI NO: 18397368 NR Description: bHLH protein [Arabidopsis thaliana]
  misc_feature (49)..(213): Homolog of NCBI NO: 34904544 NR Description: B1066G12.17 [Oryza sativa (japonica
  misc_feature (78)..(219): Homolog of NCBI NO: 34898122 NR Description: bHLH protein-like [Oryza sativa (japonica
  misc_feature (18)..(218): Homolog of NCBI NO: 18390998 NR Description: bHLH protein [Arabidopsis thaliana]
  misc_feature (12)..(217): Homolog of NCBI NO: 18397627 NR Description: bHLH protein [Arabidopsis thaliana]
  misc_feature (12)..(217): Homolog of NCBI NO: 21618012 NR Description: unknown [Arabidopsis thaliana]
  misc_feature (1)..(230): Homolog of NCBI NO: 18401374 NR Description: bHLH protein [Arabidopsis thaliana]
MESISPVSNQLLQPTTTSSNSDRSRRKRKKKSSPSSVEKSPSPSISLEKWRSEKQQQIYSTKLVHALRELRISQQPSSSSSSSIPRGGRAVREVADRALAVAARGKTLWSRAILSKAVKLKFRKHKRQRISNPTTTTLTTGSIRSKKQRATVLRLKAKGLPAVQRKVKVLSRLVPGCRKQSLPVVLEETTDYIAAMEMQIRTMTAILSAVSSSPPPPTPGHEGGQTHMLG

SEQ ID NO: 39917 - DNA, 1149 bp, Arabidopsis thaliana
  misc_feature (1)..(1149): Ceres Seq. ID no. 12327856
  misc_feature: MA Experiment ID: 108461 Result: Up-regulated in Transcription
  misc_feature: MA Experiment 108461 PARAMETER Experiment Name: At_Germinating_Seeds_cDNA_P Parameter: Age (day) Value: 1 vs. 0
  misc_feature: MA Experiment 108461 PARAMETER Experiment Name: At_Germinating_Seeds_cDNA_P Parameter: Tissue Value: Germinating Seeds
  misc_feature: MA Experiment ID: 108462 Result: Up-regulated in Transcription
  misc_feature: MA Experiment 108462 PARAMETER Experiment Name: At_Germinating_Seeds_cDNA_P Parameter: Age (day) Value: 2 vs. 0
  misc_feature: MA Experiment 108462 PARAMETER Experiment Name: At_Germinating_Seeds_cDNA_P Parameter: Tissue Value: Germinating Seeds
  misc_feature: MA Experiment ID: 108463 Result: Up-regulated in Transcription
  misc_feature: MA Experiment 108463 PARAMETER Experiment Name: At_Germinating_Seeds_cDNA_P Parameter: Age (day) Value: 3 vs. 0
  misc_feature: MA Experiment 108463 PARAMETER Experiment Name: At_Germinating_Seeds_cDNA_P Parameter: Tissue Value: Germinating Seeds
  misc_feature: MA Experiment ID: 108464 Result: Up-regulated in Transcription
  misc_feature: MA Experiment 108464 PARAMETER Experiment Name: At_Germinating_Seeds_cDNA_P Parameter: Age (day) Value: 4 vs. 0
  misc_feature: MA Experiment 108464 PARAMETER Experiment Name: At_Germinating_Seeds_cDNA_P Parameter: Tissue Value: Germinating Seeds
  misc_feature: MA Experiment ID: 20000234 Result: Up-regulated in Transcription
  misc_feature: MA Experiment 20000234 PARAMETER Experiment Name: At_Siliques_P Parameter: Age (day) Value: 21
  misc_feature: MA Experiment 20000234 PARAMETER Experiment Name: At_Siliques_P Parameter: Organism Value: A. thaliana
  misc_feature: MA Experiment 20000234 PARAMETER Experiment Name: At_Siliques_P Parameter: Plant Line Value: WS
  misc_feature: MA Experiment 20000234 PARAMETER Experiment Name: At_Siliques_P Parameter: Tissue Value: Less Than 5mm Siliques vs. Whole Plant
  misc_feature: MA Experiment ID: 20000235 Result: Up-regulated in Transcription
  misc_feature: MA Experiment 20000235 PARAMETER Experiment Name: At_Siliques_P Parameter: Age (day) Value: 21
  misc_feature: MA Experiment 20000235 PARAMETER Experiment Name: At_Siliques_P Parameter: Organism Value: A. thaliana
  misc_feature: MA Experiment 20000235 PARAMETER Experiment Name: At_Siliques_P Parameter: Plant Line Value: WS
  misc_feature: MA Experiment 20000235 PARAMETER Experiment Name: At_Siliques_P Parameter: Tissue Value: 5-10mm Siliques vs. Whole Plant
  misc_feature: MA Experiment ID: 20000264 Result: Up-regulated in Transcription
  misc_feature: MA Experiment 20000264 PARAMETER Experiment Name: At_Open_Flower_P Parameter: Age (day) Value: 21
  misc_feature: MA Experiment 20000264 PARAMETER Experiment Name: At_Open_Flower_P Parameter: Plant Line Value: WS
  misc_feature: MA Experiment 20000264 PARAMETER Experiment Name: At_Open_Flower_P Parameter: Tissue Value: Open Flower vs. Whole Plant
  misc_feature: MA Experiment ID: 20000265 Result: Up-regulated in Transcription
  misc_feature: MA Experiment 20000265 PARAMETER Experiment Name: At_Open_Flower_P Parameter: Age (day) Value: 21
  misc_feature: MA Experiment 20000265 PARAMETER Experiment Name: At_Open_Flower_P Parameter: Plant Line Value: WS
  misc_feature: MA Experiment 20000265 PARAMETER Experiment Name: At_Open_Flower_P Parameter: Tissue Value: Closed Flower vs. Whole Plant
  misc_feature: MA Experiment ID: 20000495 Result: Up-regulated in Transcription
  misc_feature: MA Experiment 20000495 PARAMETER Experiment Name: At_Guard_Cells_P Parameter: Harvest Date Value: 8/2/2002
  misc_feature: MA Experiment 20000495 PARAMETER Experiment Name: At_Guard_Cells_P Parameter: Organism Value: A. thaliana
  misc_feature: MA Experiment 20000495 PARAMETER Experiment Name: At_Guard_Cells_P Parameter: Tissue Value: Guard Cells vs. Leaves
  misc_feature: MA Experiment ID: 20001451 Result: Up-regulated in Transcription
  misc_feature: MA Experiment 20001451 PARAMETER Experiment Name: At_Far-red-induction_P Parameter: Age (day) Value: 7
  misc_feature: MA Experiment 20001451 PARAMETER Experiment Name: At_Far-red-induction_P Parameter: Light Value: Far-red vs. White
  misc_feature: MA Experiment 20001451 PARAMETER Experiment Name: At_Far-red-induction_P Parameter: Organism Value: A. thaliana
  misc_feature: MA Experiment 20001451 PARAMETER Experiment Name: At_Far-red-induction_P Parameter: Plant Line Value: Columbia
  misc_feature: MA Experiment 20001451 PARAMETER Experiment Name: At_Far-red-induction_P Parameter: Timepoint (hr) Value: 24
  misc_feature: MA Experiment 20001451 PARAMETER Experiment Name: At_Far-red-induction_P Parameter: Tissue Value: Whole Plant
gtttattctttttttccggcggaagcgaattgttggttgctgtagagagaattgattggccggagagaatggtgaaagtaatcgattcccattacctagccatcaccgccattgtcaccgtgggttatcaattcatattcttcgtaatcacagctcttttcaaatttgatcaagttactgactttgccggaagtacaaatttcgtgatacttgctgtattgactctgcttctcaaagggacatggcattatcgtcagatagtcttgactgtgctagtagtcgtatggggacttcgtctgggactgttcctccttatgaggatcttgcaatggggtgaagatcgacgctttgatgacatgcgtgaaaatattgggaaactagtagtcttttggatttttcaggccgtgtgggtttggactgttagtttacctgttacctttgttaatgcaagcaacggtggaagattgtttcagcccgcagatgttatcggttggacaatgtgggttgcagggttcttgattgaagctacagctgatcaacaaaagctttcgttcaagaagtgtccagaaaacaaaggaaaatggtgtgatgttggtgtatggaagtattcacgccatccaaactactttggtgagatgttactctggtggggcttatatgtggcttcattgcctgtgcttaaaggtctcgagtaccttgtcataattggaccagtctttctcactttgctacttctcttcgttagcggcataccattactcgaggaatctgcggacaaaaagtatggtaacttgggagcttatcgacactacaagaagacaactagtcctctgattctcttaccgcgaggagtgtatgggtacttaccaatatggtgcaaatcagtctttctctttgagtttccattgtacagccgtaatcttcctcaagagactacagcttgggatagacgaaactcgaagaagagccagagaagcattgactgagagagagaaagagagtagattgtcactgattttgcaaacccgtctcctagttcttccttaatattcaaactctctttttgtatagattcttgtttgtctttgggtacttgttaaagataattgctacattgattgagaatacaataagattcaaaccaagctt

SEQ ID NO: 39918 - protein, 327 aa, Arabidopsis thaliana
  peptide (1)..(327): Ceres Seq. ID no. 12327857
  misc_feature (23)..(309): Homolog of NCBI NO: 13937298 NR Description: unknown protein [Oryza sativa]
  misc_feature (23)..(310): Homolog of NCBI NO: 21537359 NR Description: unknown [Arabidopsis thaliana]
  misc_feature (23)..(310): Homolog of NCBI NO: 30698953 NR Description: expressed protein [Arabidopsis thaliana]
  misc_feature (23)..(310): Homolog of NCBI NO: 18410409 NR Description: expressed protein
  misc_feature (275)..(314): Homolog of NCBI NO: 25402844 NR Description: protein T10O22.15 [imported] - Arabidopsis
  misc_feature (23)..(274): Homolog of NCBI NO: 25402844 NR Description: protein T10O22.15 [imported] - Arabidopsis
  misc_feature (275)..(314): Homolog of NCBI NO: 9719732 NR Description: T10F20.18 [Arabidopsis thaliana]
  misc_feature (23)..(86): Homolog of NCBI NO: 9719732 NR Description: T10F20.18 [Arabidopsis thaliana]
  misc_feature (104)..(274): Homolog of NCBI NO: 9719732 NR Description: T10F20.18 [Arabidopsis thaliana]
  misc_feature (23)..(314): Homolog of NCBI NO: 15221003 NR Description: hypothetical protein; protein id: At1g18180.1
LFFFSGGSELLVAVERIDWPERMVKVIDSHYLAITAIVTVGYQFIFFVITALFKFDQVTDFAGSTNFVILAVLTLLLKGTWHYRQIVLTVLVVVWGLRLGLFLLMRILQWGEDRRFDDMRENIGKLVVFWIFQAVWVWTVSLPVTFVNASNGGRLFQPADVIGWTMWVAGFLIEATADQQKLSFKKCPENKGKWCDVGVWKYSRHPNYFGEMLLWWGLYVASLPVLKGLEYLVIIGPVFLTLLLLFVSGIPLLEESADKKYGNLGAYRHYKKTTSPLILLPRGVYGYLPIWCKSVFLFEFPLYSRNLPQETTAWDRRNSKKSQRSID

SEQ ID NO: 39919 - protein, 305 aa, Arabidopsis thaliana
  peptide (1)..(305): Ceres Seq. ID no. 12327858
  misc_feature (1)..(287): Homolog of NCBI NO: 13937298 NR Description: unknown protein [Oryza sativa]
  misc_feature (1)..(288): Homolog of NCBI NO: 21537359 NR Description: unknown [Arabidopsis thaliana]
  misc_feature (1)..(288): Homolog of NCBI NO: 30698953 NR Description: expressed protein [Arabidopsis thaliana]
  misc_feature (1)..(288): Homolog of NCBI NO: 18410409 NR Description: expressed protein
  misc_feature (253)..(292): Homolog of NCBI NO: 25402844 NR Description: protein T10O22.15 [imported] - Arabidopsis
  misc_feature (1)..(252): Homolog of NCBI NO: 25402844 NR Description: protein T10O22.15 [imported] - Arabidopsis
  misc_feature (253)..(292): Homolog of NCBI NO: 9719732 NR Description: T10F20.18 [Arabidopsis thaliana]
  misc_feature (1)..(64): Homolog of NCBI NO: 9719732 NR Description: T10F20.18 [Arabidopsis thaliana]
  misc_feature (82)..(252): Homolog of NCBI NO: 9719732 NR Description: T10F20.18 [Arabidopsis thaliana]
  misc_feature (1)..(292): Homolog of NCBI NO: 15221003 NR Description: hypothetical protein; protein id: At1g18180.1
MVKVIDSHYLAITAIVTVGYQFIFFVITALFKFDQVTDFAGSTNFVILAVLTLLLKGTWHYRQIVLTVLVVVWGLRLGLFLLMRILQWGEDRRFDDMRENIGKLVVFWIFQAVWVWTVSLPVTFVNASNGGRLFQPADVIGWTMWVAGFLIEATADQQKLSFKKCPENKGKWCDVGVWKYSRHPNYFGEMLLWWGLYVASLPVLKGLEYLVIIGPVFLTLLLLFVSGIPLLEESADKKYGNLGAYRHYKKTTSPLILLPRGVYGYLPIWCKSVFLFEFPLYSRNLPQETTAWDRRNSKKSQRSID

SEQ ID NO: 39920 - protein, 223 aa, Arabidopsis thaliana
  peptide (1)..(223): Ceres Seq. ID no. 12327859
  misc_feature (1)..(150): Homolog of NCBI NO: 25406281 NR Description: unknown protein F25P22.7 [imported] - Arabidopsis
  misc_feature (1)..(205): Homolog of NCBI NO: 13937298 NR Description: unknown protein [Oryza sativa]
  misc_feature (1)..(206): Homolog of NCBI NO: 21537359 NR Description: unknown [Arabidopsis thaliana]
  misc_feature (1)..(206): Homolog of NCBI NO: 30698953 NR Description: expressed protein [Arabidopsis thaliana]
  misc_feature (1)..(206): Homolog of NCBI NO: 18410409 NR Description: expressed protein
  misc_feature (171)..(210): Homolog of NCBI NO: 25402844 NR Description: protein T10O22.15 [imported] - Arabidopsis
  misc_feature (1)..(170): Homolog of NCBI NO: 25402844 NR Description: protein T10O22.15 [imported] - Arabidopsis
  misc_feature (171)..(210): Homolog of NCBI NO: 9719732 NR Description: T10F20.18 [Arabidopsis thaliana]
  misc_feature (1)..(170): Homolog of NCBI NO: 9719732 NR Description: T10F20.18 [Arabidopsis thaliana]
  misc_feature (1)..(210): Homolog of NCBI NO: 15221003 NR Description: hypothetical protein; protein id: At1g18180.1
MRILQWGEDRRFDDMRENIGKLVVFWIFQAVWVWTVSLPVTFVNASNGGRLFQPADVIGWTMWVAGFLIEATADQQKLSFKKCPENKGKWCDVGVWKYSRHPNYFGEMLLWWGLYVASLPVLKGLEYLVIIGPVFLTLLLLFVSGIPLLEESADKKYGNLGAYRHYKKTTSPLILLPRGVYGYLPIWCKSVFLFEFPLYSRNLPQETTAWDRRNSKKSQRSID

SEQ ID NO: 39921 - DNA, 1214 bp, Arabidopsis thaliana
  misc_feature (1)..(1214): Ceres Seq. ID no. 12439731
  misc_feature: MA Experiment ID: 108461 Result: Down-regulated in Transcription
  misc_feature: MA Experiment 108461 PARAMETER Experiment Name: At_Germinating_Seeds_cDNA_P Parameter: Age (day) Value: 1 vs. 0
  misc_feature: MA Experiment 108461 PARAMETER Experiment Name: At_Germinating_Seeds_cDNA_P Parameter: Tissue Value: Germinating Seeds
  misc_feature: MA Experiment ID: 108462 Result: Down-regulated in Transcription
  misc_feature: MA Experiment 108462 PARAMETER Experiment Name: At_Germinating_Seeds_cDNA_P Parameter: Age (day) Value: 2 vs. 0
  misc_feature: MA Experiment 108462 PARAMETER Experiment Name: At_Germinating_Seeds_cDNA_P Parameter: Tissue Value: Germinating Seeds
  misc_feature: MA Experiment ID: 108463 Result: Down-regulated in Transcription
  misc_feature: MA Experiment 108463 PARAMETER Experiment Name: At_Germinating_Seeds_cDNA_P Parameter: Age (day) Value: 3 vs. 0
  misc_feature: MA Experiment 108463 PARAMETER Experiment Name: At_Germinating_Seeds_cDNA_P Parameter: Tissue Value: Germinating Seeds
  misc_feature: MA Experiment ID: 108464 Result: Down-regulated in Transcription
  misc_feature: MA Experiment 108464 PARAMETER Experiment Name: At_Germinating_Seeds_cDNA_P Parameter: Age (day) Value: 4 vs. 0
  misc_feature: MA Experiment 108464 PARAMETER Experiment Name: At_Germinating_Seeds_cDNA_P Parameter: Tissue Value: Germinating Seeds
  misc_feature: MA Experiment ID: 108488 Result: Down-regulated in Transcription
  misc_feature: MA Experiment ID: 108561 Result: Up-regulated in Transcription
  misc_feature: MA Experiment 108561 PARAMETER Experiment Name: At_100uM_ABA_cDNA_P Parameter: Timepoint (hr) Value: 6
  misc_feature: MA Experiment 108561 PARAMETER Experiment Name: At_100uM_ABA_cDNA_P Parameter: Tissue Value: Aerial
  misc_feature: MA Experiment 108561 PARAMETER Experiment Name: At_100uM_ABA_cDNA_P Parameter: Treatment Value: 100uM ABA vs. No Treatment
  misc_feature: MA Experiment ID: 108573 Result: Up-regulated in Transcription
  misc_feature: MA Experiment 108573 PARAMETER Experiment Name: At_Drought_cDNA_P Parameter: Timepoint (hr) Value: 6
  misc_feature: MA Experiment 108573 PARAMETER Experiment Name: At_Drought_cDNA_P Parameter: Tissue Value: Aerial
  misc_feature: MA Experiment 108573 PARAMETER Experiment Name: At_Drought_cDNA_P Parameter: Treatment Value: Drought vs. No Drought
  misc_feature: MA Experiment ID: 108576 Result: Up-regulated in Transcription
  misc_feature: MA Experiment 108576 PARAMETER Experiment Name: At_42deg_Heat_cDNA_P Parameter: Temperature (deg C) Value: 42 vs. 22
  misc_feature: MA Experiment 108576 PARAMETER Experiment Name: At_42deg_Heat_cDNA_P Parameter: Timepoint (hr) Value: 1
  misc_feature: MA Experiment 108576 PARAMETER Experiment Name: At_42deg_Heat_cDNA_P Parameter: Tissue Value: Aerial
  misc_feature: MA Experiment ID: 108577 Result: Up-regulated in Transcription
  misc_feature: MA Experiment 108577 PARAMETER Experiment Name: At_42deg_Heat_cDNA_P Parameter: Temperature (deg C) Value: 42 vs. 22
  misc_feature: MA Experiment 108577 PARAMETER Experiment Name: At_42deg_Heat_cDNA_P Parameter: Timepoint (hr) Value: 6
  misc_feature: MA Experiment 108577 PARAMETER Experiment Name: At_42deg_Heat_cDNA_P Parameter: Tissue Value: Aerial
  misc_feature: MA Experiment ID: 108585 Result: Up-regulated in Transcription
  misc_feature: MA Experiment 108585 PARAMETER Experiment Name: At_5mM_NaNP_cDNA_P Parameter: Timepoint (hr) Value: 6
  misc_feature: MA Experiment 108585 PARAMETER Experiment Name: At_5mM_NaNP_cDNA_P Parameter: Tissue Value: Aerial
  misc_feature: MA Experiment 108585 PARAMETER Experiment Name: At_5mM_NaNP_cDNA_P Parameter: Treatment Value: null
  misc_feature: MA Experiment ID: 108595 Result: Up-regulated in Transcription
  misc_feature: MA Experiment 108595 PARAMETER Experiment Name: At_Ler-pi_Ovule_cDNA_P Parameter: Plant Line Value: null
  misc_feature: MA Experiment ID: 108605 Result: Up-regulated in Transcription
  misc_feature: MA Experiment 108605 PARAMETER Experiment Name: At_100uM_ABA_cDNA_P Parameter: Timepoint (hr) Value: 6
  misc_feature: MA Experiment 108605 PARAMETER Experiment Name: At_100uM_ABA_cDNA_P Parameter: Tissue Value: Aerial
  misc_feature: MA Experiment 108605 PARAMETER Experiment Name: At_100uM_ABA_cDNA_P Parameter: Treatment Value: 100uM ABA vs. No Treatment
  misc_feature: MA Experiment ID: 108607 Result: Up-regulated in Transcription
  misc_feature: MA Experiment 108607 PARAMETER Experiment Name: At_100uM_ABA_cDNA_P Parameter: Timepoint (hr) Value: 4
  misc_feature: MA Experiment 108607 PARAMETER Experiment Name: At_100uM_ABA_cDNA_P Parameter: Tissue Value: Aerial
  misc_feature: MA Experiment 108607 PARAMETER Experiment Name: At_100uM_ABA_cDNA_P Parameter: Treatment Value: 100uM ABA vs. No Treatment
  misc_feature: MA Experiment ID: 20000069 Result: Up-regulated in Transcription
  misc_feature: MA Experiment 20000069 PARAMETER Experiment Name: At_100uM_ABA_Mutants_cDNA_P Parameter: Plant Line Value: CS23
  misc_feature: MA Experiment 20000069 PARAMETER Experiment Name: At_100uM_ABA_Mutants_cDNA_P Parameter: Timepoint (hr) Value: 6
  misc_feature: MA Experiment 20000069 PARAMETER Experiment Name: At_100uM_ABA_Mutants_cDNA_P Parameter: Tissue Value: Aerial
  misc_feature: MA Experiment 20000069 PARAMETER Experiment Name: At_100uM_ABA_Mutants_cDNA_P Parameter: Treatment Value: 100uM ABA vs. No Treatment
  misc_feature: MA Experiment ID: 20000070 Result: Up-regulated in Transcription
  misc_feature: MA Experiment 20000070 PARAMETER Experiment Name: At_100uM_ABA_Mutants_cDNA_P Parameter: Plant Line Value: CS24
  misc_feature: MA Experiment 20000070 PARAMETER Experiment Name: At_100uM_ABA_Mutants_cDNA_P Parameter: Timepoint (hr) Value: 6
  misc_feature: MA Experiment 20000070 PARAMETER Experiment Name: At_100uM_ABA_Mutants_cDNA_P Parameter: Tissue Value: Aerial
  misc_feature: MA Experiment 20000070 PARAMETER Experiment Name: At_100uM_ABA_Mutants_cDNA_P Parameter: Treatment Value: 100uM ABA vs. No Treatment
  misc_feature: MA Experiment ID: 20000071 Result: Up-regulated in Transcription
  misc_feature: MA Experiment 20000071 PARAMETER Experiment Name: At_100uM_ABA_Mutants_cDNA_P Parameter: Plant Line Value: CS8104
  misc_feature: MA Experiment 20000071 PARAMETER Experiment Name: At_100uM_ABA_Mutants_cDNA_P Parameter: Timepoint (hr) Value: 6
  misc_feature: MA Experiment 20000071 PARAMETER Experiment Name: At_100uM_ABA_Mutants_cDNA_P Parameter: Tissue Value: Aerial
  misc_feature: MA Experiment 20000071 PARAMETER Experiment Name: At_100uM_ABA_Mutants_cDNA_P Parameter: Treatment Value: 100uM ABA vs. No Treatment
  misc_feature: MA Experiment ID: 20000072 Result: Up-regulated in Transcription
  misc_feature: MA Experiment 20000072 PARAMETER Experiment Name: At_100uM_ABA_Mutants_cDNA_P Parameter: Plant Line Value: CS8105
  misc_feature: MA Experiment 20000072 PARAMETER Experiment Name: At_100uM_ABA_Mutants_cDNA_P Parameter: Timepoint (hr) Value: 6
  misc_feature: MA Experiment 20000072 PARAMETER Experiment Name: At_100uM_ABA_Mutants_cDNA_P Parameter: Tissue Value: Aerial
  misc_feature: MA Experiment 20000072 PARAMETER Experiment Name: At_100uM_ABA_Mutants_cDNA_P Parameter: Treatment Value: 100uM ABA vs. No Treatment
  misc_feature: MA Experiment ID: 20000086 Result: Up-regulated in Transcription
  misc_feature: MA Experiment 20000086 PARAMETER Experiment Name: At_100uM_ABA_Mutants_cDNA_P Parameter: Plant Line Value: CS22
  misc_feature: MA Experiment 20000086 PARAMETER Experiment Name: At_100uM_ABA_Mutants_cDNA_P Parameter: Timepoint (hr) Value: 6
  misc_feature: MA Experiment 20000086 PARAMETER Experiment Name: At_100uM_ABA_Mutants_cDNA_P Parameter: Tissue Value: Aerial
  misc_feature: MA Experiment 20000086 PARAMETER Experiment Name: At_100uM_ABA_Mutants_cDNA_P Parameter: Treatment Value: 100uM ABA vs. No Treatment
  misc_feature: MA Experiment ID: 20000087 Result: Up-regulated in Transcription
  misc_feature: MA Experiment 20000087 PARAMETER Experiment Name: At_100uM_ABA_Mutants_cDNA_P Parameter: Plant Line Value: WS
  misc_feature: MA Experiment 20000087 PARAMETER Experiment Name: At_100uM_ABA_Mutants_cDNA_P Parameter: Timepoint (hr) Value: 6
  misc_feature: MA Experiment 20000087 PARAMETER Experiment Name: At_100uM_ABA_Mutants_cDNA_P Parameter: Tissue Value: Aerial
  misc_feature: MA Experiment 20000087 PARAMETER Experiment Name: At_100uM_ABA_Mutants_cDNA_P Parameter: Treatment Value: 100uM ABA vs. No Treatment
  misc_feature: MA Experiment ID: 20000088 Result: Up-regulated in Transcription
  misc_feature: MA Experiment 20000088 PARAMETER Experiment Name: At_100uM_ABA_Mutants_cDNA_P Parameter: Plant Line Value: Landsberg
  misc_feature: MA Experiment 20000088 PARAMETER Experiment Name: At_100uM_ABA_Mutants_cDNA_P Parameter: Timepoint (hr) Value: 6
  misc_feature: MA Experiment 20000088 PARAMETER Experiment Name: At_100uM_ABA_Mutants_cDNA_P Parameter: Tissue Value: Aerial
  misc_feature: MA Experiment 20000088 PARAMETER Experiment Name: At_100uM_ABA_Mutants_cDNA_P Parameter: Treatment Value: 100uM ABA vs. No Treatment
  misc_feature: MA Experiment ID: 20000111 Result: Up-regulated in Transcription
  misc_feature: MA Experiment 20000111 PARAMETER Experiment Name: At_42deg_Heat_cDNA_P Parameter: Temperature (deg C) Value: 42 vs. 22
  misc_feature: MA Experiment 20000111 PARAMETER Experiment Name: At_42deg_Heat_cDNA_P Parameter: Timepoint (hr) Value: 6
  misc_feature: MA Experiment 20000111 PARAMETER Experiment Name: At_42deg_Heat_cDNA_P Parameter: Tissue Value: Aerial
  misc_feature: MA Experiment ID: 20000112 Result: Up-regulated in Transcription
  misc_feature: MA Experiment 20000112 PARAMETER Experiment Name: At_42deg_Heat_cDNA_P Parameter: Temperature (deg C) Value: 42 vs. 22
  misc_feature: MA Experiment 20000112 PARAMETER Experiment Name: At_42deg_Heat_cDNA_P Parameter: Timepoint (hr) Value: 2
  misc_feature: MA Experiment 20000112 PARAMETER Experiment Name: At_42deg_Heat_cDNA_P Parameter: Tissue Value: Aerial
  misc_feature: MA Experiment ID: 20000113 Result: Up-regulated in Transcription
  misc_feature: MA Experiment 20000113 PARAMETER Experiment Name: At_42deg_Heat_cDNA_P Parameter: Temperature (deg C) Value: 42 vs. 22
  misc_feature: MA Experiment 20000113 PARAMETER Experiment Name: At_42deg_Heat_cDNA_P Parameter: Timepoint (hr) Value: 8
  misc_feature: MA Experiment 20000113 PARAMETER Experiment Name: At_42deg_Heat_cDNA_P Parameter: Tissue Value: Aerial
  misc_feature: MA Experiment ID: 20000117 Result: Up-regulated in Transcription
  misc_feature: MA Experiment 20000117 PARAMETER Experiment Name: At_100uM_ABA_Mutants_cDNA_P Parameter: Plant Line Value: Columbia
  misc_feature: MA Experiment 20000117 PARAMETER Experiment Name: At_100uM_ABA_Mutants_cDNA_P Parameter: Timepoint (hr) Value: 6
  misc_feature: MA Experiment 20000117 PARAMETER Experiment Name: At_100uM_ABA_Mutants_cDNA_P Parameter: Tissue Value: Aerial
  misc_feature: MA Experiment 20000117 PARAMETER Experiment Name: At_100uM_ABA_Mutants_cDNA_P Parameter: Treatment Value: 100uM ABA vs. No Treatment
  misc_feature: MA Experiment ID: 20000144 Result: Up-regulated in Transcription
  misc_feature: MA Experiment 20000144 PARAMETER Experiment Name: At_42deg_Heat_cDNA_P Parameter: Temperature (deg C) Value: 42 vs. 22
  misc_feature: MA Experiment 20000144 PARAMETER Experiment Name: At_42deg_Heat_cDNA_P Parameter: Timepoint (hr) Value: 1
  misc_feature: MA Experiment 20000144 PARAMETER Experiment Name: At_42deg_Heat_cDNA_P Parameter: Tissue Value: Aerial
  misc_feature: MA Experiment ID: 20000169 Result: Up-regulated in Transcription
  misc_feature: MA Experiment 20000169 PARAMETER Experiment Name: At_100uM_ABA_P Parameter: Age (day) Value: 14
  misc_feature: MA Experiment 20000169 PARAMETER Experiment Name: At_100uM_ABA_P Parameter: Organism Value: A. thaliana
  misc_feature: MA Experiment 20000169 PARAMETER Experiment Name: At_100uM_ABA_P Parameter: Plant Line Value: WS
  misc_feature: MA Experiment 20000169 PARAMETER Experiment Name: At_100uM_ABA_P Parameter: Timepoint (hr) Value: 6
  misc_feature: MA Experiment 20000169 PARAMETER Experiment Name: At_100uM_ABA_P Parameter: Tissue Value: Aerial
  misc_feature: MA Experiment 20000169 PARAMETER Experiment Name: At_100uM_ABA_P Parameter: Treatment Value: 100uM ABA vs. No Treatment
  misc_feature: MA Experiment ID: 20000171 Result: Up-regulated in Transcription
  misc_feature: MA Experiment 20000171 PARAMETER Experiment Name: At_42deg_Heat_P Parameter: Age (day) Value: 14
  misc_feature: MA Experiment 20000171 PARAMETER Experiment Name: At_42deg_Heat_P Parameter: Organism Value: A. thaliana
  misc_feature: MA Experiment 20000171 PARAMETER Experiment Name: At_42deg_Heat_P Parameter: Plant Line Value: WS
  misc_feature: MA Experiment 20000171 PARAMETER Experiment Name: At_42deg_Heat_P Parameter: Temperature (deg C) Value: 42 vs. 22
  misc_feature: MA Experiment 20000171 PARAMETER Experiment Name: At_42deg_Heat_P Parameter: Timepoint (hr) Value: 1
  misc_feature: MA Experiment 20000171 PARAMETER Experiment Name: At_42deg_Heat_P Parameter: Tissue Value: Aerial
  misc_feature: MA Experiment ID: 20000173 Result: Up-regulated in Transcription
  misc_feature: MA Experiment 20000173 PARAMETER Experiment Name: At_42deg_Heat_P Parameter: Age (day) Value: 14
  misc_feature: MA Experiment 20000173 PARAMETER Experiment Name: At_42deg_Heat_P Parameter: Organism Value: A. thaliana
  misc_feature: MA Experiment 20000173 PARAMETER Experiment Name: At_42deg_Heat_P Parameter: Plant Line Value: WS
  misc_feature: MA Experiment 20000173 PARAMETER Experiment Name: At_42deg_Heat_P Parameter: Temperature (deg C) Value: 42 vs. 22
  misc_feature: MA Experiment 20000173 PARAMETER Experiment Name: At_42deg_Heat_P Parameter: Timepoint (hr) Value: 6
  misc_feature: MA Experiment 20000173 PARAMETER Experiment Name: At_42deg_Heat_P Parameter: Tissue Value: Aerial
  misc_feature: MA Experiment ID: 20000180 Result: Down-regulated in Transcription
  misc_feature: MA Experiment 20000180 PARAMETER Experiment Name: At_Germinating_Seeds_P Parameter: Age (hr) Value: 24 vs. 0
  misc_feature: MA Experiment 20000180 PARAMETER Experiment Name: At_Germinating_Seeds_P Parameter: Tissue Value: Germinating Seeds
  misc_feature: MA Experiment ID: 20000234 Result: Down-regulated in Transcription
  misc_feature: MA Experiment 20000234 PARAMETER Experiment Name: At_Siliques_P Parameter: Age (day) Value: 21
  misc_feature: MA Experiment 20000234 PARAMETER Experiment Name: At_Siliques_P Parameter: Organism Value: A. thaliana
  misc_feature: MA Experiment 20000234 PARAMETER Experiment Name: At_Siliques_P Parameter: Plant Line Value: WS
  misc_feature: MA Experiment 20000234 PARAMETER Experiment Name: At_Siliques_P Parameter: Tissue Value: Less Than 5mm Siliques vs. Whole Plant
  misc_feature: MA Experiment ID: 20000235 Result: Down-regulated in Transcription
  misc_feature: MA Experiment 20000235 PARAMETER Experiment Name: At_Siliques_P Parameter: Age (day) Value: 21
  misc_feature: MA Experiment 20000235 PARAMETER Experiment Name: At_Siliques_P Parameter: Organism Value: A. thaliana
  misc_feature: MA Experiment 20000235 PARAMETER Experiment Name: At_Siliques_P Parameter: Plant Line Value: WS
  misc_feature: MA Experiment 20000235 PARAMETER Experiment Name: At_Siliques_P Parameter: Tissue Value: 5-10mm Siliques vs. Whole Plant
  misc_feature: MA Experiment ID: 20000265 Result: Down-regulated in Transcription
  misc_feature: MA Experiment 20000265 PARAMETER Experiment Name: At_Open_Flower_P Parameter: Age (day) Value: 21
  misc_feature: MA Experiment 20000265 PARAMETER Experiment Name: At_Open_Flower_P Parameter: Plant Line Value: WS
  misc_feature: MA Experiment 20000265 PARAMETER Experiment Name: At_Open_Flower_P Parameter: Tissue Value: Closed Flower vs. Whole Plant
  misc_feature: MA Experiment ID: 20000436 Result: Up-regulated in Transcription
  misc_feature: MA Experiment 20000436 PARAMETER Experiment Name: At_Drought_P Parameter: Age (day) Value: 7
  misc_feature: MA Experiment 20000436 PARAMETER Experiment Name: At_Drought_P Parameter: Organism Value: A. thaliana
  misc_feature: MA Experiment 20000436 PARAMETER Experiment Name: At_Drought_P Parameter: Plant Line Value: WS
  misc_feature: MA Experiment 20000436 PARAMETER Experiment Name: At_Drought_P Parameter: Timepoint (hr) Value: 12
  misc_feature: MA Experiment 20000436 PARAMETER Experiment Name: At_Drought_P Parameter: Tissue Value: Whole Plant
  misc_feature: MA Experiment 20000436 PARAMETER Experiment Name: At_Drought_P Parameter: Treatment Value: Drought vs. No Drought
  misc_feature: MA Experiment ID: 20000437 Result: Up-regulated in Transcription
  misc_feature: MA Experiment 20000437 PARAMETER Experiment Name: At_Drought_P Parameter: Age (day) Value: 8
  misc_feature: MA Experiment 20000437 PARAMETER Experiment Name: At_Drought_P Parameter: Organism Value: A. thaliana
  misc_feature: MA Experiment 20000437 PARAMETER Experiment Name: At_Drought_P Parameter: Plant Line Value: WS
  misc_feature: MA Experiment 20000437 PARAMETER Experiment Name: At_Drought_P Parameter: Timepoint (hr) Value: 24
  misc_feature: MA Experiment 20000437 PARAMETER Experiment Name: At_Drought_P Parameter: Tissue Value: Whole Plant
  misc_feature: MA Experiment 20000437 PARAMETER Experiment Name: At_Drought_P Parameter: Treatment Value: Drought vs. No Drought
  misc_feature: MA Experiment ID: 20000438 Result: Down-regulated in Transcription
  misc_feature: MA Experiment 20000438 PARAMETER Experiment Name: At_Shoots__P Parameter: Age (day) Value: 14
  misc_feature: MA Experiment 20000438 PARAMETER Experiment Name: At_Shoots__P Parameter: Tissue Value: Shoots vs. Whole Plant
  misc_feature: MA Experiment ID: 20000453 Result: Up-regulated in Transcription
  misc_feature: MA Experiment 20000453 PARAMETER Experiment Name: At_100uM_ABA_P Parameter: Age (day) Value: 15
  misc_feature: MA Experiment 20000453 PARAMETER Experiment Name: At_100uM_ABA_P Parameter: Organism Value: A. thaliana
  misc_feature: MA Experiment 20000453 PARAMETER Experiment Name: At_100uM_ABA_P Parameter: Plant Line Value: WS
  misc_feature: MA Experiment 20000453 PARAMETER Experiment Name: At_100uM_ABA_P Parameter: Timepoint (hr) Value: 24
  misc_feature: MA Experiment 20000453 PARAMETER Experiment Name: At_100uM_ABA_P Parameter: Tissue Value: Aerial
  misc_feature: MA Experiment 20000453 PARAMETER Experiment Name: At_100uM_ABA_P Parameter: Treatment Value: 100uM ABA vs. No Treatment
  misc_feature: MA Experiment ID: 20000794 Result: Up-regulated in Transcription
  misc_feature: MA Experiment 20000794 PARAMETER Experiment Name: At_Petals_P Parameter: Age (day) Value: 23-25 days
  misc_feature: MA Experiment 20000794 PARAMETER Experiment Name: At_Petals_P Parameter: Plant Line Value: WS
  misc_feature: MA Experiment 20000794 PARAMETER Experiment Name: At_Petals_P Parameter: Tissue Value: Petals vs. Whole plant
  misc_feature: MA Experiment ID: 20001554 Result: Up-regulated in Transcription
  misc_feature: MA Experiment 20001554 PARAMETER Experiment Name: At_Drought_Soil_Dry_P Parameter: Age (day) Value: 21
  misc_feature: MA Experiment 20001554 PARAMETER Experiment Name: At_Drought_Soil_Dry_P Parameter: Organism Value: A. thaliana
  misc_feature: MA Experiment 20001554 PARAMETER Experiment Name: At_Drought_Soil_Dry_P Parameter: Plant Line Value: WS
  misc_feature: MA Experiment 20001554 PARAMETER Experiment Name: At_Drought_Soil_Dry_P Parameter: Post Timepoint (hr) Value: None
  misc_feature: MA Experiment 20001554 PARAMETER Experiment Name: At_Drought_Soil_Dry_P Parameter: Post-Treatment Value: None
  misc_feature: MA Experiment 20001554 PARAMETER Experiment Name: At_Drought_Soil_Dry_P Parameter: Timepoint (day) Value: 7
  misc_feature: MA Experiment 20001554 PARAMETER Experiment Name: At_Drought_Soil_Dry_P Parameter: Treatment Value: Drought vs. No Drought
  misc_feature: MA Experiment ID: 20001904 Result: Up-regulated in Transcription
  misc_feature: MA Experiment 20001904 PARAMETER Experiment Name: At_Drought_Reproduction_P Parameter: Age (day) Value: 37
  misc_feature: MA Experiment 20001904 PARAMETER Experiment Name: At_Drought_Reproduction_P Parameter: Organism Value: A. thaliana
  misc_feature: MA Experiment 20001904 PARAMETER Experiment Name: At_Drought_Reproduction_P Parameter: Plant Line Value: WS
  misc_feature: MA Experiment 20001904 PARAMETER Experiment Name: At_Drought_Reproduction_P Parameter: Timepoint (day) Value: 7
  misc_feature: MA Experiment 20001904 PARAMETER Experiment Name: At_Drought_Reproduction_P Parameter: Tissue Value: Rosettes
  misc_feature: MA Experiment 20001904 PARAMETER Experiment Name: At_Drought_Reproduction_P Parameter: Treatment Value: Drought vs. No Drought
agcttcatatttcttgcacgtaaagtttactctgtctcaccgattttgtttttttctttgttttttttttgattttttaatatcgaaaccctaaagcctcgaaggttctctcgccggagaagaaattatgcagggtttggcggcgaccaccaccaaccgtggctctctcaccttcctcgctccgaggaaccatagtccaatttcaaagaaatttgtgaatccaagagtgttctttcccaacgttgattcatccgcaaaattaagattatcagctagctcaatttcacggagatgtccacgagagattgctcctctttcagcaactgcatctgtggactttgcagcagcagcaacatcatccaaccagctctttgctaatggcttgccaccattagctcctggtttgagaagacaccggagaccgatagagcctgcaagagtggctaaagatgacttctttaaaatcaaactgcctaaaatcgcagagagacctgaatggtggtggaggacgttagcttgtgttccttatttgatatccctccaaatatctgatgttggtttctatgtccaaccttttctcgaaaagcacgacgctattggggacatgatatatttcatcccgggagcgataaacagatggccgacatggttcttcatggtgtactgctacttgggttatatgtgggtggtgaagaacaaagagctgcctcattacttgaggtttcacatgatgatgggtatgcttcttgaaacagctcttcaggtcatatggtgcactagcaatttcttcccgctgattcatttcaaaggacggttcggaatgtattattggatggccatcggattcacctacatatgtctgcttctcgaatgcatacggtgcgctcttgctggagtctatgctcagattcctttcatgacagatgctgcttccattcacaccctcttcaacttgggaggttttcagagaccactcaggtgaaaggtgaaaaactggccctttcgggtgttacatactttggaataggaacaagtctcttatcgagtctacacttatatgaatttagtctttttagtgtcagtgtcttatctcatgtgtaacacagaactctctatgagagtagcttataccaatgattttaaagctgaataatccggtcggatttgtccatgatttgaaagtacgcagatcaattcagctctatattgaacgt

SEQ ID NO: 39922 - protein, 284 aa, Arabidopsis thaliana
  peptide (1)..(284): Ceres Seq. ID no. 12439732
  misc_feature (198)..(255): Homolog of NCBI NO: 25406822 NR Description: hypothetical protein [imported] - Arabidopsis
  misc_feature (85)..(276): Homolog of NCBI NO: 34899836 NR Description: putative Tic20 protein [Oryza sativa (japonica
  misc_feature (85)..(276): Homolog of NCBI NO: 34393290 NR Description: putative Tic20 protein [Oryza sativa (japonica
  misc_feature (63)..(270): Homolog of NCBI NO: 3769673 NR Description: Tic20 [Pisum sativum]
  misc_feature (95)..(255): Homolog of NCBI NO: 15220356 NR Description: unknown protein; protein id: At1g04940.1
  misc_feature (91)..(270): Homolog of NCBI NO: 6984128 NR Description: Tic20-like protein [Euphorbia esula]
  misc_feature (76)..(270): Homolog of NCBI NO: 26449432 NR Description: unknown protein [Arabidopsis thaliana]
  misc_feature (1)..(284): Homolog of NCBI NO: 15236283 NR Description: putative chloroplast protein import component
MQGLAATTTNRGSLTFLAPRNHSPISKKFVNPRVFFPNVDSSAKLRLSASSISRRCPREIAPLSATASVDFAAAATSSNQLFANGLPPLAPGLRRHRRPIEPARVAKDDFFKIKLPKIAERPEWWWRTLACVPYLISLQISDVGFYVQPFLEKHDAIGDMIYFIPGAINRWPTWFFMVYCYLGYMWVVKNKELPHYLRFHMMMGMLLETALQVIWCTSNFFPLIHFKGRFGMYYWMAIGFTYICLLLECIRCALAGVYAQIPFMTDAASIHTLFNLGGFQRPLR

SEQ ID NO: 39923 - DNA, 1566 bp, Arabidopsis thaliana
  misc_feature (1)..(1566): Ceres Seq. ID no. 12327860
  misc_feature: MA Experiment ID: 108434 Result: Up-regulated in Transcription
  misc_feature: MA Experiment 108434 PARAMETER Experiment Name: At_Root_Tips_cDNA_P Parameter: Tissue Value: Root Tips
  misc_feature: MA Experiment ID: 20000087 Result: Down-regulated in Transcription
  misc_feature: MA Experiment 20000087 PARAMETER Experiment Name: At_100uM_ABA_Mutants_cDNA_P Parameter: Plant Line Value: WS
  misc_feature: MA Experiment 20000087 PARAMETER Experiment Name: At_100uM_ABA_Mutants_cDNA_P Parameter: Timepoint (hr) Value: 6
  misc_feature: MA Experiment 20000087 PARAMETER Experiment Name: At_100uM_ABA_Mutants_cDNA_P Parameter: Tissue Value: Aerial
  misc_feature: MA Experiment 20000087 PARAMETER Experiment Name: At_100uM_ABA_Mutants_cDNA_P Parameter: Treatment Value: 100uM ABA vs. No Treatment
gaaaaactgagaaactttcacttcttcttcgtctccgtagtttcagtttcgatctgtaaagtttcaaacttgtggtcgaatttttaaatgggaagtggaagagatagagacgaccctttatccttcaccagcaatccatctacggcgtcgtctccagtcactgtatctgactatctcgacaactttctcggcgaacccacttctcgctccggtagttttcaaagcgagagcttactcggtggaggcggtggagaaagcatcaacgacgctgattttggattcgctcgtcctgatttccgatcggaacaactagctggaaccgtacagttttacgagaggcatgtcttcttgtgctacaaaaagccatctgtttggcccgcaaggatcgaggctgctgagttcgatcgattgcctaggctactctctgctgctgtatcggccagaaagggtagcatgaagaaggagactcgactcacaatatgtgaggggcatgatggaacagagacatccaatggtgatgtacttatttttcctgatatgatcagatacaggagattgactcactttgatgtggagacctttgtggaagaggtgcttgtgaaggatggtgaatggctgcctggaaatcctgaattgctgaaaggctcatatgtctttgtatgttcccatggatcccgagaccggcgatgtggggtttgtgggccgtcgctagttagtagattcagagaagaacttgagttccatggtcttcaaggtaaagtgtcaattagcccatgttctcacataggtggtcacaaatacgctgggaatgttatcatctaccgatcaaacatcaacagggaagtcacaggacactggtatgggtatgtgaccccagaagatgtacctattcttttggagcagcacatcaacaaaggcgagattgtagaccggctatggaggggtgaaatgggtctatcagaagaagatcagaagaaaactcaagaagggcgatttcagctaaatggtacagtccattccgtaaagatcaatgggaaagtgagtcaagaatcatcggttcacaacgccgatgtttcctgttgccagtcacgagctgcagaacctaatggttgttgccaacaaaatgggaacagctcttcatgttgtcaagacgacactactctgatgttgtcactgggaacatcagaagataatcaacttgaaagtgaaaacaacactgagaagctgacaccaggaagaaaaattgcagaaaagactttctttagaattaatagtgacaaaggatcttcgacacgtaaggtttgcggaataccaacatggttagagagctgggagcgagaagatacttatgctgctcttgctgttgtctgtgctgctgcttccgtggctgttgcctatacttgctacaaacagttgtaacgaagaaatttgtagccctaagatgattgtgtattgtgttcttataagacattgtgattttgtttctgctttcaaactacattttcctttcgatttaaaggagggttcttgtcagaactgtttgatgatatgtatcctgttaactct

SEQ ID NO: 39924 - protein, 443 aa, Arabidopsis thaliana
  peptide (1)..(443): Ceres Seq. ID no. 12327861
  misc_feature (60)..(346): Homolog of NCBI NO: 16604338 NR Description: AT3g27570/MMJ24_12 [Arabidopsis thaliana]
  misc_feature (411)..(442): Homolog of NCBI NO: 30688845 NR Description: sucrose cleavage protein -related [Arabidopsis
  misc_feature (16)..(346): Homolog of NCBI NO: 30688845 NR Description: sucrose cleavage protein -related [Arabidopsis
  misc_feature (408)..(442): Homolog of NCBI NO: 1086252 NR Description: sucrose cleavage protein - potato
  misc_feature (74)..(344): Homolog of NCBI NO: 1086252 NR Description: sucrose cleavage protein - potato
  misc_feature (1)..(355): Homolog of NCBI NO: 15241075 NR Description: sucrose cleavage protein-like
  misc_feature (285)..(443): Homolog of NCBI NO: 7488353 NR Description: sucrose cleavage protein homolog T15N24.70 -
  misc_feature (1)..(230): Homolog of NCBI NO: 7488353 NR Description: sucrose cleavage protein homolog T15N24.70 -
  misc_feature (1)..(443): Homolog of NCBI NO: 16604384 NR Description: AT4g26620/T15N24_70 [Arabidopsis thaliana]
  misc_feature (1)..(443): Homolog of NCBI NO: 18416788 NR Description: sucrase-like protein
MGSGRDRDDPLSFTSNPSTASSPVTVSDYLDNFLGEPTSRSGSFQSESLLGGGGGESINDADFGFARPDFRSEQLAGTVQFYERHVFLCYKKPSVWPARIEAAEFDRLPRLLSAAVSARKGSMKKETRLTICEGHDGTETSNGDVLIFPDMIRYRRLTHFDVETFVEEVLVKDGEWLPGNPELLKGSYVFVCSHGSRDRRCGVCGPSLVSRFREELEFHGLQGKVSISPCSHIGGHKYAGNVIIYRSNINREVTGHWYGYVTPEDVPILLEQHINKGEIVDRLWRGEMGLSEEDQKKTQEGRFQLNGTVHSVKINGKVSQESSVHNADVSCCQSRAAEPNGCCQQNGNSSSCCQDDTTLMLSLGTSEDNQLESENNTEKLTPGRKIAEKTFFRINSDKGSSTRKVCGIPTWLESWEREDTYAALAVVCAAASVAVAYTCYKQL

SEQ ID NO: 39925 - protein, 321 aa, Arabidopsis thaliana
  peptide (1)..(321): Ceres Seq. ID no. 12327862
  misc_feature (1)..(224): Homolog of NCBI NO: 16604338 NR Description: AT3g27570/MMJ24_12 [Arabidopsis thaliana]
  misc_feature (289)..(320): Homolog of NCBI NO: 30688845 NR Description: sucrose cleavage protein -related [Arabidopsis
  misc_feature (1)..(224): Homolog of NCBI NO: 30688845 NR Description: sucrose cleavage protein -related [Arabidopsis
  misc_feature (286)..(320): Homolog of NCBI NO: 1086252 NR Description: sucrose cleavage protein - potato
  misc_feature (1)..(222): Homolog of NCBI NO: 1086252 NR Description: sucrose cleavage protein - potato
  misc_feature (1)..(233): Homolog of NCBI NO: 15241075 NR Description: sucrose cleavage protein-like
  misc_feature (163)..(321): Homolog of NCBI NO: 7488353 NR Description: sucrose cleavage protein homolog T15N24.70 -
  misc_feature (1)..(108): Homolog of NCBI NO: 7488353 NR Description: sucrose cleavage protein homolog T15N24.70 -
  misc_feature (1)..(321): Homolog of NCBI NO: 16604384 NR Description: AT4g26620/T15N24_70 [Arabidopsis thaliana]
  misc_feature (1)..(321): Homolog of NCBI NO: 18416788 NR Description: sucrase-like protein
MKKETRLTICEGHDGTETSNGDVLIFPDMIRYRRLTHFDVETFVEEVLVKDGEWLPGNPELLKGSYVFVCSHGSRDRRCGVCGPSLVSRFREELEFHGLQGKVSISPCSHIGGHKYAGNVIIYRSNINREVTGHWYGYVTPEDVPILLEQHINKGEIVDRLWRGEMGLSEEDQKKTQEGRFQLNGTVHSVKINGKVSQESSVHNADVSCCQSRAAEPNGCCQQNGNSSSCCQDDTTLMLSLGTSEDNQLESENNTEKLTPGRKIAEKTFFRINSDKGSSTRKVCGIPTWLESWEREDTYAALAVVCAAASVAVAYTCYKQL

SEQ ID NO: 39926 - protein, 293 aa, Arabidopsis thaliana
  peptide (1)..(293): Ceres Seq. ID no. 12327863
  misc_feature (1)..(196): Homolog of NCBI NO: 16604338 NR Description: AT3g27570/MMJ24_12 [Arabidopsis thaliana]
  misc_feature (261)..(292): Homolog of NCBI NO: 30688845 NR Description: sucrose cleavage protein -related [Arabidopsis
  misc_feature (1)..(196): Homolog of NCBI NO: 30688845 NR Description: sucrose cleavage protein -related [Arabidopsis
  misc_feature (258)..(292): Homolog of NCBI NO: 1086252 NR Description: sucrose cleavage protein - potato
  misc_feature (1)..(194): Homolog of NCBI NO: 1086252 NR Description: sucrose cleavage protein - potato
  misc_feature (1)..(205): Homolog of NCBI NO: 15241075 NR Description: sucrose cleavage protein-like
  misc_feature (135)..(293): Homolog of NCBI NO: 7488353 NR Description: sucrose cleavage protein homolog T15N24.70 -
  misc_feature (1)..(80): Homolog of NCBI NO: 7488353 NR Description: sucrose cleavage protein homolog T15N24.70 -
  misc_feature (1)..(293): Homolog of NCBI NO: 16604384 NR Description: AT4g26620/T15N24_70 [Arabidopsis thaliana]
  misc_feature (1)..(293): Homolog of NCBI NO: 18416788 NR Description: sucrase-like protein
MIRYRRLTHFDVETFVEEVLVKDGEWLPGNPELLKGSYVFVCSHGSRDRRCGVCGPSLVSRFREELEFHGLQGKVSISPCSHIGGHKYAGNVIIYRSNINREVTGHWYGYVTPEDVPILLEQHINKGEIVDRLWRGEMGLSEEDQKKTQEGRFQLNGTVHSVKINGKVSQESSVHNADVSCCQSRAAEPNGCCQQNGNSSSCCQDDTTLMLSLGTSEDNQLESENNTEKLTPGRKIAEKTFFRINSDKGSSTRKVCGIPTWLESWEREDTYAALAVVCAAASVAVAYTCYKQL

SEQ ID NO: 39927 - DNA, 1451 bp, Arabidopsis thaliana
  misc_feature (1)..(1451): Ceres Seq. ID no. 12370299
  misc_feature: MA Experiment ID: 108434 Result: Up-regulated in Transcription
  misc_feature: MA Experiment 108434 PARAMETER Experiment Name: At_Root_Tips_cDNA_P Parameter: Tissue Value: Root Tips
  misc_feature: MA Experiment ID: 108488 Result: Up-regulated in Transcription
  misc_feature: MA Experiment ID: 108501 Result: Up-regulated in Transcription
  misc_feature: MA Experiment 108501 PARAMETER Experiment Name: At_ap2_floral_buds_cDNA_P Parameter: Plant Line Value: ap2 (Ler.)
  misc_feature: MA Experiment 108501 PARAMETER Experiment Name: At_ap2_floral_buds_cDNA_P Parameter: Tissue Value: Closed Flower
  misc_feature: MA Experiment ID: 108573 Result: Up-regulated in Transcription
  misc_feature: MA Experiment 108573 PARAMETER Experiment Name: At_Drought_cDNA_P Parameter: Timepoint (hr) Value: 6
  misc_feature: MA Experiment 108573 PARAMETER Experiment Name: At_Drought_cDNA_P Parameter: Tissue Value: Aerial
  misc_feature: MA Experiment 108573 PARAMETER Experiment Name: At_Drought_cDNA_P Parameter: Treatment Value: Drought vs. No Drought
  misc_feature: MA Experiment ID: 108577 Result: Down-regulated in Transcription
  misc_feature: MA Experiment 108577 PARAMETER Experiment Name: At_42deg_Heat_cDNA_P Parameter: Temperature (deg C) Value: 42 vs. 22
  misc_feature: MA Experiment 108577 PARAMETER Experiment Name: At_42deg_Heat_cDNA_P Parameter: Timepoint (hr) Value: 6
  misc_feature: MA Experiment 108577 PARAMETER Experiment Name: At_42deg_Heat_cDNA_P Parameter: Tissue Value: Aerial
  misc_feature: MA Experiment ID: 108585 Result: Up-regulated in Transcription
  misc_feature: MA Experiment 108585 PARAMETER Experiment Name: At_5mM_NaNP_cDNA_P Parameter: Timepoint (hr) Value: 6
  misc_feature: MA Experiment 108585 PARAMETER Experiment Name: At_5mM_NaNP_cDNA_P Parameter: Tissue Value: Aerial
  misc_feature: MA Experiment 108585 PARAMETER Experiment Name: At_5mM_NaNP_cDNA_P Parameter: Treatment Value: null
  misc_feature: MA Experiment ID: 20000436 Result: Up-regulated in Transcription
  misc_feature: MA Experiment 20000436 PARAMETER Experiment Name: At_Drought_P Parameter: Age (day) Value: 7
  misc_feature: MA Experiment 20000436 PARAMETER Experiment Name: At_Drought_P Parameter: Organism Value: A. thaliana
  misc_feature: MA Experiment 20000436 PARAMETER Experiment Name: At_Drought_P Parameter: Plant Line Value: WS
  misc_feature: MA Experiment 20000436 PARAMETER Experiment Name: At_Drought_P Parameter: Timepoint (hr) Value: 12
  misc_feature: MA Experiment 20000436 PARAMETER Experiment Name: At_Drought_P Parameter: Tissue Value: Whole Plant
  misc_feature: MA Experiment 20000436 PARAMETER Experiment Name: At_Drought_P Parameter: Treatment Value: Drought vs. No Drought
  misc_feature: MA Experiment ID: 20000439 Result: Down-regulated in Transcription
  misc_feature: MA Experiment 20000439 PARAMETER Experiment Name: At_Roots__P Parameter: Age (day) Value: 14 vs. 21
  misc_feature: MA Experiment 20000439 PARAMETER Experiment Name: At_Roots__P Parameter: Organism Value: A. thaliana
  misc_feature: MA Experiment 20000439 PARAMETER Experiment Name: At_Roots__P Parameter: Tissue Value: Roots vs. Whole Plant
  misc_feature: MA Experiment ID: 20000495 Result: Up-regulated in Transcription
  misc_feature: MA Experiment 20000495 PARAMETER Experiment Name: At_Guard_Cells_P Parameter: Harvest Date Value: 8/2/2002
  misc_feature: MA Experiment 20000495 PARAMETER Experiment Name: At_Guard_Cells_P Parameter: Organism Value: A. thaliana
  misc_feature: MA Experiment 20000495 PARAMETER Experiment Name: At_Guard_Cells_P Parameter: Tissue Value: Guard Cells vs. Leaves
  misc_feature: MA Experiment ID: 20000574 Result: Down-regulated in Transcription
  misc_feature: MA Experiment 20000574 PARAMETER Experiment Name: At_100uM_ABA_Mutants__P Parameter: Organism Value: A. thaliana
  misc_feature: MA Experiment 20000574 PARAMETER Experiment Name: At_100uM_ABA_Mutants__P Parameter: Plant Line Value: CS23 vs. Ler wt
  misc_feature: MA Experiment 20000574 PARAMETER Experiment Name: At_100uM_ABA_Mutants__P Parameter: Timepoint (hr) Value: N/A
  misc_feature: MA Experiment 20000574 PARAMETER Experiment Name: At_100uM_ABA_Mutants__P Parameter: Tissue Value: Whole Plant
  misc_feature: MA Experiment 20000574 PARAMETER Experiment Name: At_100uM_ABA_Mutants__P Parameter: Treatment Value: None
  misc_feature: MA Experiment ID: 20001554 Result: Up-regulated in Transcription
  misc_feature: MA Experiment 20001554 PARAMETER Experiment Name: At_Drought_Soil_Dry_P Parameter: Age (day) Value: 21
  misc_feature: MA Experiment 20001554 PARAMETER Experiment Name: At_Drought_Soil_Dry_P Parameter: Organism Value: A. thaliana
  misc_feature: MA Experiment 20001554 PARAMETER Experiment Name: At_Drought_Soil_Dry_P Parameter: Plant Line Value: WS
  misc_feature: MA Experiment 20001554 PARAMETER Experiment Name: At_Drought_Soil_Dry_P Parameter: Post Timepoint (hr) Value: None
  misc_feature: MA Experiment 20001554 PARAMETER Experiment Name: At_Drought_Soil_Dry_P Parameter: Post-Treatment Value: None
  misc_feature: MA Experiment 20001554 PARAMETER Experiment Name: At_Drought_Soil_Dry_P Parameter: Timepoint (day) Value: 7
  misc_feature: MA Experiment 20001554 PARAMETER Experiment Name: At_Drought_Soil_Dry_P Parameter: Treatment Value: Drought vs. No Drought
  misc_feature: MA Experiment ID: 20001555 Result: Up-regulated in Transcription
  misc_feature: MA Experiment 20001555 PARAMETER Experiment Name: At_Drought_Soil_Dry_P Parameter: Age (day) Value: 24
  misc_feature: MA Experiment 20001555 PARAMETER Experiment Name: At_Drought_Soil_Dry_P Parameter: Organism Value: A. thaliana
  misc_feature: MA Experiment 20001555 PARAMETER Experiment Name: At_Drought_Soil_Dry_P Parameter: Plant Line Value: WS
  misc_feature: MA Experiment 20001555 PARAMETER Experiment Name: At_Drought_Soil_Dry_P Parameter: Post Timepoint (hr) Value: None
  misc_feature: MA Experiment 20001555 PARAMETER Experiment Name: At_Drought_Soil_Dry_P Parameter: Post-Treatment Value: None
  misc_feature: MA Experiment 20001555 PARAMETER Experiment Name: At_Drought_Soil_Dry_P Parameter: Timepoint (day) Value: 10
  misc_feature: MA Experiment 20001555 PARAMETER Experiment Name: At_Drought_Soil_Dry_P Parameter: Treatment Value: Drought vs. No Drought
  misc_feature: MA Experiment ID: 20001556 Result: Up-regulated in Transcription
  misc_feature: MA Experiment 20001556 PARAMETER Experiment Name: At_Drought_Soil_Dry_P Parameter: Age (day) Value: 26
  misc_feature: MA Experiment 20001556 PARAMETER Experiment Name: At_Drought_Soil_Dry_P Parameter: Organism Value: A. thaliana
  misc_feature: MA Experiment 20001556 PARAMETER Experiment Name: At_Drought_Soil_Dry_P Parameter: Plant Line Value: WS
  misc_feature: MA Experiment 20001556 PARAMETER Experiment Name: At_Drought_Soil_Dry_P Parameter: Post Timepoint (hr) Value: None
  misc_feature: MA Experiment 20001556 PARAMETER Experiment Name: At_Drought_Soil_Dry_P Parameter: Post-Treatment Value: None
  misc_feature: MA Experiment 20001556 PARAMETER Experiment Name: At_Drought_Soil_Dry_P Parameter: Timepoint (day) Value: 12
  misc_feature: MA Experiment 20001556 PARAMETER Experiment Name: At_Drought_Soil_Dry_P Parameter: Treatment Value: Drought vs. No Drought
accagaagaagagccacacactcacaaattaaaaagagagagagagagagagagacagagagagagagagattctgcggaggagcttcttcttcgtagggtgttcatcgttattaacgttatcgcccctacgtcagctccatctccagaaacatgggtgcaggtggaagaatgccggttcctacttcttccaagaaatcggaaaccgacaccacaaagcgtgtgccgtgcgagaaaccgcctttctcggtgggagatctgaagaaagcaatcccgccgcattgtttcaaacgctcaatccctcgctctttctcctaccttatcagtgacatcattatagcctcatgcttctactacgtcgccaccaattacttctctctcctccctcagcctctctcttacttggcttggccactctattgggcctgtcaaggctgtgtcctaactggtatctgggtcatagcccacgaatgcggtcaccacgcattcagcgactaccaatggctggatgacacagttggtcttatcttccattccttcctcctcgtcccttacttctcctggaagtatagtcatcgccgtcaccattccaacactggatccctcgaaagagatgaagtatttgtcccaaagcagaaatcagcaatcaagtggtacgggaaatacctcaacaaccctcttggacgcatcatgatgttaaccgtccagtttgtcctcgggtggcccttgtacttagcctttaacgtctctggcagaccgtatgacgggttcgcttgccatttcttccccaacgctcccatctacaatgaccgagaacgcctccagatatacctctctgatgcgggtattctagccgtctgttttggtctttaccgttacgctgctgcacaagggatggcctcgatgatctgcctctacggagtaccgcttctgatagtgaatgcgttcctcgtcttgatcacttacttgcagcacactcatccctcgttgcctcactacgattcatcagagtgggactggctcaggggagctttggctaccgtagacagagactacggaatcttgaacaaggtgttccacaacattacagacacacacgtggctcatcacctgttctcgacaatgccgcattataacgcaatggaagctacaaaggcgataaagccaattctgggagactattaccagttcgatggaacaccgtggtatgtagcgatgtatagggaggcaaaggagtgtatctatgtagaaccggacagggaaggtgacaagaaaggtgtgtactggtacaacaataagttatgaggatgatggtgaagaaattgtcgacctttctcttgtctgtttgtcttttgttaaagaagctatgcttcgttttaataatcttattgtccattttgttgtgttatgacattttggctgctcattatgttatgtgggaagttagtgttc

SEQ ID NO: 39928 - protein, 383 aa, Arabidopsis thaliana
  peptide (1)..(383): Ceres Seq. ID no. 12370300
  misc_feature (89)..(340): Pfam Name: Fatty acid desaturase Pfam Description: Fatty acid desaturase
  misc_feature (1)..(383): Homolog of NCBI NO: 3417601 NR Description: delta-12 fatty acid desaturase [Borago
  misc_feature (1)..(383): Homolog of NCBI NO: 17225582 NR Description: delta-12 fatty acid desaturase [Gossypium
  misc_feature (1)..(382): Homolog of NCBI NO: 27261181 NR Description: delta 12 oleic acid desaturase FAD2 [Vernicia
  misc_feature (1)..(383): Homolog of NCBI NO: 3452129 NR Description: bifunctional oleate 12-hydroxylase:desaturase
  misc_feature (1)..(383): Homolog of NCBI NO: 8705229 NR Description: delta-12 oleate desaturase [Brassica napus]
  misc_feature (1)..(383): Homolog of NCBI NO: 20520624 NR Description: fatty acid desaturase 2 [Brassica rapa]
  misc_feature (1)..(383): Homolog of NCBI NO: 3334184 NR Description: Omega-6 fatty acid desaturase, endoplasmic
  misc_feature (1)..(383): Homolog of NCBI NO: 4378875 NR Description: delta-12 desaturase [Brassica carinata]
  misc_feature (1)..(383): Homolog of NCBI NO: 21536781 NR Description: omega-6 fatty acid desaturase, endoplasmic
  misc_feature (1)..(383): Homolog of NCBI NO: 15229956 NR Description: omega-6 fatty acid desaturase, endoplasmic
MGAGGRMPVPTSSKKSETDTTKRVPCEKPPFSVGDLKKAIPPHCFKRSIPRSFSYLISDIIIASCFYYVATNYFSLLPQPLSYLAWPLYWACQGCVLTGIWVIAHECGHHAFSDYQWLDDTVGLIFHSFLLVPYFSWKYSHRRHHSNTGSLERDEVFVPKQKSAIKWYGKYLNNPLGRIMMLTVQFVLGWPLYLAFNVSGRPYDGFACHFFPNAPIYNDRERLQIYLSDAGILAVCFGLYRYAAAQGMASMICLYGVPLLIVNAFLVLITYLQHTHPSLPHYDSSEWDWLRGALATVDRDYGILNKVFHNITDTHVAHHLFSTMPHYNAMEATKAIKPILGDYYQFDGTPWYVAMYREAKECIYVEPDREGDKKGVYWYNNKL

SEQ ID NO: 39929 - protein, 377 aa, Arabidopsis thaliana
  peptide (1)..(377): Ceres Seq. ID no. 12370301
  misc_feature (83)..(334): Pfam Name: Fatty acid desaturase Pfam Description: Fatty acid desaturase
  misc_feature (1)..(377): Homolog of NCBI NO: 3417601 NR Description: delta-12 fatty acid desaturase [Borago
  misc_feature (1)..(377): Homolog of NCBI NO: 17225582 NR Description: delta-12 fatty acid desaturase [Gossypium
  misc_feature (1)..(376): Homolog of NCBI NO: 27261181 NR Description: delta 12 oleic acid desaturase FAD2 [Vernicia
  misc_feature (1)..(377): Homolog of NCBI NO: 3452129 NR Description: bifunctional oleate 12-hydroxylase:desaturase
  misc_feature (1)..(377): Homolog of NCBI NO: 8705229 NR Description: delta-12 oleate desaturase [Brassica napus]
  misc_feature (1)..(377): Homolog of NCBI NO: 20520624 NR Description: fatty acid desaturase 2 [Brassica rapa]
  misc_feature (1)..(377): Homolog of NCBI NO: 3334184 NR Description: Omega-6 fatty acid desaturase, endoplasmic
  misc_feature (1)..(377): Homolog of NCBI NO: 4378875 NR Description: delta-12 desaturase [Brassica carinata]
  misc_feature (1)..(377): Homolog of NCBI NO: 21536781 NR Description: omega-6 fatty acid desaturase, endoplasmic
  misc_feature (1)..(377): Homolog of NCBI NO: 15229956 NR Description: omega-6 fatty acid desaturase, endoplasmic
MPVPTSSKKSETDTTKRVPCEKPPFSVGDLKKAIPPHCFKRSIPRSFSYLISDIIIASCFYYVATNYFSLLPQPLSYLAWPLYWACQGCVLTGIWVIAHECGHHAFSDYQWLDDTVGLIFHSFLLVPYFSWKYSHRRHHSNTGSLERDEVFVPKQKSAIKWYGKYLNNPLGRIMMLTVQFVLGWPLYLAFNVSGRPYDGFACHFFPNAPIYNDRERLQIYLSDAGILAVCFGLYRYAAAQGMASMICLYGVPLLIVNAFLVLITYLQHTHPSLPHYDSSEWDWLRGALATVDRDYGILNKVFHNITDTHVAHHLFSTMPHYNAMEATKAIKPILGDYYQFDGTPWYVAMYREAKECIYVEPDREGDKKGVYWYNNKL

SEQ ID NO: 39930 - protein, 204 aa, Arabidopsis thaliana
  peptide (1)..(204): Ceres Seq. ID no. 12370302
  misc_feature (1)..(161): Pfam Name: Fatty acid desaturase Pfam Description: Fatty acid desaturase
  misc_feature (1)..(204): Homolog of NCBI NO: 3417601 NR Description: delta-12 fatty acid desaturase [Borago
  misc_feature (1)..(204): Homolog of NCBI NO: 17225582 NR Description: delta-12 fatty acid desaturase [Gossypium
  misc_feature (1)..(203): Homolog of NCBI NO: 27261181 NR Description: delta 12 oleic acid desaturase FAD2 [Vernicia
  misc_feature (1)..(204): Homolog of NCBI NO: 3452129 NR Description: bifunctional oleate 12-hydroxylase:desaturase
  misc_feature (1)..(204): Homolog of NCBI NO: 8705229 NR Description: delta-12 oleate desaturase [Brassica napus]
  misc_feature (1)..(204): Homolog of NCBI NO: 20520624 NR Description: fatty acid desaturase 2 [Brassica rapa]
  misc_feature (1)..(204): Homolog of NCBI NO: 3334184 NR Description: Omega-6 fatty acid desaturase, endoplasmic
  misc_feature (1)..(204): Homolog of NCBI NO: 4378875 NR Description: delta-12 desaturase [Brassica carinata]
  misc_feature (1)..(204): Homolog of NCBI NO: 21536781 NR Description: omega-6 fatty acid desaturase, endoplasmic
  misc_feature (1)..(204): Homolog of NCBI NO: 15229956 NR Description: omega-6 fatty acid desaturase, endoplasmic
MMLTVQFVLGWPLYLAFNVSGRPYDGFACHFFPNAPIYNDRERLQIYLSDAGILAVCFGLYRYAAAQGMASMICLYGVPLLIVNAFLVLITYLQHTHPSLPHYDSSEWDWLRGALATVDRDYGILNKVFHNITDTHVAHHLFSTMPHYNAMEATKAIKPILGDYYQFDGTPWYVAMYREAKECIYVEPDREGDKKGVYWYNNKL

SEQ ID NO: 39931 - DNA, 1905 bp, Arabidopsis thaliana
  misc_feature (1)..(1905): Ceres Seq. ID no. 13580417
  misc_feature: MA Experiment ID: 108434 Result: Down-regulated in Transcription
  misc_feature: MA Experiment 108434 PARAMETER Experiment Name: At_Root_Tips_cDNA_P Parameter: Tissue Value: Root Tips
  misc_feature: MA Experiment ID: 108461 Result: Up-regulated in Transcription
  misc_feature: MA Experiment 108461 PARAMETER Experiment Name: At_Germinating_Seeds_cDNA_P Parameter: Age (day) Value: 1 vs. 0
  misc_feature: MA Experiment 108461 PARAMETER Experiment Name: At_Germinating_Seeds_cDNA_P Parameter: Tissue Value: Germinating Seeds
  misc_feature: MA Experiment ID: 108462 Result: Up-regulated in Transcription
  misc_feature: MA Experiment 108462 PARAMETER Experiment Name: At_Germinating_Seeds_cDNA_P Parameter: Age (day) Value: 2 vs. 0
  misc_feature: MA Experiment 108462 PARAMETER Experiment Name: At_Germinating_Seeds_cDNA_P Parameter: Tissue Value: Germinating Seeds
  misc_feature: MA Experiment ID: 108463 Result: Up-regulated in Transcription
  misc_feature: MA Experiment 108463 PARAMETER Experiment Name: At_Germinating_Seeds_cDNA_P Parameter: Age (day) Value: 3 vs. 0
  misc_feature: MA Experiment 108463 PARAMETER Experiment Name: At_Germinating_Seeds_cDNA_P Parameter: Tissue Value: Germinating Seeds
  misc_feature: MA Experiment ID: 108464 Result: Up-regulated in Transcription
  misc_feature: MA Experiment 108464 PARAMETER Experiment Name: At_Germinating_Seeds_cDNA_P Parameter: Age (day) Value: 4 vs. 0
  misc_feature: MA Experiment 108464 PARAMETER Experiment Name: At_Germinating_Seeds_cDNA_P Parameter: Tissue Value: Germinating Seeds
  misc_feature: MA Experiment ID: 108489 Result: Up-regulated in Transcription
  misc_feature: MA Experiment ID: 20000088 Result: Down-regulated in Transcription
  misc_feature: MA Experiment 20000088 PARAMETER Experiment Name: At_100uM_ABA_Mutants_cDNA_P Parameter: Plant Line Value: Landsberg
  misc_feature: MA Experiment 20000088 PARAMETER Experiment Name: At_100uM_ABA_Mutants_cDNA_P Parameter: Timepoint (hr) Value: 6
  misc_feature: MA Experiment 20000088 PARAMETER Experiment Name: At_100uM_ABA_Mutants_cDNA_P Parameter: Tissue Value: Aerial
  misc_feature: MA Experiment 20000088 PARAMETER Experiment Name: At_100uM_ABA_Mutants_cDNA_P Parameter: Treatment Value: 100uM ABA vs. No Treatment
  misc_feature: MA Experiment ID: 20000185 Result: Up-regulated in Transcription
  misc_feature: MA Experiment 20000185 PARAMETER Experiment Name: At_Roots__P Parameter: Age (day) Value: 7 vs. 21
  misc_feature: MA Experiment 20000185 PARAMETER Experiment Name: At_Roots__P Parameter: Organism Value: A. thaliana
  misc_feature: MA Experiment 20000185 PARAMETER Experiment Name: At_Roots__P Parameter: Tissue Value: Roots vs. Whole Plant
aaaccaaaacacaattaagctaaaaaaaaaaccaaaggatgtctcagaaactcatgttcttgttcacccttgcctgcctctcctcgttaccatctccttttatctccgcccaaataccggccattggaaatgccacttcaccgtcaaatatatgtagattcgcgccggatccatcttattgtagatcggttcttccaaaccagcccggagatatatattcctacggacgtttgtctctacgaagatccctctccagcccgccggttcatttcgatgatcgacgctgaacttgaccggaaaggcaaagtggctgctaaatccacagtaggggctctcgaagactgcaaattcctagccagcctgactatggactacctccttagtagctcacagacggctgattccaccaaaacactgtcgttatctagggccgaggatgttcatacatttctgagtgctgccatcaccaatgagcagacttgtcttgaaggacttaaatcaacggcgtccgaaaatggtctttccggtgatcttttcaacgatacaaaactctatggggtgtctcttgcccttttctccaaaggttgggtgccaagaaggcaaagatcgagaccgatttggcaaccacaagccaggttcaaaaagttttttggtttccgtaacggtaaattaccgttaaagatgacggaaagggcacgtgccgtttacaacaccgtgactagaagaaagcttctccaatcggatgcagacgccgttcaggtgagcgacattgtgacggtgatccagaacgggacgggaaacttcacgaccataaacgccgccattgcagctgcaccaaataaaactgacggtagtaacggttacttcttgatctacgtaacggcgggattgtacgaggaatacgtggaagttcccaagaacaagagatatgtgatgatgatcggtgacggcatcaaccagaccgttatcaccggaaacaggagtgtcgttgatggatggacaactttcaattcagccacatttattctatcaggtcccaactttattggtgtaaacataacaatccgcaatacggcaggaccaaccaaaggccaagctgtggcattgaggagtggtggggacttgtctgttttctacagttgtagttttgaagcctatcaagacacgttatacacacattctctcagacagttttatcgtgaatgtgatgtctatggtactgttgattttatatttggtaacgctgcagtggtattacaaaactgtaatttgtatccacgtcaacctcgcaaaggtcaatcgaacgaggttacggctcaaggtcgtactgatccgaaccaaaacactgggacggcaattcatggttgtactataagaccggcagatgatttggctacgagcaactatacagtgaagacttatcttggtcgaccatggaaggaatattctagaaccgttgtcatgcaaacttacatagacgggtttctagaaccgagtggttggaatgcatggtctggtgattttgcattgagcacactttactacgcggaatataataataccggacctggttctgacacgacaaaccgagtcacttggcctggttatcacgtcatcaacgcaactgatgcttccaatttcacggtcaccaatttccttgttggtgaaggttggattggacaaaccggagtgcctttcgtgggtggactgatcgcataatcaaccaaccttatactatatatgatatgttaattagttaaattatttaatcattcatgtgttgtttttttaatcaaataattatttagtggtgcctgattcaatacgatttgtaataactttaacttactattgtacaaccgaatggttttcttcgaaatctaataataatgaacgggtaatcag

SEQ ID NO: 39932 - protein, 529 aa, Arabidopsis thaliana
  peptide (1)..(529): Ceres Seq. ID no. 13580418
  misc_feature (215)..(511): Pfam Name: Pectinesterase Pfam Description: Pectinesterase
  misc_feature (43)..(529): Homolog of NCBI NO: 19424045 NR Description: unknown protein [Arabidopsis thaliana]
  misc_feature (43)..(529): Homolog of NCBI NO: 18411914 NR Description: expressed protein [Arabidopsis thaliana]
  misc_feature (185)..(529): Homolog of NCBI NO: 16604402 NR Description: At2g47550/T30B22.15 [Arabidopsis thaliana]
  misc_feature (185)..(529): Homolog of NCBI NO: 27363394 NR Description: At2g47550/T30B22.15 [Arabidopsis thaliana]
  misc_feature (41)..(168): Homolog of NCBI NO: 18379010 NR Description: pectinesterase family [Arabidopsis thaliana]
  misc_feature (130)..(529): Homolog of NCBI NO: 18379010 NR Description: pectinesterase family [Arabidopsis thaliana]
  misc_feature (1)..(41): Homolog of NCBI NO: 7447370 NR Description: probable pectinesterase (EC 3.1.1.11) T30B22.15 -
  misc_feature (67)..(168): Homolog of NCBI NO: 7447370 NR Description: probable pectinesterase (EC 3.1.1.11) T30B22.15 -
  misc_feature (210)..(529): Homolog of NCBI NO: 7447370 NR Description: probable pectinesterase (EC 3.1.1.11) T30B22.15 -
  misc_feature (27)..(529): Homolog of NCBI NO: 18407388 NR Description: pectinesterase family [Arabidopsis thaliana]
MPLHRQIYVDSRRIHLIVDRFFQTSPEIYIPTDVCLYEDPSPARRFISMIDAELDRKGKVAAKSTVGALEDCKFLASLTMDYLLSSSQTADSTKTLSLSRAEDVHTFLSAAITNEQTCLEGLKSTASENGLSGDLFNDTKLYGVSLALFSKGWVPRRQRSRPIWQPQARFKKFFGFRNGKLPLKMTERARAVYNTVTRRKLLQSDADAVQVSDIVTVIQNGTGNFTTINAAIAAAPNKTDGSNGYFLIYVTAGLYEEYVEVPKNKRYVMMIGDGINQTVITGNRSVVDGWTTFNSATFILSGPNFIGVNITIRNTAGPTKGQAVALRSGGDLSVFYSCSFEAYQDTLYTHSLRQFYRECDVYGTVDFIFGNAAVVLQNCNLYPRQPRKGQSNEVTAQGRTDPNQNTGTAIHGCTIRPADDLATSNYTVKTYLGRPWKEYSRTVVMQTYIDGFLEPSGWNAWSGDFALSTLYYAEYNNTGPGSDTTNRVTWPGYHVINATDASNFTVTNFLVGEGWIGQTGVPFVGGLIA

SEQ ID NO: 39933 - protein, 481 aa, Arabidopsis thaliana
  peptide (1)..(481): Ceres Seq. ID no. 13580419
  misc_feature (167)..(463): Pfam Name: Pectinesterase Pfam Description: Pectinesterase
  misc_feature (1)..(479): Homolog of NCBI NO: 34894528 NR Description: putative pectinesterase [Oryza sativa (japonica
  misc_feature (1)..(481): Homolog of NCBI NO: 19424045 NR Description: unknown protein [Arabidopsis thaliana]
  misc_feature (1)..(481): Homolog of NCBI NO: 18411914 NR Description: expressed protein [Arabidopsis thaliana]
  misc_feature (137)..(481): Homolog of NCBI NO: 16604402 NR Description: At2g47550/T30B22.15 [Arabidopsis thaliana]
  misc_feature (137)..(481): Homolog of NCBI NO: 27363394 NR Description: At2g47550/T30B22.15 [Arabidopsis thaliana]
  misc_feature (1)..(120): Homolog of NCBI NO: 18379010 NR Description: pectinesterase family [Arabidopsis thaliana]
  misc_feature (82)..(481): Homolog of NCBI NO: 18379010 NR Description: pectinesterase family [Arabidopsis thaliana]
  misc_feature (19)..(120): Homolog of NCBI NO: 7447370 NR Description: probable pectinesterase (EC 3.1.1.11) T30B22.15 -
  misc_feature (162)..(481): Homolog of NCBI NO: 7447370 NR Description: probable pectinesterase (EC 3.1.1.11) T30B22.15 -
  misc_feature (1)..(481): Homolog of NCBI NO: 18407388 NR Description: pectinesterase family [Arabidopsis thaliana]
MIDAELDRKGKVAAKSTVGALEDCKFLASLTMDYLLSSSQTADSTKTLSLSRAEDVHTFLSAAITNEQTCLEGLKSTASENGLSGDLFNDTKLYGVSLALFSKGWVPRRQRSRPIWQPQARFKKFFGFRNGKLPLKMTERARAVYNTVTRRKLLQSDADAVQVSDIVTVIQNGTGNFTTINAAIAAAPNKTDGSNGYFLIYVTAGLYEEYVEVPKNKRYVMMIGDGINQTVITGNRSVVDGWTTFNSATFILSGPNFIGVNITIRNTAGPTKGQAVALRSGGDLSVFYSCSFEAYQDTLYTHSLRQFYRECDVYGTVDFIFGNAAVVLQNCNLYPRQPRKGQSNEVTAQGRTDPNQNTGTAIHGCTIRPADDLATSNYTVKTYLGRPWKEYSRTVVMQTYIDGFLEPSGWNAWSGDFALSTLYYAEYNNTGPGSDTTNRVTWPGYHVINATDASNFTVTNFLVGEGWIGQTGVPFVGGLIA

SEQ ID NO: 39934 - protein, 450 aa, Arabidopsis thaliana
  peptide (1)..(450): Ceres Seq. ID no. 13580420
  misc_feature (136)..(432): Pfam Name: Pectinesterase Pfam Description: Pectinesterase
  misc_feature (1)..(448): Homolog of NCBI NO: 34894528 NR Description: putative pectinesterase [Oryza sativa (japonica
  misc_feature (1)..(450): Homolog of NCBI NO: 19424045 NR Description: unknown protein [Arabidopsis thaliana]
  misc_feature (1)..(450): Homolog of NCBI NO: 18411914 NR Description: expressed protein [Arabidopsis thaliana]
  misc_feature (106)..(450): Homolog of NCBI NO: 16604402 NR Description: At2g47550/T30B22.15 [Arabidopsis thaliana]
  misc_feature (106)..(450): Homolog of NCBI NO: 27363394 NR Description: At2g47550/T30B22.15 [Arabidopsis thaliana]
  misc_feature (1)..(89): Homolog of NCBI NO: 18379010 NR Description: pectinesterase family [Arabidopsis thaliana]
  misc_feature (51)..(450): Homolog of NCBI NO: 18379010 NR Description: pectinesterase family [Arabidopsis thaliana]
  misc_feature (1)..(89): Homolog of NCBI NO: 7447370 NR Description: probable pectinesterase (EC 3.1.1.11) T30B22.15 -
  misc_feature (131)..(450): Homolog of NCBI NO: 7447370 NR Description: probable pectinesterase (EC 3.1.1.11) T30B22.15 -
  misc_feature (1)..(450): Homolog of NCBI NO: 18407388 NR Description: pectinesterase family [Arabidopsis thaliana]
MDYLLSSSQTADSTKTLSLSRAEDVHTFLSAAITNEQTCLEGLKSTASENGLSGDLFNDTKLYGVSLALFSKGWVPRRQRSRPIWQPQARFKKFFGFRNGKLPLKMTERARAVYNTVTRRKLLQSDADAVQVSDIVTVIQNGTGNFTTINAAIAAAPNKTDGSNGYFLIYVTAGLYEEYVEVPKNKRYVMMIGDGINQTVITGNRSVVDGWTTFNSATFILSGPNFIGVNITIRNTAGPTKGQAVALRSGGDLSVFYSCSFEAYQDTLYTHSLRQFYRECDVYGTVDFIFGNAAVVLQNCNLYPRQPRKGQSNEVTAQGRTDPNQNTGTAIHGCTIRPADDLATSNYTVKTYLGRPWKEYSRTVVMQTYIDGFLEPSGWNAWSGDFALSTLYYAEYNNTGPGSDTTNRVTWPGYHVINATDASNFTVTNFLVGEGWIGQTGVPFVGGLIA

SEQ ID NO: 39935 - DNA, 1236 bp, Arabidopsis thaliana
  misc_feature (1)..(1236): Ceres Seq. ID no. 12328274
  misc_feature: MA Experiment ID: 108435 Result: Down-regulated in Transcription
  misc_feature: MA Experiment 108435 PARAMETER Experiment Name: At_stm_Mutants_cDNA_P Parameter: Plant Line Value: wt Landsburg vs stm
  misc_feature: MA Experiment 108435 PARAMETER Experiment Name: At_stm_Mutants_cDNA_P Parameter: Tissue Value: Shoot Apical Meristem Region
  misc_feature: MA Experiment ID: 108462 Result: Up-regulated in Transcription
  misc_feature: MA Experiment 108462 PARAMETER Experiment Name: At_Germinating_Seeds_cDNA_P Parameter: Age (day) Value: 2 vs. 0
  misc_feature: MA Experiment 108462 PARAMETER Experiment Name: At_Germinating_Seeds_cDNA_P Parameter: Tissue Value: Germinating Seeds
  misc_feature: MA Experiment ID: 108464 Result: Up-regulated in Transcription
  misc_feature: MA Experiment 108464 PARAMETER Experiment Name: At_Germinating_Seeds_cDNA_P Parameter: Age (day) Value: 4 vs. 0
  misc_feature: MA Experiment 108464 PARAMETER Experiment Name: At_Germinating_Seeds_cDNA_P Parameter: Tissue Value: Germinating Seeds
  misc_feature: MA Experiment ID: 108561 Result: Down-regulated in Transcription
  misc_feature: MA Experiment 108561 PARAMETER Experiment Name: At_100uM_ABA_cDNA_P Parameter: Timepoint (hr) Value: 6
  misc_feature: MA Experiment 108561 PARAMETER Experiment Name: At_100uM_ABA_cDNA_P Parameter: Tissue Value: Aerial
  misc_feature: MA Experiment 108561 PARAMETER Experiment Name: At_100uM_ABA_cDNA_P Parameter: Treatment Value: 100uM ABA vs. No Treatment
  misc_feature: MA Experiment ID: 108576 Result: Down-regulated in Transcription
  misc_feature: MA Experiment 108576 PARAMETER Experiment Name: At_42deg_Heat_cDNA_P Parameter: Temperature (deg C) Value: 42 vs. 22
  misc_feature: MA Experiment 108576 PARAMETER Experiment Name: At_42deg_Heat_cDNA_P Parameter: Timepoint (hr) Value: 1
  misc_feature: MA Experiment 108576 PARAMETER Experiment Name: At_42deg_Heat_cDNA_P Parameter: Tissue Value: Aerial
  misc_feature: MA Experiment ID: 108595 Result: Down-regulated in Transcription
  misc_feature: MA Experiment 108595 PARAMETER Experiment Name: At_Ler-pi_Ovule_cDNA_P Parameter: Plant Line Value: null
  misc_feature: MA Experiment ID: 108609 Result: Down-regulated in Transcription
  misc_feature: MA Experiment 108609 PARAMETER Experiment Name: At_100uM_ABA_cDNA_P Parameter: Timepoint (hr) Value: 24
  misc_feature: MA Experiment 108609 PARAMETER Experiment Name: At_100uM_ABA_cDNA_P Parameter: Tissue Value: Aerial
  misc_feature: MA Experiment 108609 PARAMETER Experiment Name: At_100uM_ABA_cDNA_P Parameter: Treatment Value: 100uM ABA vs. No Treatment
  misc_feature: MA Experiment ID: 20000070 Result: Down-regulated in Transcription
  misc_feature: MA Experiment 20000070 PARAMETER Experiment Name: At_100uM_ABA_Mutants_cDNA_P Parameter: Plant Line Value: CS24
  misc_feature: MA Experiment 20000070 PARAMETER Experiment Name: At_100uM_ABA_Mutants_cDNA_P Parameter: Timepoint (hr) Value: 6
  misc_feature: MA Experiment 20000070 PARAMETER Experiment Name: At_100uM_ABA_Mutants_cDNA_P Parameter: Tissue Value: Aerial
  misc_feature: MA Experiment 20000070 PARAMETER Experiment Name: At_100uM_ABA_Mutants_cDNA_P Parameter: Treatment Value: 100uM ABA vs. No Treatment
  misc_feature: MA Experiment ID: 20000144 Result: Down-regulated in Transcription
  misc_feature: MA Experiment 20000144 PARAMETER Experiment Name: At_42deg_Heat_cDNA_P Parameter: Temperature (deg C) Value: 42 vs. 22
  misc_feature: MA Experiment 20000144 PARAMETER Experiment Name: At_42deg_Heat_cDNA_P Parameter: Timepoint (hr) Value: 1
  misc_feature: MA Experiment 20000144 PARAMETER Experiment Name: At_42deg_Heat_cDNA_P Parameter: Tissue Value: Aerial
  misc_feature: MA Experiment ID: 20000171 Result: Down-regulated in Transcription
  misc_feature: MA Experiment 20000171 PARAMETER Experiment Name: At_42deg_Heat_P Parameter: Age (day) Value: 14
  misc_feature: MA Experiment 20000171 PARAMETER Experiment Name: At_42deg_Heat_P Parameter: Organism Value: A. thaliana
  misc_feature: MA Experiment 20000171 PARAMETER Experiment Name: At_42deg_Heat_P Parameter: Plant Line Value: WS
  misc_feature: MA Experiment 20000171 PARAMETER Experiment Name: At_42deg_Heat_P Parameter: Temperature (deg C) Value: 42 vs. 22
  misc_feature: MA Experiment 20000171 PARAMETER Experiment Name: At_42deg_Heat_P Parameter: Timepoint (hr) Value: 1
  misc_feature: MA Experiment 20000171 PARAMETER Experiment Name: At_42deg_Heat_P Parameter: Tissue Value: Aerial
  misc_feature: MA Experiment ID: 20000173 Result: Down-regulated in Transcription
  misc_feature: MA Experiment 20000173 PARAMETER Experiment Name: At_42deg_Heat_P Parameter: Age (day) Value: 14
  misc_feature: MA Experiment 20000173 PARAMETER Experiment Name: At_42deg_Heat_P Parameter: Organism Value: A. thaliana
  misc_feature: MA Experiment 20000173 PARAMETER Experiment Name: At_42deg_Heat_P Parameter: Plant Line Value: WS
  misc_feature: MA Experiment 20000173 PARAMETER Experiment Name: At_42deg_Heat_P Parameter: Temperature (deg C) Value: 42 vs. 22
  misc_feature: MA Experiment 20000173 PARAMETER Experiment Name: At_42deg_Heat_P Parameter: Timepoint (hr) Value: 6
  misc_feature: MA Experiment 20000173 PARAMETER Experiment Name: At_42deg_Heat_P Parameter: Tissue Value: Aerial
  misc_feature: MA Experiment ID: 20000184 Result: Up-regulated in Transcription
  misc_feature: MA Experiment 20000184 PARAMETER Experiment Name: At_Shoots__P Parameter: Age (day) Value: 7
  misc_feature: MA Experiment 20000184 PARAMETER Experiment Name: At_Shoots__P Parameter: Tissue Value: Shoots vs. Whole Plant
  misc_feature: MA Experiment ID: 20000234 Result: Up-regulated in Transcription
  misc_feature: MA Experiment 20000234 PARAMETER Experiment Name: At_Siliques_P Parameter: Age (day) Value: 21
  misc_feature: MA Experiment 20000234 PARAMETER Experiment Name: At_Siliques_P Parameter: Organism Value: A. thaliana
  misc_feature: MA Experiment 20000234 PARAMETER Experiment Name: At_Siliques_P Parameter: Plant Line Value: WS
  misc_feature: MA Experiment 20000234 PARAMETER Experiment Name: At_Siliques_P Parameter: Tissue Value: Less Than 5mm Siliques vs. Whole Plant
  misc_feature: MA Experiment ID: 20000437 Result: Down-regulated in Transcription
  misc_feature: MA Experiment 20000437 PARAMETER Experiment Name: At_Drought_P Parameter: Age (day) Value: 8
  misc_feature: MA Experiment 20000437 PARAMETER Experiment Name: At_Drought_P Parameter: Organism Value: A. thaliana
  misc_feature: MA Experiment 20000437 PARAMETER Experiment Name: At_Drought_P Parameter: Plant Line Value: WS
  misc_feature: MA Experiment 20000437 PARAMETER Experiment Name: At_Drought_P Parameter: Timepoint (hr) Value: 24
  misc_feature: MA Experiment 20000437 PARAMETER Experiment Name: At_Drought_P Parameter: Tissue Value: Whole Plant
  misc_feature: MA Experiment 20000437 PARAMETER Experiment Name: At_Drought_P Parameter: Treatment Value: Drought vs. No Drought
  misc_feature: MA Experiment ID: 20000438 Result: Up-regulated in Transcription
  misc_feature: MA Experiment 20000438 PARAMETER Experiment Name: At_Shoots__P Parameter: Age (day) Value: 14
  misc_feature: MA Experiment 20000438 PARAMETER Experiment Name: At_Shoots__P Parameter: Tissue Value: Shoots vs. Whole Plant
  misc_feature: MA Experiment ID: 20001560 Result: Up-regulated in Transcription
  misc_feature: MA Experiment 20001560 PARAMETER Experiment Name: At_Drought_Soil_Dry_P Parameter: Age (day) Value: 28
  misc_feature: MA Experiment 20001560 PARAMETER Experiment Name: At_Drought_Soil_Dry_P Parameter: Organism Value: A. thaliana
  misc_feature: MA Experiment 20001560 PARAMETER Experiment Name: At_Drought_Soil_Dry_P Parameter: Plant Line Value: WS
  misc_feature: MA Experiment 20001560 PARAMETER Experiment Name: At_Drought_Soil_Dry_P Parameter: Post Timepoint (hr) Value: None
  misc_feature: MA Experiment 20001560 PARAMETER Experiment Name: At_Drought_Soil_Dry_P Parameter: Post-Treatment Value: None
  misc_feature: MA Experiment 20001560 PARAMETER Experiment Name: At_Drought_Soil_Dry_P Parameter: Timepoint (day) Value: 14
  misc_feature: MA Experiment 20001560 PARAMETER Experiment Name: At_Drought_Soil_Dry_P Parameter: Treatment Value: Drought vs. No Drought
aattgtaatttttgtcacagtcattaaacaaaacgcttttatgacgatatcaacggttatagcattcatgtccatgttcctagtatttgttatgtctggtccgatagtggtggagggacgtgcttttttcgtgttcggtgactcgctcgtcgacagtggcaacaacaactatctggtgacaactgcacgtgccgactctccaccgtatggaatcgattttccaactcggagaccaaccggccggttttccaacggtcttaacattccagatcttatcagtgaggcaatcggtaacgaagagccaccgttaccttaccttagtccagagctaaggggccggagtcttcttaacggtgctaatttcgcctccgctggtatcggaattctcaatgataccggatttcaattcatcaacattataagaatgtaccaacagctcgattacttccaacaataccaacaacgtgtgagtcgcttgattgggaaaccgcaaactcagcggctcgtgagtcaagcgcttgtattaatcacggtcggtggaaatgattttgtgaacaactatttcttgtttccatattccgctagatcacgccaattcactctaccggattacgtccgactcctaatttctgaatacaaaaaaatactattgaggttaaattcacttggagtgggtcgagttctagtgacaggagctggaccactatgatgtgcaccggccgaactggcgagatcaggcacgtcgaatggaagatgctcggccgagctacaacgagctgcatctctatatgatcctcagctacttcaaatgataaatgaacttaacaaaaaaattgggagaaatgtgtttattgctgctaacactaaccaaatgcaagaggattttctaagcactccacgaagatatggatttgtaacatcgaaggttgcttgttgcggacaagggccgtacaatgggatgggtttgtgtacggttctatcaaacttgtgtccgaaccgtgagttatacgtcttttgggatgcgtttcatccgactgagaaagcatccgcatgatagtccgacatatcttgaccggtaccaccaagtatatgaaccccatgaaccttagctctgctcttgccctatgagccacacacgttgaagtgggaaactcggttttgtttatttcactcgcaagatatatgtatcgactaccgagtacaagagtatgaaataagataactcagtctcaattt

SEQ ID NO: 39936 - protein, 235 aa, Arabidopsis thaliana
  peptide (1)..(235): Ceres Seq. ID no. 12328275
  misc_feature (42)..(235): Pfam Name: GDSL-like Lipase/Acylhydrolase Pfam Description: GDSL-like Lipase/Acylhydrolase
  misc_feature (16)..(235): Homolog of NCBI NO: 15224005 NR Description: putative GDSL-motif lipase/acylhydrolase; protein
  misc_feature (41)..(235): Homolog of NCBI NO: 15227849 NR Description: putative GDSL-motif lipase/hydrolase
  misc_feature (34)..(202): Homolog of NCBI NO: 37789825 NR Description: putative GDSL-motif lipase [Vitis vinifera]
  misc_feature (38)..(235): Homolog of NCBI NO: 22758315 NR Description: putative early nodulin gene (Enod) related
  misc_feature (20)..(235): Homolog of NCBI NO: 37535146 NR Description: putative early nodulin gene (Enod) related
  misc_feature (40)..(235): Homolog of NCBI NO: 28071322 NR Description: P0705A05.30 [Oryza sativa (japonica
  misc_feature (14)..(235): Homolog of NCBI NO: 15242808 NR Description: putative protein
  misc_feature (16)..(235): Homolog of NCBI NO: 15235421 NR Description: Proline-rich APG - like protein
  misc_feature (23)..(235): Homolog of NCBI NO: 15229265 NR Description: putative GDSL-motif lipase/acylhydrolase
  misc_feature (14)..(235): Homolog of NCBI NO: 15238814 NR Description: putative protein; protein id: At5g18430.1
IVIFVTVIKQNAFMTISTVIAFMSMFLVFVMSGPIVVEGRAFFVFGDSLVDSGNNNYLVTTARADSPPYGIDFPTRRPTGRFSNGLNIPDLISEAIGNEEPPLPYLSPELRGRSLLNGANFASAGIGILNDTGFQFINIIRMYQQLDYFQQYQQRVSRLIGKPQTQRLVSQALVLITVGGNDFVNNYFLFPYSARSRQFTLPDYVRLLISEYKKILLRLNSLGVGRVLVTGAGPL

SEQ ID NO: 39937 - protein, 222 aa, Arabidopsis thaliana
  peptide (1)..(222): Ceres Seq. ID no. 12328276
  misc_feature (29)..(222): Pfam Name: GDSL-like Lipase/Acylhydrolase Pfam Description: GDSL-like Lipase/Acylhydrolase
  misc_feature (3)..(222): Homolog of NCBI NO: 15224005 NR Description: putative GDSL-motif lipase/acylhydrolase; protein
  misc_feature (28)..(222): Homolog of NCBI NO: 15227849 NR Description: putative GDSL-motif lipase/hydrolase
  misc_feature (21)..(189): Homolog of NCBI NO: 37789825 NR Description: putative GDSL-motif lipase [Vitis vinifera]
  misc_feature (25)..(222): Homolog of NCBI NO: 22758315 NR Description: putative early nodulin gene (Enod) related
  misc_feature (7)..(222): Homolog of NCBI NO: 37535146 NR Description: putative early nodulin gene (Enod) related
  misc_feature (27)..(222): Homolog of NCBI NO: 28071322 NR Description: P0705A05.30 [Oryza sativa (japonica
  misc_feature (1)..(222): Homolog of NCBI NO: 15242808 NR Description: putative protein
  misc_feature (3)..(222): Homolog of NCBI NO: 15235421 NR Description: Proline-rich APG - like protein
  misc_feature (10)..(222): Homolog of NCBI NO: 15229265 NR Description: putative GDSL-motif lipase/acylhydrolase
  misc_feature (1)..(222): Homolog of NCBI NO: 15238814 NR Description: putative protein; protein id: At5g18430.1
MTISTVIAFMSMFLVFVMSGPIVVEGRAFFVFGDSLVDSGNNNYLVTTARADSPPYGIDFPTRRPTGRFSNGLNIPDLISEAIGNEEPPLPYLSPELRGRSLLNGANFASAGIGILNDTGFQFINIIRMYQQLDYFQQYQQRVSRLIGKPQTQRLVSQALVLITVGGNDFVNNYFLFPYSARSRQFTLPDYVRLLISEYKKILLRLNSLGVGRVLVTGAGPL

SEQ ID NO: 39938 - protein, 213 aa, Arabidopsis thaliana
  peptide (1)..(213): Ceres Seq. ID no. 12328277
  misc_feature (20)..(213): Pfam Name: GDSL-like Lipase/Acylhydrolase Pfam Description: GDSL-like Lipase/Acylhydrolase
  misc_feature (1)..(213): Homolog of NCBI NO: 15224005 NR Description: putative GDSL-motif lipase/acylhydrolase; protein
  misc_feature (19)..(213): Homolog of NCBI NO: 15227849 NR Description: putative GDSL-motif lipase/hydrolase
  misc_feature (12)..(180): Homolog of NCBI NO: 37789825 NR Description: putative GDSL-motif lipase [Vitis vinifera]
  misc_feature (16)..(213): Homolog of NCBI NO: 22758315 NR Description: putative early nodulin gene (Enod) related
  misc_feature (1)..(213): Homolog of NCBI NO: 37535146 NR Description: putative early nodulin gene (Enod) related
  misc_feature (18)..(213): Homolog of NCBI NO: 28071322 NR Description: P0705A05.30 [Oryza sativa (japonica
  misc_feature (1)..(213): Homolog of NCBI NO: 15242808 NR Description: putative protein
  misc_feature (1)..(213): Homolog of NCBI NO: 15235421 NR Description: Proline-rich APG - like protein
  misc_feature (1)..(213): Homolog of NCBI NO: 15229265 NR Description: putative GDSL-motif lipase/acylhydrolase
  misc_feature (1)..(213): Homolog of NCBI NO: 15238814 NR Description: putative protein; protein id: At5g18430.1
MSMFLVFVMSGPIVVEGRAFFVFGDSLVDSGNNNYLVTTARADSPPYGIDFPTRRPTGRFSNGLNIPDLISEAIGNEEPPLPYLSPELRGRSLLNGANFASAGIGILNDTGFQFINIIRMYQQLDYFQQYQQRVSRLIGKPQTQRLVSQALVLITVGGNDFVNNYFLFPYSARSRQFTLPDYVRLLISEYKKILLRLNSLGVGRVLVTGAGPL

SEQ ID NO: 39939 - DNA, 2758 bp, Arabidopsis thaliana; identical to SEQ ID NO: 36164
  misc_feature (1)..(2758): Ceres Seq. ID no. 13497291
  misc_feature: MA Experiment ID: 108434 Result: Up-regulated in Transcription
  misc_feature: MA Experiment 108434 PARAMETER Experiment Name: At_Root_Tips_cDNA_P Parameter: Tissue Value: Root Tips
  misc_feature: MA Experiment ID: 108462 Result: Down-regulated in Transcription
  misc_feature: MA Experiment 108462 PARAMETER Experiment Name: At_Germinating_Seeds_cDNA_P Parameter: Age (day) Value: 2 vs. 0
  misc_feature: MA Experiment 108462 PARAMETER Experiment Name: At_Germinating_Seeds_cDNA_P Parameter: Tissue Value: Germinating Seeds
  misc_feature: MA Experiment ID: 108463 Result: Down-regulated in Transcription
  misc_feature: MA Experiment 108463 PARAMETER Experiment Name: At_Germinating_Seeds_cDNA_P Parameter: Age (day) Value: 3 vs. 0
  misc_feature: MA Experiment 108463 PARAMETER Experiment Name: At_Germinating_Seeds_cDNA_P Parameter: Tissue Value: Germinating Seeds
  misc_feature: MA Experiment ID: 108595 Result: Down-regulated in Transcription
  misc_feature: MA Experiment 108595 PARAMETER Experiment Name: At_Ler-pi_Ovule_cDNA_P Parameter: Plant Line Value: null
  misc_feature: MA Experiment ID: 20000087 Result: Down-regulated in Transcription
  misc_feature: MA Experiment 20000087 PARAMETER Experiment Name: At_100uM_ABA_Mutants_cDNA_P Parameter: Plant Line Value: WS
  misc_feature: MA Experiment 20000087 PARAMETER Experiment Name: At_100uM_ABA_Mutants_cDNA_P Parameter: Timepoint (hr) Value: 6
  misc_feature: MA Experiment 20000087 PARAMETER Experiment Name: At_100uM_ABA_Mutants_cDNA_P Parameter: Tissue Value: Aerial
  misc_feature: MA Experiment 20000087 PARAMETER Experiment Name: At_100uM_ABA_Mutants_cDNA_P Parameter: Treatment Value: 100uM ABA vs. No Treatment
  misc_feature: MA Experiment ID: 20000117 Result: Down-regulated in Transcription
  misc_feature: MA Experiment 20000117 PARAMETER Experiment Name: At_100uM_ABA_Mutants_cDNA_P Parameter: Plant Line Value: Columbia
  misc_feature: MA Experiment 20000117 PARAMETER Experiment Name: At_100uM_ABA_Mutants_cDNA_P Parameter: Timepoint (hr) Value: 6
  misc_feature: MA Experiment 20000117 PARAMETER Experiment Name: At_100uM_ABA_Mutants_cDNA_P Parameter: Tissue Value: Aerial
  misc_feature: MA Experiment 20000117 PARAMETER Experiment Name: At_100uM_ABA_Mutants_cDNA_P Parameter: Treatment Value: 100uM ABA vs. No Treatment

SEQ ID NO: 39940 - protein, 421 aa, Arabidopsis thaliana; identical to SEQ ID NO: 36165
  peptide (1)..(421): Ceres Seq. ID no. 13497292
  misc_feature (40)..(284): Pfam Name: Ribosomal protein L4/L1 family Pfam Description: Ribosomal protein L4/L1 family
  misc_feature (40)..(284): Pfam Name: Ribosomal protein L4/L1 family Pfam Description: Ribosomal protein L4/L1 family
  misc_feature (20)..(386): Homolog of NCBI NO: 1350686 NR Description: 60S RIBOSOMAL PROTEIN L4 (L1)
  misc_feature (64)..(421): Homolog of NCBI NO: 6441068 NR Description: 60S ribosomal protein L4 [Chlamydomonas sp. HS-5]
  misc_feature (18)..(421): Homolog of NCBI NO: 34897236 NR Description: putative 60S ribosomal protein L1
  misc_feature (115)..(421): Homolog of NCBI NO: 13605831 NR Description: AT5g02870/F9G14_180 [Arabidopsis thaliana]
  misc_feature (22)..(421): Homolog of NCBI NO: 34393487 NR Description: putative 60S ribosomal protein L4/L1
  misc_feature (20)..(386): Homolog of NCBI NO: 1350686 NR Description: 60S RIBOSOMAL PROTEIN L4 (L1)
  misc_feature (18)..(421): Homolog of NCBI NO: 34897236 NR Description: putative 60S ribosomal protein L1
  misc_feature (22)..(421): Homolog of NCBI NO: 34393487 NR Description: putative 60S ribosomal protein L4/L1
  misc_feature (15)..(421): Homolog of NCBI NO: 15242558 NR Description: 60S ribosomal protein L4/L1 (RPL4D) [Arabidopsis
  misc_feature (15)..(421): Homolog of NCBI NO: 26450328 NR Description: putative 60S ribosomal protein [Arabidopsis
  misc_feature (16)..(421): Homolog of NCBI NO: 15232723 NR Description: 60S ribosomal protein L4/L1 (RPL4A) [Arabidopsis
  misc_feature (16)..(421): Homolog of NCBI NO: 21593543 NR Description: 60S ribosomal protein L4-B (L1) [Arabidopsis
  misc_feature (17)..(421): Homolog of NCBI NO: 17367847 NR Description: 60S ribosomal protein L4 (L1)
  misc_feature (115)..(421): Homolog of NCBI NO: 13605831 NR Description: AT5g02870/F9G14_180 [Arabidopsis thaliana]
  misc_feature (64)..(421): Homolog of NCBI NO: 6441068 NR Description: 60S ribosomal protein L4 [Chlamydomonas sp. HS-5]
  misc_feature (17)..(421): Homolog of NCBI NO: 17367847 NR Description: 60S ribosomal protein L4 (L1)
  misc_feature (16)..(421): Homolog of NCBI NO: 21593543 NR Description: 60S ribosomal protein L4-B (L1) [Arabidopsis
  misc_feature (16)..(421): Homolog of NCBI NO: 15232723 NR Description: 60S ribosomal protein L4/L1 (RPL4A) [Arabidopsis
  misc_feature (15)..(421): Homolog of NCBI NO: 26450328 NR Description: putative 60S ribosomal protein [Arabidopsis
  misc_feature (15)..(421): Homolog of NCBI NO: 15242558 NR Description: 60S ribosomal protein L4/L1 (RPL4D) [Arabidopsis

SEQ ID NO: 39941 - protein, 407 aa, Arabidopsis thaliana; identical to SEQ ID NO: 36166
  peptide (1)..(407): Ceres Seq. ID no. 13497293
  misc_feature (26)..(270): Pfam Name: Ribosomal protein L4/L1 family Pfam Description: Ribosomal protein L4/L1 family
  misc_feature (26)..(270): Pfam Name: Ribosomal protein L4/L1 family Pfam Description: Ribosomal protein L4/L1 family
  misc_feature (6)..(372): Homolog of NCBI NO: 1350686 NR Description: 60S RIBOSOMAL PROTEIN L4 (L1)
  misc_feature (50)..(407): Homolog of NCBI NO: 6441068 NR Description: 60S ribosomal protein L4 [Chlamydomonas sp. HS-5]
  misc_feature (4)..(407): Homolog of NCBI NO: 34897236 NR Description: putative 60S ribosomal protein L1
  misc_feature (101)..(407): Homolog of NCBI NO: 13605831 NR Description: AT5g02870/F9G14_180 [Arabidopsis thaliana]
  misc_feature (8)..(407): Homolog of NCBI NO: 34393487 NR Description: putative 60S ribosomal protein L4/L1
  misc_feature (6)..(372): Homolog of NCBI NO: 1350686 NR Description: 60S RIBOSOMAL PROTEIN L4 (L1)
  misc_feature (4)..(407): Homolog of NCBI NO: 34897236 NR Description: putative 60S ribosomal protein L1
  misc_feature (8)..(407): Homolog of NCBI NO: 34393487 NR Description: putative 60S ribosomal protein L4/L1
  misc_feature (1)..(407): Homolog of NCBI NO: 15242558 NR Description: 60S ribosomal protein L4/L1 (RPL4D) [Arabidopsis
  misc_feature (1)..(407): Homolog of NCBI NO: 26450328 NR Description: putative 60S ribosomal protein [Arabidopsis
  misc_feature (2)..(407): Homolog of NCBI NO: 15232723 NR Description: 60S ribosomal protein L4/L1 (RPL4A) [Arabidopsis
  misc_feature (2)..(407): Homolog of NCBI NO: 21593543 NR Description: 60S ribosomal protein L4-B (L1) [Arabidopsis
  misc_feature (3)..(407): Homolog of NCBI NO: 17367847 NR Description: 60S ribosomal protein L4 (L1)
  misc_feature (101)..(407): Homolog of NCBI NO: 13605831 NR Description: AT5g02870/F9G14_180 [Arabidopsis thaliana]
  misc_feature (50)..(407): Homolog of NCBI NO: 6441068 NR Description: 60S ribosomal protein L4 [Chlamydomonas sp. HS-5]
  misc_feature (3)..(407): Homolog of NCBI NO: 17367847 NR Description: 60S ribosomal protein L4 (L1)
  misc_feature (2)..(407): Homolog of NCBI NO: 21593543 NR Description: 60S ribosomal protein L4-B (L1) [Arabidopsis
  misc_feature (2)..(407): Homolog of NCBI NO: 15232723 NR Description: 60S ribosomal protein L4/L1 (RPL4A) [Arabidopsis
  misc_feature (1)..(407): Homolog of NCBI NO: 26450328 NR Description: putative 60S ribosomal protein [Arabidopsis
  misc_feature (1)..(407): Homolog of NCBI NO: 15242558 NR Description: 60S ribosomal protein L4/L1 (RPL4D) [Arabidopsis

SEQ ID NO: 39942 - protein, 388 aa, Arabidopsis thaliana; identical to SEQ ID NO: 36167
  peptide (1)..(388): Ceres Seq. ID no. 13497294
  misc_feature (7)..(251): Pfam Name: Ribosomal protein L4/L1 family Pfam Description: Ribosomal protein L4/L1 family
  misc_feature (7)..(251): Pfam Name: Ribosomal protein L4/L1 family Pfam Description: Ribosomal protein L4/L1 family
  misc_feature (1)..(353): Homolog of NCBI NO: 1350686 NR Description: 60S RIBOSOMAL PROTEIN L4 (L1)
  misc_feature (31)..(388): Homolog of NCBI NO: 6441068 NR Description: 60S ribosomal protein L4 [Chlamydomonas sp. HS-5]
  misc_feature (1)..(388): Homolog of NCBI NO: 34897236 NR Description: putative 60S ribosomal protein L1
  misc_feature (82)..(388): Homolog of NCBI NO: 13605831 NR Description: AT5g02870/F9G14_180 [Arabidopsis thaliana]
  misc_feature (1)..(388): Homolog of NCBI NO: 34393487 NR Description: putative 60S ribosomal protein L4/L1
  misc_feature (1)..(353): Homolog of NCBI NO: 1350686 NR Description: 60S RIBOSOMAL PROTEIN L4 (L1)
  misc_feature (1)..(388): Homolog of NCBI NO: 34897236 NR Description: putative 60S ribosomal protein L1
  misc_feature (1)..(388): Homolog of NCBI NO: 34393487 NR Description: putative 60S ribosomal protein L4/L1
  misc_feature (1)..(388): Homolog of NCBI NO: 15242558 NR Description: 60S ribosomal protein L4/L1 (RPL4D) [Arabidopsis
  misc_feature (1)..(388): Homolog of NCBI NO: 26450328 NR Description: putative 60S ribosomal protein [Arabidopsis
  misc_feature (1)..(388): Homolog of NCBI NO: 15232723 NR Description: 60S ribosomal protein L4/L1 (RPL4A) [Arabidopsis
  misc_feature (1)..(388): Homolog of NCBI NO: 21593543 NR Description: 60S ribosomal protein L4-B (L1) [Arabidopsis
  misc_feature (1)..(388): Homolog of NCBI NO: 17367847 NR Description: 60S ribosomal protein L4 (L1)
  misc_feature (82)..(388): Homolog of NCBI NO: 13605831 NR Description: AT5g02870/F9G14_180 [Arabidopsis thaliana]
  misc_feature (31)..(388): Homolog of NCBI NO: 6441068 NR Description: 60S ribosomal protein L4 [Chlamydomonas sp. HS-5]
  misc_feature (1)..(388): Homolog of NCBI NO: 17367847 NR Description: 60S ribosomal protein L4 (L1)
  misc_feature (1)..(388): Homolog of NCBI NO: 21593543 NR Description: 60S ribosomal protein L4-B (L1) [Arabidopsis
  misc_feature (1)..(388): Homolog of NCBI NO: 15232723 NR Description: 60S ribosomal protein L4/L1 (RPL4A) [Arabidopsis
  misc_feature (1)..(388): Homolog of NCBI NO: 26450328 NR Description: putative 60S ribosomal protein [Arabidopsis
  misc_feature (1)..(388): Homolog of NCBI NO: 15242558 NR Description: 60S ribosomal protein L4/L1 (RPL4D) [Arabidopsis

SEQ ID NO: 39943 - DNA, 1257 bp, Arabidopsis thaliana
  misc_feature (1)..(1257): Ceres Seq. ID no. 12337370
  misc_feature: MA Experiment ID: 108595 Result: Up-regulated in Transcription
  misc_feature: MA Experiment 108595 PARAMETER Experiment Name: At_Ler-pi_Ovule_cDNA_P Parameter: Plant Line Value: null
  misc_feature: MA Experiment ID: 20000234 Result: Up-regulated in Transcription
  misc_feature: MA Experiment 20000234 PARAMETER Experiment Name: At_Siliques_P Parameter: Age (day) Value: 21
  misc_feature: MA Experiment 20000234 PARAMETER Experiment Name: At_Siliques_P Parameter: Organism Value: A. thaliana
  misc_feature: MA Experiment 20000234 PARAMETER Experiment Name: At_Siliques_P Parameter: Plant Line Value: WS
  misc_feature: MA Experiment 20000234 PARAMETER Experiment Name: At_Siliques_P Parameter: Tissue Value: Less Than 5mm Siliques vs. Whole Plant
  misc_feature: MA Experiment ID: 20000264 Result: Up-regulated in Transcription
  misc_feature: MA Experiment 20000264 PARAMETER Experiment Name: At_Open_Flower_P Parameter: Age (day) Value: 21
  misc_feature: MA Experiment 20000264 PARAMETER Experiment Name: At_Open_Flower_P Parameter: Plant Line Value: WS
  misc_feature: MA Experiment 20000264 PARAMETER Experiment Name: At_Open_Flower_P Parameter: Tissue Value: Open Flower vs. Whole Plant
  misc_feature: MA Experiment ID: 20000437 Result: Down-regulated in Transcription
  misc_feature: MA Experiment 20000437 PARAMETER Experiment Name: At_Drought_P Parameter: Age (day) Value: 8
  misc_feature: MA Experiment 20000437 PARAMETER Experiment Name: At_Drought_P Parameter: Organism Value: A. thaliana
  misc_feature: MA Experiment 20000437 PARAMETER Experiment Name: At_Drought_P Parameter: Plant Line Value: WS
  misc_feature: MA Experiment 20000437 PARAMETER Experiment Name: At_Drought_P Parameter: Timepoint (hr) Value: 24
  misc_feature: MA Experiment 20000437 PARAMETER Experiment Name: At_Drought_P Parameter: Tissue Value: Whole Plant
  misc_feature: MA Experiment 20000437 PARAMETER Experiment Name: At_Drought_P Parameter: Treatment Value: Drought vs. No Drought
  misc_feature: MA Experiment ID: 20000495 Result: Up-regulated in Transcription
  misc_feature: MA Experiment 20000495 PARAMETER Experiment Name: At_Guard_Cells_P Parameter: Harvest Date Value: 8/2/2002
  misc_feature: MA Experiment 20000495 PARAMETER Experiment Name: At_Guard_Cells_P Parameter: Organism Value: A. thaliana
  misc_feature: MA Experiment 20000495 PARAMETER Experiment Name: At_Guard_Cells_P Parameter: Tissue Value: Guard Cells vs. Leaves
  misc_feature: MA Experiment ID: 20001450 Result: Down-regulated in Transcription
  misc_feature: MA Experiment 20001450 PARAMETER Experiment Name: At_Far-red-induction_P Parameter: Age (day) Value: 7
  misc_feature: MA Experiment 20001450 PARAMETER Experiment Name: At_Far-red-induction_P Parameter: Light Value: Far-red vs. White
  misc_feature: MA Experiment 20001450 PARAMETER Experiment Name: At_Far-red-induction_P Parameter: Organism Value: A. thaliana
  misc_feature: MA Experiment 20001450 PARAMETER Experiment Name: At_Far-red-induction_P Parameter: Plant Line Value: Columbia
  misc_feature: MA Experiment 20001450 PARAMETER Experiment Name: At_Far-red-induction_P Parameter: Timepoint (hr) Value: 8
  misc_feature: MA Experiment 20001450 PARAMETER Experiment Name: At_Far-red-induction_P Parameter: Tissue Value: Whole Plant
  misc_feature: MA Experiment ID: 20001560 Result: Up-regulated in Transcription
  misc_feature: MA Experiment 20001560 PARAMETER Experiment Name: At_Drought_Soil_Dry_P Parameter: Age (day) Value: 28
  misc_feature: MA Experiment 20001560 PARAMETER Experiment Name: At_Drought_Soil_Dry_P Parameter: Organism Value: A. thaliana
  misc_feature: MA Experiment 20001560 PARAMETER Experiment Name: At_Drought_Soil_Dry_P Parameter: Plant Line Value: WS
  misc_feature: MA Experiment 20001560 PARAMETER Experiment Name: At_Drought_Soil_Dry_P Parameter: Post Timepoint (hr) Value: None
  misc_feature: MA Experiment 20001560 PARAMETER Experiment Name: At_Drought_Soil_Dry_P Parameter: Post-Treatment Value: None
  misc_feature: MA Experiment 20001560 PARAMETER Experiment Name: At_Drought_Soil_Dry_P Parameter: Timepoint (day) Value: 14
  misc_feature: MA Experiment 20001560 PARAMETER Experiment Name: At_Drought_Soil_Dry_P Parameter: Treatment Value: Drought vs. No Drought
  misc_feature: MA Experiment ID: 20001911 Result: Down-regulated in Transcription
  misc_feature: MA Experiment 20001911 PARAMETER Experiment Name: At_Drought_Reproduction_P Parameter: Age (day) Value: 40
  misc_feature: MA Experiment 20001911 PARAMETER Experiment Name: At_Drought_Reproduction_P Parameter: Organism Value: A. thaliana
  misc_feature: MA Experiment 20001911 PARAMETER Experiment Name: At_Drought_Reproduction_P Parameter: Plant Line Value: WS
  misc_feature: MA Experiment 20001911 PARAMETER Experiment Name: At_Drought_Reproduction_P Parameter: Timepoint (day) Value: 10
  misc_feature: MA Experiment 20001911 PARAMETER Experiment Name: At_Drought_Reproduction_P Parameter: Tissue Value: Flowers
  misc_feature: MA Experiment 20001911 PARAMETER Experiment Name: At_Drought_Reproduction_P Parameter: Treatment Value: Drought vs. No Drought
acaatcacttgtctgattctctcatataatagagttttctttctattctcctctgcttaatttcccagaaattactctttctgtgcttatcggattcaatagattcttagtaaatcgtaatggagacaccatcatcgacaagaagagtcacgagatctcagacccgctgtgctatcaataatctcttatcctcaaagaaagcggatgattggtcagataaatgtcaatcgaagtcggtacaaagaaacggtgcaaaagacaggtctgcgttgtttgacataaccaacgactcaccgatcgtaggtctggcgatgcagacaccgtcctcaggagttgttgggaagaggaacatgagcagaatcaataacactcctggatctggtgaggctctcttgagaggccaagtcaagactctcttgcagaaggttgaggaagaagcagatctcaccaagatttcgttggaatctcgtcctttcatccatctcgttacttctcccatgggtcttctcgccccaactccggccaacaccccccaagttcttggtttctcagacgaagtgcaggttgtgatcacttctccggtagttgcaggacaattcagagcaccgtctcaggtggtggaaagcaacatgtttgatgagaaagaagaaagcttggagttagagaagagcccgagcattactcggtcattgcttctggactttagtgataaatcagaattatgggagagctcagactgctcatctgtggtgactcaaaacccagaggatgataactcgtcggtgtggtcgatgcaggccaatgcaagtgccaaagacgaagagtatgatgatgaagaggaagaagcctattcttacggtgaggaatatgatgaggaatactacgacgaggaagaggaggaagaagagggagggattgtggatgggttgtgtgagggaattaggaagatgagcgtagagactgactttgcagggaaacacactagatttgtgtatgacagtgaagatgaagagattgtggaggccaaagatcaatctccaggagtgttgcgtttgaaaggctttcctacaccgacaggaaaacatgtcagatttgccggtgatgaatgagttcagtttgaatctttcttcttggagttgtgacaaaaagcctcatatgtctcgacttttttttttttttttcttgttgttgaagattcacaaatctgattcttgttattaccttgttgttatttttcaataactaaaagtgtaatcg

SEQ ID NO: 39944 - protein, 329 aa, Arabidopsis thaliana; identical to SEQ ID NO: 39350
  peptide (1)..(329): Ceres Seq. ID no. 12337371
  misc_feature (1)..(328): Homolog of NCBI NO: 37537140 NR Description: putative proline and glutamic acid rich nuclear
  misc_feature (274)..(329): Homolog of NCBI NO: 15230432 NR Description: hypothetical protein; protein id: At3g51230.1
  misc_feature (1)..(182): Homolog of NCBI NO: 15230432 NR Description: hypothetical protein; protein id: At3g51230.1
  misc_feature (1)..(329): Homolog of NCBI NO: 15239303 NR Description: putative protein; protein id: At5g66230.1

SEQ ID NO: 39945 - protein, 265 aa, Arabidopsis thaliana; identical to SEQ ID NO: 39351
  peptide (1)..(265): Ceres Seq. ID no. 12337372
  misc_feature (1)..(264): Homolog of NCBI NO: 37537140 NR Description: putative proline and glutamic acid rich nuclear
  misc_feature (210)..(265): Homolog of NCBI NO: 15230432 NR Description: hypothetical protein; protein id: At3g51230.1
  misc_feature (1)..(118): Homolog of NCBI NO: 15230432 NR Description: hypothetical protein; protein id: At3g51230.1
  misc_feature (1)..(265): Homolog of NCBI NO: 15239303 NR Description: putative protein; protein id: At5g66230.1

SEQ ID NO: 39946 - protein, 252 aa, Arabidopsis thaliana; identical to SEQ ID NO: 39352
  peptide (1)..(252): Ceres Seq. ID no. 12337373
  misc_feature (1)..(251): Homolog of NCBI NO: 37537140 NR Description: putative proline and glutamic acid rich nuclear
  misc_feature (197)..(252): Homolog of NCBI NO: 15230432 NR Description: hypothetical protein; protein id: At3g51230.1
  misc_feature (1)..(105): Homolog of NCBI NO: 15230432 NR Description: hypothetical protein; protein id: At3g51230.1
  misc_feature (1)..(252): Homolog of NCBI NO: 15239303 NR Description: putative protein; protein id: At5g66230.1

SEQ ID NO: 39947 - DNA, 1387 bp, Arabidopsis thaliana
  misc_feature (1)..(1387): Ceres Seq. ID no. 13575410
  misc_feature: MA Experiment ID: 108595 Result: Down-regulated in Transcription
  misc_feature: MA Experiment 108595 PARAMETER Experiment Name: At_Ler-pi_Ovule_cDNA_P Parameter: Plant Line Value: null
  misc_feature: MA Experiment ID: 20000179 Result: Up-regulated in Transcription
  misc_feature: MA Experiment 20000179 PARAMETER Experiment Name: At_Germinating_Seeds_P Parameter: Age (hr) Value: 6 vs. 0
  misc_feature: MA Experiment 20000179 PARAMETER Experiment Name: At_Germinating_Seeds_P Parameter: Tissue Value: Germinating Seeds
  misc_feature: MA Experiment ID: 20000265 Result: Up-regulated in Transcription
  misc_feature: MA Experiment 20000265 PARAMETER Experiment Name: At_Open_Flower_P Parameter: Age (day) Value: 21
  misc_feature: MA Experiment 20000265 PARAMETER Experiment Name: At_Open_Flower_P Parameter: Plant Line Value: WS
  misc_feature: MA Experiment 20000265 PARAMETER Experiment Name: At_Open_Flower_P Parameter: Tissue Value: Closed Flower vs. Whole Plant
  misc_feature: MA Experiment ID: 20000495 Result: Up-regulated in Transcription
  misc_feature: MA Experiment 20000495 PARAMETER Experiment Name: At_Guard_Cells_P Parameter: Harvest Date Value: 8/2/2002
  misc_feature: MA Experiment 20000495 PARAMETER Experiment Name: At_Guard_Cells_P Parameter: Organism Value: A. thaliana
  misc_feature: MA Experiment 20000495 PARAMETER Experiment Name: At_Guard_Cells_P Parameter: Tissue Value: Guard Cells vs. Leaves
ggaggagacgaaaccgagagaaacaatgggagacgctgcgatccgtaccgtcgtcgaagccattcactcatctccgacgcaggccgtcgtctatctttgcggcggtgcctctctggctttaggttggttgatgtcggttcctggagcgtcgaacacgcttctcgagtccgtggttccttattcgagagtatctatggttcaattactcggcagggttccgagccaacactgtagccaagcattggccaaggagatggccttgttagcctacaatcgggcgcttaagctctctaaaccaggatatccggttctcggtgtcgggtttacgggatcattggtaacttctcgtcctaagcgtggagatcacaggttctttttgtctatgagagcatccgaccggattttggaatcttcagtcactctaactaagaacttacggagccgagaagaagaagataaggtgtcaagctgtgcactgatccaggctatggccaaggcatgccaagtttctgggacacttgactctggcttgaccgagtctgaggtgccttatgagtctgaaacccactttactgaagaacaagaactagagcagcttataaatgggcacttgtgctgtaagatttatccattttctggggaagcacacgggtctgatgaagacagaaagattatactacctggctcttttaacccattacatgaaggtcatctcaagctgttagaagttgctatgagtgtttgtgggggcggctacccatgttttgaaatatccgcaataaatgccgacaaaccaccgcttacaattgcacagattaaagatcgtgtcaagcaatttgaagtagttggaaagacgataatagtttcaaatcagccatacttctacaagaaagctgaactcttcccaggaagcagttttgtaattggcgctgacactgcagcgaggcttgtcaatccaaagtactatgaaggaagcatcaaaaggatgttggagatacttggtgattgcaaacggacaggttgcactttccttgttggtggccgcaatgtagatggtgtatttaaggttcttgaagatgttgatattccagaggaaataatcgacatgtttatttcaattccagcagatatattccggatggatatatcctctacagagataagaaaaaaacaagggggtggtacgaactaatgacttctcaacccgcttgaaagtcttggctcgcaagacaatttatttagtgcagttactttttgatttgatatgtattgtgttgcattctgttcttattatggaatccggatcaatggtatgagcatttgcacatgacatcgaaagagcattgcagagttgcatgggaaacgtttaaagagtgcgaatatttgc

SEQ ID NO: 39948 - protein, 396 aa, Arabidopsis thaliana
  peptide (1)..(396): Ceres Seq. ID no. 13575411
  misc_feature (9)..(161): Homolog of NCBI NO: 25371182 NR Description: hypothetical protein At2g01220 [imported] -
  misc_feature (319)..(392): Homolog of NCBI NO: 34911372 NR Description: P0034C09.17 [Oryza sativa (japonica
  misc_feature (14)..(104): Homolog of NCBI NO: 34911372 NR Description: P0034C09.17 [Oryza sativa (japonica
  misc_feature (159)..(279): Homolog of NCBI NO: 34911372 NR Description: P0034C09.17 [Oryza sativa (japonica
  misc_feature (9)..(393): Homolog of NCBI NO: 9294466 NR Description: gb|AAD14522.1~gene_id:MGF10.2~similar to unknown
  misc_feature (9)..(393): Homolog of NCBI NO: 15232221 NR Description: expressed protein [Arabidopsis thaliana]
  misc_feature (9)..(396): Homolog of NCBI NO: 21537099 NR Description: unknown [Arabidopsis thaliana]
  misc_feature (9)..(396): Homolog of NCBI NO: 30677890 NR Description: expressed protein [Arabidopsis thaliana]
  misc_feature (9)..(396): Homolog of NCBI NO: 26451899 NR Description: unknown protein [Arabidopsis thaliana]
  misc_feature (9)..(396): Homolog of NCBI NO: 30677893 NR Description: expressed protein [Arabidopsis thaliana]
  misc_feature (9)..(161): Homolog of NCBI NO: 25371182 NR Description: hypothetical protein At2g01220 [imported] -
  misc_feature (319)..(392): Homolog of NCBI NO: 34911372 NR Description: P0034C09.17 [Oryza sativa (japonica
  misc_feature (14)..(104): Homolog of NCBI NO: 34911372 NR Description: P0034C09.17 [Oryza sativa (japonica
  misc_feature (159)..(279): Homolog of NCBI NO: 34911372 NR Description: P0034C09.17 [Oryza sativa (japonica
  misc_feature (9)..(393): Homolog of NCBI NO: 9294466 NR Description: gb|AAD14522.1~gene_id:MGF10.2~similar to unknown
  misc_feature (9)..(393): Homolog of NCBI NO: 15232221 NR Description: expressed protein [Arabidopsis thaliana]
  misc_feature (9)..(396): Homolog of NCBI NO: 21537099 NR Description: unknown [Arabidopsis thaliana]
  misc_feature (9)..(396): Homolog of NCBI NO: 30677890 NR Description: expressed protein [Arabidopsis thaliana]
  misc_feature (9)..(396): Homolog of NCBI NO: 26451899 NR Description: unknown protein [Arabidopsis thaliana]
  misc_feature (9)..(396): Homolog of NCBI NO: 30677893 NR Description: expressed protein [Arabidopsis thaliana]
EETKPRETMGDAAIRTVVEAIHSSPTQAVVYLCGGASLALGWLMSVPGASNTLLESVVPYSRVSMVQLLGRVPSQHCSQALAKEMALLAYNRALKLSKPGYPVLGVGFTGSLVTSRPKRGDHRFFLSMRASDRILESSVTLTKNLRSREEEDKVSSCALIQAMAKACQVSGTLDSGLTESEVPYESETHFTEEQELEQLINGHLCCKIYPFSGEAHGSDEDRKIILPGSFNPLHEGHLKLLEVAMSVCGGGYPCFEISAINADKPPLTIAQIKDRVKQFEVVGKTIIVSNQPYFYKKAELFPGSSFVIGADTAARLVNPKYYEGSIKRMLEILGDCKRTGCTFLVGGRNVDGVFKVLEDVDIPEEIIDMFISIPADIFRMDISSTEIRKKQGGGTN

SEQ ID NO: 39949 - protein, 388 aa, Arabidopsis thaliana
  peptide (1)..(388): Ceres Seq. ID no. 13575412
  misc_feature (1)..(153): Homolog of NCBI NO: 25371182 NR Description: hypothetical protein At2g01220 [imported] -
  misc_feature (311)..(384): Homolog of NCBI NO: 34911372 NR Description: P0034C09.17 [Oryza sativa (japonica
  misc_feature (6)..(96): Homolog of NCBI NO: 34911372 NR Description: P0034C09.17 [Oryza sativa (japonica
  misc_feature (151)..(271): Homolog of NCBI NO: 34911372 NR Description: P0034C09.17 [Oryza sativa (japonica
  misc_feature (1)..(385): Homolog of NCBI NO: 9294466 NR Description: gb|AAD14522.1~gene_id:MGF10.2~similar to unknown
  misc_feature (1)..(385): Homolog of NCBI NO: 15232221 NR Description: expressed protein [Arabidopsis thaliana]
  misc_feature (1)..(388): Homolog of NCBI NO: 21537099 NR Description: unknown [Arabidopsis thaliana]
  misc_feature (1)..(388): Homolog of NCBI NO: 30677890 NR Description: expressed protein [Arabidopsis thaliana]
  misc_feature (1)..(388): Homolog of NCBI NO: 26451899 NR Description: unknown protein [Arabidopsis thaliana]
  misc_feature (1)..(388): Homolog of NCBI NO: 30677893 NR Description: expressed protein [Arabidopsis thaliana]
  misc_feature (1)..(153): Homolog of NCBI NO: 25371182 NR Description: hypothetical protein At2g01220 [imported] -
  misc_feature (311)..(384): Homolog of NCBI NO: 34911372 NR Description: P0034C09.17 [Oryza sativa (japonica
  misc_feature (6)..(96): Homolog of NCBI NO: 34911372 NR Description: P0034C09.17 [Oryza sativa (japonica
  misc_feature (151)..(271): Homolog of NCBI NO: 34911372 NR Description: P0034C09.17 [Oryza sativa (japonica
  misc_feature (1)..(385): Homolog of NCBI NO: 9294466 NR Description: gb|AAD14522.1~gene_id:MGF10.2~similar to unknown
  misc_feature (1)..(385): Homolog of NCBI NO: 15232221 NR Description: expressed protein [Arabidopsis thaliana]
  misc_feature (1)..(388): Homolog of NCBI NO: 21537099 NR Description: unknown [Arabidopsis thaliana]
  misc_feature (1)..(388): Homolog of NCBI NO: 30677890 NR Description: expressed protein [Arabidopsis thaliana]
  misc_feature (1)..(388): Homolog of NCBI NO: 26451899 NR Description: unknown protein [Arabidopsis thaliana]
  misc_feature (1)..(388): Homolog of NCBI NO: 30677893 NR Description: expressed protein [Arabidopsis thaliana]
MGDAAIRTVVEAIHSSPTQAVVYLCGGASLALGWLMSVPGASNTLLESVVPYSRVSMVQLLGRVPSQHCSQALAKEMALLAYNRALKLSKPGYPVLGVGFTGSLVTSRPKRGDHRFFLSMRASDRILESSVTLTKNLRSREEEDKVSSCALIQAMAKACQVSGTLDSGLTESEVPYESETHFTEEQELEQLINGHLCCKIYPFSGEAHGSDEDRKIILPGSFNPLHEGHLKLLEVAMSVCGGGYPCFEISAINADKPPLTIAQIKDRVKQFEVVGKTIIVSNQPYFYKKAELFPGSSFVIGADTAARLVNPKYYEGSIKRMLEILGDCKRTGCTFLVGGRNVDGVFKVLEDVDIPEEIIDMFISIPADIFRMDISSTEIRKKQGGGTN

SEQ ID NO: 39950 - protein, 353 aa, Arabidopsis thaliana
  peptide (1)..(353): Ceres Seq. ID no. 13575413
  misc_feature (1)..(118): Homolog of NCBI NO: 25371182 NR Description: hypothetical protein At2g01220 [imported] -
  misc_feature (276)..(349): Homolog of NCBI NO: 34911372 NR Description: P0034C09.17 [Oryza sativa (japonica
  misc_feature (1)..(61): Homolog of NCBI NO: 34911372 NR Description: P0034C09.17 [Oryza sativa (japonica
  misc_feature (116)..(236): Homolog of NCBI NO: 34911372 NR Description: P0034C09.17 [Oryza sativa (japonica
  misc_feature (1)..(350): Homolog of NCBI NO: 9294466 NR Description: gb|AAD14522.1~gene_id:MGF10.2~similar to unknown
  misc_feature (1)..(350): Homolog of NCBI NO: 15232221 NR Description: expressed protein [Arabidopsis thaliana]
  misc_feature (1)..(353): Homolog of NCBI NO: 21537099 NR Description: unknown [Arabidopsis thaliana]
  misc_feature (1)..(353): Homolog of NCBI NO: 30677890 NR Description: expressed protein [Arabidopsis thaliana]
  misc_feature (1)..(353): Homolog of NCBI NO: 26451899 NR Description: unknown protein [Arabidopsis thaliana]
  misc_feature (1)..(353): Homolog of NCBI NO: 30677893 NR Description: expressed protein [Arabidopsis thaliana]
  misc_feature (1)..(118): Homolog of NCBI NO: 25371182 NR Description: hypothetical protein At2g01220 [imported] -
  misc_feature (276)..(349): Homolog of NCBI NO: 34911372 NR Description: P0034C09.17 [Oryza sativa (japonica
  misc_feature (1)..(61): Homolog of NCBI NO: 34911372 NR Description: P0034C09.17 [Oryza sativa (japonica
  misc_feature (116)..(236): Homolog of NCBI NO: 34911372 NR Description: P0034C09.17 [Oryza sativa (japonica
  misc_feature (1)..(350): Homolog of NCBI NO: 9294466 NR Description: gb|AAD14522.1~gene_id:MGF10.2~similar to unknown
  misc_feature (1)..(350): Homolog of NCBI NO: 15232221 NR Description: expressed protein [Arabidopsis thaliana]
  misc_feature (1)..(353): Homolog of NCBI NO: 21537099 NR Description: unknown [Arabidopsis thaliana]
  misc_feature (1)..(353): Homolog of NCBI NO: 30677890 NR Description: expressed protein [Arabidopsis thaliana]
  misc_feature (1)..(353): Homolog of NCBI NO: 26451899 NR Description: unknown protein [Arabidopsis thaliana]
  misc_feature (1)..(353): Homolog of NCBI NO: 30677893 NR Description: expressed protein [Arabidopsis thaliana]
MSVPGASNTLLESVVPYSRVSMVQLLGRVPSQHCSQALAKEMALLAYNRALKLSKPGYPVLGVGFTGSLVTSRPKRGDHRFFLSMRASDRILESSVTLTKNLRSREEEDKVSSCALIQAMAKACQVSGTLDSGLTESEVPYESETHFTEEQELEQLINGHLCCKIYPFSGEAHGSDEDRKIILPGSFNPLHEGHLKLLEVAMSVCGGGYPCFEISAINADKPPLTIAQIKDRVKQFEVVGKTIIVSNQPYFYKKAELFPGSSFVIGADTAARLVNPKYYEGSIKRMLEILGDCKRTGCTFLVGGRNVDGVFKVLEDVDIPEEIIDMFISIPADIFRMDISSTEIRKKQGGGTN

SEQ ID NO: 39951 - DNA, 1145 bp, Arabidopsis thaliana
  misc_feature (1)..(1145): Ceres Seq. ID no. 12345029
  misc_feature: MA Experiment ID: 108462 Result: Up-regulated in Transcription
  misc_feature: MA Experiment 108462 PARAMETER Experiment Name: At_Germinating_Seeds_cDNA_P Parameter: Age (day) Value: 2 vs. 0
  misc_feature: MA Experiment 108462 PARAMETER Experiment Name: At_Germinating_Seeds_cDNA_P Parameter: Tissue Value: Germinating Seeds
  misc_feature: MA Experiment ID: 108463 Result: Up-regulated in Transcription
  misc_feature: MA Experiment 108463 PARAMETER Experiment Name: At_Germinating_Seeds_cDNA_P Parameter: Age (day) Value: 3 vs. 0
  misc_feature: MA Experiment 108463 PARAMETER Experiment Name: At_Germinating_Seeds_cDNA_P Parameter: Tissue Value: Germinating Seeds
  misc_feature: MA Experiment ID: 108464 Result: Up-regulated in Transcription
  misc_feature: MA Experiment 108464 PARAMETER Experiment Name: At_Germinating_Seeds_cDNA_P Parameter: Age (day) Value: 4 vs. 0
  misc_feature: MA Experiment 108464 PARAMETER Experiment Name: At_Germinating_Seeds_cDNA_P Parameter: Tissue Value: Germinating Seeds
  misc_feature: MA Experiment ID: 108561 Result: Up-regulated in Transcription
  misc_feature: MA Experiment 108561 PARAMETER Experiment Name: At_100uM_ABA_cDNA_P Parameter: Timepoint (hr) Value: 6
  misc_feature: MA Experiment 108561 PARAMETER Experiment Name: At_100uM_ABA_cDNA_P Parameter: Tissue Value: Aerial
  misc_feature: MA Experiment 108561 PARAMETER Experiment Name: At_100uM_ABA_cDNA_P Parameter: Treatment Value: 100uM ABA vs. No Treatment
  misc_feature: MA Experiment ID: 108572 Result: Up-regulated in Transcription
  misc_feature: MA Experiment 108572 PARAMETER Experiment Name: At_Drought_cDNA_P Parameter: Timepoint (hr) Value: 1
  misc_feature: MA Experiment 108572 PARAMETER Experiment Name: At_Drought_cDNA_P Parameter: Tissue Value: Aerial
  misc_feature: MA Experiment 108572 PARAMETER Experiment Name: At_Drought_cDNA_P Parameter: Treatment Value: Drought vs. No Drought
  misc_feature: MA Experiment ID: 108573 Result: Up-regulated in Transcription
  misc_feature: MA Experiment 108573 PARAMETER Experiment Name: At_Drought_cDNA_P Parameter: Timepoint (hr) Value: 6
  misc_feature: MA Experiment 108573 PARAMETER Experiment Name: At_Drought_cDNA_P Parameter: Tissue Value: Aerial
  misc_feature: MA Experiment 108573 PARAMETER Experiment Name: At_Drought_cDNA_P Parameter: Treatment Value: Drought vs. No Drought
  misc_feature: MA Experiment ID: 108576 Result: Up-regulated in Transcription
  misc_feature: MA Experiment 108576 PARAMETER Experiment Name: At_42deg_Heat_cDNA_P Parameter: Temperature (deg C) Value: 42 vs. 22
  misc_feature: MA Experiment 108576 PARAMETER Experiment Name: At_42deg_Heat_cDNA_P Parameter: Timepoint (hr) Value: 1
  misc_feature: MA Experiment 108576 PARAMETER Experiment Name: At_42deg_Heat_cDNA_P Parameter: Tissue Value: Aerial
  misc_feature: MA Experiment ID: 108577 Result: Up-regulated in Transcription
  misc_feature: MA Experiment 108577 PARAMETER Experiment Name: At_42deg_Heat_cDNA_P Parameter: Temperature (deg C) Value: 42 vs. 22
  misc_feature: MA Experiment 108577 PARAMETER Experiment Name: At_42deg_Heat_cDNA_P Parameter: Timepoint (hr) Value: 6
  misc_feature: MA Experiment 108577 PARAMETER Experiment Name: At_42deg_Heat_cDNA_P Parameter: Tissue Value: Aerial
  misc_feature: MA Experiment ID: 108579 Result: Up-regulated in Transcription
  misc_feature: MA Experiment 108579 PARAMETER Experiment Name: At_4deg_Cold_cDNA_P Parameter: Temperature (deg C) Value: 4 vs. 22
  misc_feature: MA Experiment 108579 PARAMETER Experiment Name: At_4deg_Cold_cDNA_P Parameter: Timepoint (hr) Value: 6
  misc_feature: MA Experiment 108579 PARAMETER Experiment Name: At_4deg_Cold_cDNA_P Parameter: Tissue Value: Aerial
  misc_feature: MA Experiment ID: 108594 Result: Down-regulated in Transcription
  misc_feature: MA Experiment 108594 PARAMETER Experiment Name: At_Ler-rhl_Root_cDNA_P Parameter: Plant Line Value: null
  misc_feature: MA Experiment ID: 108605 Result: Up-regulated in Transcription
  misc_feature: MA Experiment 108605 PARAMETER Experiment Name: At_100uM_ABA_cDNA_P Parameter: Timepoint (hr) Value: 6
  misc_feature: MA Experiment 108605 PARAMETER Experiment Name: At_100uM_ABA_cDNA_P Parameter: Tissue Value: Aerial
  misc_feature: MA Experiment 108605 PARAMETER Experiment Name: At_100uM_ABA_cDNA_P Parameter: Treatment Value: 100uM ABA vs. No Treatment
  misc_feature: MA Experiment ID: 108607 Result: Up-regulated in Transcription
  misc_feature: MA Experiment 108607 PARAMETER Experiment Name: At_100uM_ABA_cDNA_P Parameter: Timepoint (hr) Value: 4
  misc_feature: MA Experiment 108607 PARAMETER Experiment Name: At_100uM_ABA_cDNA_P Parameter: Tissue Value: Aerial
  misc_feature: MA Experiment 108607 PARAMETER Experiment Name: At_100uM_ABA_cDNA_P Parameter: Treatment Value: 100uM ABA vs. No Treatment
  misc_feature: MA Experiment ID: 108609 Result: Up-regulated in Transcription
  misc_feature: MA Experiment 108609 PARAMETER Experiment Name: At_100uM_ABA_cDNA_P Parameter: Timepoint (hr) Value: 24
  misc_feature: MA Experiment 108609 PARAMETER Experiment Name: At_100uM_ABA_cDNA_P Parameter: Tissue Value: Aerial
  misc_feature: MA Experiment 108609 PARAMETER Experiment Name: At_100uM_ABA_cDNA_P Parameter: Treatment Value: 100uM ABA vs. No Treatment
  misc_feature: MA Experiment ID: 108668 Result: Up-regulated in Transcription
  misc_feature: MA Experiment 108668 PARAMETER Experiment Name: At_2mM_SA_cDNA_P Parameter: Plant Line Value: WS
  misc_feature: MA Experiment 108668 PARAMETER Experiment Name: At_2mM_SA_cDNA_P Parameter: Timepoint (hr) Value: 6
  misc_feature: MA Experiment 108668 PARAMETER Experiment Name: At_2mM_SA_cDNA_P Parameter: Treatment Value: 2mM SA vs. No Treatment
  misc_feature: MA Experiment ID: 20000069 Result: Up-regulated in Transcription
  misc_feature: MA Experiment 20000069 PARAMETER Experiment Name: At_100uM_ABA_Mutants_cDNA_P Parameter: Plant Line Value: CS23
  misc_feature: MA Experiment 20000069 PARAMETER Experiment Name: At_100uM_ABA_Mutants_cDNA_P Parameter: Timepoint (hr) Value: 6
  misc_feature: MA Experiment 20000069 PARAMETER Experiment Name: At_100uM_ABA_Mutants_cDNA_P Parameter: Tissue Value: Aerial
  misc_feature: MA Experiment 20000069 PARAMETER Experiment Name: At_100uM_ABA_Mutants_cDNA_P Parameter: Treatment Value: 100uM ABA vs. No Treatment
  misc_feature: MA Experiment ID: 20000070 Result: Up-regulated in Transcription
  misc_feature: MA Experiment 20000070 PARAMETER Experiment Name: At_100uM_ABA_Mutants_cDNA_P Parameter: Plant Line Value: CS24
  misc_feature: MA Experiment 20000070 PARAMETER Experiment Name: At_100uM_ABA_Mutants_cDNA_P Parameter: Timepoint (hr) Value: 6
  misc_feature: MA Experiment 20000070 PARAMETER Experiment Name: At_100uM_ABA_Mutants_cDNA_P Parameter: Tissue Value: Aerial
  misc_feature: MA Experiment 20000070 PARAMETER Experiment Name: At_100uM_ABA_Mutants_cDNA_P Parameter: Treatment Value: 100uM ABA vs. No Treatment
  misc_feature: MA Experiment ID: 20000072 Result: Up-regulated in Transcription
  misc_feature: MA Experiment 20000072 PARAMETER Experiment Name: At_100uM_ABA_Mutants_cDNA_P Parameter: Plant Line Value: CS8105
  misc_feature: MA Experiment 20000072 PARAMETER Experiment Name: At_100uM_ABA_Mutants_cDNA_P Parameter: Timepoint (hr) Value: 6
  misc_feature: MA Experiment 20000072 PARAMETER Experiment Name: At_100uM_ABA_Mutants_cDNA_P Parameter: Tissue Value: Aerial
  misc_feature: MA Experiment 20000072 PARAMETER Experiment Name: At_100uM_ABA_Mutants_cDNA_P Parameter: Treatment Value: 100uM ABA vs. No Treatment
  misc_feature: MA Experiment ID: 20000088 Result: Up-regulated in Transcription
  misc_feature: MA Experiment 20000088 PARAMETER Experiment Name: At_100uM_ABA_Mutants_cDNA_P Parameter: Plant Line Value: Landsberg
  misc_feature: MA Experiment 20000088 PARAMETER Experiment Name: At_100uM_ABA_Mutants_cDNA_P Parameter: Timepoint (hr) Value: 6
  misc_feature: MA Experiment 20000088 PARAMETER Experiment Name: At_100uM_ABA_Mutants_cDNA_P Parameter: Tissue Value: Aerial
  misc_feature: MA Experiment 20000088 PARAMETER Experiment Name: At_100uM_ABA_Mutants_cDNA_P Parameter: Treatment Value: 100uM ABA vs. No Treatment
  misc_feature: MA Experiment ID: 20000093 Result: Up-regulated in Transcription
  misc_feature: MA Experiment 20000093 PARAMETER Experiment Name: At_42deg_Heat_cDNA_P Parameter: Temperature (deg C) Value: 42 vs. 22
  misc_feature: MA Experiment 20000093 PARAMETER Experiment Name: At_42deg_Heat_cDNA_P Parameter: Timepoint (hr) Value: 0.5
  misc_feature: MA Experiment 20000093 PARAMETER Experiment Name: At_42deg_Heat_cDNA_P Parameter: Tissue Value: Aerial
  misc_feature: MA Experiment ID: 20000111 Result: Up-regulated in Transcription
  misc_feature: MA Experiment 20000111 PARAMETER Experiment Name: At_42deg_Heat_cDNA_P Parameter: Temperature (deg C) Value: 42 vs. 22
  misc_feature: MA Experiment 20000111 PARAMETER Experiment Name: At_42deg_Heat_cDNA_P Parameter: Timepoint (hr) Value: 6
  misc_feature: MA Experiment 20000111 PARAMETER Experiment Name: At_42deg_Heat_cDNA_P Parameter: Tissue Value: Aerial
  misc_feature: MA Experiment ID: 20000112 Result: Up-regulated in Transcription
  misc_feature: MA Experiment 20000112 PARAMETER Experiment Name: At_42deg_Heat_cDNA_P Parameter: Temperature (deg C) Value: 42 vs. 22
  misc_feature: MA Experiment 20000112 PARAMETER Experiment Name: At_42deg_Heat_cDNA_P Parameter: Timepoint (hr) Value: 2
  misc_feature: MA Experiment 20000112 PARAMETER Experiment Name: At_42deg_Heat_cDNA_P Parameter: Tissue Value: Aerial
  misc_feature: MA Experiment ID: 20000113 Result: Up-regulated in Transcription
  misc_feature: MA Experiment 20000113 PARAMETER Experiment Name: At_42deg_Heat_cDNA_P Parameter: Temperature (deg C) Value: 42 vs. 22
  misc_feature: MA Experiment 20000113 PARAMETER Experiment Name: At_42deg_Heat_cDNA_P Parameter: Timepoint (hr) Value: 8
  misc_feature: MA Experiment 20000113 PARAMETER Experiment Name: At_42deg_Heat_cDNA_P Parameter: Tissue Value: Aerial
  misc_feature: MA Experiment ID: 20000117 Result: Up-regulated in Transcription
  misc_feature: MA Experiment 20000117 PARAMETER Experiment Name: At_100uM_ABA_Mutants_cDNA_P Parameter: Plant Line Value: Columbia
  misc_feature: MA Experiment 20000117 PARAMETER Experiment Name: At_100uM_ABA_Mutants_cDNA_P Parameter: Timepoint (hr) Value: 6
  misc_feature: MA Experiment 20000117 PARAMETER Experiment Name: At_100uM_ABA_Mutants_cDNA_P Parameter: Tissue Value: Aerial
  misc_feature: MA Experiment 20000117 PARAMETER Experiment Name: At_100uM_ABA_Mutants_cDNA_P Parameter: Treatment Value: 100uM ABA vs. No Treatment
  misc_feature: MA Experiment ID: 20000144 Result: Up-regulated in Transcription
  misc_feature: MA Experiment 20000144 PARAMETER Experiment Name: At_42deg_Heat_cDNA_P Parameter: Temperature (deg C) Value: 42 vs. 22
  misc_feature: MA Experiment 20000144 PARAMETER Experiment Name: At_42deg_Heat_cDNA_P Parameter: Timepoint (hr) Value: 1
  misc_feature: MA Experiment 20000144 PARAMETER Experiment Name: At_42deg_Heat_cDNA_P Parameter: Tissue Value: Aerial
  misc_feature: MA Experiment ID: 20000169 Result: Up-regulated in Transcription
  misc_feature: MA Experiment 20000169 PARAMETER Experiment Name: At_100uM_ABA_P Parameter: Age (day) Value: 14
  misc_feature: MA Experiment 20000169 PARAMETER Experiment Name: At_100uM_ABA_P Parameter: Organism Value: A. thaliana
  misc_feature: MA Experiment 20000169 PARAMETER Experiment Name: At_100uM_ABA_P Parameter: Plant Line Value: WS
  misc_feature: MA Experiment 20000169 PARAMETER Experiment Name: At_100uM_ABA_P Parameter: Timepoint (hr) Value: 6
  misc_feature: MA Experiment 20000169 PARAMETER Experiment Name: At_100uM_ABA_P Parameter: Tissue Value: Aerial
  misc_feature: MA Experiment 20000169 PARAMETER Experiment Name: At_100uM_ABA_P Parameter: Treatment Value: 100uM ABA vs. No Treatment
  misc_feature: MA Experiment ID: 20000171 Result: Up-regulated in Transcription
  misc_feature: MA Experiment 20000171 PARAMETER Experiment Name: At_42deg_Heat_P Parameter: Age (day) Value: 14
  misc_feature: MA Experiment 20000171 PARAMETER Experiment Name: At_42deg_Heat_P Parameter: Organism Value: A. thaliana
  misc_feature: MA Experiment 20000171 PARAMETER Experiment Name: At_42deg_Heat_P Parameter: Plant Line Value: WS
  misc_feature: MA Experiment 20000171 PARAMETER Experiment Name: At_42deg_Heat_P Parameter: Temperature (deg C) Value: 42 vs. 22
  misc_feature: MA Experiment 20000171 PARAMETER Experiment Name: At_42deg_Heat_P Parameter: Timepoint (hr) Value: 1
  misc_feature: MA Experiment 20000171 PARAMETER Experiment Name: At_42deg_Heat_P Parameter: Tissue Value: Aerial
  misc_feature: MA Experiment ID: 20000173 Result: Up-regulated in Transcription
  misc_feature: MA Experiment 20000173 PARAMETER Experiment Name: At_42deg_Heat_P Parameter: Age (day) Value: 14
  misc_feature: MA Experiment 20000173 PARAMETER Experiment Name: At_42deg_Heat_P Parameter: Organism Value: A. thaliana
  misc_feature: MA Experiment 20000173 PARAMETER Experiment Name: At_42deg_Heat_P Parameter: Plant Line Value: WS
  misc_feature: MA Experiment 20000173 PARAMETER Experiment Name: At_42deg_Heat_P Parameter: Temperature (deg C) Value: 42 vs. 22
  misc_feature: MA Experiment 20000173 PARAMETER Experiment Name: At_42deg_Heat_P Parameter: Timepoint (hr) Value: 6
  misc_feature: MA Experiment 20000173 PARAMETER Experiment Name: At_42deg_Heat_P Parameter: Tissue Value: Aerial
  misc_feature: MA Experiment ID: 20000180 Result: Up-regulated in Transcription
  misc_feature: MA Experiment 20000180 PARAMETER Experiment Name: At_Germinating_Seeds_P Parameter: Age (hr) Value: 24 vs. 0
  misc_feature: MA Experiment 20000180 PARAMETER Experiment Name: At_Germinating_Seeds_P Parameter: Tissue Value: Germinating Seeds
  misc_feature: MA Experiment ID: 20000185 Result: Down-regulated in Transcription
  misc_feature: MA Experiment 20000185 PARAMETER Experiment Name: At_Roots__P Parameter: Age (day) Value: 7 vs. 21
  misc_feature: MA Experiment 20000185 PARAMETER Experiment Name: At_Roots__P Parameter: Organism Value: A. thaliana
  misc_feature: MA Experiment 20000185 PARAMETER Experiment Name: At_Roots__P Parameter: Tissue Value: Roots vs. Whole Plant
  misc_feature: MA Experiment ID: 20000234 Result: Down-regulated in Transcription
  misc_feature: MA Experiment 20000234 PARAMETER Experiment Name: At_Siliques_P Parameter: Age (day) Value: 21
  misc_feature: MA Experiment 20000234 PARAMETER Experiment Name: At_Siliques_P Parameter: Organism Value: A. thaliana
  misc_feature: MA Experiment 20000234 PARAMETER Experiment Name: At_Siliques_P Parameter: Plant Line Value: WS
  misc_feature: MA Experiment 20000234 PARAMETER Experiment Name: At_Siliques_P Parameter: Tissue Value: Less Than 5mm Siliques vs. Whole Plant
  misc_feature: MA Experiment ID: 20000235 Result: Down-regulated in Transcription
  misc_feature: MA Experiment 20000235 PARAMETER Experiment Name: At_Siliques_P Parameter: Age (day) Value: 21
  misc_feature: MA Experiment 20000235 PARAMETER Experiment Name: At_Siliques_P Parameter: Organism Value: A. thaliana
  misc_feature: MA Experiment 20000235 PARAMETER Experiment Name: At_Siliques_P Parameter: Plant Line Value: WS
  misc_feature: MA Experiment 20000235 PARAMETER Experiment Name: At_Siliques_P Parameter: Tissue Value: 5-10mm Siliques vs. Whole Plant
  misc_feature: MA Experiment ID: 20000264 Result: Up-regulated in Transcription
  misc_feature: MA Experiment 20000264 PARAMETER Experiment Name: At_Open_Flower_P Parameter: Age (day) Value: 21
  misc_feature: MA Experiment 20000264 PARAMETER Experiment Name: At_Open_Flower_P Parameter: Plant Line Value: WS
  misc_feature: MA Experiment 20000264 PARAMETER Experiment Name: At_Open_Flower_P Parameter: Tissue Value: Open Flower vs. Whole Plant
  misc_feature: MA Experiment ID: 20000268 Result: Up-regulated in Transcription
  misc_feature: MA Experiment 20000268 PARAMETER Experiment Name: At_100mM_NaCl__P Parameter: Age (day) Value: 14
  misc_feature: MA Experiment 20000268 PARAMETER Experiment Name: At_100mM_NaCl__P Parameter: Organism Value: A. thaliana
  misc_feature: MA Experiment 20000268 PARAMETER Experiment Name: At_100mM_NaCl__P Parameter: Plant Line Value: WS
  misc_feature: MA Experiment 20000268 PARAMETER Experiment Name: At_100mM_NaCl__P Parameter: Timepoint (hr) Value: 6
  misc_feature: MA Experiment 20000268 PARAMETER Experiment Name: At_100mM_NaCl__P Parameter: Tissue Value: Whole Plant
  misc_feature: MA Experiment 20000268 PARAMETER Experiment Name: At_100mM_NaCl__P Parameter: Treatment Value: 100mM NaCl vs. No Treatment
  misc_feature: MA Experiment ID: 20000436 Result: Up-regulated in Transcription
  misc_feature: MA Experiment 20000436 PARAMETER Experiment Name: At_Drought_P Parameter: Age (day) Value: 7
  misc_feature: MA Experiment 20000436 PARAMETER Experiment Name: At_Drought_P Parameter: Organism Value: A. thaliana
  misc_feature: MA Experiment 20000436 PARAMETER Experiment Name: At_Drought_P Parameter: Plant Line Value: WS
  misc_feature: MA Experiment 20000436 PARAMETER Experiment Name: At_Drought_P Parameter: Timepoint (hr) Value: 12
  misc_feature: MA Experiment 20000436 PARAMETER Experiment Name: At_Drought_P Parameter: Tissue Value: Whole Plant
  misc_feature: MA Experiment 20000436 PARAMETER Experiment Name: At_Drought_P Parameter: Treatment Value: Drought vs. No Drought
  misc_feature: MA Experiment ID: 20000439 Result: Down-regulated in Transcription
  misc_feature: MA Experiment 20000439 PARAMETER Experiment Name: At_Roots__P Parameter: Age (day) Value: 14 vs. 21
  misc_feature: MA Experiment 20000439 PARAMETER Experiment Name: At_Roots__P Parameter: Organism Value: A. thaliana
  misc_feature: MA Experiment 20000439 PARAMETER Experiment Name: At_Roots__P Parameter: Tissue Value: Roots vs. Whole Plant
  misc_feature: MA Experiment ID: 20000453 Result: Up-regulated in Transcription
  misc_feature: MA Experiment 20000453 PARAMETER Experiment Name: At_100uM_ABA_P Parameter: Age (day) Value: 15
  misc_feature: MA Experiment 20000453 PARAMETER Experiment Name: At_100uM_ABA_P Parameter: Organism Value: A. thaliana
  misc_feature: MA Experiment 20000453 PARAMETER Experiment Name: At_100uM_ABA_P Parameter: Plant Line Value: WS
  misc_feature: MA Experiment 20000453 PARAMETER Experiment Name: At_100uM_ABA_P Parameter: Timepoint (hr) Value: 24
  misc_feature: MA Experiment 20000453 PARAMETER Experiment Name: At_100uM_ABA_P Parameter: Tissue Value: Aerial
  misc_feature: MA Experiment 20000453 PARAMETER Experiment Name: At_100uM_ABA_P Parameter: Treatment Value: 100uM ABA vs. No Treatment
  misc_feature: MA Experiment ID: 20000794 Result: Up-regulated in Transcription
  misc_feature: MA Experiment 20000794 PARAMETER Experiment Name: At_Petals_P Parameter: Age (day) Value: 23-25 days
  misc_feature: MA Experiment 20000794 PARAMETER Experiment Name: At_Petals_P Parameter: Plant Line Value: WS
  misc_feature: MA Experiment 20000794 PARAMETER Experiment Name: At_Petals_P Parameter: Tissue Value: Petals vs. Whole plant
  misc_feature: MA Experiment ID: 20001248 Result: Down-regulated in Transcription
  misc_feature: MA Experiment 20001248 PARAMETER Experiment Name: At_Far-red-induction_P Parameter: Age (day) Value: 7
  misc_feature: MA Experiment 20001248 PARAMETER Experiment Name: At_Far-red-induction_P Parameter: Light Value: Far-red vs. White
  misc_feature: MA Experiment 20001248 PARAMETER Experiment Name: At_Far-red-induction_P Parameter: Organism Value: A. thaliana
  misc_feature: MA Experiment 20001248 PARAMETER Experiment Name: At_Far-red-induction_P Parameter: Plant Line Value: Columbia
  misc_feature: MA Experiment 20001248 PARAMETER Experiment Name: At_Far-red-induction_P Parameter: Timepoint (hr) Value: 4
  misc_feature: MA Experiment 20001248 PARAMETER Experiment Name: At_Far-red-induction_P Parameter: Tissue Value: Whole Plant
  misc_feature: MA Experiment ID: 20001451 Result: Down-regulated in Transcription
  misc_feature: MA Experiment 20001451 PARAMETER Experiment Name: At_Far-red-induction_P Parameter: Age (day) Value: 7
  misc_feature: MA Experiment 20001451 PARAMETER Experiment Name: At_Far-red-induction_P Parameter: Light Value: Far-red vs. White
  misc_feature: MA Experiment 20001451 PARAMETER Experiment Name: At_Far-red-induction_P Parameter: Organism Value: A. thaliana
  misc_feature: MA Experiment 20001451 PARAMETER Experiment Name: At_Far-red-induction_P Parameter: Plant Line Value: Columbia
  misc_feature: MA Experiment 20001451 PARAMETER Experiment Name: At_Far-red-induction_P Parameter: Timepoint (hr) Value: 24
  misc_feature: MA Experiment 20001451 PARAMETER Experiment Name: At_Far-red-induction_P Parameter: Tissue Value: Whole Plant
  misc_feature: MA Experiment ID: 20001555 Result: Up-regulated in Transcription
  misc_feature: MA Experiment 20001555 PARAMETER Experiment Name: At_Drought_Soil_Dry_P Parameter: Age (day) Value: 24
  misc_feature: MA Experiment 20001555 PARAMETER Experiment Name: At_Drought_Soil_Dry_P Parameter: Organism Value: A. thaliana
  misc_feature: MA Experiment 20001555 PARAMETER Experiment Name: At_Drought_Soil_Dry_P Parameter: Plant Line Value: WS
  misc_feature: MA Experiment 20001555 PARAMETER Experiment Name: At_Drought_Soil_Dry_P Parameter: Post Timepoint (hr) Value: None
  misc_feature: MA Experiment 20001555 PARAMETER Experiment Name: At_Drought_Soil_Dry_P Parameter: Post-Treatment Value: None
  misc_feature: MA Experiment 20001555 PARAMETER Experiment Name: At_Drought_Soil_Dry_P Parameter: Timepoint (day) Value: 10
  misc_feature: MA Experiment 20001555 PARAMETER Experiment Name: At_Drought_Soil_Dry_P Parameter: Treatment Value: Drought vs. No Drought
  misc_feature: MA Experiment ID: 20001559 Result: Up-regulated in Transcription
  misc_feature: MA Experiment 20001559 PARAMETER Experiment Name: At_Drought_Soil_Dry_P Parameter: Age (day) Value: 28
  misc_feature: MA Experiment 20001559 PARAMETER Experiment Name: At_Drought_Soil_Dry_P Parameter: Organism Value: A. thaliana
  misc_feature: MA Experiment 20001559 PARAMETER Experiment Name: At_Drought_Soil_Dry_P Parameter: Plant Line Value: WS
  misc_feature: MA Experiment 20001559 PARAMETER Experiment Name: At_Drought_Soil_Dry_P Parameter: Post Timepoint (hr) Value: 29
  misc_feature: MA Experiment 20001559 PARAMETER Experiment Name: At_Drought_Soil_Dry_P Parameter: Post-Treatment Value: Re-Water vs. No Drought
  misc_feature: MA Experiment 20001559 PARAMETER Experiment Name: At_Drought_Soil_Dry_P Parameter: Timepoint (day) Value: 14
  misc_feature: MA Experiment 20001559 PARAMETER Experiment Name: At_Drought_Soil_Dry_P Parameter: Treatment Value: Drought vs. No Drought
  misc_feature: MA Experiment ID: 20001904 Result: Up-regulated in Transcription
  misc_feature: MA Experiment 20001904 PARAMETER Experiment Name: At_Drought_Reproduction_P Parameter: Age (day) Value: 37
  misc_feature: MA Experiment 20001904 PARAMETER Experiment Name: At_Drought_Reproduction_P Parameter: Organism Value: A. thaliana
  misc_feature: MA Experiment 20001904 PARAMETER Experiment Name: At_Drought_Reproduction_P Parameter: Plant Line Value: WS
  misc_feature: MA Experiment 20001904 PARAMETER Experiment Name: At_Drought_Reproduction_P Parameter: Timepoint (day) Value: 7
  misc_feature: MA Experiment 20001904 PARAMETER Experiment Name: At_Drought_Reproduction_P Parameter: Tissue Value: Rosettes
  misc_feature: MA Experiment 20001904 PARAMETER Experiment Name: At_Drought_Reproduction_P Parameter: Treatment Value: Drought vs. No Drought
  misc_feature: MA Experiment ID: 20001905 Result: Up-regulated in Transcription
  misc_feature: MA Experiment 20001905 PARAMETER Experiment Name: At_Drought_Reproduction_P Parameter: Age (day) Value: 40
  misc_feature: MA Experiment 20001905 PARAMETER Experiment Name: At_Drought_Reproduction_P Parameter: Organism Value: A. thaliana
  misc_feature: MA Experiment 20001905 PARAMETER Experiment Name: At_Drought_Reproduction_P Parameter: Plant Line Value: WS
  misc_feature: MA Experiment 20001905 PARAMETER Experiment Name: At_Drought_Reproduction_P Parameter: Timepoint (day) Value: 10
  misc_feature: MA Experiment 20001905 PARAMETER Experiment Name: At_Drought_Reproduction_P Parameter: Tissue Value: Rosettes
  misc_feature: MA Experiment 20001905 PARAMETER Experiment Name: At_Drought_Reproduction_P Parameter: Treatment Value: Drought vs. No Drought
ggggttctctaacaatgtctataaaatcagtacaggtctattcttgttcactagcttcgaaattttagtcgaagaaacaaaaaaaaatggcgacggtacaattgtccacccaatttagctgccaaaccagagtttcaatctcaccgaactctaaatctatctccaagcctccgtttctggtaccggtgacctcaattattcaccgcctgatgatctccaccggaggaatcgctgtttccccccgtagagttttcaaagtccgagccacagatacgggagagataggatcagctctattggcggcggaggaagcaattgaagacgtggaagagacggagcggctaaagagatcgctcgtggattcgttgtacggaacagatcgaggtttaagcgcatcgagcgaaaccagagctgaaatcggagatctaatcacacagctcgagtctaagaaccctactccagctccgacggaagctcttttccttctcaacggcaaatggatcctcgcctacacatcgttcgtgaatttgttcccgttgctatcacgaggaatcgtaccgttaataaaagtcgatgagatctctcaaaccattgattcagataacttcaccgtccagaactctgttcgtttcgctggtcctttaggtacaaactcgattagcaccaacgctaaattcgaaatccgaagccctaaacgcgtccagattaagtttgagcaaggcgtaattgggacgcctcagctaacggattctattgagataccggaatatgtagaggttcttggtcaaaagattgatcttaacccgatcagagggttacttacctcggtgcaagacacagcctcgtctgtggctagaaccatatcaagccaaccaccgttgaaattctttttgccggcggacaatgcgcagtcttggctactcacgacttatctagacaaagacattcggatctctagaggagacggtggaagtgtctttgtgcttatcaaagaaggaagccctctcttgaatccttgaacttggtcaaaatatatgtctctctcttgtcgttgtgttaagtgagacaaatatatagtgtggttgtaggtttacttcttaatcgttgttattaactcgatgataaggaatataatgtttttaacc

SEQ ID NO: 39952 - protein, 310 aa, Arabidopsis thaliana
  peptide (1)..(310): Ceres Seq. ID no. 12345030
  misc_feature (84)..(301): Pfam Name: PAP_fibrillin Pfam Description: PAP_fibrillin
  misc_feature (1)..(310): Homolog of NCBI NO: 3928760 NR Description: homolog to plastid-lipid-associated protein
  misc_feature (74)..(310): Homolog of NCBI NO: 4139097 NR Description: fibrillin [Brassica napus]
  misc_feature (3)..(310): Homolog of NCBI NO: 14248548 NR Description: plastid-lipid associated protein PAP1 [Brassica
  misc_feature (3)..(310): Homolog of NCBI NO: 14248554 NR Description: plastid-lipid associated protein PAP1 [Brassica
  misc_feature (1)..(310): Homolog of NCBI NO: 15233357 NR Description: putative fibrillin
  misc_feature (1)..(310): Homolog of NCBI NO: 14248550 NR Description: plastid-lipid associated protein PAP2 [Brassica
  misc_feature (1)..(310): Homolog of NCBI NO: 14248556 NR Description: plastid-lipid associated protein PAP2 [Brassica
  misc_feature (1)..(310): Homolog of NCBI NO: 21618237 NR Description: fibrillin precursor-like protein [Arabidopsis
  misc_feature (1)..(310): Homolog of NCBI NO: 15235575 NR Description: fibrillin precursor-like protein
  misc_feature (1)..(310): Homolog of NCBI NO: 18377868 NR Description: AT4g22240/T10I14_70 [Arabidopsis thaliana]
MATVQLSTQFSCQTRVSISPNSKSISKPPFLVPVTSIIHRLMISTGGIAVSPRRVFKVRATDTGEIGSALLAAEEAIEDVEETERLKRSLVDSLYGTDRGLSASSETRAEIGDLITQLESKNPTPAPTEALFLLNGKWILAYTSFVNLFPLLSRGIVPLIKVDEISQTIDSDNFTVQNSVRFAGPLGTNSISTNAKFEIRSPKRVQIKFEQGVIGTPQLTDSIEIPEYVEVLGQKIDLNPIRGLLTSVQDTASSVARTISSQPPLKFFLPADNAQSWLLTTYLDKDIRISRGDGGSVFVLIKEGSPLLNP

SEQ ID NO: 39953 - protein, 269 aa, Arabidopsis thaliana
  peptide (1)..(269): Ceres Seq. ID no. 12345031
  misc_feature (43)..(260): Pfam Name: PAP_fibrillin Pfam Description: PAP_fibrillin
  misc_feature (1)..(269): Homolog of NCBI NO: 3928760 NR Description: homolog to plastid-lipid-associated protein
  misc_feature (33)..(269): Homolog of NCBI NO: 4139097 NR Description: fibrillin [Brassica napus]
  misc_feature (1)..(269): Homolog of NCBI NO: 14248548 NR Description: plastid-lipid associated protein PAP1 [Brassica
  misc_feature (1)..(269): Homolog of NCBI NO: 14248554 NR Description: plastid-lipid associated protein PAP1 [Brassica
  misc_feature (1)..(269): Homolog of NCBI NO: 15233357 NR Description: putative fibrillin
  misc_feature (1)..(269): Homolog of NCBI NO: 14248550 NR Description: plastid-lipid associated protein PAP2 [Brassica
  misc_feature (1)..(269): Homolog of NCBI NO: 14248556 NR Description: plastid-lipid associated protein PAP2 [Brassica
  misc_feature (1)..(269): Homolog of NCBI NO: 21618237 NR Description: fibrillin precursor-like protein [Arabidopsis
  misc_feature (1)..(269): Homolog of NCBI NO: 15235575 NR Description: fibrillin precursor-like protein
  misc_feature (1)..(269): Homolog of NCBI NO: 18377868 NR Description: AT4g22240/T10I14_70 [Arabidopsis thaliana]
MISTGGIAVSPRRVFKVRATDTGEIGSALLAAEEAIEDVEETERLKRSLVDSLYGTDRGLSASSETRAEIGDLITQLESKNPTPAPTEALFLLNGKWILAYTSFVNLFPLLSRGIVPLIKVDEISQTIDSDNFTVQNSVRFAGPLGTNSISTNAKFEIRSPKRVQIKFEQGVIGTPQLTDSIEIPEYVEVLGQKIDLNPIRGLLTSVQDTASSVARTISSQPPLKFFLPADNAQSWLLTTYLDKDIRISRGDGGSVFVLIKEGSPLLNP

SEQ ID NO: 39954 - DNA, 1078 bp, Arabidopsis thaliana
  misc_feature (1)..(1078): Ceres Seq. ID no. 12653446
  misc_feature: MA Experiment ID: 108488 Result: Up-regulated in Transcription
  misc_feature: MA Experiment ID: 108595 Result: Down-regulated in Transcription
  misc_feature: MA Experiment 108595 PARAMETER Experiment Name: At_Ler-pi_Ovule_cDNA_P Parameter: Plant Line Value: null
  misc_feature: MA Experiment ID: 20000069 Result: Down-regulated in Transcription
  misc_feature: MA Experiment 20000069 PARAMETER Experiment Name: At_100uM_ABA_Mutants_cDNA_P Parameter: Plant Line Value: CS23
  misc_feature: MA Experiment 20000069 PARAMETER Experiment Name: At_100uM_ABA_Mutants_cDNA_P Parameter: Timepoint (hr) Value: 6
  misc_feature: MA Experiment 20000069 PARAMETER Experiment Name: At_100uM_ABA_Mutants_cDNA_P Parameter: Tissue Value: Aerial
  misc_feature: MA Experiment 20000069 PARAMETER Experiment Name: At_100uM_ABA_Mutants_cDNA_P Parameter: Treatment Value: 100uM ABA vs. No Treatment
  misc_feature: MA Experiment ID: 20000070 Result: Down-regulated in Transcription
  misc_feature: MA Experiment 20000070 PARAMETER Experiment Name: At_100uM_ABA_Mutants_cDNA_P Parameter: Plant Line Value: CS24
  misc_feature: MA Experiment 20000070 PARAMETER Experiment Name: At_100uM_ABA_Mutants_cDNA_P Parameter: Timepoint (hr) Value: 6
  misc_feature: MA Experiment 20000070 PARAMETER Experiment Name: At_100uM_ABA_Mutants_cDNA_P Parameter: Tissue Value: Aerial
  misc_feature: MA Experiment 20000070 PARAMETER Experiment Name: At_100uM_ABA_Mutants_cDNA_P Parameter: Treatment Value: 100uM ABA vs. No Treatment
  misc_feature: MA Experiment ID: 20000072 Result: Down-regulated in Transcription
  misc_feature: MA Experiment 20000072 PARAMETER Experiment Name: At_100uM_ABA_Mutants_cDNA_P Parameter: Plant Line Value: CS8105
  misc_feature: MA Experiment 20000072 PARAMETER Experiment Name: At_100uM_ABA_Mutants_cDNA_P Parameter: Timepoint (hr) Value: 6
  misc_feature: MA Experiment 20000072 PARAMETER Experiment Name: At_100uM_ABA_Mutants_cDNA_P Parameter: Tissue Value: Aerial
  misc_feature: MA Experiment 20000072 PARAMETER Experiment Name: At_100uM_ABA_Mutants_cDNA_P Parameter: Treatment Value: 100uM ABA vs. No Treatment
  misc_feature: MA Experiment ID: 20000087 Result: Down-regulated in Transcription
  misc_feature: MA Experiment 20000087 PARAMETER Experiment Name: At_100uM_ABA_Mutants_cDNA_P Parameter: Plant Line Value: WS
  misc_feature: MA Experiment 20000087 PARAMETER Experiment Name: At_100uM_ABA_Mutants_cDNA_P Parameter: Timepoint (hr) Value: 6
  misc_feature: MA Experiment 20000087 PARAMETER Experiment Name: At_100uM_ABA_Mutants_cDNA_P Parameter: Tissue Value: Aerial
  misc_feature: MA Experiment 20000087 PARAMETER Experiment Name: At_100uM_ABA_Mutants_cDNA_P Parameter: Treatment Value: 100uM ABA vs. No Treatment
  misc_feature: MA Experiment ID: 20001248 Result: Down-regulated in Transcription
  misc_feature: MA Experiment 20001248 PARAMETER Experiment Name: At_Far-red-induction_P Parameter: Age (day) Value: 7
  misc_feature: MA Experiment 20001248 PARAMETER Experiment Name: At_Far-red-induction_P Parameter: Light Value: Far-red vs. White
  misc_feature: MA Experiment 20001248 PARAMETER Experiment Name: At_Far-red-induction_P Parameter: Organism Value: A. thaliana
  misc_feature: MA Experiment 20001248 PARAMETER Experiment Name: At_Far-red-induction_P Parameter: Plant Line Value: Columbia
  misc_feature: MA Experiment 20001248 PARAMETER Experiment Name: At_Far-red-induction_P Parameter: Timepoint (hr) Value: 4
  misc_feature: MA Experiment 20001248 PARAMETER Experiment Name: At_Far-red-induction_P Parameter: Tissue Value: Whole Plant
  misc_feature: MA Experiment ID: 20001557 Result: Down-regulated in Transcription
  misc_feature: MA Experiment 20001557 PARAMETER Experiment Name: At_Drought_Soil_Dry_P Parameter: Age (day) Value: 27
  misc_feature: MA Experiment 20001557 PARAMETER Experiment Name: At_Drought_Soil_Dry_P Parameter: Organism Value: A. thaliana
  misc_feature: MA Experiment 20001557 PARAMETER Experiment Name: At_Drought_Soil_Dry_P Parameter: Plant Line Value: WS
  misc_feature: MA Experiment 20001557 PARAMETER Experiment Name: At_Drought_Soil_Dry_P Parameter: Post Timepoint (hr) Value: 3
  misc_feature: MA Experiment 20001557 PARAMETER Experiment Name: At_Drought_Soil_Dry_P Parameter: Post-Treatment Value: Re-Water vs. No Drought
  misc_feature: MA Experiment 20001557 PARAMETER Experiment Name: At_Drought_Soil_Dry_P Parameter: Timepoint (day) Value: 13
  misc_feature: MA Experiment 20001557 PARAMETER Experiment Name: At_Drought_Soil_Dry_P Parameter: Treatment Value: Drought vs. No Drought
  misc_feature: MA Experiment ID: 20001905 Result: Down-regulated in Transcription
  misc_feature: MA Experiment 20001905 PARAMETER Experiment Name: At_Drought_Reproduction_P Parameter: Age (day) Value: 40
  misc_feature: MA Experiment 20001905 PARAMETER Experiment Name: At_Drought_Reproduction_P Parameter: Organism Value: A. thaliana
  misc_feature: MA Experiment 20001905 PARAMETER Experiment Name: At_Drought_Reproduction_P Parameter: Plant Line Value: WS
  misc_feature: MA Experiment 20001905 PARAMETER Experiment Name: At_Drought_Reproduction_P Parameter: Timepoint (day) Value: 10
  misc_feature: MA Experiment 20001905 PARAMETER Experiment Name: At_Drought_Reproduction_P Parameter: Tissue Value: Rosettes
  misc_feature: MA Experiment 20001905 PARAMETER Experiment Name: At_Drought_Reproduction_P Parameter: Treatment Value: Drought vs. No Drought
actcacacatccacaaaaagagagttagagattccaaggaggagagtgcgtgagcgtgacaatggaaactgacaaaagatggtctctcgccgggaaaacagctctggtaaccggcgggactcgtggaatcgggagagcagttgtagaggaactagcaaaatttggtgcaaaagttcatacttgttcaaggaaccaggaagagctaaatgcatgcttgaatgattggaaagcgaatggtttagtcgtgtctggttcggtttgtgatgcttcggttagggatcagagggagaagttgattcaggaagcttcttctgccttcagtggcaagctcaacatccttataaacaatgttggaactaatgtcaggaaaccaacagttgaatactcaagcgaggaatatgccaaaatcatgtcgaccaacttagaatccgctttccatttatctcaaattgctcatcctcttctaaaagcatctggtgtcggaagcattgtgttcatctcctctgtagctggcctggtgcatcttagcagtggatctatctatggtgcaactaaaggagcacttaatcagcttacaagaaatctagcttgcgagtgggcaagcgacaacatcagaaccaattgcgtggcgccatggtacatcaagacctcacttgtggaaacgctacttgagaagaaagaatttgtggaggctgtagtttcaaggaccccacttgggcgcgttggagaaccagaggaagtctcatcgttggttgcctttctctgccttcccgcatcatcttatattaccggacaggtcatatccgtcgatggaggattcactgtcaacggttttagctatgctatgaagccttaatctcgaatcgcaacattactaataaagcaagaatcctcgtgatgtgttggtcttgtttgtctttgtttagtttttgtgacttctttaaacatatagtaatatcaaaacgtttgaatttctaatgtagccgttaaataaatcaaggcacagttgtgcaccagtttatgtagacctacaacatttgtcattgatttaggtatatggatgagagtattttgatcg

SEQ ID NO: 39955 - protein, 264 aa, Arabidopsis thaliana
  peptide (1)..(264): Ceres Seq. ID no. 12653447
  misc_feature (4)..(258): Homolog of NCBI NO: 38707448 NR Description: short chain alcohol dehydrogenase-like protein
  misc_feature (4)..(264): Homolog of NCBI NO: 15227075 NR Description: putative tropinone reductase
  misc_feature (1)..(251): Homolog of NCBI NO: 34902058 NR Description: putative pfam00106, adh_short, short chain
  misc_feature (1)..(258): Homolog of NCBI NO: 28393476 NR Description: putative tropinone reductase [Arabidopsis
  misc_feature (4)..(260): Homolog of NCBI NO: 15227069 NR Description: putative tropinone reductase; protein id:
  misc_feature (1)..(258): Homolog of NCBI NO: 15227060 NR Description: putative tropinone reductase; protein id:
  misc_feature (196)..(252): Homolog of NCBI NO: 29893663 NR Description: unknown protein [Oryza sativa (japonica
  misc_feature (1)..(200): Homolog of NCBI NO: 29893663 NR Description: unknown protein [Oryza sativa (japonica
  misc_feature (1)..(264): Homolog of NCBI NO: 21536785 NR Description: short chain alcohol dehydrogenase-like
  misc_feature (1)..(264): Homolog of NCBI NO: 15239327 NR Description: short chain alcohol dehydrogenase-like
METDKRWSLAGKTALVTGGTRGIGRAVVEELAKFGAKVHTCSRNQEELNACLNDWKANGLVVSGSVCDASVRDQREKLIQEASSAFSGKLNILINNVGTNVRKPTVEYSSEEYAKIMSTNLESAFHLSQIAHPLLKASGVGSIVFISSVAGLVHLSSGSIYGATKGALNQLTRNLACEWASDNIRTNCVAPWYIKTSLVETLLEKKEFVEAVVSRTPLGRVGEPEEVSSLVAFLCLPASSYITGQVISVDGGFTVNGFSYAMKP

SEQ ID NO: 39956 - protein, 148 aa, Arabidopsis thaliana
  peptide (1)..(148): Ceres Seq. ID no. 12653448
  misc_feature (1)..(142): Homolog of NCBI NO: 38707448 NR Description: short chain alcohol dehydrogenase-like protein
  misc_feature (1)..(148): Homolog of NCBI NO: 15227075 NR Description: putative tropinone reductase
  misc_feature (1)..(135): Homolog of NCBI NO: 34902058 NR Description: putative pfam00106, adh_short, short chain
  misc_feature (1)..(142): Homolog of NCBI NO: 28393476 NR Description: putative tropinone reductase [Arabidopsis
  misc_feature (1)..(144): Homolog of NCBI NO: 15227069 NR Description: putative tropinone reductase; protein id:
  misc_feature (1)..(142): Homolog of NCBI NO: 15227060 NR Description: putative tropinone reductase; protein id:
  misc_feature (80)..(136): Homolog of NCBI NO: 29893663 NR Description: unknown protein [Oryza sativa (japonica
  misc_feature (1)..(84): Homolog of NCBI NO: 29893663 NR Description: unknown protein [Oryza sativa (japonica
  misc_feature (1)..(148): Homolog of NCBI NO: 21536785 NR Description: short chain alcohol dehydrogenase-like
  misc_feature (1)..(148): Homolog of NCBI NO: 15239327 NR Description: short chain alcohol dehydrogenase-like
MSTNLESAFHLSQIAHPLLKASGVGSIVFISSVAGLVHLSSGSIYGATKGALNQLTRNLACEWASDNIRTNCVAPWYIKTSLVETLLEKKEFVEAVVSRTPLGRVGEPEEVSSLVAFLCLPASSYITGQVISVDGGFTVNGFSYAMKP

SEQ ID NO: 39957 - DNA, 781 bp, Arabidopsis thaliana
  misc_feature (1)..(781): Ceres Seq. ID no. 12395884
  misc_feature: MA Experiment ID: 108435 Result: Down-regulated in Transcription
  misc_feature: MA Experiment 108435 PARAMETER Experiment Name: At_stm_Mutants_cDNA_P Parameter: Plant Line Value: wt Landsburg vs stm
  misc_feature: MA Experiment 108435 PARAMETER Experiment Name: At_stm_Mutants_cDNA_P Parameter: Tissue Value: Shoot Apical Meristem Region
  misc_feature: MA Experiment ID: 108462 Result: Up-regulated in Transcription
  misc_feature: MA Experiment 108462 PARAMETER Experiment Name: At_Germinating_Seeds_cDNA_P Parameter: Age (day) Value: 2 vs. 0
  misc_feature: MA Experiment 108462 PARAMETER Experiment Name: At_Germinating_Seeds_cDNA_P Parameter: Tissue Value: Germinating Seeds
  misc_feature: MA Experiment ID: 108463 Result: Up-regulated in Transcription
  misc_feature: MA Experiment 108463 PARAMETER Experiment Name: At_Germinating_Seeds_cDNA_P Parameter: Age (day) Value: 3 vs. 0
  misc_feature: MA Experiment 108463 PARAMETER Experiment Name: At_Germinating_Seeds_cDNA_P Parameter: Tissue Value: Germinating Seeds
  misc_feature: MA Experiment ID: 108464 Result: Up-regulated in Transcription
  misc_feature: MA Experiment 108464 PARAMETER Experiment Name: At_Germinating_Seeds_cDNA_P Parameter: Age (day) Value: 4 vs. 0
  misc_feature: MA Experiment 108464 PARAMETER Experiment Name: At_Germinating_Seeds_cDNA_P Parameter: Tissue Value: Germinating Seeds
  misc_feature: MA Experiment ID: 108488 Result: Up-regulated in Transcription
  misc_feature: MA Experiment ID: 108595 Result: Down-regulated in Transcription
  misc_feature: MA Experiment 108595 PARAMETER Experiment Name: At_Ler-pi_Ovule_cDNA_P Parameter: Plant Line Value: null
  misc_feature: MA Experiment ID: 20000069 Result: Down-regulated in Transcription
  misc_feature: MA Experiment 20000069 PARAMETER Experiment Name: At_100uM_ABA_Mutants_cDNA_P Parameter: Plant Line Value: CS23
  misc_feature: MA Experiment 20000069 PARAMETER Experiment Name: At_100uM_ABA_Mutants_cDNA_P Parameter: Timepoint (hr) Value: 6
  misc_feature: MA Experiment 20000069 PARAMETER Experiment Name: At_100uM_ABA_Mutants_cDNA_P Parameter: Tissue Value: Aerial
  misc_feature: MA Experiment 20000069 PARAMETER Experiment Name: At_100uM_ABA_Mutants_cDNA_P Parameter: Treatment Value: 100uM ABA vs. No Treatment
  misc_feature: MA Experiment ID: 20000071 Result: Down-regulated in Transcription
  misc_feature: MA Experiment 20000071 PARAMETER Experiment Name: At_100uM_ABA_Mutants_cDNA_P Parameter: Plant Line Value: CS8104
  misc_feature: MA Experiment 20000071 PARAMETER Experiment Name: At_100uM_ABA_Mutants_cDNA_P Parameter: Timepoint (hr) Value: 6
  misc_feature: MA Experiment 20000071 PARAMETER Experiment Name: At_100uM_ABA_Mutants_cDNA_P Parameter: Tissue Value: Aerial
  misc_feature: MA Experiment 20000071 PARAMETER Experiment Name: At_100uM_ABA_Mutants_cDNA_P Parameter: Treatment Value: 100uM ABA vs. No Treatment
  misc_feature: MA Experiment ID: 20000072 Result: Down-regulated in Transcription
  misc_feature: MA Experiment 20000072 PARAMETER Experiment Name: At_100uM_ABA_Mutants_cDNA_P Parameter: Plant Line Value: CS8105
  misc_feature: MA Experiment 20000072 PARAMETER Experiment Name: At_100uM_ABA_Mutants_cDNA_P Parameter: Timepoint (hr) Value: 6
  misc_feature: MA Experiment 20000072 PARAMETER Experiment Name: At_100uM_ABA_Mutants_cDNA_P Parameter: Tissue Value: Aerial
  misc_feature: MA Experiment 20000072 PARAMETER Experiment Name: At_100uM_ABA_Mutants_cDNA_P Parameter: Treatment Value: 100uM ABA vs. No Treatment
  misc_feature: MA Experiment ID: 20000086 Result: Down-regulated in Transcription
  misc_feature: MA Experiment 20000086 PARAMETER Experiment Name: At_100uM_ABA_Mutants_cDNA_P Parameter: Plant Line Value: CS22
  misc_feature: MA Experiment 20000086 PARAMETER Experiment Name: At_100uM_ABA_Mutants_cDNA_P Parameter: Timepoint (hr) Value: 6
  misc_feature: MA Experiment 20000086 PARAMETER Experiment Name: At_100uM_ABA_Mutants_cDNA_P Parameter: Tissue Value: Aerial
  misc_feature: MA Experiment 20000086 PARAMETER Experiment Name: At_100uM_ABA_Mutants_cDNA_P Parameter: Treatment Value: 100uM ABA vs. No Treatment
  misc_feature: MA Experiment ID: 20000087 Result: Down-regulated in Transcription
  misc_feature: MA Experiment 20000087 PARAMETER Experiment Name: At_100uM_ABA_Mutants_cDNA_P Parameter: Plant Line Value: WS
  misc_feature: MA Experiment 20000087 PARAMETER Experiment Name: At_100uM_ABA_Mutants_cDNA_P Parameter: Timepoint (hr) Value: 6
  misc_feature: MA Experiment 20000087 PARAMETER Experiment Name: At_100uM_ABA_Mutants_cDNA_P Parameter: Tissue Value: Aerial
  misc_feature: MA Experiment 20000087 PARAMETER Experiment Name: At_100uM_ABA_Mutants_cDNA_P Parameter: Treatment Value: 100uM ABA vs. No Treatment
  misc_feature: MA Experiment ID: 20000088 Result: Down-regulated in Transcription
  misc_feature: MA Experiment 20000088 PARAMETER Experiment Name: At_100uM_ABA_Mutants_cDNA_P Parameter: Plant Line Value: Landsberg
  misc_feature: MA Experiment 20000088 PARAMETER Experiment Name: At_100uM_ABA_Mutants_cDNA_P Parameter: Timepoint (hr) Value: 6
  misc_feature: MA Experiment 20000088 PARAMETER Experiment Name: At_100uM_ABA_Mutants_cDNA_P Parameter: Tissue Value: Aerial
  misc_feature: MA Experiment 20000088 PARAMETER Experiment Name: At_100uM_ABA_Mutants_cDNA_P Parameter: Treatment Value: 100uM ABA vs. No Treatment
  misc_feature: MA Experiment ID: 20000117 Result: Down-regulated in Transcription
  misc_feature: MA Experiment 20000117 PARAMETER Experiment Name: At_100uM_ABA_Mutants_cDNA_P Parameter: Plant Line Value: Columbia
  misc_feature: MA Experiment 20000117 PARAMETER Experiment Name: At_100uM_ABA_Mutants_cDNA_P Parameter: Timepoint (hr) Value: 6
  misc_feature: MA Experiment 20000117 PARAMETER Experiment Name: At_100uM_ABA_Mutants_cDNA_P Parameter: Tissue Value: Aerial
  misc_feature: MA Experiment 20000117 PARAMETER Experiment Name: At_100uM_ABA_Mutants_cDNA_P Parameter: Treatment Value: 100uM ABA vs. No Treatment
  misc_feature: MA Experiment ID: 20000180 Result: Up-regulated in Transcription
  misc_feature: MA Experiment 20000180 PARAMETER Experiment Name: At_Germinating_Seeds_P Parameter: Age (hr) Value: 24 vs. 0
  misc_feature: MA Experiment 20000180 PARAMETER Experiment Name: At_Germinating_Seeds_P Parameter: Tissue Value: Germinating Seeds
  misc_feature: MA Experiment ID: 20000184 Result: Up-regulated in Transcription
  misc_feature: MA Experiment 20000184 PARAMETER Experiment Name: At_Shoots__P Parameter: Age (day) Value: 7
  misc_feature: MA Experiment 20000184 PARAMETER Experiment Name: At_Shoots__P Parameter: Tissue Value: Shoots vs. Whole Plant
  misc_feature: MA Experiment ID: 20000185 Result: Down-regulated in Transcription
  misc_feature: MA Experiment 20000185 PARAMETER Experiment Name: At_Roots__P Parameter: Age (day) Value: 7 vs. 21
  misc_feature: MA Experiment 20000185 PARAMETER Experiment Name: At_Roots__P Parameter: Organism Value: A. thaliana
  misc_feature: MA Experiment 20000185 PARAMETER Experiment Name: At_Roots__P Parameter: Tissue Value: Roots vs. Whole Plant
  misc_feature: MA Experiment ID: 20000224 Result: Down-regulated in Transcription
  misc_feature: MA Experiment ID: 20000227 Result: Down-regulated in Transcription
  misc_feature: MA Experiment 20000227 PARAMETER Experiment Name: At_Root-Tips-vs-Tops_P Parameter: Tissue Value: Root Tips vs. Root Tops
  misc_feature: MA Experiment ID: 20000264 Result: Down-regulated in Transcription
  misc_feature: MA Experiment 20000264 PARAMETER Experiment Name: At_Open_Flower_P Parameter: Age (day) Value: 21
  misc_feature: MA Experiment 20000264 PARAMETER Experiment Name: At_Open_Flower_P Parameter: Plant Line Value: WS
  misc_feature: MA Experiment 20000264 PARAMETER Experiment Name: At_Open_Flower_P Parameter: Tissue Value: Open Flower vs. Whole Plant
  misc_feature: MA Experiment ID: 20000438 Result: Up-regulated in Transcription
  misc_feature: MA Experiment 20000438 PARAMETER Experiment Name: At_Shoots__P Parameter: Age (day) Value: 14
  misc_feature: MA Experiment 20000438 PARAMETER Experiment Name: At_Shoots__P Parameter: Tissue Value: Shoots vs. Whole Plant
  misc_feature: MA Experiment ID: 20000439 Result: Down-regulated in Transcription
  misc_feature: MA Experiment 20000439 PARAMETER Experiment Name: At_Roots__P Parameter: Age (day) Value: 14 vs. 21
  misc_feature: MA Experiment 20000439 PARAMETER Experiment Name: At_Roots__P Parameter: Organism Value: A. thaliana
  misc_feature: MA Experiment 20000439 PARAMETER Experiment Name: At_Roots__P Parameter: Tissue Value: Roots vs. Whole Plant
  misc_feature: MA Experiment ID: 20000794 Result: Down-regulated in Transcription
  misc_feature: MA Experiment 20000794 PARAMETER Experiment Name: At_Petals_P Parameter: Age (day) Value: 23-25 days
  misc_feature: MA Experiment 20000794 PARAMETER Experiment Name: At_Petals_P Parameter: Plant Line Value: WS
  misc_feature: MA Experiment 20000794 PARAMETER Experiment Name: At_Petals_P Parameter: Tissue Value: Petals vs. Whole plant
  misc_feature: MA Experiment ID: 20001557 Result: Down-regulated in Transcription
  misc_feature: MA Experiment 20001557 PARAMETER Experiment Name: At_Drought_Soil_Dry_P Parameter: Age (day) Value: 27
  misc_feature: MA Experiment 20001557 PARAMETER Experiment Name: At_Drought_Soil_Dry_P Parameter: Organism Value: A. thaliana
  misc_feature: MA Experiment 20001557 PARAMETER Experiment Name: At_Drought_Soil_Dry_P Parameter: Plant Line Value: WS
  misc_feature: MA Experiment 20001557 PARAMETER Experiment Name: At_Drought_Soil_Dry_P Parameter: Post Timepoint (hr) Value: 3
  misc_feature: MA Experiment 20001557 PARAMETER Experiment Name: At_Drought_Soil_Dry_P Parameter: Post-Treatment Value: Re-Water vs. No Drought
  misc_feature: MA Experiment 20001557 PARAMETER Experiment Name: At_Drought_Soil_Dry_P Parameter: Timepoint (day) Value: 13
  misc_feature: MA Experiment 20001557 PARAMETER Experiment Name: At_Drought_Soil_Dry_P Parameter: Treatment Value: Drought vs. No Drought
  misc_feature: MA Experiment ID: 20001757 Result: Up-regulated in Transcription
  misc_feature: MA Experiment 20001757 PARAMETER Experiment Name: At_50mM_NH4NO3_L-to-H_P Parameter: Timepoint (hr) Value: 6
  misc_feature: MA Experiment 20001757 PARAMETER Experiment Name: At_50mM_NH4NO3_L-to-H_P Parameter: Tissue Value: Leaf
  misc_feature: MA Experiment 20001757 PARAMETER Experiment Name: At_50mM_NH4NO3_L-to-H_P Parameter: Treatment Value: 50mM NH4NO3 vs 100mM Mannitol
ctttttcattctcttcttacaccttttctccagagttccgacaatggcttcagcatcagcgacagctactcttctcaaacccaatcttccgccgcataaaccgaccatcatcgcctcctccgtatctccgcctcttcctcctccacgtcgcaaccacctcctccgccgcgatttcctctccctggcggcaacatccacgcttctaacacaatcgattcagtttctagctccggcgccggtctccgccgctgaagatgaagagtatatcaaagatacgtcggcagtgatcagtaaagtaaggagtacgctttcgatgcagaagacagatccgaatgtggctgatgcggtggcggagctgagagaagcgtcgaattcttgggttgccaagtaccggaaagagaaagctcttctcggaaaagcttctttccgggatatatactcggcgttgaatgctgtttcaggtcattatgtgagttttggtccgacggctccgattccggcgaagaggaaggcgaggattcttgaagagatggaaactgctgagaaagctctcacaagaggaagatgaaaaaactgcagtcaggccttcttctccattttcttgttgatgaaaattttattttcctaaaaatgccaatcgaattatatgagaagagaaacttgaattggctcgcctgcttttttttttcattcctgtaaaatacttaatgttctgcatgataattgcttaattatcattatcagagatacttatataacttatatcgaattccattttccc

SEQ ID NO: 39958 - protein, 188 aa, Arabidopsis thaliana
  peptide (1)..(188): Ceres Seq. ID no. 12395885
  misc_feature (88)..(187): Homolog of NCBI NO: 16331054 NR Description: photosystem II 11 kD protein [Synechocystis sp.
  misc_feature (88)..(187): Homolog of NCBI NO: 6919945 NR Description: Photosystem II 11 kDa protein precursor
  misc_feature (51)..(188): Homolog of NCBI NO: 33863528 NR Description: possible Photosystem II reaction center Psb27
  misc_feature (88)..(187): Homolog of NCBI NO: 23041360 NR Description: hypothetical protein [Trichodesmium erythraeum
  misc_feature (59)..(187): Homolog of NCBI NO: 33866304 NR Description: possible photosystem II Psb27 protein
  misc_feature (54)..(187): Homolog of NCBI NO: 23125315 NR Description: hypothetical protein [Nostoc punctiforme]
  misc_feature (87)..(187): Homolog of NCBI NO: 17228753 NR Description: photosystem II 11 kD protein [Nostoc sp. PCC
  misc_feature (68)..(186): Homolog of NCBI NO: 22300006 NR Description: photosystem II 11 kD protein [Thermosynechococcus
  misc_feature (15)..(108): Homolog of NCBI NO: 11692876 NR Description: At1g03600 [Arabidopsis thaliana]
  misc_feature (15)..(188): Homolog of NCBI NO: 18379115 NR Description: photosystem II protein family
FFILFLHLFSRVPTMASASATATLLKPNLPPHKPTIIASSVSPPLPPPRRNHLLRRDFLSLAATSTLLTQSIQFLAPAPVSAAEDEEYIKDTSAVISKVRSTLSMQKTDPNVADAVAELREASNSWVAKYRKEKALLGKASFRDIYSALNAVSGHYVSFGPTAPIPAKRKARILEEMETAEKALTRGR

SEQ ID NO: 39959 - protein, 174 aa, Arabidopsis thaliana
  peptide (1)..(174): Ceres Seq. ID no. 12395886
  misc_feature (74)..(173): Homolog of NCBI NO: 16331054 NR Description: photosystem II 11 kD protein [Synechocystis sp.
  misc_feature (74)..(173): Homolog of NCBI NO: 6919945 NR Description: Photosystem II 11 kDa protein precursor
  misc_feature (37)..(174): Homolog of NCBI NO: 33863528 NR Description: possible Photosystem II reaction center Psb27
  misc_feature (74)..(173): Homolog of NCBI NO: 23041360 NR Description: hypothetical protein [Trichodesmium erythraeum
  misc_feature (45)..(173): Homolog of NCBI NO: 33866304 NR Description: possible photosystem II Psb27 protein
  misc_feature (40)..(173): Homolog of NCBI NO: 23125315 NR Description: hypothetical protein [Nostoc punctiforme]
  misc_feature (73)..(173): Homolog of NCBI NO: 17228753 NR Description: photosystem II 11 kD protein [Nostoc sp. PCC
  misc_feature (54)..(172): Homolog of NCBI NO: 22300006 NR Description: photosystem II 11 kD protein [Thermosynechococcus
  misc_feature (1)..(94): Homolog of NCBI NO: 11692876 NR Description: At1g03600 [Arabidopsis thaliana]
  misc_feature (1)..(174): Homolog of NCBI NO: 18379115 NR Description: photosystem II protein family
MASASATATLLKPNLPPHKPTIIASSVSPPLPPPRRNHLLRRDFLSLAATSTLLTQSIQFLAPAPVSAAEDEEYIKDTSAVISKVRSTLSMQKTDPNVADAVAELREASNSWVAKYRKEKALLGKASFRDIYSALNAVSGHYVSFGPTAPIPAKRKARILEEMETAEKALTRGR

SEQ ID NO: 39960 - DNA, 1227 bp, Arabidopsis thaliana
  misc_feature (1)..(1227): Ceres Seq. ID no. 12328278
  misc_feature: MA Experiment ID: 108569 Result: Up-regulated in Transcription
  misc_feature: MA Experiment 108569 PARAMETER Experiment Name: At_0.001%_MeJA__cDNA_P Parameter: Timepoint (hr) Value: 6
  misc_feature: MA Experiment 108569 PARAMETER Experiment Name: At_0.001%_MeJA__cDNA_P Parameter: Tissue Value: Aerial
  misc_feature: MA Experiment 108569 PARAMETER Experiment Name: At_0.001%_MeJA__cDNA_P Parameter: Treatment Value: 0.001% MeJA vs. No Treatment
  misc_feature: MA Experiment ID: 108573 Result: Up-regulated in Transcription
  misc_feature: MA Experiment 108573 PARAMETER Experiment Name: At_Drought_cDNA_P Parameter: Timepoint (hr) Value: 6
  misc_feature: MA Experiment 108573 PARAMETER Experiment Name: At_Drought_cDNA_P Parameter: Tissue Value: Aerial
  misc_feature: MA Experiment 108573 PARAMETER Experiment Name: At_Drought_cDNA_P Parameter: Treatment Value: Drought vs. No Drought
  misc_feature: MA Experiment ID: 108579 Result: Down-regulated in Transcription
  misc_feature: MA Experiment 108579 PARAMETER Experiment Name: At_4deg_Cold_cDNA_P Parameter: Temperature (deg C) Value: 4 vs. 22
  misc_feature: MA Experiment 108579 PARAMETER Experiment Name: At_4deg_Cold_cDNA_P Parameter: Timepoint (hr) Value: 6
  misc_feature: MA Experiment 108579 PARAMETER Experiment Name: At_4deg_Cold_cDNA_P Parameter: Tissue Value: Aerial
  misc_feature: MA Experiment ID: 108595 Result: Down-regulated in Transcription
  misc_feature: MA Experiment 108595 PARAMETER Experiment Name: At_Ler-pi_Ovule_cDNA_P Parameter: Plant Line Value: null
  misc_feature: MA Experiment ID: 20000224 Result: Down-regulated in Transcription
  misc_feature: MA Experiment ID: 20001450 Result: Up-regulated in Transcription
  misc_feature: MA Experiment 20001450 PARAMETER Experiment Name: At_Far-red-induction_P Parameter: Age (day) Value: 7
  misc_feature: MA Experiment 20001450 PARAMETER Experiment Name: At_Far-red-induction_P Parameter: Light Value: Far-red vs. White
  misc_feature: MA Experiment 20001450 PARAMETER Experiment Name: At_Far-red-induction_P Parameter: Organism Value: A. thaliana
  misc_feature: MA Experiment 20001450 PARAMETER Experiment Name: At_Far-red-induction_P Parameter: Plant Line Value: Columbia
  misc_feature: MA Experiment 20001450 PARAMETER Experiment Name: At_Far-red-induction_P Parameter: Timepoint (hr) Value: 8
  misc_feature: MA Experiment 20001450 PARAMETER Experiment Name: At_Far-red-induction_P Parameter: Tissue Value: Whole Plant
atctctctctctctctaccctttggatctttcttctcgatcaattatccattttgcccagattttttccagaagctcatcgaattcatcaaatcacaatgtttgaaatttggtttcactgttgctgagtgtgtttggaggagaagcttgattggttcggtgtttcactgtttgaagattataagagttatggagaatggtggtcagtatgataatgcgcggttcaagcccgattacttcaaaggtgcacaatctatgtggaatatgattccccagcatcagattaaggaacaacataatgcgttggtgatgaataagaagatcatgtccatccttgctgagagagacgctgctgtacatgaaagaaatcaagctgtctctgctaaaaaggaagctgtcgctgctcgggacgaagcgcttcagcaacgtgacaaagctctttctgagagagataaagctttgatagagagagataatgcttatgctgctcttcaacaccatgaaaatagtctcaactttgctttgtctggtgggaagtgtgttgatggagatgattgttttggtattggggaaccccacaaacttgaagtcttccctttgtcaactattccgcctgaggttacaaacacgaaggtggtgaacaaaaggaagaaagagaacaagcagggactatcaaaggtgaaaaaagtgggtgaagatctgaaccgtcgagttcctgctcctggaaagaaatctagaacagattgggacagtcaagatgtcggtttgaacttagtcaccttcgatgagacgacaatgcctgtacccatgtgttcgtgcacaggctctacgcgtcagtgttacaaatggggaaatggcggctggcaatcgtcttgctgcacaaccaccttatcccagtatccattaccgcagatgccaaacaagaggcattctcggatgggcggtaggaaaatgagcggaaacgttttctcgagattactcagccgtttatcagcagaaggatatgatctctcgtgtcctgttgatcttaaagactattgggctaggcacgggacaaaccgctacatcactatcaagtagcctctgttgtttacacagtccaagtatgtttctctcgtcttcttaagattaggtgttgtctttgtctttattgtccatagtttgttctttgttgtgtatggtaaaaccattgttatgtgtatcttttggatgggcaaaaatggtttgc

SEQ ID NO: 39961 - protein, 358 aa, Arabidopsis thaliana
  peptide (1)..(358): Ceres Seq. ID no. 12328279
  misc_feature (202)..(358): Homolog of NCBI NO: 18422219 NR Description: putative protein
  misc_feature (63)..(358): Homolog of NCBI NO: 9759488 NR Description: gb|AAF18661.1~gene_id:MDH9.22~similar to unknown
  misc_feature (63)..(330): Homolog of NCBI NO: 15234867 NR Description: putative protein; protein id: At4g38910.1
  misc_feature (63)..(358): Homolog of NCBI NO: 18399638 NR Description: expressed protein
LSLSLPFGSFFSINYPFCPDFFQKLIEFIKSQCLKFGFTVAECVWRRSLIGSVFHCLKIIRVMENGGQYDNARFKPDYFKGAQSMWNMIPQHQIKEQHNALVMNKKIMSILAERDAAVHERNQAVSAKKEAVAARDEALQQRDKALSERDKALIERDNAYAALQHHENSLNFALSGGKCVDGDDCFGIGEPHKLEVFPLSTIPPEVTNTKVVNKRKKENKQGLSKVKKVGEDLNRRVPAPGKKSRTDWDSQDVGLNLVTFDETTMPVPMCSCTGSTRQCYKWGNGGWQSSCCTTTLSQYPLPQMPNKRHSRMGGRKMSGNVFSRLLSRLSAEGYDLSCPVDLKDYWARHGTNRYITIK

SEQ ID NO: 39962 - protein, 296 aa, Arabidopsis thaliana
  peptide (1)..(296): Ceres Seq. ID no. 12328280
  misc_feature (140)..(296): Homolog of NCBI NO: 18422219 NR Description: putative protein
  misc_feature (1)..(296): Homolog of NCBI NO: 9759488 NR Description: gb|AAF18661.1~gene_id:MDH9.22~similar to unknown
  misc_feature (1)..(268): Homolog of NCBI NO: 15234867 NR Description: putative protein; protein id: At4g38910.1
  misc_feature (1)..(296): Homolog of NCBI NO: 18399638 NR Description: expressed protein
MENGGQYDNARFKPDYFKGAQSMWNMIPQHQIKEQHNALVMNKKIMSILAERDAAVHERNQAVSAKKEAVAARDEALQQRDKALSERDKALIERDNAYAALQHHENSLNFALSGGKCVDGDDCFGIGEPHKLEVFPLSTIPPEVTNTKVVNKRKKENKQGLSKVKKVGEDLNRRVPAPGKKSRTDWDSQDVGLNLVTFDETTMPVPMCSCTGSTRQCYKWGNGGWQSSCCTTTLSQYPLPQMPNKRHSRMGGRKMSGNVFSRLLSRLSAEGYDLSCPVDLKDYWARHGTNRYITIK

SEQ ID NO: 39963 - protein, 274 aa, Arabidopsis thaliana
  peptide (1)..(274): Ceres Seq. ID no. 12328281
  misc_feature (118)..(274): Homolog of NCBI NO: 18422219 NR Description: putative protein
  misc_feature (1)..(274): Homolog of NCBI NO: 9759488 NR Description: gb|AAF18661.1~gene_id:MDH9.22~similar to unknown
  misc_feature (1)..(246): Homolog of NCBI NO: 15234867 NR Description: putative protein; protein id: At4g38910.1
  misc_feature (1)..(274): Homolog of NCBI NO: 18399638 NR Description: expressed protein
MWNMIPQHQIKEQHNALVMNKKIMSILAERDAAVHERNQAVSAKKEAVAARDEALQQRDKALSERDKALIERDNAYAALQHHENSLNFALSGGKCVDGDDCFGIGEPHKLEVFPLSTIPPEVTNTKVVNKRKKENKQGLSKVKKVGEDLNRRVPAPGKKSRTDWDSQDVGLNLVTFDETTMPVPMCSCTGSTRQCYKWGNGGWQSSCCTTTLSQYPLPQMPNKRHSRMGGRKMSGNVFSRLLSRLSAEGYDLSCPVDLKDYWARHGTNRYITIK

SEQ ID NO: 39964 - DNA, 1763 bp, Arabidopsis thaliana
  misc_feature (1)..(1763): Ceres Seq. ID no. 13488927
  misc_feature: MA Experiment ID: 108434 Result: Down-regulated in Transcription
  misc_feature: MA Experiment 108434 PARAMETER Experiment Name: At_Root_Tips_cDNA_P Parameter: Tissue Value: Root Tips
  misc_feature: MA Experiment ID: 108435 Result: Up-regulated in Transcription
  misc_feature: MA Experiment 108435 PARAMETER Experiment Name: At_stm_Mutants_cDNA_P Parameter: Plant Line Value: wt Landsburg vs stm
  misc_feature: MA Experiment 108435 PARAMETER Experiment Name: At_stm_Mutants_cDNA_P Parameter: Tissue Value: Shoot Apical Meristem Region
  misc_feature: MA Experiment ID: 108461 Result: Down-regulated in Transcription
  misc_feature: MA Experiment 108461 PARAMETER Experiment Name: At_Germinating_Seeds_cDNA_P Parameter: Age (day) Value: 1 vs. 0
  misc_feature: MA Experiment 108461 PARAMETER Experiment Name: At_Germinating_Seeds_cDNA_P Parameter: Tissue Value: Germinating Seeds
  misc_feature: MA Experiment ID: 108462 Result: Down-regulated in Transcription
  misc_feature: MA Experiment 108462 PARAMETER Experiment Name: At_Germinating_Seeds_cDNA_P Parameter: Age (day) Value: 2 vs. 0
  misc_feature: MA Experiment 108462 PARAMETER Experiment Name: At_Germinating_Seeds_cDNA_P Parameter: Tissue Value: Germinating Seeds
  misc_feature: MA Experiment ID: 108576 Result: Up-regulated in Transcription
  misc_feature: MA Experiment 108576 PARAMETER Experiment Name: At_42deg_Heat_cDNA_P Parameter: Temperature (deg C) Value: 42 vs. 22
  misc_feature: MA Experiment 108576 PARAMETER Experiment Name: At_42deg_Heat_cDNA_P Parameter: Timepoint (hr) Value: 1
  misc_feature: MA Experiment 108576 PARAMETER Experiment Name: At_42deg_Heat_cDNA_P Parameter: Tissue Value: Aerial
  misc_feature: MA Experiment ID: 20000185 Result: Down-regulated in Transcription
  misc_feature: MA Experiment 20000185 PARAMETER Experiment Name: At_Roots__P Parameter: Age (day) Value: 7 vs. 21
  misc_feature: MA Experiment 20000185 PARAMETER Experiment Name: At_Roots__P Parameter: Organism Value: A. thaliana
  misc_feature: MA Experiment 20000185 PARAMETER Experiment Name: At_Roots__P Parameter: Tissue Value: Roots vs. Whole Plant
  misc_feature: MA Experiment ID: 20000224 Result: Down-regulated in Transcription
  misc_feature: MA Experiment ID: 20000268 Result: Down-regulated in Transcription
  misc_feature: MA Experiment 20000268 PARAMETER Experiment Name: At_100mM_NaCl__P Parameter: Age (day) Value: 14
  misc_feature: MA Experiment 20000268 PARAMETER Experiment Name: At_100mM_NaCl__P Parameter: Organism Value: A. thaliana
  misc_feature: MA Experiment 20000268 PARAMETER Experiment Name: At_100mM_NaCl__P Parameter: Plant Line Value: WS
  misc_feature: MA Experiment 20000268 PARAMETER Experiment Name: At_100mM_NaCl__P Parameter: Timepoint (hr) Value: 6
  misc_feature: MA Experiment 20000268 PARAMETER Experiment Name: At_100mM_NaCl__P Parameter: Tissue Value: Whole Plant
  misc_feature: MA Experiment 20000268 PARAMETER Experiment Name: At_100mM_NaCl__P Parameter: Treatment Value: 100mM NaCl vs. No Treatment
  misc_feature: MA Experiment ID: 20000438 Result: Down-regulated in Transcription
  misc_feature: MA Experiment 20000438 PARAMETER Experiment Name: At_Shoots__P Parameter: Age (day) Value: 14
  misc_feature: MA Experiment 20000438 PARAMETER Experiment Name: At_Shoots__P Parameter: Tissue Value: Shoots vs. Whole Plant
  misc_feature: MA Experiment ID: 20000439 Result: Down-regulated in Transcription
  misc_feature: MA Experiment 20000439 PARAMETER Experiment Name: At_Roots__P Parameter: Age (day) Value: 14 vs. 21
  misc_feature: MA Experiment 20000439 PARAMETER Experiment Name: At_Roots__P Parameter: Organism Value: A. thaliana
  misc_feature: MA Experiment 20000439 PARAMETER Experiment Name: At_Roots__P Parameter: Tissue Value: Roots vs. Whole Plant
  misc_feature: MA Experiment ID: 20000460 Result: Up-regulated in Transcription
  misc_feature: MA Experiment 20000460 PARAMETER Experiment Name: At_10percent_PEG_P Parameter: Age (day) Value: 12
  misc_feature: MA Experiment 20000460 PARAMETER Experiment Name: At_10percent_PEG_P Parameter: Organism Value: A. thaliana
  misc_feature: MA Experiment 20000460 PARAMETER Experiment Name: At_10percent_PEG_P Parameter: Plant Line Value: WS
  misc_feature: MA Experiment 20000460 PARAMETER Experiment Name: At_10percent_PEG_P Parameter: Timepoint (day) Value: 12
  misc_feature: MA Experiment 20000460 PARAMETER Experiment Name: At_10percent_PEG_P Parameter: Tissue Value: Whole Plant
  misc_feature: MA Experiment 20000460 PARAMETER Experiment Name: At_10percent_PEG_P Parameter: Treatment Value: 10percent PEG vs. No Treatment
  misc_feature: MA Experiment ID: 20000527 Result: Up-regulated in Transcription
  misc_feature: MA Experiment 20000527 PARAMETER Experiment Name: At_10percent_PEG_P Parameter: Age (day) Value: 20
  misc_feature: MA Experiment 20000527 PARAMETER Experiment Name: At_10percent_PEG_P Parameter: Organism Value: A. thaliana
  misc_feature: MA Experiment 20000527 PARAMETER Experiment Name: At_10percent_PEG_P Parameter: Plant Line Value: WS
  misc_feature: MA Experiment 20000527 PARAMETER Experiment Name: At_10percent_PEG_P Parameter: Timepoint (day) Value: 20
  misc_feature: MA Experiment 20000527 PARAMETER Experiment Name: At_10percent_PEG_P Parameter: Tissue Value: Whole Plant
  misc_feature: MA Experiment 20000527 PARAMETER Experiment Name: At_10percent_PEG_P Parameter: Treatment Value: 10percent PEG vs. No Treatment
  misc_feature: MA Experiment ID: 20001247 Result: Up-regulated in Transcription
  misc_feature: MA Experiment 20001247 PARAMETER Experiment Name: At_Far-red-induction_P Parameter: Age (day) Value: 7
  misc_feature: MA Experiment 20001247 PARAMETER Experiment Name: At_Far-red-induction_P Parameter: Light Value: Far-red vs. White
  misc_feature: MA Experiment 20001247 PARAMETER Experiment Name: At_Far-red-induction_P Parameter: Organism Value: A. thaliana
  misc_feature: MA Experiment 20001247 PARAMETER Experiment Name: At_Far-red-induction_P Parameter: Plant Line Value: Columbia
  misc_feature: MA Experiment 20001247 PARAMETER Experiment Name: At_Far-red-induction_P Parameter: Timepoint (hr) Value: 1
  misc_feature: MA Experiment 20001247 PARAMETER Experiment Name: At_Far-red-induction_P Parameter: Tissue Value: Whole Plant
  misc_feature: MA Experiment ID: 20001248 Result: Up-regulated in Transcription
  misc_feature: MA Experiment 20001248 PARAMETER Experiment Name: At_Far-red-induction_P Parameter: Age (day) Value: 7
  misc_feature: MA Experiment 20001248 PARAMETER Experiment Name: At_Far-red-induction_P Parameter: Light Value: Far-red vs. White
  misc_feature: MA Experiment 20001248 PARAMETER Experiment Name: At_Far-red-induction_P Parameter: Organism Value: A. thaliana
  misc_feature: MA Experiment 20001248 PARAMETER Experiment Name: At_Far-red-induction_P Parameter: Plant Line Value: Columbia
  misc_feature: MA Experiment 20001248 PARAMETER Experiment Name: At_Far-red-induction_P Parameter: Timepoint (hr) Value: 4
  misc_feature: MA Experiment 20001248 PARAMETER Experiment Name: At_Far-red-induction_P Parameter: Tissue Value: Whole Plant
  misc_feature: MA Experiment ID: 20001450 Result: Up-regulated in Transcription
  misc_feature: MA Experiment 20001450 PARAMETER Experiment Name: At_Far-red-induction_P Parameter: Age (day) Value: 7
  misc_feature: MA Experiment 20001450 PARAMETER Experiment Name: At_Far-red-induction_P Parameter: Light Value: Far-red vs. White
  misc_feature: MA Experiment 20001450 PARAMETER Experiment Name: At_Far-red-induction_P Parameter: Organism Value: A. thaliana
  misc_feature: MA Experiment 20001450 PARAMETER Experiment Name: At_Far-red-induction_P Parameter: Plant Line Value: Columbia
  misc_feature: MA Experiment 20001450 PARAMETER Experiment Name: At_Far-red-induction_P Parameter: Timepoint (hr) Value: 8
  misc_feature: MA Experiment 20001450 PARAMETER Experiment Name: At_Far-red-induction_P Parameter: Tissue Value: Whole Plant
  misc_feature: MA Experiment ID: 20001557 Result: Up-regulated in Transcription
  misc_feature: MA Experiment 20001557 PARAMETER Experiment Name: At_Drought_Soil_Dry_P Parameter: Age (day) Value: 27
  misc_feature: MA Experiment 20001557 PARAMETER Experiment Name: At_Drought_Soil_Dry_P Parameter: Organism Value: A. thaliana
  misc_feature: MA Experiment 20001557 PARAMETER Experiment Name: At_Drought_Soil_Dry_P Parameter: Plant Line Value: WS
  misc_feature: MA Experiment 20001557 PARAMETER Experiment Name: At_Drought_Soil_Dry_P Parameter: Post Timepoint (hr) Value: 3
  misc_feature: MA Experiment 20001557 PARAMETER Experiment Name: At_Drought_Soil_Dry_P Parameter: Post-Treatment Value: Re-Water vs. No Drought
  misc_feature: MA Experiment 20001557 PARAMETER Experiment Name: At_Drought_Soil_Dry_P Parameter: Timepoint (day) Value: 13
  misc_feature: MA Experiment 20001557 PARAMETER Experiment Name: At_Drought_Soil_Dry_P Parameter: Treatment Value: Drought vs. No Drought
  misc_feature: MA Experiment ID: 20001558 Result: Up-regulated in Transcription
  misc_feature: MA Experiment 20001558 PARAMETER Experiment Name: At_Drought_Soil_Dry_P Parameter: Age (day) Value: 27
  misc_feature: MA Experiment 20001558 PARAMETER Experiment Name: At_Drought_Soil_Dry_P Parameter: Organism Value: A. thaliana
  misc_feature: MA Experiment 20001558 PARAMETER Experiment Name: At_Drought_Soil_Dry_P Parameter: Plant Line Value: WS
  misc_feature: MA Experiment 20001558 PARAMETER Experiment Name: At_Drought_Soil_Dry_P Parameter: Post Timepoint (hr) Value: 6
  misc_feature: MA Experiment 20001558 PARAMETER Experiment Name: At_Drought_Soil_Dry_P Parameter: Post-Treatment Value: Re-Water vs. No Drought
  misc_feature: MA Experiment 20001558 PARAMETER Experiment Name: At_Drought_Soil_Dry_P Parameter: Timepoint (day) Value: 13
  misc_feature: MA Experiment 20001558 PARAMETER Experiment Name: At_Drought_Soil_Dry_P Parameter: Treatment Value: Drought vs. No Drought
  misc_feature: MA Experiment ID: 20001560 Result: Up-regulated in Transcription
  misc_feature: MA Experiment 20001560 PARAMETER Experiment Name: At_Drought_Soil_Dry_P Parameter: Age (day) Value: 28
  misc_feature: MA Experiment 20001560 PARAMETER Experiment Name: At_Drought_Soil_Dry_P Parameter: Organism Value: A. thaliana
  misc_feature: MA Experiment 20001560 PARAMETER Experiment Name: At_Drought_Soil_Dry_P Parameter: Plant Line Value: WS
  misc_feature: MA Experiment 20001560 PARAMETER Experiment Name: At_Drought_Soil_Dry_P Parameter: Post Timepoint (hr) Value: None
  misc_feature: MA Experiment 20001560 PARAMETER Experiment Name: At_Drought_Soil_Dry_P Parameter: Post-Treatment Value: None
  misc_feature: MA Experiment 20001560 PARAMETER Experiment Name: At_Drought_Soil_Dry_P Parameter: Timepoint (day) Value: 14
  misc_feature: MA Experiment 20001560 PARAMETER Experiment Name: At_Drought_Soil_Dry_P Parameter: Treatment Value: Drought vs. No Drought
  misc_feature: MA Experiment ID: 20001906 Result: Down-regulated in Transcription
  misc_feature: MA Experiment 20001906 PARAMETER Experiment Name: At_Drought_Reproduction_P Parameter: Age (day) Value: 35
  misc_feature: MA Experiment 20001906 PARAMETER Experiment Name: At_Drought_Reproduction_P Parameter: Organism Value: A. thaliana
  misc_feature: MA Experiment 20001906 PARAMETER Experiment Name: At_Drought_Reproduction_P Parameter: Plant Line Value: WS
  misc_feature: MA Experiment 20001906 PARAMETER Experiment Name: At_Drought_Reproduction_P Parameter: Timepoint (day) Value: 5
  misc_feature: MA Experiment 20001906 PARAMETER Experiment Name: At_Drought_Reproduction_P Parameter: Tissue Value: Siliques
  misc_feature: MA Experiment 20001906 PARAMETER Experiment Name: At_Drought_Reproduction_P Parameter: Treatment Value: Drought vs. No Drought
aaaatttaaatcttcattgaatgctttttctgaagctttatctaataaatctcttcgttgatccttcctttccattaacgaggtagaaattccaaaacgcgtaataatcttgtcgtcattacaaattacaataaaaagaagacatttttatttagatttccctctgatcctctcttttagatttcgaatcgagaccagatctgcgtgaagatgatagagaagtgtataggagcgcatcggtttcggagattacagagattcatgcgtcaagggaaagtgacgattctttgtctcgttctcaccgtcatcgtcttacgtggcacaatcggagccggtaagtttggtacgccggagaaagatatcgaggagatccgtgagcatttcttctacacgcgtaaacgcggcgagcctcaccgtgtcctcgtcgaggtctcttccaaaacgacgtcgtccgaagacggaggaaatggtggtaacagctacgagaccttcgatatcaacaagctattcgttgatgaaggagacgaagagaaatctcgagaccggactaataaaccttattctcttggtcccaagatctctgattgggatgagcagagacgtgattggctcaaacaaaaccctagcttccctaatttcgtggcgccaaacaagcctagggttcttcttgtcacaggttcagctcctaaaccgtgtgagaatcctgtaggagaccattacctcttgaaatcgattaagaacaaaatcgattactgtagaatacacggaatcgagatcttctacaacatggcgttgctcgatgctgagatggctggattctgggctaagcttccgttgattaggaagttactcttgtcacatcctgagattgagtttctatggtggatggatagtgatgccatgttcacggacatggtgttcgagcttccatgggagaggtacaaagattacaacttggtgatgcatggttggaacgagatggtttatgaccagaagaattggattggtctcaacacgggaagtttcttgctcaggaactcacagtggtcgcttgatcttcttgacgcttgggctcctatgggcccaaaagggaagatccgagaagaagcgggtaaagtcttgacccgggaacttaaagaccgacccgctttcgaagctgacgatcaatcggcgatggtttatctgctggcgacggagagagagaaatggggaggcaaagtttatctagagagtggttattacttgcacggttattgggggattttggtagaccggtacgaggagatgattgagaatcataaaccgggttttggagaccatcggtggccattggttacgcatttcgtcgggtgtaaaccgtgcgggaaatttggagattatccggtggaacggtgtctacggcagatggatagagcgtttaatttcggagacaatcagatccttcaaatgtatggtttcacgcataaatcgcttgggagccggcgcgtgaaacccacgcgcaatcagacggataggccgctcgatgccaaggacgagtttgggctgcttcatccgccgttcaaagcggccaagcttagtacgacgacgacgtgagtgagtgagaggatatattgttttgtatcttttaattttgcgtttaggggacacacgtttatttgttttattcaattttatttgtttgtagtttacttaattgttttgatctcccattcatggtggagtcgtgtatggagtatttaatgatttattgtagacgttatttc

SEQ ID NO: 39965 - protein, 460 aa, Arabidopsis thaliana
  peptide (1)..(460): Ceres Seq. ID no. 13488928
  misc_feature (147)..(391): Pfam Name: galactosyl transferase GMA12/MNN10 family Pfam Description: galactosyl transferase GMA12/MNN10 family
  misc_feature (89)..(359): Homolog of NCBI NO: 32127690 NR Description: galactomannan galactosyltransferase [Lotus
  misc_feature (114)..(445): Homolog of NCBI NO: 25349326 NR Description: hypothetical protein F6A14.20 - Arabidopsis
  misc_feature (114)..(445): Homolog of NCBI NO: 15221850 NR Description: transferase - related [Arabidopsis thaliana]
  misc_feature (10)..(82): Homolog of NCBI NO: 15240848 NR Description: transferase - related [Arabidopsis thaliana]
  misc_feature (114)..(445): Homolog of NCBI NO: 15240848 NR Description: transferase - related [Arabidopsis thaliana]
  misc_feature (10)..(108): Homolog of NCBI NO: 15221224 NR Description: transferase - related [Arabidopsis thaliana]
  misc_feature (105)..(449): Homolog of NCBI NO: 15221224 NR Description: transferase - related [Arabidopsis thaliana]
  misc_feature (1)..(454): Homolog of NCBI NO: 25349323 NR Description: probable glycosyltransferase [imported] -
  misc_feature (1)..(457): Homolog of NCBI NO: 18411962 NR Description: transferase - related [Arabidopsis thaliana]
  misc_feature (1)..(460): Homolog of NCBI NO: 15228843 NR Description: transferase - related [Arabidopsis thaliana]
MIEKCIGAHRFRRLQRFMRQGKVTILCLVLTVIVLRGTIGAGKFGTPEKDIEEIREHFFYTRKRGEPHRVLVEVSSKTTSSEDGGNGGNSYETFDINKLFVDEGDEEKSRDRTNKPYSLGPKISDWDEQRRDWLKQNPSFPNFVAPNKPRVLLVTGSAPKPCENPVGDHYLLKSIKNKIDYCRIHGIEIFYNMALLDAEMAGFWAKLPLIRKLLLSHPEIEFLWWMDSDAMFTDMVFELPWERYKDYNLVMHGWNEMVYDQKNWIGLNTGSFLLRNSQWSLDLLDAWAPMGPKGKIREEAGKVLTRELKDRPAFEADDQSAMVYLLATEREKWGGKVYLESGYYLHGYWGILVDRYEEMIENHKPGFGDHRWPLVTHFVGCKPCGKFGDYPVERCLRQMDRAFNFGDNQILQMYGFTHKSLGSRRVKPTRNQTDRPLDAKDEFGLLHPPFKAAKLSTTTT

SEQ ID NO: 39966 - protein, 443 aa, Arabidopsis thaliana
  peptide (1)..(443): Ceres Seq. ID no. 13488929
  misc_feature (130)..(374): Pfam Name: galactosyl transferase GMA12/MNN10 family Pfam Description: galactosyl transferase GMA12/MNN10 family
  misc_feature (72)..(342): Homolog of NCBI NO: 32127690 NR Description: galactomannan galactosyltransferase [Lotus
  misc_feature (97)..(428): Homolog of NCBI NO: 25349326 NR Description: hypothetical protein F6A14.20 - Arabidopsis
  misc_feature (97)..(428): Homolog of NCBI NO: 15221850 NR Description: transferase - related [Arabidopsis thaliana]
  misc_feature (1)..(65): Homolog of NCBI NO: 15240848 NR Description: transferase - related [Arabidopsis thaliana]
  misc_feature (97)..(428): Homolog of NCBI NO: 15240848 NR Description: transferase - related [Arabidopsis thaliana]
  misc_feature (1)..(91): Homolog of NCBI NO: 15221224 NR Description: transferase - related [Arabidopsis thaliana]
  misc_feature (88)..(432): Homolog of NCBI NO: 15221224 NR Description: transferase - related [Arabidopsis thaliana]
  misc_feature (1)..(437): Homolog of NCBI NO: 25349323 NR Description: probable glycosyltransferase [imported] -
  misc_feature (1)..(440): Homolog of NCBI NO: 18411962 NR Description: transferase - related [Arabidopsis thaliana]
  misc_feature (1)..(443): Homolog of NCBI NO: 15228843 NR Description: transferase - related [Arabidopsis thaliana]
MRQGKVTILCLVLTVIVLRGTIGAGKFGTPEKDIEEIREHFFYTRKRGEPHRVLVEVSSKTTSSEDGGNGGNSYETFDINKLFVDEGDEEKSRDRTNKPYSLGPKISDWDEQRRDWLKQNPSFPNFVAPNKPRVLLVTGSAPKPCENPVGDHYLLKSIKNKIDYCRIHGIEIFYNMALLDAEMAGFWAKLPLIRKLLLSHPEIEFLWWMDSDAMFTDMVFELPWERYKDYNLVMHGWNEMVYDQKNWIGLNTGSFLLRNSQWSLDLLDAWAPMGPKGKIREEAGKVLTRELKDRPAFEADDQSAMVYLLATEREKWGGKVYLESGYYLHGYWGILVDRYEEMIENHKPGFGDHRWPLVTHFVGCKPCGKFGDYPVERCLRQMDRAFNFGDNQILQMYGFTHKSLGSRRVKPTRNQTDRPLDAKDEFGLLHPPFKAAKLSTTTT

SEQ ID NO: 39967 - protein, 268 aa, Arabidopsis thaliana
  peptide (1)..(268): Ceres Seq. ID no. 13488930
  misc_feature (1)..(199): Pfam Name: galactosyl transferase GMA12/MNN10 family Pfam Description: galactosyl transferase GMA12/MNN10 family
  misc_feature (1)..(171): Homolog of NCBI NO: 25486551 NR Description: alpha galactosyltransferase (EC 2.4.1.-)
  misc_feature (162)..(236): Homolog of NCBI NO: 32127690 NR Description: galactomannan galactosyltransferase [Lotus
  misc_feature (1)..(167): Homolog of NCBI NO: 32127690 NR Description: galactomannan galactosyltransferase [Lotus
  misc_feature (1)..(253): Homolog of NCBI NO: 25349326 NR Description: hypothetical protein F6A14.20 - Arabidopsis
  misc_feature (1)..(253): Homolog of NCBI NO: 15221850 NR Description: transferase - related [Arabidopsis thaliana]
  misc_feature (1)..(253): Homolog of NCBI NO: 15240848 NR Description: transferase - related [Arabidopsis thaliana]
  misc_feature (1)..(257): Homolog of NCBI NO: 15221224 NR Description: transferase - related [Arabidopsis thaliana]
  misc_feature (1)..(262): Homolog of NCBI NO: 25349323 NR Description: probable glycosyltransferase [imported] -
  misc_feature (1)..(265): Homolog of NCBI NO: 18411962 NR Description: transferase - related [Arabidopsis thaliana]
  misc_feature (1)..(268): Homolog of NCBI NO: 15228843 NR Description: transferase - related [Arabidopsis thaliana]
MALLDAEMAGFWAKLPLIRKLLLSHPEIEFLWWMDSDAMFTDMVFELPWERYKDYNLVMHGWNEMVYDQKNWIGLNTGSFLLRNSQWSLDLLDAWAPMGPKGKIREEAGKVLTRELKDRPAFEADDQSAMVYLLATEREKWGGKVYLESGYYLHGYWGILVDRYEEMIENHKPGFGDHRWPLVTHFVGCKPCGKFGDYPVERCLRQMDRAFNFGDNQILQMYGFTHKSLGSRRVKPTRNQTDRPLDAKDEFGLLHPPFKAAKLSTTTT

SEQ ID NO: 39968 - DNA, 1290 bp, Arabidopsis thaliana
  misc_feature (1)..(1290): Ceres Seq. ID no. 12328789
  misc_feature: MA Experiment ID: 20000171 Result: Down-regulated in Transcription
  misc_feature: MA Experiment 20000171 PARAMETER Experiment Name: At_42deg_Heat_P Parameter: Age (day) Value: 14
  misc_feature: MA Experiment 20000171 PARAMETER Experiment Name: At_42deg_Heat_P Parameter: Organism Value: A. thaliana
  misc_feature: MA Experiment 20000171 PARAMETER Experiment Name: At_42deg_Heat_P Parameter: Plant Line Value: WS
  misc_feature: MA Experiment 20000171 PARAMETER Experiment Name: At_42deg_Heat_P Parameter: Temperature (deg C) Value: 42 vs. 22
  misc_feature: MA Experiment 20000171 PARAMETER Experiment Name: At_42deg_Heat_P Parameter: Timepoint (hr) Value: 1
  misc_feature: MA Experiment 20000171 PARAMETER Experiment Name: At_42deg_Heat_P Parameter: Tissue Value: Aerial
  misc_feature: MA Experiment ID: 20000173 Result: Down-regulated in Transcription
  misc_feature: MA Experiment 20000173 PARAMETER Experiment Name: At_42deg_Heat_P Parameter: Age (day) Value: 14
  misc_feature: MA Experiment 20000173 PARAMETER Experiment Name: At_42deg_Heat_P Parameter: Organism Value: A. thaliana
  misc_feature: MA Experiment 20000173 PARAMETER Experiment Name: At_42deg_Heat_P Parameter: Plant Line Value: WS
  misc_feature: MA Experiment 20000173 PARAMETER Experiment Name: At_42deg_Heat_P Parameter: Temperature (deg C) Value: 42 vs. 22
  misc_feature: MA Experiment 20000173 PARAMETER Experiment Name: At_42deg_Heat_P Parameter: Timepoint (hr) Value: 6
  misc_feature: MA Experiment 20000173 PARAMETER Experiment Name: At_42deg_Heat_P Parameter: Tissue Value: Aerial
  misc_feature: MA Experiment ID: 20000184 Result: Up-regulated in Transcription
  misc_feature: MA Experiment 20000184 PARAMETER Experiment Name: At_Shoots__P Parameter: Age (day) Value: 7
  misc_feature: MA Experiment 20000184 PARAMETER Experiment Name: At_Shoots__P Parameter: Tissue Value: Shoots vs. Whole Plant
  misc_feature: MA Experiment ID: 20000185 Result: Down-regulated in Transcription
  misc_feature: MA Experiment 20000185 PARAMETER Experiment Name: At_Roots__P Parameter: Age (day) Value: 7 vs. 21
  misc_feature: MA Experiment 20000185 PARAMETER Experiment Name: At_Roots__P Parameter: Organism Value: A. thaliana
  misc_feature: MA Experiment 20000185 PARAMETER Experiment Name: At_Roots__P Parameter: Tissue Value: Roots vs. Whole Plant
  misc_feature: MA Experiment ID: 20000264 Result: Up-regulated in Transcription
  misc_feature: MA Experiment 20000264 PARAMETER Experiment Name: At_Open_Flower_P Parameter: Age (day) Value: 21
  misc_feature: MA Experiment 20000264 PARAMETER Experiment Name: At_Open_Flower_P Parameter: Plant Line Value: WS
  misc_feature: MA Experiment 20000264 PARAMETER Experiment Name: At_Open_Flower_P Parameter: Tissue Value: Open Flower vs. Whole Plant
  misc_feature: MA Experiment ID: 20000265 Result: Up-regulated in Transcription
  misc_feature: MA Experiment 20000265 PARAMETER Experiment Name: At_Open_Flower_P Parameter: Age (day) Value: 21
  misc_feature: MA Experiment 20000265 PARAMETER Experiment Name: At_Open_Flower_P Parameter: Plant Line Value: WS
  misc_feature: MA Experiment 20000265 PARAMETER Experiment Name: At_Open_Flower_P Parameter: Tissue Value: Closed Flower vs. Whole Plant
  misc_feature: MA Experiment ID: 20000286 Result: Up-regulated in Transcription
  misc_feature: MA Experiment 20000286 PARAMETER Experiment Name: At_Open_Flower_P Parameter: Age (day) Value: 21
  misc_feature: MA Experiment 20000286 PARAMETER Experiment Name: At_Open_Flower_P Parameter: Plant Line Value: WS
  misc_feature: MA Experiment 20000286 PARAMETER Experiment Name: At_Open_Flower_P Parameter: Tissue Value: Half Open vs. Whole Plant
  misc_feature: MA Experiment ID: 20000438 Result: Up-regulated in Transcription
  misc_feature: MA Experiment 20000438 PARAMETER Experiment Name: At_Shoots__P Parameter: Age (day) Value: 14
  misc_feature: MA Experiment 20000438 PARAMETER Experiment Name: At_Shoots__P Parameter: Tissue Value: Shoots vs. Whole Plant
  misc_feature: MA Experiment ID: 20000439 Result: Down-regulated in Transcription
  misc_feature: MA Experiment 20000439 PARAMETER Experiment Name: At_Roots__P Parameter: Age (day) Value: 14 vs. 21
  misc_feature: MA Experiment 20000439 PARAMETER Experiment Name: At_Roots__P Parameter: Organism Value: A. thaliana
  misc_feature: MA Experiment 20000439 PARAMETER Experiment Name: At_Roots__P Parameter: Tissue Value: Roots vs. Whole Plant
  misc_feature: MA Experiment ID: 20000794 Result: Up-regulated in Transcription
  misc_feature: MA Experiment 20000794 PARAMETER Experiment Name: At_Petals_P Parameter: Age (day) Value: 23-25 days
  misc_feature: MA Experiment 20000794 PARAMETER Experiment Name: At_Petals_P Parameter: Plant Line Value: WS
  misc_feature: MA Experiment 20000794 PARAMETER Experiment Name: At_Petals_P Parameter: Tissue Value: Petals vs. Whole plant
  misc_feature: MA Experiment ID: 20001450 Result: Up-regulated in Transcription
  misc_feature: MA Experiment 20001450 PARAMETER Experiment Name: At_Far-red-induction_P Parameter: Age (day) Value: 7
  misc_feature: MA Experiment 20001450 PARAMETER Experiment Name: At_Far-red-induction_P Parameter: Light Value: Far-red vs. White
  misc_feature: MA Experiment 20001450 PARAMETER Experiment Name: At_Far-red-induction_P Parameter: Organism Value: A. thaliana
  misc_feature: MA Experiment 20001450 PARAMETER Experiment Name: At_Far-red-induction_P Parameter: Plant Line Value: Columbia
  misc_feature: MA Experiment 20001450 PARAMETER Experiment Name: At_Far-red-induction_P Parameter: Timepoint (hr) Value: 8
  misc_feature: MA Experiment 20001450 PARAMETER Experiment Name: At_Far-red-induction_P Parameter: Tissue Value: Whole Plant
cctcacccatcaagtcccaattcccaacactgtcactcaaaaagaatcttcaaacaatgaatctcaacgtcgtcgttttactcctactccttctaatctcatccgccacgtgttgtccgccgtcagaccgccgtgcacttctagctttccgatcagctcttcacgagccttacctcggcattttcaactcatggacaggccaagactgttgccacaactggtacggtattagctgcgactcgctcactcaccgagtcgccgacataaatctccgcggcgagtcagaagatccaatcttcgaacgagctcaccgaaccggttacatgaccggacacatctccgcctcgatatgtgagctcactcgtctctccgccattacaatcgccgattggaaaggtatctccggcgaaatccctaaatgtatcactcgtcttccttttctccgtacactcgacttaatcggaaaccaaatctccggtgggattccatacgacatcggaagattaaaccggttagctgttttaaacgtagccgataaccgaatctccggttcaattccaaaatcattaaccaatctctctagcttaatgcatttagatctccgtaacaacttaatctccggtgtaatcccgtcggacgtcggaagattaaaaatgctcagccgtgcgttattatccggtaaccgaataaccggtcggatcccagaatcattaaccaatatctaccggttagctgacgtggatctctccggtaaccaactctacggtacaatcccaccgtctctaggacgtatgtcggtactagccacacttaacctcgacggaaacaaaatctccggcgagatacctcaaactctgatgacgtcgtcggtgatgaatctgaatttgagccggaacttgctacaagggaagatacctgaagggtttggaccaaggtcttacttcacagttcttgatttgtcgtataataatctgaaaggaccaataccgagatcgatctcaggtgcgtcgtttattggtcatttggatcttagccataaccatctctgtgggaggattccggtaggttcaccgtttgatcatcttgaagcggcgtcgtttatgtttaacgactgtctttgtggtaaacctttaagagcttgcttgaaaaattgatttttatatgtaatttgagttttttcattagagacattattatatttatggttatgcattttataaaaaaaagatttaaaattgtatgctacgtttagttgaattatgggatgattaacaaaatatataaacttcc

SEQ ID NO: 39969 - protein, 383 aa, Arabidopsis thaliana
  peptide (1)..(383): Ceres Seq. ID no. 12328790
  misc_feature (146)..(169): Pfam Name: Leucine Rich Repeat Pfam Description: Leucine Rich Repeat
  misc_feature (5)..(353): Homolog of NCBI NO: 25518158 NR Description: Hypothetical 55.6 kDa protein - Arabidopsis
  misc_feature (24)..(346): Homolog of NCBI NO: 15225296 NR Description: disease resistance protien-related (LRR); protein
  misc_feature (40)..(373): Homolog of NCBI NO: 421844 NR Description: DRT100 protein precursor - Arabidopsis thaliana
  misc_feature (12)..(377): Homolog of NCBI NO: 15230539 NR Description: DNA-damage-repair/toleration protein, putative
  misc_feature (24)..(380): Homolog of NCBI NO: 38566726 NR Description: leucine rich repeat protein [Cicer arietinum]
  misc_feature (10)..(382): Homolog of NCBI NO: 14532722 NR Description: unknown protein [Arabidopsis thaliana]
  misc_feature (61)..(380): Homolog of NCBI NO: 25004882 NR Description: polygalacturonase inhibitor-like protein [Cicer
  misc_feature (10)..(382): Homolog of NCBI NO: 15239943 NR Description: leucine rich repeat protein family
  misc_feature (10)..(382): Homolog of NCBI NO: 21593689 NR Description: leucine rich repeat protein, putative
  misc_feature (19)..(383): Homolog of NCBI NO: 15232373 NR Description: disease resistance protein family (LRR)
SPIKSQFPTLSLKKNLQTMNLNVVVLLLLLLISSATCCPPSDRRALLAFRSALHEPYLGIFNSWTGQDCCHNWYGISCDSLTHRVADINLRGESEDPIFERAHRTGYMTGHISASICELTRLSAITIADWKGISGEIPKCITRLPFLRTLDLIGNQISGGIPYDIGRLNRLAVLNVADNRISGSIPKSLTNLSSLMHLDLRNNLISGVIPSDVGRLKMLSRALLSGNRITGRIPESLTNIYRLADVDLSGNQLYGTIPPSLGRMSVLATLNLDGNKISGEIPQTLMTSSVMNLNLSRNLLQGKIPEGFGPRSYFTVLDLSYNNLKGPIPRSISGASFIGHLDLSHNHLCGRIPVGSPFDHLEAASFMFNDCLCGKPLRACLKN

SEQ ID NO: 39970 - protein, 365 aa, Arabidopsis thaliana
  peptide (1)..(365): Ceres Seq. ID no. 12328791
  misc_feature (128)..(151): Pfam Name: Leucine Rich Repeat Pfam Description: Leucine Rich Repeat
  misc_feature (1)..(335): Homolog of NCBI NO: 25518158 NR Description: Hypothetical 55.6 kDa protein - Arabidopsis
  misc_feature (6)..(328): Homolog of NCBI NO: 15225296 NR Description: disease resistance protien-related (LRR); protein
  misc_feature (22)..(355): Homolog of NCBI NO: 421844 NR Description: DRT100 protein precursor - Arabidopsis thaliana
  misc_feature (1)..(359): Homolog of NCBI NO: 15230539 NR Description: DNA-damage-repair/toleration protein, putative
  misc_feature (6)..(362): Homolog of NCBI NO: 38566726 NR Description: leucine rich repeat protein [Cicer arietinum]
  misc_feature (1)..(364): Homolog of NCBI NO: 14532722 NR Description: unknown protein [Arabidopsis thaliana]
  misc_feature (43)..(362): Homolog of NCBI NO: 25004882 NR Description: polygalacturonase inhibitor-like protein [Cicer
  misc_feature (1)..(364): Homolog of NCBI NO: 15239943 NR Description: leucine rich repeat protein family
  misc_feature (1)..(364): Homolog of NCBI NO: 21593689 NR Description: leucine rich repeat protein, putative
  misc_feature (1)..(365): Homolog of NCBI NO: 15232373 NR Description: disease resistance protein family (LRR)
MNLNVVVLLLLLLISSATCCPPSDRRALLAFRSALHEPYLGIFNSWTGQDCCHNWYGISCDSLTHRVADINLRGESEDPIFERAHRTGYMTGHISASICELTRLSAITIADWKGISGEIPKCITRLPFLRTLDLIGNQISGGIPYDIGRLNRLAVLNVADNRISGSIPKSLTNLSSLMHLDLRNNLISGVIPSDVGRLKMLSRALLSGNRITGRIPESLTNIYRLADVDLSGNQLYGTIPPSLGRMSVLATLNLDGNKISGEIPQTLMTSSVMNLNLSRNLLQGKIPEGFGPRSYFTVLDLSYNNLKGPIPRSISGASFIGHLDLSHNHLCGRIPVGSPFDHLEAASFMFNDCLCGKPLRACLKN

SEQ ID NO: 39971 - protein, 276 aa, Arabidopsis thaliana
  peptide (1)..(276): Ceres Seq. ID no. 12328792
  misc_feature (39)..(62): Pfam Name: Leucine Rich Repeat Pfam Description: Leucine Rich Repeat
  misc_feature (1)..(246): Homolog of NCBI NO: 25518158 NR Description: Hypothetical 55.6 kDa protein - Arabidopsis
  misc_feature (1)..(239): Homolog of NCBI NO: 15225296 NR Description: disease resistance protien-related (LRR); protein
  misc_feature (1)..(266): Homolog of NCBI NO: 421844 NR Description: DRT100 protein precursor - Arabidopsis thaliana
  misc_feature (1)..(270): Homolog of NCBI NO: 15230539 NR Description: DNA-damage-repair/toleration protein, putative
  misc_feature (1)..(273): Homolog of NCBI NO: 38566726 NR Description: leucine rich repeat protein [Cicer arietinum]
  misc_feature (1)..(275): Homolog of NCBI NO: 14532722 NR Description: unknown protein [Arabidopsis thaliana]
  misc_feature (1)..(273): Homolog of NCBI NO: 25004882 NR Description: polygalacturonase inhibitor-like protein [Cicer
  misc_feature (1)..(275): Homolog of NCBI NO: 15239943 NR Description: leucine rich repeat protein family
  misc_feature (1)..(275): Homolog of NCBI NO: 21593689 NR Description: leucine rich repeat protein, putative
  misc_feature (1)..(276): Homolog of NCBI NO: 15232373 NR Description: disease resistance protein family (LRR)
MTGHISASICELTRLSAITIADWKGISGEIPKCITRLPFLRTLDLIGNQISGGIPYDIGRLNRLAVLNVADNRISGSIPKSLTNLSSLMHLDLRNNLISGVIPSDVGRLKMLSRALLSGNRITGRIPESLTNIYRLADVDLSGNQLYGTIPPSLGRMSVLATLNLDGNKISGEIPQTLMTSSVMNLNLSRNLLQGKIPEGFGPRSYFTVLDLSYNNLKGPIPRSISGASFIGHLDLSHNHLCGRIPVGSPFDHLEAASFMFNDCLCGKPLRACLKN

SEQ ID NO: 39972 - DNA, 1036 bp, Arabidopsis thaliana
  misc_feature (1)..(1036): Ceres Seq. ID no. 12329101
  misc_feature: MA Experiment ID: 108434 Result: Down-regulated in Transcription
  misc_feature: MA Experiment 108434 PARAMETER Experiment Name: At_Root_Tips_cDNA_P Parameter: Tissue Value: Root Tips
  misc_feature: MA Experiment ID: 108435 Result: Down-regulated in Transcription
  misc_feature: MA Experiment 108435 PARAMETER Experiment Name: At_stm_Mutants_cDNA_P Parameter: Plant Line Value: wt Landsburg vs stm
  misc_feature: MA Experiment 108435 PARAMETER Experiment Name: At_stm_Mutants_cDNA_P Parameter: Tissue Value: Shoot Apical Meristem Region
  misc_feature: MA Experiment ID: 108461 Result: Up-regulated in Transcription
  misc_feature: MA Experiment 108461 PARAMETER Experiment Name: At_Germinating_Seeds_cDNA_P Parameter: Age (day) Value: 1 vs. 0
  misc_feature: MA Experiment 108461 PARAMETER Experiment Name: At_Germinating_Seeds_cDNA_P Parameter: Tissue Value: Germinating Seeds
  misc_feature: MA Experiment ID: 108462 Result: Up-regulated in Transcription
  misc_feature: MA Experiment 108462 PARAMETER Experiment Name: At_Germinating_Seeds_cDNA_P Parameter: Age (day) Value: 2 vs. 0
  misc_feature: MA Experiment 108462 PARAMETER Experiment Name: At_Germinating_Seeds_cDNA_P Parameter: Tissue Value: Germinating Seeds
  misc_feature: MA Experiment ID: 108488 Result: Up-regulated in Transcription
  misc_feature: MA Experiment ID: 108489 Result: Down-regulated in Transcription
  misc_feature: MA Experiment ID: 108573 Result: Up-regulated in Transcription
  misc_feature: MA Experiment 108573 PARAMETER Experiment Name: At_Drought_cDNA_P Parameter: Timepoint (hr) Value: 6
  misc_feature: MA Experiment 108573 PARAMETER Experiment Name: At_Drought_cDNA_P Parameter: Tissue Value: Aerial
  misc_feature: MA Experiment 108573 PARAMETER Experiment Name: At_Drought_cDNA_P Parameter: Treatment Value: Drought vs. No Drought
  misc_feature: MA Experiment ID: 108595 Result: Down-regulated in Transcription
  misc_feature: MA Experiment 108595 PARAMETER Experiment Name: At_Ler-pi_Ovule_cDNA_P Parameter: Plant Line Value: null
  misc_feature: MA Experiment ID: 20000180 Result: Up-regulated in Transcription
  misc_feature: MA Experiment 20000180 PARAMETER Experiment Name: At_Germinating_Seeds_P Parameter: Age (hr) Value: 24 vs. 0
  misc_feature: MA Experiment 20000180 PARAMETER Experiment Name: At_Germinating_Seeds_P Parameter: Tissue Value: Germinating Seeds
  misc_feature: MA Experiment ID: 20000185 Result: Down-regulated in Transcription
  misc_feature: MA Experiment 20000185 PARAMETER Experiment Name: At_Roots__P Parameter: Age (day) Value: 7 vs. 21
  misc_feature: MA Experiment 20000185 PARAMETER Experiment Name: At_Roots__P Parameter: Organism Value: A. thaliana
  misc_feature: MA Experiment 20000185 PARAMETER Experiment Name: At_Roots__P Parameter: Tissue Value: Roots vs. Whole Plant
  misc_feature: MA Experiment ID: 20000264 Result: Down-regulated in Transcription
  misc_feature: MA Experiment 20000264 PARAMETER Experiment Name: At_Open_Flower_P Parameter: Age (day) Value: 21
  misc_feature: MA Experiment 20000264 PARAMETER Experiment Name: At_Open_Flower_P Parameter: Plant Line Value: WS
  misc_feature: MA Experiment 20000264 PARAMETER Experiment Name: At_Open_Flower_P Parameter: Tissue Value: Open Flower vs. Whole Plant
  misc_feature: MA Experiment ID: 20000265 Result: Down-regulated in Transcription
  misc_feature: MA Experiment 20000265 PARAMETER Experiment Name: At_Open_Flower_P Parameter: Age (day) Value: 21
  misc_feature: MA Experiment 20000265 PARAMETER Experiment Name: At_Open_Flower_P Parameter: Plant Line Value: WS
  misc_feature: MA Experiment 20000265 PARAMETER Experiment Name: At_Open_Flower_P Parameter: Tissue Value: Closed Flower vs. Whole Plant
  misc_feature: MA Experiment ID: 20000269 Result: Down-regulated in Transcription
  misc_feature: MA Experiment 20000269 PARAMETER Experiment Name: At_1mM_KNO3_L-vs-H_Roots_P Parameter: Age (day) Value: 7,10,12
  misc_feature: MA Experiment 20000269 PARAMETER Experiment Name: At_1mM_KNO3_L-vs-H_Roots_P Parameter: Organism Value: A. thaliana
  misc_feature: MA Experiment 20000269 PARAMETER Experiment Name: At_1mM_KNO3_L-vs-H_Roots_P Parameter: Plant Line Value: WS
  misc_feature: MA Experiment 20000269 PARAMETER Experiment Name: At_1mM_KNO3_L-vs-H_Roots_P Parameter: Timepoint (day) Value: 7,10,12
  misc_feature: MA Experiment 20000269 PARAMETER Experiment Name: At_1mM_KNO3_L-vs-H_Roots_P Parameter: Tissue Value: Roots
  misc_feature: MA Experiment 20000269 PARAMETER Experiment Name: At_1mM_KNO3_L-vs-H_Roots_P Parameter: Treatment Value: 1mM KNO3 vs. 50mM KNO3
  misc_feature: MA Experiment ID: 20000286 Result: Down-regulated in Transcription
  misc_feature: MA Experiment 20000286 PARAMETER Experiment Name: At_Open_Flower_P Parameter: Age (day) Value: 21
  misc_feature: MA Experiment 20000286 PARAMETER Experiment Name: At_Open_Flower_P Parameter: Plant Line Value: WS
  misc_feature: MA Experiment 20000286 PARAMETER Experiment Name: At_Open_Flower_P Parameter: Tissue Value: Half Open vs. Whole Plant
  misc_feature: MA Experiment ID: 20000439 Result: Down-regulated in Transcription
  misc_feature: MA Experiment 20000439 PARAMETER Experiment Name: At_Roots__P Parameter: Age (day) Value: 14 vs. 21
  misc_feature: MA Experiment 20000439 PARAMETER Experiment Name: At_Roots__P Parameter: Organism Value: A. thaliana
  misc_feature: MA Experiment 20000439 PARAMETER Experiment Name: At_Roots__P Parameter: Tissue Value: Roots vs. Whole Plant
  misc_feature: MA Experiment ID: 20000441 Result: Up-regulated in Transcription
  misc_feature: MA Experiment 20000441 PARAMETER Experiment Name: At_1uM_BR-BRZ__P Parameter: Tissue Value: Shoot Apices
  misc_feature: MA Experiment 20000441 PARAMETER Experiment Name: At_1uM_BR-BRZ__P Parameter: Treatment Value: 1uM BR vs. No Treatment
  misc_feature: MA Experiment ID: 20000794 Result: Down-regulated in Transcription
  misc_feature: MA Experiment 20000794 PARAMETER Experiment Name: At_Petals_P Parameter: Age (day) Value: 23-25 days
  misc_feature: MA Experiment 20000794 PARAMETER Experiment Name: At_Petals_P Parameter: Plant Line Value: WS
  misc_feature: MA Experiment 20000794 PARAMETER Experiment Name: At_Petals_P Parameter: Tissue Value: Petals vs. Whole plant
  misc_feature: MA Experiment ID: 20001757 Result: Up-regulated in Transcription
  misc_feature: MA Experiment 20001757 PARAMETER Experiment Name: At_50mM_NH4NO3_L-to-H_P Parameter: Timepoint (hr) Value: 6
  misc_feature: MA Experiment 20001757 PARAMETER Experiment Name: At_50mM_NH4NO3_L-to-H_P Parameter: Tissue Value: Leaf
  misc_feature: MA Experiment 20001757 PARAMETER Experiment Name: At_50mM_NH4NO3_L-to-H_P Parameter: Treatment Value: 50mM NH4NO3 vs 100mM Mannitol
aactaaaccatcatcatcatcatcatctcttggtgacagaagaaaagagttgaggaacagagaaaatggcagcacaagcacttgtgtcttcttcacttacctcctctgttcagacagctagacagatatttggctcaaaaccagttgcgtctgcctcacagaagaagagttcctttgttgttaaagctgctgcaactccacctgtcaagcaaggagcaaacagaccattgtggtttgcatcatcgcagagtctctcttacttggatggcagcttacctggtgactatggattcgaccctcttggcctttcagacccagaaggtactggaggattcattgagccaagatggctagcatacggagagatcatcaacggacggttcgccatcagctggagctattgctcctgagattctaggaaaggctggtctgattccagcagagactgctcttccttggttccaaaccggtgtgattccaccagcagggacatacacttactgggcagacaattacacactctttgttctcgagatggctctgatgggattcgctgagcaccggaggttacaggactggtacaacccaggatctatgggaaaacagtacttcttggggttagagaagggtttggccggttcaggtaacccggcttaccccggtggacctttcttcaaccctcttgggtttgggaaagatgagaagtcactgaaggagttgaaactcaaggaggtcaagaacggtagactggctatgctcgccatcctcggttactttatccaaggactagtgaccggtgtgggaccttaccagaacctgcttgatcacttggctgatcccgtcaacaacaacgtcttgaccagcctcaagttccactgaggtgatcatcatctcatgtgtttttatgtctcttgtatcgtacaatatttccatctttcgctaccattggcttcttcgtattgtaacaccctgtgtaaacatattcgtgttttgtaagaaatgacaatgtcaatggccaaacgaaaaaacttttagg

SEQ ID NO: 39973 - protein, 114 aa, Arabidopsis thaliana
  peptide (1)..(114): Ceres Seq. ID no. 12329102
  misc_feature (8)..(108): Homolog of NCBI NO: 2129879 NR Description: chlorophyll a/b-binding protein type II
  misc_feature (11)..(108): Homolog of NCBI NO: 40714511 NR Description: light-harvesting chlorophyll-a/b protein of
  misc_feature (72)..(108): Homolog of NCBI NO: 7271947 NR Description: chlorophyll a/b-binding protein type III [Alonsoa
  misc_feature (1)..(108): Homolog of NCBI NO: 99487 NR Description: chlorophyll a/b-binding protein (clone pINEab 43)
  misc_feature (1)..(108): Homolog of NCBI NO: 7443229 NR Description: probable chlorophyll a/b-binding protein type III
  misc_feature (1)..(108): Homolog of NCBI NO: 115813 NR Description: Chlorophyll A-B binding protein 8, chloroplast
  misc_feature (1)..(108): Homolog of NCBI NO: 82080 NR Description: chlorophyll a/b-binding protein type III
  misc_feature (1)..(108): Homolog of NCBI NO: 21554335 NR Description: PSI type III chlorophyll a/b-binding protein,
  misc_feature (1)..(108): Homolog of NCBI NO: 430947 NR Description: PSI type III chlorophyll a/b-binding protein
  misc_feature (1)..(108): Homolog of NCBI NO: 15219941 NR Description: light-harvesting chlorophyll a/b binding protein
MAAQALVSSSLTSSVQTARQIFGSKPVASASQKKSSFVVKAAATPPVKQGANRPLWFASSQSLSYLDGSLPGDYGFDPLGLSDPEGTGGFIEPRWLAYGEIINGRFAISWSYCS

SEQ ID NO: 39974 - protein, 114 aa, Arabidopsis thaliana
  peptide (1)..(114): Ceres Seq. ID no. 12329103
  misc_feature (1)..(85): Pfam Name: Chlorophyll A-B binding protein Pfam Description: Chlorophyll A-B binding protein
  misc_feature (1)..(110): Homolog of NCBI NO: 40714511 NR Description: light-harvesting chlorophyll-a/b protein of
  misc_feature (1)..(114): Homolog of NCBI NO: 37780998 NR Description: chlorophyll a/b binding protein [Vitis vinifera]
  misc_feature (1)..(105): Homolog of NCBI NO: 7271947 NR Description: chlorophyll a/b-binding protein type III [Alonsoa
  misc_feature (1)..(114): Homolog of NCBI NO: 99487 NR Description: chlorophyll a/b-binding protein (clone pINEab 43)
  misc_feature (1)..(114): Homolog of NCBI NO: 7443229 NR Description: probable chlorophyll a/b-binding protein type III
  misc_feature (1)..(114): Homolog of NCBI NO: 115813 NR Description: Chlorophyll A-B binding protein 8, chloroplast
  misc_feature (1)..(114): Homolog of NCBI NO: 82080 NR Description: chlorophyll a/b-binding protein type III
  misc_feature (1)..(114): Homolog of NCBI NO: 21554335 NR Description: PSI type III chlorophyll a/b-binding protein,
  misc_feature (1)..(114): Homolog of NCBI NO: 430947 NR Description: PSI type III chlorophyll a/b-binding protein
  misc_feature (1)..(114): Homolog of NCBI NO: 15219941 NR Description: light-harvesting chlorophyll a/b binding protein
MALMGFAEHRRLQDWYNPGSMGKQYFLGLEKGLAGSGNPAYPGGPFFNPLGFGKDEKSLKELKLKEVKNGRLAMLAILGYFIQGLVTGVGPYQNLLDHLADPVNNNVLTSLKFH

SEQ ID NO: 39975 - protein, 111 aa, Arabidopsis thaliana
  peptide (1)..(111): Ceres Seq. ID no. 12329104
  misc_feature (1)..(82): Pfam Name: Chlorophyll A-B binding protein Pfam Description: Chlorophyll A-B binding protein
  misc_feature (1)..(107): Homolog of NCBI NO: 40714511 NR Description: light-harvesting chlorophyll-a/b protein of
  misc_feature (1)..(111): Homolog of NCBI NO: 37780998 NR Description: chlorophyll a/b binding protein [Vitis vinifera]
  misc_feature (1)..(102): Homolog of NCBI NO: 7271947 NR Description: chlorophyll a/b-binding protein type III [Alonsoa
  misc_feature (1)..(111): Homolog of NCBI NO: 99487 NR Description: chlorophyll a/b-binding protein (clone pINEab 43)
  misc_feature (1)..(111): Homolog of NCBI NO: 7443229 NR Description: probable chlorophyll a/b-binding protein type III
  misc_feature (1)..(111): Homolog of NCBI NO: 115813 NR Description: Chlorophyll A-B binding protein 8, chloroplast
  misc_feature (1)..(111): Homolog of NCBI NO: 82080 NR Description: chlorophyll a/b-binding protein type III
  misc_feature (1)..(111): Homolog of NCBI NO: 21554335 NR Description: PSI type III chlorophyll a/b-binding protein,
  misc_feature (1)..(111): Homolog of NCBI NO: 430947 NR Description: PSI type III chlorophyll a/b-binding protein
  misc_feature (1)..(111): Homolog of NCBI NO: 15219941 NR Description: light-harvesting chlorophyll a/b binding protein
MGFAEHRRLQDWYNPGSMGKQYFLGLEKGLAGSGNPAYPGGPFFNPLGFGKDEKSLKELKLKEVKNGRLAMLAILGYFIQGLVTGVGPYQNLLDHLADPVNNNVLTSLKFH

SEQ ID NO: 39976 - DNA, 1355 bp, Arabidopsis thaliana
  misc_feature (1)..(1355): Ceres Seq. ID no. 13575049
  misc_feature: MA Experiment ID: 20000184 Result: Up-regulated in Transcription
  misc_feature: MA Experiment 20000184 PARAMETER Experiment Name: At_Shoots__P Parameter: Age (day) Value: 7
  misc_feature: MA Experiment 20000184 PARAMETER Experiment Name: At_Shoots__P Parameter: Tissue Value: Shoots vs. Whole Plant
  misc_feature: MA Experiment ID: 20000185 Result: Up-regulated in Transcription
  misc_feature: MA Experiment 20000185 PARAMETER Experiment Name: At_Roots__P Parameter: Age (day) Value: 7 vs. 21
  misc_feature: MA Experiment 20000185 PARAMETER Experiment Name: At_Roots__P Parameter: Organism Value: A. thaliana
  misc_feature: MA Experiment 20000185 PARAMETER Experiment Name: At_Roots__P Parameter: Tissue Value: Roots vs. Whole Plant
  misc_feature: MA Experiment ID: 20000438 Result: Up-regulated in Transcription
  misc_feature: MA Experiment 20000438 PARAMETER Experiment Name: At_Shoots__P Parameter: Age (day) Value: 14
  misc_feature: MA Experiment 20000438 PARAMETER Experiment Name: At_Shoots__P Parameter: Tissue Value: Shoots vs. Whole Plant
  misc_feature: MA Experiment ID: 20000439 Result: Up-regulated in Transcription
  misc_feature: MA Experiment 20000439 PARAMETER Experiment Name: At_Roots__P Parameter: Age (day) Value: 14 vs. 21
  misc_feature: MA Experiment 20000439 PARAMETER Experiment Name: At_Roots__P Parameter: Organism Value: A. thaliana
  misc_feature: MA Experiment 20000439 PARAMETER Experiment Name: At_Roots__P Parameter: Tissue Value: Roots vs. Whole Plant
atcatttccctttctcttcccattttagtcttcctataacttcttctcaatcctctctcatatcttttttcttagtttaaatttcaataaaatagaaaaaaacatatacaaatctacagagaagagaagctttattttaatcttatgtgtgtgtgtgtgttttatataatttttattttttttcaaattaaaatctcttctttgcttttgatgtgggcatggctggtcttgatctaggcacagcttttcgttacgttaatcaccagctccatcgtcccgatctccaccttcaccacaattcctcctccgatgacgtcactcccggagccgggatgggtcatttcaccgtcgacgacgaagacaacaacaacaaccatcaaggtcttgacttagcctctggtggaggatcaggaagctctggaggaggaggaggtcacggcgggggaggagacgtcgttggtcgtcgtccacgtggcagaccaccgggatccaagaacaaaccgaaacctccggtaattatcacgcgcgagagcgcaaacactctaagagctcacattcttgaagtaacaaacggctgcgatgttttcgactgcgttgcgacttatgctcgtcggagacagcgagggatctgcgttctgagcggtagcggaacggtcacgaacgtcagcatacgtcagccatctgcggctggagcggttgtgacgctacaaggaacgttcgagattctttctctctccggatcgtttcttcctcctccggcacctcccggagcaacgagtttgacaattttcttagccggaggacaaggtcaggtggttggaggaagcgttgtgggtgagcttacggcggctggaccggtgattgtgattgcagcttcgtttactaatgttgcttatgagagacttcctttagaagaagatgagcagcagcaacagcttggaggaggatctaacggcggaggtaatttgtttccggaggtggcagctggaggaggaggaggacttccgttctttaatttaccgatgaatatgcaaccaaatgtgcaacttccggtggaaggttggccggggaattccggtggaagaggtcctttctgatgtgtatatattgataatcattatatatataccggcggagaagcttttccggcgaagaatttgcgagagtgaagaaaggttagaaaagcttttaatggactaatgaatttcaaattatcatcgtgatttcggacattgtcttgttcatcatgttaagcttaggtttattttttgtcgtttgtagaattttatgtttgaatccttttttttttctgtgaaactctattgtgttcgtctgcgaaggaaaaaaaaattctc

SEQ ID NO: 39977 - protein, 292 aa, Arabidopsis thaliana
  peptide (1)..(292): Ceres Seq. ID no. 13575050
  misc_feature (75)..(274): Homolog of NCBI NO: 18414224 NR Description: expressed protein [Arabidopsis thaliana]
  misc_feature (46)..(258): Homolog of NCBI NO: 34902080 NR Description: unknown protein [Oryza sativa (japonica
  misc_feature (16)..(290): Homolog of NCBI NO: 18396925 NR Description: expressed protein [Arabidopsis thaliana]
  misc_feature (45)..(285): Homolog of NCBI NO: 15225475 NR Description: AT-hook DNA-binding protein -related [Arabidopsis
  misc_feature (44)..(250): Homolog of NCBI NO: 15235815 NR Description: DNA binding protein -related [Arabidopsis
  misc_feature (43)..(278): Homolog of NCBI NO: 15234404 NR Description: DNA-binding protein -related [Arabidopsis
  misc_feature (18)..(292): Homolog of NCBI NO: 34905212 NR Description: P0672D01.8 [Oryza sativa (japonica
  misc_feature (1)..(292): Homolog of NCBI NO: 38346718 NR Description: OSJNBa0086O06.16 [Oryza sativa (japonica
  misc_feature (1)..(292): Homolog of NCBI NO: 15226945 NR Description: hypothetical protein [Arabidopsis thaliana]
  misc_feature (1)..(292): Homolog of NCBI NO: 15236657 NR Description: expressed protein [Arabidopsis thaliana]
MAGLDLGTAFRYVNHQLHRPDLHLHHNSSSDDVTPGAGMGHFTVDDEDNNNNHQGLDLASGGGSGSSGGGGGHGGGGDVVGRRPRGRPPGSKNKPKPPVIITRESANTLRAHILEVTNGCDVFDCVATYARRRQRGICVLSGSGTVTNVSIRQPSAAGAVVTLQGTFEILSLSGSFLPPPAPPGATSLTIFLAGGQGQVVGGSVVGELTAAGPVIVIAASFTNVAYERLPLEEDEQQQQLGGGSNGGGNLFPEVAAGGGGGLPFFNLPMNMQPNVQLPVEGWPGNSGGRGPF

SEQ ID NO: 39978 - protein, 254 aa, Arabidopsis thaliana
  peptide (1)..(254): Ceres Seq. ID no. 13575051
  misc_feature (37)..(236): Homolog of NCBI NO: 18414224 NR Description: expressed protein [Arabidopsis thaliana]
  misc_feature (8)..(220): Homolog of NCBI NO: 34902080 NR Description: unknown protein [Oryza sativa (japonica
  misc_feature (1)..(252): Homolog of NCBI NO: 18396925 NR Description: expressed protein [Arabidopsis thaliana]
  misc_feature (7)..(247): Homolog of NCBI NO: 15225475 NR Description: AT-hook DNA-binding protein -related [Arabidopsis
  misc_feature (6)..(212): Homolog of NCBI NO: 15235815 NR Description: DNA binding protein -related [Arabidopsis
  misc_feature (5)..(240): Homolog of NCBI NO: 15234404 NR Description: DNA-binding protein -related [Arabidopsis
  misc_feature (1)..(254): Homolog of NCBI NO: 34905212 NR Description: P0672D01.8 [Oryza sativa (japonica
  misc_feature (1)..(254): Homolog of NCBI NO: 38346718 NR Description: OSJNBa0086O06.16 [Oryza sativa (japonica
  misc_feature (1)..(254): Homolog of NCBI NO: 15226945 NR Description: hypothetical protein [Arabidopsis thaliana]
  misc_feature (1)..(254): Homolog of NCBI NO: 15236657 NR Description: expressed protein [Arabidopsis thaliana]
MGHFTVDDEDNNNNHQGLDLASGGGSGSSGGGGGHGGGGDVVGRRPRGRPPGSKNKPKPPVIITRESANTLRAHILEVTNGCDVFDCVATYARRRQRGICVLSGSGTVTNVSIRQPSAAGAVVTLQGTFEILSLSGSFLPPPAPPGATSLTIFLAGGQGQVVGGSVVGELTAAGPVIVIAASFTNVAYERLPLEEDEQQQQLGGGSNGGGNLFPEVAAGGGGGLPFFNLPMNMQPNVQLPVEGWPGNSGGRGPF

SEQ ID NO: 39979 - DNA, 1356 bp, Arabidopsis thaliana
  misc_feature (1)..(1356): Ceres Seq. ID no. 12329865
  misc_feature: MA Experiment ID: 108595 Result: Down-regulated in Transcription
  misc_feature: MA Experiment 108595 PARAMETER Experiment Name: At_Ler-pi_Ovule_cDNA_P Parameter: Plant Line Value: null
  misc_feature: MA Experiment ID: 20000111 Result: Down-regulated in Transcription
  misc_feature: MA Experiment 20000111 PARAMETER Experiment Name: At_42deg_Heat_cDNA_P Parameter: Temperature (deg C) Value: 42 vs. 22
  misc_feature: MA Experiment 20000111 PARAMETER Experiment Name: At_42deg_Heat_cDNA_P Parameter: Timepoint (hr) Value: 6
  misc_feature: MA Experiment 20000111 PARAMETER Experiment Name: At_42deg_Heat_cDNA_P Parameter: Tissue Value: Aerial
  misc_feature: MA Experiment ID: 20000113 Result: Down-regulated in Transcription
  misc_feature: MA Experiment 20000113 PARAMETER Experiment Name: At_42deg_Heat_cDNA_P Parameter: Temperature (deg C) Value: 42 vs. 22
  misc_feature: MA Experiment 20000113 PARAMETER Experiment Name: At_42deg_Heat_cDNA_P Parameter: Timepoint (hr) Value: 8
  misc_feature: MA Experiment 20000113 PARAMETER Experiment Name: At_42deg_Heat_cDNA_P Parameter: Tissue Value: Aerial
  misc_feature: MA Experiment ID: 20000224 Result: Down-regulated in Transcription
  misc_feature: MA Experiment ID: 20000286 Result: Down-regulated in Transcription
  misc_feature: MA Experiment 20000286 PARAMETER Experiment Name: At_Open_Flower_P Parameter: Age (day) Value: 21
  misc_feature: MA Experiment 20000286 PARAMETER Experiment Name: At_Open_Flower_P Parameter: Plant Line Value: WS
  misc_feature: MA Experiment 20000286 PARAMETER Experiment Name: At_Open_Flower_P Parameter: Tissue Value: Half Open vs. Whole Plant
  misc_feature: MA Experiment ID: 20000439 Result: Down-regulated in Transcription
  misc_feature: MA Experiment 20000439 PARAMETER Experiment Name: At_Roots__P Parameter: Age (day) Value: 14 vs. 21
  misc_feature: MA Experiment 20000439 PARAMETER Experiment Name: At_Roots__P Parameter: Organism Value: A. thaliana
  misc_feature: MA Experiment 20000439 PARAMETER Experiment Name: At_Roots__P Parameter: Tissue Value: Roots vs. Whole Plant
  misc_feature: MA Experiment ID: 20000451 Result: Down-regulated in Transcription
  misc_feature: MA Experiment 20000451 PARAMETER Experiment Name: At_CS6879_Shoots-Roots_P Parameter: Age (day) Value: 14
  misc_feature: MA Experiment 20000451 PARAMETER Experiment Name: At_CS6879_Shoots-Roots_P Parameter: Organism Value: A. thaliana
  misc_feature: MA Experiment 20000451 PARAMETER Experiment Name: At_CS6879_Shoots-Roots_P Parameter: Plant Line Value: CS6879 vs. WS
  misc_feature: MA Experiment 20000451 PARAMETER Experiment Name: At_CS6879_Shoots-Roots_P Parameter: Tissue Value: Roots
actagtgatcagtgataatctattaatcatctaggtggcaaaagcagcatcgttgagaacgaagaagcttgaaaaagttgcgagctcagagaatctggaagtagcaaaatttggcggctttaactcagcaatttgttctgtacatgaagagagcattcagctcacagttacgctctgcctatccagcttctaaatctactcactttggtcgagtcatggcttcttctggatctgaggcaaaagctaattacgcacccatatctaccaatgaacctgttgtgtctgttgattggctccactctaatcttggagatgctgatataaaggttttggatgcctcatggtacatggcacatgagcaaagaaatccaatccaagagtatcaagttgctcatattccaggtgctctcttctttgatttgaatggaatagcagatcgaaaaacaaatttacgacacatgctaccatctgaggaagcttttgctgctggttgttctgctcttggaatcgagaacaacgatggagtggttgtgtatgatggaatggggctctttagtgcagctcgtgtatggtggatgtttagagtctttggacatgacaaagtatgggtacttgatggaggcttgccgaaatggcgtgcttcaggctatgacgttgaatccagtgtttcaaatgatgccattttgaaagccagtgcagcaactgaggctatagagaagatctatcaaggacaaacaattagcccaataacttttcagacgaagttccggccacatcttgtattggcacttgatcaggtgaaggaaaacatcgaggataagacttatcagcacatcgatgcgcgttcaaaggctagatttgacggtattgctccagaaccttggaagggtttaccgagtggtcatatacccggtagcaagtgtgtcccttttcccctaatgtttgattcctctcaaacactgttaccagcagaggagctgaagaagcagtttgaacaggaagacatatctctggacagtccgattgcggcctcatgtggaaccggtgtaacagcttgtattttggcattgggactttatcgtctgggaaaaactaatgtggcaatctatgatgggtcttggactgaatgggcaactgcaccaaacttgcccatagtgggttcttcttcataagaaagtccaagaaaaagctacaagatcacaagccagtggatatatatttataagcttagcttggttcaatccatttctgtgttaaactttaacaaatttgctgggagggttgtattagtattatacatcagtattcaggattcttgagtttggtctcatctttgtggagattgattaaaagtcc

SEQ ID NO: 39980 - protein, 342 aa, Arabidopsis thaliana
  peptide (1)..(342): Ceres Seq. ID no. 12329866
  misc_feature (47)..(167): Pfam Name: Rhodanese-like domain Pfam Description: Rhodanese-like domain
  misc_feature (201)..(337): Homolog of NCBI NO: 27381801 NR Description: thiosulfate sulfurtransferase [Bradyrhizobium
  misc_feature (41)..(195): Homolog of NCBI NO: 27381801 NR Description: thiosulfate sulfurtransferase [Bradyrhizobium
  misc_feature (39)..(341): Homolog of NCBI NO: 14571545 NR Description: thiosulfate transferase [Triticum aestivum]
  misc_feature (1)..(337): Homolog of NCBI NO: 4406372 NR Description: thiosulfate sulfurtransferase [Datisca glomerata]
  misc_feature (1)..(342): Homolog of NCBI NO: 25288794 NR Description: thiosulfate sulfurtransferase (EC 2.8.1.1) Mst1
  misc_feature (1)..(342): Homolog of NCBI NO: 18412307 NR Description: mercaptopyruvate sulfurtransferase (Mst1/Rdh1)
  misc_feature (25)..(342): Homolog of NCBI NO: 25288797 NR Description: hypothetical protein F3O9.26 [imported] -
  misc_feature (25)..(342): Homolog of NCBI NO: 18394364 NR Description: mercaptopyruvate sulfurtransferase (Mst2/Rdh2)
  misc_feature (1)..(342): Homolog of NCBI NO: 30684873 NR Description: mercaptopyruvate sulfurtransferase (Mst2/Rdh2)
  misc_feature (1)..(342): Homolog of NCBI NO: 25456716 NR Description: thiosulfate sulfurtransferase (EC 2.8.1.1)
MKRAFSSQLRSAYPASKSTHFGRVMASSGSEAKANYAPISTNEPVVSVDWLHSNLGDADIKVLDASWYMAHEQRNPIQEYQVAHIPGALFFDLNGIADRKTNLRHMLPSEEAFAAGCSALGIENNDGVVVYDGMGLFSAARVWWMFRVFGHDKVWVLDGGLPKWRASGYDVESSVSNDAILKASAATEAIEKIYQGQTISPITFQTKFRPHLVLALDQVKENIEDKTYQHIDARSKARFDGIAPEPWKGLPSGHIPGSKCVPFPLMFDSSQTLLPAEELKKQFEQEDISLDSPIAASCGTGVTACILALGLYRLGKTNVAIYDGSWTEWATAPNLPIVGSSS

SEQ ID NO: 39981 - protein, 318 aa, Arabidopsis thaliana; identical to SEQ ID NO: 24974
  peptide (1)..(318): Ceres Seq. ID no. 12329867
  misc_feature (23)..(143): Pfam Name: Rhodanese-like domain Pfam Description: Rhodanese-like domain
  misc_feature (177)..(313): Homolog of NCBI NO: 27381801 NR Description: thiosulfate sulfurtransferase [Bradyrhizobium
  misc_feature (17)..(171): Homolog of NCBI NO: 27381801 NR Description: thiosulfate sulfurtransferase [Bradyrhizobium
  misc_feature (15)..(317): Homolog of NCBI NO: 14571545 NR Description: thiosulfate transferase [Triticum aestivum]
  misc_feature (1)..(313): Homolog of NCBI NO: 4406372 NR Description: thiosulfate sulfurtransferase [Datisca glomerata]
  misc_feature (1)..(318): Homolog of NCBI NO: 25288794 NR Description: thiosulfate sulfurtransferase (EC 2.8.1.1) Mst1
  misc_feature (1)..(318): Homolog of NCBI NO: 18412307 NR Description: mercaptopyruvate sulfurtransferase (Mst1/Rdh1)
  misc_feature (1)..(318): Homolog of NCBI NO: 25288797 NR Description: hypothetical protein F3O9.26 [imported] -
  misc_feature (1)..(318): Homolog of NCBI NO: 18394364 NR Description: mercaptopyruvate sulfurtransferase (Mst2/Rdh2)
  misc_feature (1)..(318): Homolog of NCBI NO: 30684873 NR Description: mercaptopyruvate sulfurtransferase (Mst2/Rdh2)
  misc_feature (1)..(318): Homolog of NCBI NO: 25456716 NR Description: thiosulfate sulfurtransferase (EC 2.8.1.1)

SEQ ID NO: 39982 - protein, 274 aa, Arabidopsis thaliana; identical to SEQ ID NO: 24975
  peptide (1)..(274): Ceres Seq. ID no. 12329868
  misc_feature (1)..(99): Pfam Name: Rhodanese-like domain Pfam Description: Rhodanese-like domain
  misc_feature (133)..(269): Homolog of NCBI NO: 27381801 NR Description: thiosulfate sulfurtransferase [Bradyrhizobium
  misc_feature (1)..(127): Homolog of NCBI NO: 27381801 NR Description: thiosulfate sulfurtransferase [Bradyrhizobium
  misc_feature (1)..(273): Homolog of NCBI NO: 14571545 NR Description: thiosulfate transferase [Triticum aestivum]
  misc_feature (1)..(269): Homolog of NCBI NO: 4406372 NR Description: thiosulfate sulfurtransferase [Datisca glomerata]
  misc_feature (1)..(274): Homolog of NCBI NO: 25288794 NR Description: thiosulfate sulfurtransferase (EC 2.8.1.1) Mst1
  misc_feature (1)..(274): Homolog of NCBI NO: 18412307 NR Description: mercaptopyruvate sulfurtransferase (Mst1/Rdh1)
  misc_feature (1)..(274): Homolog of NCBI NO: 25288797 NR Description: hypothetical protein F3O9.26 [imported] -
  misc_feature (1)..(274): Homolog of NCBI NO: 18394364 NR Description: mercaptopyruvate sulfurtransferase (Mst2/Rdh2)
  misc_feature (1)..(274): Homolog of NCBI NO: 30684873 NR Description: mercaptopyruvate sulfurtransferase (Mst2/Rdh2)
  misc_feature (1)..(274): Homolog of NCBI NO: 25456716 NR Description: thiosulfate sulfurtransferase (EC 2.8.1.1)

SEQ ID NO: 39983 - DNA, 2458 bp, Arabidopsis thaliana
  misc_feature (1)..(2458): Ceres Seq. ID no. 13488149
  misc_feature: MA Experiment ID: 108435 Result: Down-regulated in Transcription
  misc_feature: MA Experiment 108435 PARAMETER Experiment Name: At_stm_Mutants_cDNA_P Parameter: Plant Line Value: wt Landsburg vs stm
  misc_feature: MA Experiment 108435 PARAMETER Experiment Name: At_stm_Mutants_cDNA_P Parameter: Tissue Value: Shoot Apical Meristem Region
  misc_feature: MA Experiment ID: 108461 Result: Up-regulated in Transcription
  misc_feature: MA Experiment 108461 PARAMETER Experiment Name: At_Germinating_Seeds_cDNA_P Parameter: Age (day) Value: 1 vs. 0
  misc_feature: MA Experiment 108461 PARAMETER Experiment Name: At_Germinating_Seeds_cDNA_P Parameter: Tissue Value: Germinating Seeds
  misc_feature: MA Experiment ID: 108462 Result: Up-regulated in Transcription
  misc_feature: MA Experiment 108462 PARAMETER Experiment Name: At_Germinating_Seeds_cDNA_P Parameter: Age (day) Value: 2 vs. 0
  misc_feature: MA Experiment 108462 PARAMETER Experiment Name: At_Germinating_Seeds_cDNA_P Parameter: Tissue Value: Germinating Seeds
  misc_feature: MA Experiment ID: 108463 Result: Up-regulated in Transcription
  misc_feature: MA Experiment 108463 PARAMETER Experiment Name: At_Germinating_Seeds_cDNA_P Parameter: Age (day) Value: 3 vs. 0
  misc_feature: MA Experiment 108463 PARAMETER Experiment Name: At_Germinating_Seeds_cDNA_P Parameter: Tissue Value: Germinating Seeds
  misc_feature: MA Experiment ID: 108464 Result: Up-regulated in Transcription
  misc_feature: MA Experiment 108464 PARAMETER Experiment Name: At_Germinating_Seeds_cDNA_P Parameter: Age (day) Value: 4 vs. 0
  misc_feature: MA Experiment 108464 PARAMETER Experiment Name: At_Germinating_Seeds_cDNA_P Parameter: Tissue Value: Germinating Seeds
  misc_feature: MA Experiment ID: 108607 Result: Up-regulated in Transcription
  misc_feature: MA Experiment 108607 PARAMETER Experiment Name: At_100uM_ABA_cDNA_P Parameter: Timepoint (hr) Value: 4
  misc_feature: MA Experiment 108607 PARAMETER Experiment Name: At_100uM_ABA_cDNA_P Parameter: Tissue Value: Aerial
  misc_feature: MA Experiment 108607 PARAMETER Experiment Name: At_100uM_ABA_cDNA_P Parameter: Treatment Value: 100uM ABA vs. No Treatment
  misc_feature: MA Experiment ID: 20000069 Result: Up-regulated in Transcription
  misc_feature: MA Experiment 20000069 PARAMETER Experiment Name: At_100uM_ABA_Mutants_cDNA_P Parameter: Plant Line Value: CS23
  misc_feature: MA Experiment 20000069 PARAMETER Experiment Name: At_100uM_ABA_Mutants_cDNA_P Parameter: Timepoint (hr) Value: 6
  misc_feature: MA Experiment 20000069 PARAMETER Experiment Name: At_100uM_ABA_Mutants_cDNA_P Parameter: Tissue Value: Aerial
  misc_feature: MA Experiment 20000069 PARAMETER Experiment Name: At_100uM_ABA_Mutants_cDNA_P Parameter: Treatment Value: 100uM ABA vs. No Treatment
  misc_feature: MA Experiment ID: 20000070 Result: Up-regulated in Transcription
  misc_feature: MA Experiment 20000070 PARAMETER Experiment Name: At_100uM_ABA_Mutants_cDNA_P Parameter: Plant Line Value: CS24
  misc_feature: MA Experiment 20000070 PARAMETER Experiment Name: At_100uM_ABA_Mutants_cDNA_P Parameter: Timepoint (hr) Value: 6
  misc_feature: MA Experiment 20000070 PARAMETER Experiment Name: At_100uM_ABA_Mutants_cDNA_P Parameter: Tissue Value: Aerial
  misc_feature: MA Experiment 20000070 PARAMETER Experiment Name: At_100uM_ABA_Mutants_cDNA_P Parameter: Treatment Value: 100uM ABA vs. No Treatment
  misc_feature: MA Experiment ID: 20000071 Result: Up-regulated in Transcription
  misc_feature: MA Experiment 20000071 PARAMETER Experiment Name: At_100uM_ABA_Mutants_cDNA_P Parameter: Plant Line Value: CS8104
  misc_feature: MA Experiment 20000071 PARAMETER Experiment Name: At_100uM_ABA_Mutants_cDNA_P Parameter: Timepoint (hr) Value: 6
  misc_feature: MA Experiment 20000071 PARAMETER Experiment Name: At_100uM_ABA_Mutants_cDNA_P Parameter: Tissue Value: Aerial
  misc_feature: MA Experiment 20000071 PARAMETER Experiment Name: At_100uM_ABA_Mutants_cDNA_P Parameter: Treatment Value: 100uM ABA vs. No Treatment
  misc_feature: MA Experiment ID: 20000072 Result: Up-regulated in Transcription
  misc_feature: MA Experiment 20000072 PARAMETER Experiment Name: At_100uM_ABA_Mutants_cDNA_P Parameter: Plant Line Value: CS8105
  misc_feature: MA Experiment 20000072 PARAMETER Experiment Name: At_100uM_ABA_Mutants_cDNA_P Parameter: Timepoint (hr) Value: 6
  misc_feature: MA Experiment 20000072 PARAMETER Experiment Name: At_100uM_ABA_Mutants_cDNA_P Parameter: Tissue Value: Aerial
  misc_feature: MA Experiment 20000072 PARAMETER Experiment Name: At_100uM_ABA_Mutants_cDNA_P Parameter: Treatment Value: 100uM ABA vs. No Treatment
  misc_feature: MA Experiment ID: 20000087 Result: Up-regulated in Transcription
  misc_feature: MA Experiment 20000087 PARAMETER Experiment Name: At_100uM_ABA_Mutants_cDNA_P Parameter: Plant Line Value: WS
  misc_feature: MA Experiment 20000087 PARAMETER Experiment Name: At_100uM_ABA_Mutants_cDNA_P Parameter: Timepoint (hr) Value: 6
  misc_feature: MA Experiment 20000087 PARAMETER Experiment Name: At_100uM_ABA_Mutants_cDNA_P Parameter: Tissue Value: Aerial
  misc_feature: MA Experiment 20000087 PARAMETER Experiment Name: At_100uM_ABA_Mutants_cDNA_P Parameter: Treatment Value: 100uM ABA vs. No Treatment
  misc_feature: MA Experiment ID: 20000117 Result: Up-regulated in Transcription
  misc_feature: MA Experiment 20000117 PARAMETER Experiment Name: At_100uM_ABA_Mutants_cDNA_P Parameter: Plant Line Value: Columbia
  misc_feature: MA Experiment 20000117 PARAMETER Experiment Name: At_100uM_ABA_Mutants_cDNA_P Parameter: Timepoint (hr) Value: 6
  misc_feature: MA Experiment 20000117 PARAMETER Experiment Name: At_100uM_ABA_Mutants_cDNA_P Parameter: Tissue Value: Aerial
  misc_feature: MA Experiment 20000117 PARAMETER Experiment Name: At_100uM_ABA_Mutants_cDNA_P Parameter: Treatment Value: 100uM ABA vs. No Treatment
  misc_feature: MA Experiment ID: 20000173 Result: Down-regulated in Transcription
  misc_feature: MA Experiment 20000173 PARAMETER Experiment Name: At_42deg_Heat_P Parameter: Age (day) Value: 14
  misc_feature: MA Experiment 20000173 PARAMETER Experiment Name: At_42deg_Heat_P Parameter: Organism Value: A. thaliana
  misc_feature: MA Experiment 20000173 PARAMETER Experiment Name: At_42deg_Heat_P Parameter: Plant Line Value: WS
  misc_feature: MA Experiment 20000173 PARAMETER Experiment Name: At_42deg_Heat_P Parameter: Temperature (deg C) Value: 42 vs. 22
  misc_feature: MA Experiment 20000173 PARAMETER Experiment Name: At_42deg_Heat_P Parameter: Timepoint (hr) Value: 6
  misc_feature: MA Experiment 20000173 PARAMETER Experiment Name: At_42deg_Heat_P Parameter: Tissue Value: Aerial
  misc_feature: MA Experiment ID: 20000179 Result: Up-regulated in Transcription
  misc_feature: MA Experiment 20000179 PARAMETER Experiment Name: At_Germinating_Seeds_P Parameter: Age (hr) Value: 6 vs. 0
  misc_feature: MA Experiment 20000179 PARAMETER Experiment Name: At_Germinating_Seeds_P Parameter: Tissue Value: Germinating Seeds
  misc_feature: MA Experiment ID: 20000180 Result: Up-regulated in Transcription
  misc_feature: MA Experiment 20000180 PARAMETER Experiment Name: At_Germinating_Seeds_P Parameter: Age (hr) Value: 24 vs. 0
  misc_feature: MA Experiment 20000180 PARAMETER Experiment Name: At_Germinating_Seeds_P Parameter: Tissue Value: Germinating Seeds
  misc_feature: MA Experiment ID: 20000184 Result: Down-regulated in Transcription
  misc_feature: MA Experiment 20000184 PARAMETER Experiment Name: At_Shoots__P Parameter: Age (day) Value: 7
  misc_feature: MA Experiment 20000184 PARAMETER Experiment Name: At_Shoots__P Parameter: Tissue Value: Shoots vs. Whole Plant
  misc_feature: MA Experiment ID: 20000185 Result: Down-regulated in Transcription
  misc_feature: MA Experiment 20000185 PARAMETER Experiment Name: At_Roots__P Parameter: Age (day) Value: 7 vs. 21
  misc_feature: MA Experiment 20000185 PARAMETER Experiment Name: At_Roots__P Parameter: Organism Value: A. thaliana
  misc_feature: MA Experiment 20000185 PARAMETER Experiment Name: At_Roots__P Parameter: Tissue Value: Roots vs. Whole Plant
  misc_feature: MA Experiment ID: 20000224 Result: Up-regulated in Transcription
  misc_feature: MA Experiment ID: 20000234 Result: Down-regulated in Transcription
  misc_feature: MA Experiment 20000234 PARAMETER Experiment Name: At_Siliques_P Parameter: Age (day) Value: 21
  misc_feature: MA Experiment 20000234 PARAMETER Experiment Name: At_Siliques_P Parameter: Organism Value: A. thaliana
  misc_feature: MA Experiment 20000234 PARAMETER Experiment Name: At_Siliques_P Parameter: Plant Line Value: WS
  misc_feature: MA Experiment 20000234 PARAMETER Experiment Name: At_Siliques_P Parameter: Tissue Value: Less Than 5mm Siliques vs. Whole Plant
  misc_feature: MA Experiment ID: 20000265 Result: Down-regulated in Transcription
  misc_feature: MA Experiment 20000265 PARAMETER Experiment Name: At_Open_Flower_P Parameter: Age (day) Value: 21
  misc_feature: MA Experiment 20000265 PARAMETER Experiment Name: At_Open_Flower_P Parameter: Plant Line Value: WS
  misc_feature: MA Experiment 20000265 PARAMETER Experiment Name: At_Open_Flower_P Parameter: Tissue Value: Closed Flower vs. Whole Plant
  misc_feature: MA Experiment ID: 20000439 Result: Down-regulated in Transcription
  misc_feature: MA Experiment 20000439 PARAMETER Experiment Name: At_Roots__P Parameter: Age (day) Value: 14 vs. 21
  misc_feature: MA Experiment 20000439 PARAMETER Experiment Name: At_Roots__P Parameter: Organism Value: A. thaliana
  misc_feature: MA Experiment 20000439 PARAMETER Experiment Name: At_Roots__P Parameter: Tissue Value: Roots vs. Whole Plant
  misc_feature: MA Experiment ID: 20000495 Result: Down-regulated in Transcription
  misc_feature: MA Experiment 20000495 PARAMETER Experiment Name: At_Guard_Cells_P Parameter: Harvest Date Value: 8/2/2002
  misc_feature: MA Experiment 20000495 PARAMETER Experiment Name: At_Guard_Cells_P Parameter: Organism Value: A. thaliana
  misc_feature: MA Experiment 20000495 PARAMETER Experiment Name: At_Guard_Cells_P Parameter: Tissue Value: Guard Cells vs. Leaves
  misc_feature: MA Experiment ID: 20000794 Result: Up-regulated in Transcription
  misc_feature: MA Experiment 20000794 PARAMETER Experiment Name: At_Petals_P Parameter: Age (day) Value: 23-25 days
  misc_feature: MA Experiment 20000794 PARAMETER Experiment Name: At_Petals_P Parameter: Plant Line Value: WS
  misc_feature: MA Experiment 20000794 PARAMETER Experiment Name: At_Petals_P Parameter: Tissue Value: Petals vs. Whole plant
  misc_feature: MA Experiment ID: 20001248 Result: Down-regulated in Transcription
  misc_feature: MA Experiment 20001248 PARAMETER Experiment Name: At_Far-red-induction_P Parameter: Age (day) Value: 7
  misc_feature: MA Experiment 20001248 PARAMETER Experiment Name: At_Far-red-induction_P Parameter: Light Value: Far-red vs. White
  misc_feature: MA Experiment 20001248 PARAMETER Experiment Name: At_Far-red-induction_P Parameter: Organism Value: A. thaliana
  misc_feature: MA Experiment 20001248 PARAMETER Experiment Name: At_Far-red-induction_P Parameter: Plant Line Value: Columbia
  misc_feature: MA Experiment 20001248 PARAMETER Experiment Name: At_Far-red-induction_P Parameter: Timepoint (hr) Value: 4
  misc_feature: MA Experiment 20001248 PARAMETER Experiment Name: At_Far-red-induction_P Parameter: Tissue Value: Whole Plant
  misc_feature: MA Experiment ID: 20001557 Result: Down-regulated in Transcription
  misc_feature: MA Experiment 20001557 PARAMETER Experiment Name: At_Drought_Soil_Dry_P Parameter: Age (day) Value: 27
  misc_feature: MA Experiment 20001557 PARAMETER Experiment Name: At_Drought_Soil_Dry_P Parameter: Organism Value: A. thaliana
  misc_feature: MA Experiment 20001557 PARAMETER Experiment Name: At_Drought_Soil_Dry_P Parameter: Plant Line Value: WS
  misc_feature: MA Experiment 20001557 PARAMETER Experiment Name: At_Drought_Soil_Dry_P Parameter: Post Timepoint (hr) Value: 3
  misc_feature: MA Experiment 20001557 PARAMETER Experiment Name: At_Drought_Soil_Dry_P Parameter: Post-Treatment Value: Re-Water vs. No Drought
  misc_feature: MA Experiment 20001557 PARAMETER Experiment Name: At_Drought_Soil_Dry_P Parameter: Timepoint (day) Value: 13
  misc_feature: MA Experiment 20001557 PARAMETER Experiment Name: At_Drought_Soil_Dry_P Parameter: Treatment Value: Drought vs. No Drought
  misc_feature: MA Experiment ID: 20001558 Result: Down-regulated in Transcription
  misc_feature: MA Experiment 20001558 PARAMETER Experiment Name: At_Drought_Soil_Dry_P Parameter: Age (day) Value: 27
  misc_feature: MA Experiment 20001558 PARAMETER Experiment Name: At_Drought_Soil_Dry_P Parameter: Organism Value: A. thaliana
  misc_feature: MA Experiment 20001558 PARAMETER Experiment Name: At_Drought_Soil_Dry_P Parameter: Plant Line Value: WS
  misc_feature: MA Experiment 20001558 PARAMETER Experiment Name: At_Drought_Soil_Dry_P Parameter: Post Timepoint (hr) Value: 6
  misc_feature: MA Experiment 20001558 PARAMETER Experiment Name: At_Drought_Soil_Dry_P Parameter: Post-Treatment Value: Re-Water vs. No Drought
  misc_feature: MA Experiment 20001558 PARAMETER Experiment Name: At_Drought_Soil_Dry_P Parameter: Timepoint (day) Value: 13
  misc_feature: MA Experiment 20001558 PARAMETER Experiment Name: At_Drought_Soil_Dry_P Parameter: Treatment Value: Drought vs. No Drought
  misc_feature: MA Experiment ID: 20001560 Result: Down-regulated in Transcription
  misc_feature: MA Experiment 20001560 PARAMETER Experiment Name: At_Drought_Soil_Dry_P Parameter: Age (day) Value: 28
  misc_feature: MA Experiment 20001560 PARAMETER Experiment Name: At_Drought_Soil_Dry_P Parameter: Organism Value: A. thaliana
  misc_feature: MA Experiment 20001560 PARAMETER Experiment Name: At_Drought_Soil_Dry_P Parameter: Plant Line Value: WS
  misc_feature: MA Experiment 20001560 PARAMETER Experiment Name: At_Drought_Soil_Dry_P Parameter: Post Timepoint (hr) Value: None
  misc_feature: MA Experiment 20001560 PARAMETER Experiment Name: At_Drought_Soil_Dry_P Parameter: Post-Treatment Value: None
  misc_feature: MA Experiment 20001560 PARAMETER Experiment Name: At_Drought_Soil_Dry_P Parameter: Timepoint (day) Value: 14
  misc_feature: MA Experiment 20001560 PARAMETER Experiment Name: At_Drought_Soil_Dry_P Parameter: Treatment Value: Drought vs. No Drought
  misc_feature: MA Experiment ID: 20001911 Result: Down-regulated in Transcription
  misc_feature: MA Experiment 20001911 PARAMETER Experiment Name: At_Drought_Reproduction_P Parameter: Age (day) Value: 40
  misc_feature: MA Experiment 20001911 PARAMETER Experiment Name: At_Drought_Reproduction_P Parameter: Organism Value: A. thaliana
  misc_feature: MA Experiment 20001911 PARAMETER Experiment Name: At_Drought_Reproduction_P Parameter: Plant Line Value: WS
  misc_feature: MA Experiment 20001911 PARAMETER Experiment Name: At_Drought_Reproduction_P Parameter: Timepoint (day) Value: 10
  misc_feature: MA Experiment 20001911 PARAMETER Experiment Name: At_Drought_Reproduction_P Parameter: Tissue Value: Flowers
  misc_feature: MA Experiment 20001911 PARAMETER Experiment Name: At_Drought_Reproduction_P Parameter: Treatment Value: Drought vs. No Drought
tctcaaatctcaaatctcaaattttttattaaacgcctacatatattactcacacttgttttcagatcataaagttttttcttggatttatatataatgcactaatacatacacacccacatgcttacacacatgttcgacctgtaatcagtaaaagaaacatcagagaggaagagaaggagaagaaaagatggagatgggtcgtctggtcttcgggttgtgtttgattcttattgtgggtacgtttcttgaattctccggcggtgctacggcggcgaagggagtaacgtacgacggacggtctttgataatcgatggacagaggaagcttctcttctccggttccatccactatcctcgcagcacacccgagatgtggccgtctctgataaaaaagacaaaggaaggaggcatcgatgtgatccaaacgtacgttttctggaacctccatgagcctaagcttggacagtatgattttagtggaagaaacgatttagtgaagtttattaaagaaattagatcacaaggtctctatgtctgtctacgtattggacccttcatcgaagccgagtggaattacgggggattgccattttggttacgggatgtacccggtatggtataccgaaccgacaatgagcccttcaagttccacatgcaaaaattcaccgctaagatcgtagatttgatgaaatctgagggcttatatgcttctcaaggaggtccaattattctttctcagatcgagaacgagtatgcaaacgtggagggggctttccatgagaaaggagcatcgtacatcaagtgggcaggtcaaatggcggtcgggcttaagaccggagtgccatggatcatgtgcaagtcgcccgacgctcctgatcccgtgatcaatacctgcaacgggatgaaatgcggcgagacttttcctggaccaaactcacccaataagccgaaaatgtggactgaggattggacttcattctttcaggtttatggaaaagagccttatattagatctgctgaggatattgctttccatgccgctcttttcgttgcaaaaaatggaagttacatcaactattacatgtaccatggtggaacaaactttggaaggacttcatcttcgtatttcattacaggatactatgatcaagctcctctcgacgaatacggtcttttaagacagcctaagtacggtcatttgaaggagcttcacgctgcgataaaatcctctgcaaatcctctgcttcaaggaaagcaaacgattctctccttgggaccaatgcaacaagcttatgtctttgaagacgcgaacaatggatgcgttgcgtttctggtaaacaatgacgctaaagccagtcaaatacaattcagaaacaatgcgtatagcttgagtcccaagtcaattggtattcttcagaactgcaaaaacctaatttatgaaactgcaaaagtgaatgtgaagatgaatacgagagttacaacgccggttcaagtgttcaacgttcccgataactggaatttgtttagagaaacaatccctgcattcccaggcacatctttgaagacaaatgctttgttggaacacactaatttgacaaaggacaaaactgattatctttggtacacttcaagctttaagctggattcaccctgcacgaacccgtctatctacacagaatcatcaggacatgttgtccacgtgttcgtcaacaatgcactagcaggatctggacatggaagcagagacataagggtagttaaactacaagctccggttagcttaatcaatggacaaaacaatatatcgatcctcagcggcatggttggtctaccggactctggagcttacatggagaggagatcttatggactaaccaaagtacaaattagctgtggcgggacaaaacccatcgatttgagtagatctcaatggggttactcggtgggtttgcttggagagaaagttaggttatatcaatggaagaatttaaatagagtgaagtggagtatgaataaagctggactaattaagaaccgccccctcgcttggtacaagacaacgtttgatgggccgaatggagatgggcccgtgggcctacacatgtcgagtatgggtaaaggagaaatttgggtgaatggtgaaagcattggtcgttattgggtctcgtttctcacccctgctggacaaccttctcaatctatatatcatattcctcgggcgttcttaaaaccatctggaaatttattggtggtatttgaagaggaaggtggtgatcctcttgggatatctttgaatacaatatcggttgttggttcgagtcaagctcaatctcaattctcctgaagattattttttaaaaaatggtttttgggtaattgggggtgttttataaaccaaacaatacattatattgaaatgatacaatacacaaattgaatgaaatatacaggtttc

SEQ ID NO: 39984 - protein, 718 aa, Arabidopsis thaliana
  peptide (1)..(718): Ceres Seq. ID no. 13488150
  misc_feature (5)..(663): Homolog of NCBI NO: 30690633 NR Description: glycosyl hydrolase family 35 (beta-galactosidase)
  misc_feature (5)..(663): Homolog of NCBI NO: 18419821 NR Description: glycosyl hydrolase family 35 (beta-galactosidase)
  misc_feature (30)..(693): Homolog of NCBI NO: 30679742 NR Description: glycosyl hydrolase family 35 (beta-galactosidase)
  misc_feature (12)..(693): Homolog of NCBI NO: 25326168 NR Description: probable beta-galactosidase [imported] -
  misc_feature (12)..(706): Homolog of NCBI NO: 10862896 NR Description: putative beta-galactosidase [Nicotiana tabacum]
  misc_feature (32)..(664): Homolog of NCBI NO: 25326165 NR Description: probable beta-galactosidase [imported] -
  misc_feature (32)..(646): Homolog of NCBI NO: 12323389 NR Description: putative beta-galactosidase, 3' partial; 3669-1
  misc_feature (299)..(718): Homolog of NCBI NO: 16649045 NR Description: beta-galactosidase [Arabidopsis thaliana]
  misc_feature (32)..(707): Homolog of NCBI NO: 30699255 NR Description: glycosyl hydrolase family 35 (beta-galactosidase)
  misc_feature (32)..(707): Homolog of NCBI NO: 26451843 NR Description: unknown protein [Arabidopsis thaliana]
MEMGRLVFGLCLILIVGTFLEFSGGATAAKGVTYDGRSLIIDGQRKLLFSGSIHYPRSTPEMWPSLIKKTKEGGIDVIQTYVFWNLHEPKLGQYDFSGRNDLVKFIKEIRSQGLYVCLRIGPFIEAEWNYGGLPFWLRDVPGMVYRTDNEPFKFHMQKFTAKIVDLMKSEGLYASQGGPIILSQIENEYANVEGAFHEKGASYIKWAGQMAVGLKTGVPWIMCKSPDAPDPVINTCNGMKCGETFPGPNSPNKPKMWTEDWTSFFQVYGKEPYIRSAEDIAFHAALFVAKNGSYINYYMYHGGTNFGRTSSSYFITGYYDQAPLDEYGLLRQPKYGHLKELHAAIKSSANPLLQGKQTILSLGPMQQAYVFEDANNGCVAFLVNNDAKASQIQFRNNAYSLSPKSIGILQNCKNLIYETAKVNVKMNTRVTTPVQVFNVPDNWNLFRETIPAFPGTSLKTNALLEHTNLTKDKTDYLWYTSSFKLDSPCTNPSIYTESSGHVVHVFVNNALAGSGHGSRDIRVVKLQAPVSLINGQNNISILSGMVGLPDSGAYMERRSYGLTKVQISCGGTKPIDLSRSQWGYSVGLLGEKVRLYQWKNLNRVKWSMNKAGLIKNRPLAWYKTTFDGPNGDGPVGLHMSSMGKGEIWVNGESIGRYWVSFLTPAGQPSQSIYHIPRAFLKPSGNLLVVFEEEGGDPLGISLNTISVVGSSQAQSQFS

SEQ ID NO: 39985 - protein, 716 aa, Arabidopsis thaliana
  peptide (1)..(716): Ceres Seq. ID no. 13488151
  misc_feature (3)..(661): Homolog of NCBI NO: 25326166 NR Description: beta-galactosidase like protein [imported] -
  misc_feature (3)..(661): Homolog of NCBI NO: 18419821 NR Description: glycosyl hydrolase family 35 (beta-galactosidase)
  misc_feature (28)..(691): Homolog of NCBI NO: 30679742 NR Description: glycosyl hydrolase family 35 (beta-galactosidase)
  misc_feature (10)..(691): Homolog of NCBI NO: 25326168 NR Description: probable beta-galactosidase [imported] -
  misc_feature (10)..(704): Homolog of NCBI NO: 10862896 NR Description: putative beta-galactosidase [Nicotiana tabacum]
  misc_feature (30)..(662): Homolog of NCBI NO: 25326165 NR Description: probable beta-galactosidase [imported] -
  misc_feature (30)..(644): Homolog of NCBI NO: 12323389 NR Description: putative beta-galactosidase, 3' partial; 3669-1
  misc_feature (297)..(716): Homolog of NCBI NO: 16649045 NR Description: beta-galactosidase [Arabidopsis thaliana]
  misc_feature (30)..(705): Homolog of NCBI NO: 30699255 NR Description: glycosyl hydrolase family 35 (beta-galactosidase)
  misc_feature (30)..(705): Homolog of NCBI NO: 26451843 NR Description: unknown protein [Arabidopsis thaliana]
MGRLVFGLCLILIVGTFLEFSGGATAAKGVTYDGRSLIIDGQRKLLFSGSIHYPRSTPEMWPSLIKKTKEGGIDVIQTYVFWNLHEPKLGQYDFSGRNDLVKFIKEIRSQGLYVCLRIGPFIEAEWNYGGLPFWLRDVPGMVYRTDNEPFKFHMQKFTAKIVDLMKSEGLYASQGGPIILSQIENEYANVEGAFHEKGASYIKWAGQMAVGLKTGVPWIMCKSPDAPDPVINTCNGMKCGETFPGPNSPNKPKMWTEDWTSFFQVYGKEPYIRSAEDIAFHAALFVAKNGSYINYYMYHGGTNFGRTSSSYFITGYYDQAPLDEYGLLRQPKYGHLKELHAAIKSSANPLLQGKQTILSLGPMQQAYVFEDANNGCVAFLVNNDAKASQIQFRNNAYSLSPKSIGILQNCKNLIYETAKVNVKMNTRVTTPVQVFNVPDNWNLFRETIPAFPGTSLKTNALLEHTNLTKDKTDYLWYTSSFKLDSPCTNPSIYTESSGHVVHVFVNNALAGSGHGSRDIRVVKLQAPVSLINGQNNISILSGMVGLPDSGAYMERRSYGLTKVQISCGGTKPIDLSRSQWGYSVGLLGEKVRLYQWKNLNRVKWSMNKAGLIKNRPLAWYKTTFDGPNGDGPVGLHMSSMGKGEIWVNGESIGRYWVSFLTPAGQPSQSIYHIPRAFLKPSGNLLVVFEEEGGDPLGISLNTISVVGSSQAQSQFS

SEQ ID NO: 39986 - protein, 657 aa, Arabidopsis thaliana
  peptide (1)..(657): Ceres Seq. ID no. 13488152
  misc_feature (1)..(602): Homolog of NCBI NO: 30690633 NR Description: glycosyl hydrolase family 35 (beta-galactosidase)
  misc_feature (1)..(602): Homolog of NCBI NO: 18419821 NR Description: glycosyl hydrolase family 35 (beta-galactosidase)
  misc_feature (1)..(632): Homolog of NCBI NO: 30679742 NR Description: glycosyl hydrolase family 35 (beta-galactosidase)
  misc_feature (1)..(632): Homolog of NCBI NO: 25326168 NR Description: probable beta-galactosidase [imported] -
  misc_feature (1)..(645): Homolog of NCBI NO: 10862896 NR Description: putative beta-galactosidase [Nicotiana tabacum]
  misc_feature (1)..(603): Homolog of NCBI NO: 25326165 NR Description: probable beta-galactosidase [imported] -
  misc_feature (1)..(585): Homolog of NCBI NO: 12323389 NR Description: putative beta-galactosidase, 3' partial; 3669-1
  misc_feature (238)..(657): Homolog of NCBI NO: 16649045 NR Description: beta-galactosidase [Arabidopsis thaliana]
  misc_feature (1)..(646): Homolog of NCBI NO: 30699255 NR Description: glycosyl hydrolase family 35 (beta-galactosidase)
  misc_feature (1)..(646): Homolog of NCBI NO: 26451843 NR Description: unknown protein [Arabidopsis thaliana]
MWPSLIKKTKEGGIDVIQTYVFWNLHEPKLGQYDFSGRNDLVKFIKEIRSQGLYVCLRIGPFIEAEWNYGGLPFWLRDVPGMVYRTDNEPFKFHMQKFTAKIVDLMKSEGLYASQGGPIILSQIENEYANVEGAFHEKGASYIKWAGQMAVGLKTGVPWIMCKSPDAPDPVINTCNGMKCGETFPGPNSPNKPKMWTEDWTSFFQVYGKEPYIRSAEDIAFHAALFVAKNGSYINYYMYHGGTNFGRTSSSYFITGYYDQAPLDEYGLLRQPKYGHLKELHAAIKSSANPLLQGKQTILSLGPMQQAYVFEDANNGCVAFLVNNDAKASQIQFRNNAYSLSPKSIGILQNCKNLIYETAKVNVKMNTRVTTPVQVFNVPDNWNLFRETIPAFPGTSLKTNALLEHTNLTKDKTDYLWYTSSFKLDSPCTNPSIYTESSGHVVHVFVNNALAGSGHGSRDIRVVKLQAPVSLINGQNNISILSGMVGLPDSGAYMERRSYGLTKVQISCGGTKPIDLSRSQWGYSVGLLGEKVRLYQWKNLNRVKWSMNKAGLIKNRPLAWYKTTFDGPNGDGPVGLHMSSMGKGEIWVNGESIGRYWVSFLTPAGQPSQSIYHIPRAFLKPSGNLLVVFEEEGGDPLGISLNTISVVGSSQAQSQFS

SEQ ID NO: 39987 - DNA, 1437 bp, Arabidopsis thaliana
  misc_feature (1)..(1437): Ceres Seq. ID no. 12371961
  misc_feature: MA Experiment ID: 108433 Result: Up-regulated in Transcription
  misc_feature: MA Experiment 108433 PARAMETER Experiment Name: At_rhl_Mutant2_cDNA_P Parameter: Age (day) Value: 7
  misc_feature: MA Experiment 108433 PARAMETER Experiment Name: At_rhl_Mutant2_cDNA_P Parameter: Organism Value: A. thaliana
  misc_feature: MA Experiment 108433 PARAMETER Experiment Name: At_rhl_Mutant2_cDNA_P Parameter: Plant Line Value: rhl Mutant vs. wt landsburg
  misc_feature: MA Experiment 108433 PARAMETER Experiment Name: At_rhl_Mutant2_cDNA_P Parameter: Tissue Value: Roots
  misc_feature: MA Experiment ID: 108434 Result: Down-regulated in Transcription
  misc_feature: MA Experiment 108434 PARAMETER Experiment Name: At_Root_Tips_cDNA_P Parameter: Tissue Value: Root Tips
  misc_feature: MA Experiment ID: 108435 Result: Down-regulated in Transcription
  misc_feature: MA Experiment 108435 PARAMETER Experiment Name: At_stm_Mutants_cDNA_P Parameter: Plant Line Value: wt Landsburg vs stm
  misc_feature: MA Experiment 108435 PARAMETER Experiment Name: At_stm_Mutants_cDNA_P Parameter: Tissue Value: Shoot Apical Meristem Region
  misc_feature: MA Experiment ID: 108464 Result: Up-regulated in Transcription
  misc_feature: MA Experiment 108464 PARAMETER Experiment Name: At_Germinating_Seeds_cDNA_P Parameter: Age (day) Value: 4 vs. 0
  misc_feature: MA Experiment 108464 PARAMETER Experiment Name: At_Germinating_Seeds_cDNA_P Parameter: Tissue Value: Germinating Seeds
  misc_feature: MA Experiment ID: 108572 Result: Up-regulated in Transcription
  misc_feature: MA Experiment 108572 PARAMETER Experiment Name: At_Drought_cDNA_P Parameter: Timepoint (hr) Value: 1
  misc_feature: MA Experiment 108572 PARAMETER Experiment Name: At_Drought_cDNA_P Parameter: Tissue Value: Aerial
  misc_feature: MA Experiment 108572 PARAMETER Experiment Name: At_Drought_cDNA_P Parameter: Treatment Value: Drought vs. No Drought
  misc_feature: MA Experiment ID: 108573 Result: Up-regulated in Transcription
  misc_feature: MA Experiment 108573 PARAMETER Experiment Name: At_Drought_cDNA_P Parameter: Timepoint (hr) Value: 6
  misc_feature: MA Experiment 108573 PARAMETER Experiment Name: At_Drought_cDNA_P Parameter: Tissue Value: Aerial
  misc_feature: MA Experiment 108573 PARAMETER Experiment Name: At_Drought_cDNA_P Parameter: Treatment Value: Drought vs. No Drought
  misc_feature: MA Experiment ID: 108595 Result: Down-regulated in Transcription
  misc_feature: MA Experiment 108595 PARAMETER Experiment Name: At_Ler-pi_Ovule_cDNA_P Parameter: Plant Line Value: null
  misc_feature: MA Experiment ID: 108605 Result: Up-regulated in Transcription
  misc_feature: MA Experiment 108605 PARAMETER Experiment Name: At_100uM_ABA_cDNA_P Parameter: Timepoint (hr) Value: 6
  misc_feature: MA Experiment 108605 PARAMETER Experiment Name: At_100uM_ABA_cDNA_P Parameter: Tissue Value: Aerial
  misc_feature: MA Experiment 108605 PARAMETER Experiment Name: At_100uM_ABA_cDNA_P Parameter: Treatment Value: 100uM ABA vs. No Treatment
  misc_feature: MA Experiment ID: 108607 Result: Up-regulated in Transcription
  misc_feature: MA Experiment 108607 PARAMETER Experiment Name: At_100uM_ABA_cDNA_P Parameter: Timepoint (hr) Value: 4
  misc_feature: MA Experiment 108607 PARAMETER Experiment Name: At_100uM_ABA_cDNA_P Parameter: Tissue Value: Aerial
  misc_feature: MA Experiment 108607 PARAMETER Experiment Name: At_100uM_ABA_cDNA_P Parameter: Treatment Value: 100uM ABA vs. No Treatment
  misc_feature: MA Experiment ID: 20000069 Result: Up-regulated in Transcription
  misc_feature: MA Experiment 20000069 PARAMETER Experiment Name: At_100uM_ABA_Mutants_cDNA_P Parameter: Plant Line Value: CS23
  misc_feature: MA Experiment 20000069 PARAMETER Experiment Name: At_100uM_ABA_Mutants_cDNA_P Parameter: Timepoint (hr) Value: 6
  misc_feature: MA Experiment 20000069 PARAMETER Experiment Name: At_100uM_ABA_Mutants_cDNA_P Parameter: Tissue Value: Aerial
  misc_feature: MA Experiment 20000069 PARAMETER Experiment Name: At_100uM_ABA_Mutants_cDNA_P Parameter: Treatment Value: 100uM ABA vs. No Treatment
  misc_feature: MA Experiment ID: 20000070 Result: Up-regulated in Transcription
  misc_feature: MA Experiment 20000070 PARAMETER Experiment Name: At_100uM_ABA_Mutants_cDNA_P Parameter: Plant Line Value: CS24
  misc_feature: MA Experiment 20000070 PARAMETER Experiment Name: At_100uM_ABA_Mutants_cDNA_P Parameter: Timepoint (hr) Value: 6
  misc_feature: MA Experiment 20000070 PARAMETER Experiment Name: At_100uM_ABA_Mutants_cDNA_P Parameter: Tissue Value: Aerial
  misc_feature: MA Experiment 20000070 PARAMETER Experiment Name: At_100uM_ABA_Mutants_cDNA_P Parameter: Treatment Value: 100uM ABA vs. No Treatment
  misc_feature: MA Experiment ID: 20000071 Result: Up-regulated in Transcription
  misc_feature: MA Experiment 20000071 PARAMETER Experiment Name: At_100uM_ABA_Mutants_cDNA_P Parameter: Plant Line Value: CS8104
  misc_feature: MA Experiment 20000071 PARAMETER Experiment Name: At_100uM_ABA_Mutants_cDNA_P Parameter: Timepoint (hr) Value: 6
  misc_feature: MA Experiment 20000071 PARAMETER Experiment Name: At_100uM_ABA_Mutants_cDNA_P Parameter: Tissue Value: Aerial
  misc_feature: MA Experiment 20000071 PARAMETER Experiment Name: At_100uM_ABA_Mutants_cDNA_P Parameter: Treatment Value: 100uM ABA vs. No Treatment
  misc_feature: MA Experiment ID: 20000072 Result: Up-regulated in Transcription
  misc_feature: MA Experiment 20000072 PARAMETER Experiment Name: At_100uM_ABA_Mutants_cDNA_P Parameter: Plant Line Value: CS8105
  misc_feature: MA Experiment 20000072 PARAMETER Experiment Name: At_100uM_ABA_Mutants_cDNA_P Parameter: Timepoint (hr) Value: 6
  misc_feature: MA Experiment 20000072 PARAMETER Experiment Name: At_100uM_ABA_Mutants_cDNA_P Parameter: Tissue Value: Aerial
  misc_feature: MA Experiment 20000072 PARAMETER Experiment Name: At_100uM_ABA_Mutants_cDNA_P Parameter: Treatment Value: 100uM ABA vs. No Treatment
  misc_feature: MA Experiment ID: 20000086 Result: Up-regulated in Transcription
  misc_feature: MA Experiment 20000086 PARAMETER Experiment Name: At_100uM_ABA_Mutants_cDNA_P Parameter: Plant Line Value: CS22
  misc_feature: MA Experiment 20000086 PARAMETER Experiment Name: At_100uM_ABA_Mutants_cDNA_P Parameter: Timepoint (hr) Value: 6
  misc_feature: MA Experiment 20000086 PARAMETER Experiment Name: At_100uM_ABA_Mutants_cDNA_P Parameter: Tissue Value: Aerial
  misc_feature: MA Experiment 20000086 PARAMETER Experiment Name: At_100uM_ABA_Mutants_cDNA_P Parameter: Treatment Value: 100uM ABA vs. No Treatment
  misc_feature: MA Experiment ID: 20000087 Result: Up-regulated in Transcription
  misc_feature: MA Experiment 20000087 PARAMETER Experiment Name: At_100uM_ABA_Mutants_cDNA_P Parameter: Plant Line Value: WS
  misc_feature: MA Experiment 20000087 PARAMETER Experiment Name: At_100uM_ABA_Mutants_cDNA_P Parameter: Timepoint (hr) Value: 6
  misc_feature: MA Experiment 20000087 PARAMETER Experiment Name: At_100uM_ABA_Mutants_cDNA_P Parameter: Tissue Value: Aerial
  misc_feature: MA Experiment 20000087 PARAMETER Experiment Name: At_100uM_ABA_Mutants_cDNA_P Parameter: Treatment Value: 100uM ABA vs. No Treatment
  misc_feature: MA Experiment ID: 20000088 Result: Up-regulated in Transcription
  misc_feature: MA Experiment 20000088 PARAMETER Experiment Name: At_100uM_ABA_Mutants_cDNA_P Parameter: Plant Line Value: Landsberg
  misc_feature: MA Experiment 20000088 PARAMETER Experiment Name: At_100uM_ABA_Mutants_cDNA_P Parameter: Timepoint (hr) Value: 6
  misc_feature: MA Experiment 20000088 PARAMETER Experiment Name: At_100uM_ABA_Mutants_cDNA_P Parameter: Tissue Value: Aerial
  misc_feature: MA Experiment 20000088 PARAMETER Experiment Name: At_100uM_ABA_Mutants_cDNA_P Parameter: Treatment Value: 100uM ABA vs. No Treatment
  misc_feature: MA Experiment ID: 20000111 Result: Up-regulated in Transcription
  misc_feature: MA Experiment 20000111 PARAMETER Experiment Name: At_42deg_Heat_cDNA_P Parameter: Temperature (deg C) Value: 42 vs. 22
  misc_feature: MA Experiment 20000111 PARAMETER Experiment Name: At_42deg_Heat_cDNA_P Parameter: Timepoint (hr) Value: 6
  misc_feature: MA Experiment 20000111 PARAMETER Experiment Name: At_42deg_Heat_cDNA_P Parameter: Tissue Value: Aerial
  misc_feature: MA Experiment ID: 20000112 Result: Up-regulated in Transcription
  misc_feature: MA Experiment 20000112 PARAMETER Experiment Name: At_42deg_Heat_cDNA_P Parameter: Temperature (deg C) Value: 42 vs. 22
  misc_feature: MA Experiment 20000112 PARAMETER Experiment Name: At_42deg_Heat_cDNA_P Parameter: Timepoint (hr) Value: 2
  misc_feature: MA Experiment 20000112 PARAMETER Experiment Name: At_42deg_Heat_cDNA_P Parameter: Tissue Value: Aerial
  misc_feature: MA Experiment ID: 20000113 Result: Up-regulated in Transcription
  misc_feature: MA Experiment 20000113 PARAMETER Experiment Name: At_42deg_Heat_cDNA_P Parameter: Temperature (deg C) Value: 42 vs. 22
  misc_feature: MA Experiment 20000113 PARAMETER Experiment Name: At_42deg_Heat_cDNA_P Parameter: Timepoint (hr) Value: 8
  misc_feature: MA Experiment 20000113 PARAMETER Experiment Name: At_42deg_Heat_cDNA_P Parameter: Tissue Value: Aerial
  misc_feature: MA Experiment ID: 20000169 Result: Up-regulated in Transcription
  misc_feature: MA Experiment 20000169 PARAMETER Experiment Name: At_100uM_ABA_P Parameter: Age (day) Value: 14
  misc_feature: MA Experiment 20000169 PARAMETER Experiment Name: At_100uM_ABA_P Parameter: Organism Value: A. thaliana
  misc_feature: MA Experiment 20000169 PARAMETER Experiment Name: At_100uM_ABA_P Parameter: Plant Line Value: WS
  misc_feature: MA Experiment 20000169 PARAMETER Experiment Name: At_100uM_ABA_P Parameter: Timepoint (hr) Value: 6
  misc_feature: MA Experiment 20000169 PARAMETER Experiment Name: At_100uM_ABA_P Parameter: Tissue Value: Aerial
  misc_feature: MA Experiment 20000169 PARAMETER Experiment Name: At_100uM_ABA_P Parameter: Treatment Value: 100uM ABA vs. No Treatment
  misc_feature: MA Experiment ID: 20000234 Result: Down-regulated in Transcription
  misc_feature: MA Experiment 20000234 PARAMETER Experiment Name: At_Siliques_P Parameter: Age (day) Value: 21
  misc_feature: MA Experiment 20000234 PARAMETER Experiment Name: At_Siliques_P Parameter: Organism Value: A. thaliana
  misc_feature: MA Experiment 20000234 PARAMETER Experiment Name: At_Siliques_P Parameter: Plant Line Value: WS
  misc_feature: MA Experiment 20000234 PARAMETER Experiment Name: At_Siliques_P Parameter: Tissue Value: Less Than 5mm Siliques vs. Whole Plant
  misc_feature: MA Experiment ID: 20000264 Result: Down-regulated in Transcription
  misc_feature: MA Experiment 20000264 PARAMETER Experiment Name: At_Open_Flower_P Parameter: Age (day) Value: 21
  misc_feature: MA Experiment 20000264 PARAMETER Experiment Name: At_Open_Flower_P Parameter: Plant Line Value: WS
  misc_feature: MA Experiment 20000264 PARAMETER Experiment Name: At_Open_Flower_P Parameter: Tissue Value: Open Flower vs. Whole Plant
  misc_feature: MA Experiment ID: 20000265 Result: Down-regulated in Transcription
  misc_feature: MA Experiment 20000265 PARAMETER Experiment Name: At_Open_Flower_P Parameter: Age (day) Value: 21
  misc_feature: MA Experiment 20000265 PARAMETER Experiment Name: At_Open_Flower_P Parameter: Plant Line Value: WS
  misc_feature: MA Experiment 20000265 PARAMETER Experiment Name: At_Open_Flower_P Parameter: Tissue Value: Closed Flower vs. Whole Plant
  misc_feature: MA Experiment ID: 20000439 Result: Down-regulated in Transcription
  misc_feature: MA Experiment 20000439 PARAMETER Experiment Name: At_Roots__P Parameter: Age (day) Value: 14 vs. 21
  misc_feature: MA Experiment 20000439 PARAMETER Experiment Name: At_Roots__P Parameter: Organism Value: A. thaliana
  misc_feature: MA Experiment 20000439 PARAMETER Experiment Name: At_Roots__P Parameter: Tissue Value: Roots vs. Whole Plant
  misc_feature: MA Experiment ID: 20000451 Result: Down-regulated in Transcription
  misc_feature: MA Experiment 20000451 PARAMETER Experiment Name: At_CS6879_Shoots-Roots_P Parameter: Age (day) Value: 14
  misc_feature: MA Experiment 20000451 PARAMETER Experiment Name: At_CS6879_Shoots-Roots_P Parameter: Organism Value: A. thaliana
  misc_feature: MA Experiment 20000451 PARAMETER Experiment Name: At_CS6879_Shoots-Roots_P Parameter: Plant Line Value: CS6879 vs. WS
  misc_feature: MA Experiment 20000451 PARAMETER Experiment Name: At_CS6879_Shoots-Roots_P Parameter: Tissue Value: Roots
  misc_feature: MA Experiment ID: 20000495 Result: Down-regulated in Transcription
  misc_feature: MA Experiment 20000495 PARAMETER Experiment Name: At_Guard_Cells_P Parameter: Harvest Date Value: 8/2/2002
  misc_feature: MA Experiment 20000495 PARAMETER Experiment Name: At_Guard_Cells_P Parameter: Organism Value: A. thaliana
  misc_feature: MA Experiment 20000495 PARAMETER Experiment Name: At_Guard_Cells_P Parameter: Tissue Value: Guard Cells vs. Leaves
  misc_feature: MA Experiment ID: 20000527 Result: Up-regulated in Transcription
  misc_feature: MA Experiment 20000527 PARAMETER Experiment Name: At_10percent_PEG_P Parameter: Age (day) Value: 20
  misc_feature: MA Experiment 20000527 PARAMETER Experiment Name: At_10percent_PEG_P Parameter: Organism Value: A. thaliana
  misc_feature: MA Experiment 20000527 PARAMETER Experiment Name: At_10percent_PEG_P Parameter: Plant Line Value: WS
  misc_feature: MA Experiment 20000527 PARAMETER Experiment Name: At_10percent_PEG_P Parameter: Timepoint (day) Value: 20
  misc_feature: MA Experiment 20000527 PARAMETER Experiment Name: At_10percent_PEG_P Parameter: Tissue Value: Whole Plant
  misc_feature: MA Experiment 20000527 PARAMETER Experiment Name: At_10percent_PEG_P Parameter: Treatment Value: 10percent PEG vs. No Treatment
  misc_feature: MA Experiment ID: 20000574 Result: Down-regulated in Transcription
  misc_feature: MA Experiment 20000574 PARAMETER Experiment Name: At_100uM_ABA_Mutants__P Parameter: Organism Value: A. thaliana
  misc_feature: MA Experiment 20000574 PARAMETER Experiment Name: At_100uM_ABA_Mutants__P Parameter: Plant Line Value: CS23 vs. Ler wt
  misc_feature: MA Experiment 20000574 PARAMETER Experiment Name: At_100uM_ABA_Mutants__P Parameter: Timepoint (hr) Value: N/A
  misc_feature: MA Experiment 20000574 PARAMETER Experiment Name: At_100uM_ABA_Mutants__P Parameter: Tissue Value: Whole Plant
  misc_feature: MA Experiment 20000574 PARAMETER Experiment Name: At_100uM_ABA_Mutants__P Parameter: Treatment Value: None
  misc_feature: MA Experiment ID: 20001247 Result: Up-regulated in Transcription
  misc_feature: MA Experiment 20001247 PARAMETER Experiment Name: At_Far-red-induction_P Parameter: Age (day) Value: 7
  misc_feature: MA Experiment 20001247 PARAMETER Experiment Name: At_Far-red-induction_P Parameter: Light Value: Far-red vs. White
  misc_feature: MA Experiment 20001247 PARAMETER Experiment Name: At_Far-red-induction_P Parameter: Organism Value: A. thaliana
  misc_feature: MA Experiment 20001247 PARAMETER Experiment Name: At_Far-red-induction_P Parameter: Plant Line Value: Columbia
  misc_feature: MA Experiment 20001247 PARAMETER Experiment Name: At_Far-red-induction_P Parameter: Timepoint (hr) Value: 1
  misc_feature: MA Experiment 20001247 PARAMETER Experiment Name: At_Far-red-induction_P Parameter: Tissue Value: Whole Plant
  misc_feature: MA Experiment ID: 20001248 Result: Up-regulated in Transcription
  misc_feature: MA Experiment 20001248 PARAMETER Experiment Name: At_Far-red-induction_P Parameter: Age (day) Value: 7
  misc_feature: MA Experiment 20001248 PARAMETER Experiment Name: At_Far-red-induction_P Parameter: Light Value: Far-red vs. White
  misc_feature: MA Experiment 20001248 PARAMETER Experiment Name: At_Far-red-induction_P Parameter: Organism Value: A. thaliana
  misc_feature: MA Experiment 20001248 PARAMETER Experiment Name: At_Far-red-induction_P Parameter: Plant Line Value: Columbia
  misc_feature: MA Experiment 20001248 PARAMETER Experiment Name: At_Far-red-induction_P Parameter: Timepoint (hr) Value: 4
  misc_feature: MA Experiment 20001248 PARAMETER Experiment Name: At_Far-red-induction_P Parameter: Tissue Value: Whole Plant
  misc_feature: MA Experiment ID: 20001450 Result: Up-regulated in Transcription
  misc_feature: MA Experiment 20001450 PARAMETER Experiment Name: At_Far-red-induction_P Parameter: Age (day) Value: 7
  misc_feature: MA Experiment 20001450 PARAMETER Experiment Name: At_Far-red-induction_P Parameter: Light Value: Far-red vs. White
  misc_feature: MA Experiment 20001450 PARAMETER Experiment Name: At_Far-red-induction_P Parameter: Organism Value: A. thaliana
  misc_feature: MA Experiment 20001450 PARAMETER Experiment Name: At_Far-red-induction_P Parameter: Plant Line Value: Columbia
  misc_feature: MA Experiment 20001450 PARAMETER Experiment Name: At_Far-red-induction_P Parameter: Timepoint (hr) Value: 8
  misc_feature: MA Experiment 20001450 PARAMETER Experiment Name: At_Far-red-induction_P Parameter: Tissue Value: Whole Plant
  misc_feature: MA Experiment ID: 20001451 Result: Up-regulated in Transcription
  misc_feature: MA Experiment 20001451 PARAMETER Experiment Name: At_Far-red-induction_P Parameter: Age (day) Value: 7
  misc_feature: MA Experiment 20001451 PARAMETER Experiment Name: At_Far-red-induction_P Parameter: Light Value: Far-red vs. White
  misc_feature: MA Experiment 20001451 PARAMETER Experiment Name: At_Far-red-induction_P Parameter: Organism Value: A. thaliana
  misc_feature: MA Experiment 20001451 PARAMETER Experiment Name: At_Far-red-induction_P Parameter: Plant Line Value: Columbia
  misc_feature: MA Experiment 20001451 PARAMETER Experiment Name: At_Far-red-induction_P Parameter: Timepoint (hr) Value: 24
  misc_feature: MA Experiment 20001451 PARAMETER Experiment Name: At_Far-red-induction_P Parameter: Tissue Value: Whole Plant
  misc_feature: MA Experiment ID: 20001554 Result: Up-regulated in Transcription
  misc_feature: MA Experiment 20001554 PARAMETER Experiment Name: At_Drought_Soil_Dry_P Parameter: Age (day) Value: 21
  misc_feature: MA Experiment 20001554 PARAMETER Experiment Name: At_Drought_Soil_Dry_P Parameter: Organism Value: A. thaliana
  misc_feature: MA Experiment 20001554 PARAMETER Experiment Name: At_Drought_Soil_Dry_P Parameter: Plant Line Value: WS
  misc_feature: MA Experiment 20001554 PARAMETER Experiment Name: At_Drought_Soil_Dry_P Parameter: Post Timepoint (hr) Value: None
  misc_feature: MA Experiment 20001554 PARAMETER Experiment Name: At_Drought_Soil_Dry_P Parameter: Post-Treatment Value: None
  misc_feature: MA Experiment 20001554 PARAMETER Experiment Name: At_Drought_Soil_Dry_P Parameter: Timepoint (day) Value: 7
  misc_feature: MA Experiment 20001554 PARAMETER Experiment Name: At_Drought_Soil_Dry_P Parameter: Treatment Value: Drought vs. No Drought
  misc_feature: MA Experiment ID: 20001555 Result: Up-regulated in Transcription
  misc_feature: MA Experiment 20001555 PARAMETER Experiment Name: At_Drought_Soil_Dry_P Parameter: Age (day) Value: 24
  misc_feature: MA Experiment 20001555 PARAMETER Experiment Name: At_Drought_Soil_Dry_P Parameter: Organism Value: A. thaliana
  misc_feature: MA Experiment 20001555 PARAMETER Experiment Name: At_Drought_Soil_Dry_P Parameter: Plant Line Value: WS
  misc_feature: MA Experiment 20001555 PARAMETER Experiment Name: At_Drought_Soil_Dry_P Parameter: Post Timepoint (hr) Value: None
  misc_feature: MA Experiment 20001555 PARAMETER Experiment Name: At_Drought_Soil_Dry_P Parameter: Post-Treatment Value: None
  misc_feature: MA Experiment 20001555 PARAMETER Experiment Name: At_Drought_Soil_Dry_P Parameter: Timepoint (day) Value: 10
  misc_feature: MA Experiment 20001555 PARAMETER Experiment Name: At_Drought_Soil_Dry_P Parameter: Treatment Value: Drought vs. No Drought
  misc_feature: MA Experiment ID: 20001757 Result: Up-regulated in Transcription
  misc_feature: MA Experiment 20001757 PARAMETER Experiment Name: At_50mM_NH4NO3_L-to-H_P Parameter: Timepoint (hr) Value: 6
  misc_feature: MA Experiment 20001757 PARAMETER Experiment Name: At_50mM_NH4NO3_L-to-H_P Parameter: Tissue Value: Leaf
  misc_feature: MA Experiment 20001757 PARAMETER Experiment Name: At_50mM_NH4NO3_L-to-H_P Parameter: Treatment Value: 50mM NH4NO3 vs 100mM Mannitol
atcaaattaaaaccctccagcctccaacaacaaaatttaccaacactctctctttctctttctctctgaaaacttaaaacgatggctataaccgccactcaaaacgacggcgtttcactaaacgccaataagatttcgtatgatcttgtggaaactgatgttgagatcatcacctccggtcgtcgtagtattccggcacactccggcatcctcgcttcggtctcaccggtactgacgaacatcatcgagaagccgaggaagattcacggcggatcatcgaagaaagttattaagattctcggtgttccatgcgacgccgtttcagtcttcgtcagattcctctattctccgagtgtcacggagaatgagatggaaaaatacggaatccatctactggctttatcacacgtgtatatggtgactcagttaaagcaacggtgcactaaaggcgtcggtgagagagtaaccgccgaaaacgttgtcgatattctccagctggctcgtctctgcgacgcacctgacctctgtctcaagtgtatgcgattcattcactacaagttcaagaccgttgaacagacagaaggatggaagtttcttcaagaacacgatccttttcttgaacttgacattctccaattcatcgacgatgcagaatcgaggaagaaaagaagaaggagacacagacgagaacagaatctgtatttgcagctgagtgaagccatggaatgtatagaacacatatgcaccgaaggttgcacactggtcggaccatcgtctaacttagacaacaagtcaacatgtcaagcaaaacccggtccatgcagtgcgttttcgacttgttaaggacttcaacttcttatacgtcactttgcagtatgcaagaaaagagtcgatggcaaaggttgtgtccgatgcaagagaatgattcaactccttagactccattcttcgatttgtgaccaatctgaatcttgccgtgtccctctttgcaggcaatataagaatagaggtgaaaaggacaagaaaatggttgaggacacgaagtggaaggttctggtgagaagagtagcgtctgctaaagccatgtcttcgttgtctcaatcaaagaagaaaaaaagtgaagtgttatttaaagaagaagcagaagatttgatcagaatccggaacaagttaatgtgaatatacaatatatgtgtttttattagattatatagtgagcgattgttagaagccattaattacttgagtcggaaggtttatttgtttgttatttgtctctcggactggttgattgggttaaacttgtcaatgagtaaccctttgaatctgtcgttttgtttggtcggtcgaattatatagaaatgtattattggttataaaatggtattagggtttttggagactttgtggcaaaaagtatacagattgatccggttt

SEQ ID NO: 39988 - protein, 253 aa, Arabidopsis thaliana
  peptide (1)..(253): Ceres Seq. ID no. 12371962
  misc_feature (26)..(253): Homolog of NCBI NO: 18420081 NR Description: putative protein
  misc_feature (26)..(253): Homolog of NCBI NO: 26453150 NR Description: unknown protein [Arabidopsis thaliana]
  misc_feature (26)..(253): Homolog of NCBI NO: 7485765 NR Description: hypothetical protein F19F18.100 - Arabidopsis
  misc_feature (26)..(253): Homolog of NCBI NO: 15221235 NR Description: hypothetical protein; protein id: At1g05690.1
  misc_feature (16)..(253): Homolog of NCBI NO: 15240763 NR Description: putative protein
  misc_feature (23)..(253): Homolog of NCBI NO: 38345257 NR Description: OSJNBb0011N17.18 [Oryza sativa (japonica
  misc_feature (26)..(253): Homolog of NCBI NO: 20804890 NR Description: P0497A05.15 [Oryza sativa (japonica
  misc_feature (1)..(253): Homolog of NCBI NO: 7487530 NR Description: hypothetical protein T29H11.120 - Arabidopsis
  misc_feature (1)..(253): Homolog of NCBI NO: 18408618 NR Description: putative protein
  misc_feature (1)..(253): Homolog of NCBI NO: 15242656 NR Description: putative protein; protein id: At5g63160.1
MAITATQNDGVSLNANKISYDLVETDVEIITSGRRSIPAHSGILASVSPVLTNIIEKPRKIHGGSSKKVIKILGVPCDAVSVFVRFLYSPSVTENEMEKYGIHLLALSHVYMVTQLKQRCTKGVGERVTAENVVDILQLARLCDAPDLCLKCMRFIHYKFKTVEQTEGWKFLQEHDPFLELDILQFIDDAESRKKRRRRHRREQNLYLQLSEAMECIEHICTEGCTLVGPSSNLDNKSTCQAKPGPCSAFSTC

SEQ ID NO: 39989 - protein, 157 aa, Arabidopsis thaliana
  peptide (1)..(157): Ceres Seq. ID no. 12371963
  misc_feature (1)..(157): Homolog of NCBI NO: 18420081 NR Description: putative protein
  misc_feature (1)..(157): Homolog of NCBI NO: 26453150 NR Description: unknown protein [Arabidopsis thaliana]
  misc_feature (1)..(157): Homolog of NCBI NO: 7485765 NR Description: hypothetical protein F19F18.100 - Arabidopsis
  misc_feature (1)..(157): Homolog of NCBI NO: 15221235 NR Description: hypothetical protein; protein id: At1g05690.1
  misc_feature (1)..(157): Homolog of NCBI NO: 15240763 NR Description: putative protein
  misc_feature (1)..(157): Homolog of NCBI NO: 38345257 NR Description: OSJNBb0011N17.18 [Oryza sativa (japonica
  misc_feature (1)..(157): Homolog of NCBI NO: 20804890 NR Description: P0497A05.15 [Oryza sativa (japonica
  misc_feature (1)..(157): Homolog of NCBI NO: 7487530 NR Description: hypothetical protein T29H11.120 - Arabidopsis
  misc_feature (1)..(157): Homolog of NCBI NO: 18408618 NR Description: putative protein
  misc_feature (1)..(157): Homolog of NCBI NO: 15242656 NR Description: putative protein; protein id: At5g63160.1
MEKYGIHLLALSHVYMVTQLKQRCTKGVGERVTAENVVDILQLARLCDAPDLCLKCMRFIHYKFKTVEQTEGWKFLQEHDPFLELDILQFIDDAESRKKRRRRHRREQNLYLQLSEAMECIEHICTEGCTLVGPSSNLDNKSTCQAKPGPCSAFSTC

SEQ ID NO: 39990 - protein, 142 aa, Arabidopsis thaliana
  peptide (1)..(142): Ceres Seq. ID no. 12371964
  misc_feature (1)..(142): Homolog of NCBI NO: 26453150 NR Description: unknown protein [Arabidopsis thaliana]
  misc_feature (1)..(142): Homolog of NCBI NO: 18420081 NR Description: putative protein
  misc_feature (1)..(142): Homolog of NCBI NO: 7485765 NR Description: hypothetical protein F19F18.100 - Arabidopsis
  misc_feature (1)..(142): Homolog of NCBI NO: 15221235 NR Description: hypothetical protein; protein id: At1g05690.1
  misc_feature (1)..(142): Homolog of NCBI NO: 15240763 NR Description: putative protein
  misc_feature (1)..(142): Homolog of NCBI NO: 38345257 NR Description: OSJNBb0011N17.18 [Oryza sativa (japonica
  misc_feature (1)..(142): Homolog of NCBI NO: 20804890 NR Description: P0497A05.15 [Oryza sativa (japonica
  misc_feature (1)..(142): Homolog of NCBI NO: 7487530 NR Description: hypothetical protein T29H11.120 - Arabidopsis
  misc_feature (1)..(142): Homolog of NCBI NO: 18408618 NR Description: putative protein
  misc_feature (1)..(142): Homolog of NCBI NO: 15242656 NR Description: putative protein; protein id: At5g63160.1
MVTQLKQRCTKGVGERVTAENVVDILQLARLCDAPDLCLKCMRFIHYKFKTVEQTEGWKFLQEHDPFLELDILQFIDDAESRKKRRRRHRREQNLYLQLSEAMECIEHICTEGCTLVGPSSNLDNKSTCQAKPGPCSAFSTC

SEQ ID NO: 39991 - DNA, 2412 bp, Arabidopsis thaliana
  misc_feature (1)..(2412): Ceres Seq. ID no. 13494097
  misc_feature: MA Experiment ID: 108434 Result: Up-regulated in Transcription
  misc_feature: MA Experiment 108434 PARAMETER Experiment Name: At_Root_Tips_cDNA_P Parameter: Tissue Value: Root Tips
  misc_feature: MA Experiment ID: 20000093 Result: Up-regulated in Transcription
  misc_feature: MA Experiment 20000093 PARAMETER Experiment Name: At_42deg_Heat_cDNA_P Parameter: Temperature (deg C) Value: 42 vs. 22
  misc_feature: MA Experiment 20000093 PARAMETER Experiment Name: At_42deg_Heat_cDNA_P Parameter: Timepoint (hr) Value: 0.5
  misc_feature: MA Experiment 20000093 PARAMETER Experiment Name: At_42deg_Heat_cDNA_P Parameter: Tissue Value: Aerial
  misc_feature: MA Experiment ID: 20000112 Result: Up-regulated in Transcription
  misc_feature: MA Experiment 20000112 PARAMETER Experiment Name: At_42deg_Heat_cDNA_P Parameter: Temperature (deg C) Value: 42 vs. 22
  misc_feature: MA Experiment 20000112 PARAMETER Experiment Name: At_42deg_Heat_cDNA_P Parameter: Timepoint (hr) Value: 2
  misc_feature: MA Experiment 20000112 PARAMETER Experiment Name: At_42deg_Heat_cDNA_P Parameter: Tissue Value: Aerial
  misc_feature: MA Experiment ID: 20000113 Result: Up-regulated in Transcription
  misc_feature: MA Experiment 20000113 PARAMETER Experiment Name: At_42deg_Heat_cDNA_P Parameter: Temperature (deg C) Value: 42 vs. 22
  misc_feature: MA Experiment 20000113 PARAMETER Experiment Name: At_42deg_Heat_cDNA_P Parameter: Timepoint (hr) Value: 8
  misc_feature: MA Experiment 20000113 PARAMETER Experiment Name: At_42deg_Heat_cDNA_P Parameter: Tissue Value: Aerial
  misc_feature: MA Experiment ID: 20000144 Result: Up-regulated in Transcription
  misc_feature: MA Experiment 20000144 PARAMETER Experiment Name: At_42deg_Heat_cDNA_P Parameter: Temperature (deg C) Value: 42 vs. 22
  misc_feature: MA Experiment 20000144 PARAMETER Experiment Name: At_42deg_Heat_cDNA_P Parameter: Timepoint (hr) Value: 1
  misc_feature: MA Experiment 20000144 PARAMETER Experiment Name: At_42deg_Heat_cDNA_P Parameter: Tissue Value: Aerial
  misc_feature: MA Experiment ID: 20000173 Result: Up-regulated in Transcription
  misc_feature: MA Experiment 20000173 PARAMETER Experiment Name: At_42deg_Heat_P Parameter: Age (day) Value: 14
  misc_feature: MA Experiment 20000173 PARAMETER Experiment Name: At_42deg_Heat_P Parameter: Organism Value: A. thaliana
  misc_feature: MA Experiment 20000173 PARAMETER Experiment Name: At_42deg_Heat_P Parameter: Plant Line Value: WS
  misc_feature: MA Experiment 20000173 PARAMETER Experiment Name: At_42deg_Heat_P Parameter: Temperature (deg C) Value: 42 vs. 22
  misc_feature: MA Experiment 20000173 PARAMETER Experiment Name: At_42deg_Heat_P Parameter: Timepoint (hr) Value: 6
  misc_feature: MA Experiment 20000173 PARAMETER Experiment Name: At_42deg_Heat_P Parameter: Tissue Value: Aerial
  misc_feature: MA Experiment ID: 20001248 Result: Up-regulated in Transcription
  misc_feature: MA Experiment 20001248 PARAMETER Experiment Name: At_Far-red-induction_P Parameter: Age (day) Value: 7
  misc_feature: MA Experiment 20001248 PARAMETER Experiment Name: At_Far-red-induction_P Parameter: Light Value: Far-red vs. White
  misc_feature: MA Experiment 20001248 PARAMETER Experiment Name: At_Far-red-induction_P Parameter: Organism Value: A. thaliana
  misc_feature: MA Experiment 20001248 PARAMETER Experiment Name: At_Far-red-induction_P Parameter: Plant Line Value: Columbia
  misc_feature: MA Experiment 20001248 PARAMETER Experiment Name: At_Far-red-induction_P Parameter: Timepoint (hr) Value: 4
  misc_feature: MA Experiment 20001248 PARAMETER Experiment Name: At_Far-red-induction_P Parameter: Tissue Value: Whole Plant
  misc_feature: MA Experiment ID: 20001451 Result: Up-regulated in Transcription
  misc_feature: MA Experiment 20001451 PARAMETER Experiment Name: At_Far-red-induction_P Parameter: Age (day) Value: 7
  misc_feature: MA Experiment 20001451 PARAMETER Experiment Name: At_Far-red-induction_P Parameter: Light Value: Far-red vs. White
  misc_feature: MA Experiment 20001451 PARAMETER Experiment Name: At_Far-red-induction_P Parameter: Organism Value: A. thaliana
  misc_feature: MA Experiment 20001451 PARAMETER Experiment Name: At_Far-red-induction_P Parameter: Plant Line Value: Columbia
  misc_feature: MA Experiment 20001451 PARAMETER Experiment Name: At_Far-red-induction_P Parameter: Timepoint (hr) Value: 24
  misc_feature: MA Experiment 20001451 PARAMETER Experiment Name: At_Far-red-induction_P Parameter: Tissue Value: Whole Plant
  misc_feature: MA Experiment ID: 20001911 Result: Up-regulated in Transcription
  misc_feature: MA Experiment 20001911 PARAMETER Experiment Name: At_Drought_Reproduction_P Parameter: Age (day) Value: 40
  misc_feature: MA Experiment 20001911 PARAMETER Experiment Name: At_Drought_Reproduction_P Parameter: Organism Value: A. thaliana
  misc_feature: MA Experiment 20001911 PARAMETER Experiment Name: At_Drought_Reproduction_P Parameter: Plant Line Value: WS
  misc_feature: MA Experiment 20001911 PARAMETER Experiment Name: At_Drought_Reproduction_P Parameter: Timepoint (day) Value: 10
  misc_feature: MA Experiment 20001911 PARAMETER Experiment Name: At_Drought_Reproduction_P Parameter: Tissue Value: Flowers
  misc_feature: MA Experiment 20001911 PARAMETER Experiment Name: At_Drought_Reproduction_P Parameter: Treatment Value: Drought vs. No Drought
aaaaaaagcgtcgttgagaggttagagacgaaggaaggaggcagaggatagagagatagcgaggctaatggatcagtgactcactgagtcagattttaccgattcattgcctccattgaagcctcttttctcagattctacgcttcactgtctcttctccatgtgcgtctcctcctcctccgtttcttcagatcttgctttccggtgacggttttaatcttcttctctctggtaacacgtataaagcatggcttacctgatgtagacatgtagtgttaggctaaagactcctcttttcacttctgtcttgttgagtttgtgttggtttaaggctttaagccaaaggcgttgttggtctgacaagatggcaatggcggtgtttaaggctcctctaaaaggggaatttcatggggctagaaagatggaagggaagcaatataagcaccatctgcttcagcaacagtctacagggagaagacgtgtgttcgtgcaaaccgatactggctgtgtgttgggagttgagttggatcgtaatgacaatgttcatactgtgaagaaaaggcttcagattgcgtttaactttcctactgaggaaagctctttgacctttggggatatggtgttgaagaatgacttgagtgctgtgaggaatgattctccgcttctcttaaagcgtaacttaatgcacagaagctcttctactccgtgtctttcacctactgggaatgatctgcagaggaaagatcgaagtggtcctattgagatacttagtcactcgccctgttttctgtctttgaagcaaacagcgaatgacattgttaaggcgatgaagatgggtgttgaaccaatccctgttaatggtgggcttggaggggcatactattttagggatgaaaagggtcaaagtgttgctattgtcaagcctacggatgaagagccgtttgcccctaacaatcctaaaggcttcgtagggaaagcgcttgggcagcctggtttaaagccttctgtgcgggttggggaaaccgggtttagagaagttgctgcataccttcttgattatgatcactttgctaatgttcctcctacggctcttgtgaagataacacactctgttttcaatgtcaatgatggaatggatgggaacaaatctcgtgagaagaagaagctggtcagcagcaagattgcttcgttccagaagtttgtacctcatgattttgatgccagtgatcacgggacttcaagcttccctgtcgcttctgtgcaccgcattgggattttggacataaggattctcaacacagaccggcatggtggaaatcttttggtgaagaagcttgatgatggtggtgttgggaggtttggtcaagtggagcttattccaatagatcatggtctttgcttaccagaaacactcgaagatccttacttcgaatggattcattggcctcaggcttcaatacctttctctgaagaagaacttgactacatacaaagtcttgatccagtgaaagattgtgaaatgcttcgaagagagcttccgatgattcgagaggcttgtctcagggttctagttctctgtaccgttttccttaaagaagctgctgtttttggactttgtcttgcagagatcggtgagatgatgactcgagaatttcgtgcaggagaagaggaaccaagtgaactagaaatgttgtgtatcgaagccaagagattaaccactgaacaagacgttttgtctcccaagtcagatggagaaggagagacagagtttcagtttgatatagactacaatgagctagactcggtttatggctctgagacagaaaccgatgagttcttcgccaagaacccattttcaaacggacgttcttcacttggagagctcaaagagagcattgctgaagaagaagaagatgacgaagaggaggcaaaacttactctatctctctcaaagctttccacatcaatgaagaacaatctaagcaacaccatgggatccggatacctgaaacctccgaaagacaaccaaaccgacaaagcattggtaagtcacaagagcgcgaacgtgcagctcccgcttagcgtaaactttgtgaagttagccgacatgaaagaagttgaatgggttgtgttcttggagaggtttcaggagttgctttactcggcttttgcagaacgcaagaccatgacgttgaggaacacacagagacttggtacatcgtgcaagttttgagatcatacgagttcacataagagaagaccaaagatttcacttttacgagttttgaagcaattacttgttagctacgttaagattagtttacttttgtagcgaccacgagcacttgcaatgtgaagaaatgtttattttgcctgtaaatattctttaccatttttttttccctaacttcc

SEQ ID NO: 39992 - protein, 622 aa, Arabidopsis thaliana
  peptide (1)..(622): Ceres Seq. ID no. 13494098
  misc_feature (167)..(429): Pfam Name: Phosphatidylinositol 3- and 4-kinase Pfam Description: Phosphatidylinositol 3- and 4-kinase
  misc_feature (117)..(429): Homolog of NCBI NO: 34904388 NR Description: unnamed protein product [Oryza sativa (japonica
  misc_feature (223)..(474): Homolog of NCBI NO: 34903186 NR Description: unnamed protein product [Oryza sativa (japonica
  misc_feature (105)..(478): Homolog of NCBI NO: 15228965 NR Description: phosphatidylinositol 3- and 4-kinase family
  misc_feature (107)..(610): Homolog of NCBI NO: 15226765 NR Description: phosphatidylinositol 3- and 4-kinase family
  misc_feature (107)..(610): Homolog of NCBI NO: 19310381 NR Description: At2g40850/T20B5.5 [Arabidopsis thaliana]
  misc_feature (1)..(622): Homolog of NCBI NO: 18395825 NR Description: phosphatidylinositol 3- and 4-kinase family
  misc_feature (527)..(622): Homolog of NCBI NO: 25363315 NR Description: hypothetical protein At2g03890 [imported] -
  misc_feature (1)..(525): Homolog of NCBI NO: 25363315 NR Description: hypothetical protein At2g03890 [imported] -
  misc_feature (527)..(622): Homolog of NCBI NO: 18395629 NR Description: phosphatidylinositol 3- and 4-kinase family
  misc_feature (1)..(525): Homolog of NCBI NO: 18395629 NR Description: phosphatidylinositol 3- and 4-kinase family
MAMAVFKAPLKGEFHGARKMEGKQYKHHLLQQQSTGRRRVFVQTDTGCVLGVELDRNDNVHTVKKRLQIAFNFPTEESSLTFGDMVLKNDLSAVRNDSPLLLKRNLMHRSSSTPCLSPTGNDLQRKDRSGPIEILSHSPCFLSLKQTANDIVKAMKMGVEPIPVNGGLGGAYYFRDEKGQSVAIVKPTDEEPFAPNNPKGFVGKALGQPGLKPSVRVGETGFREVAAYLLDYDHFANVPPTALVKITHSVFNVNDGMDGNKSREKKKLVSSKIASFQKFVPHDFDASDHGTSSFPVASVHRIGILDIRILNTDRHGGNLLVKKLDDGGVGRFGQVELIPIDHGLCLPETLEDPYFEWIHWPQASIPFSEEELDYIQSLDPVKDCEMLRRELPMIREACLRVLVLCTVFLKEAAVFGLCLAEIGEMMTREFRAGEEEPSELEMLCIEAKRLTTEQDVLSPKSDGEGETEFQFDIDYNELDSVYGSETETDEFFAKNPFSNGRSSLGELKESIAEEEEDDEEEAKLTLSLSKLSTSMKNNLSNTMGSGYLKPPKDNQTDKALVSHKSANVQLPLSVNFVKLADMKEVEWVVFLERFQELLYSAFAERKTMTLRNTQRLGTSCKF

SEQ ID NO: 39993 - protein, 620 aa, Arabidopsis thaliana
  peptide (1)..(620): Ceres Seq. ID no. 13494099
  misc_feature (165)..(427): Pfam Name: Phosphatidylinositol 3- and 4-kinase Pfam Description: Phosphatidylinositol 3- and 4-kinase
  misc_feature (115)..(427): Homolog of NCBI NO: 34904388 NR Description: unnamed protein product [Oryza sativa (japonica
  misc_feature (221)..(472): Homolog of NCBI NO: 34903186 NR Description: unnamed protein product [Oryza sativa (japonica
  misc_feature (103)..(476): Homolog of NCBI NO: 15228965 NR Description: phosphatidylinositol 3- and 4-kinase family
  misc_feature (105)..(608): Homolog of NCBI NO: 15226765 NR Description: phosphatidylinositol 3- and 4-kinase family
  misc_feature (105)..(608): Homolog of NCBI NO: 19310381 NR Description: At2g40850/T20B5.5 [Arabidopsis thaliana]
  misc_feature (1)..(620): Homolog of NCBI NO: 18395825 NR Description: phosphatidylinositol 3- and 4-kinase family
  misc_feature (525)..(620): Homolog of NCBI NO: 25363315 NR Description: hypothetical protein At2g03890 [imported] -
  misc_feature (1)..(523): Homolog of NCBI NO: 25363315 NR Description: hypothetical protein At2g03890 [imported] -
  misc_feature (525)..(620): Homolog of NCBI NO: 18395629 NR Description: phosphatidylinositol 3- and 4-kinase family
  misc_feature (1)..(523): Homolog of NCBI NO: 18395629 NR Description: phosphatidylinositol 3- and 4-kinase family
MAVFKAPLKGEFHGARKMEGKQYKHHLLQQQSTGRRRVFVQTDTGCVLGVELDRNDNVHTVKKRLQIAFNFPTEESSLTFGDMVLKNDLSAVRNDSPLLLKRNLMHRSSSTPCLSPTGNDLQRKDRSGPIEILSHSPCFLSLKQTANDIVKAMKMGVEPIPVNGGLGGAYYFRDEKGQSVAIVKPTDEEPFAPNNPKGFVGKALGQPGLKPSVRVGETGFREVAAYLLDYDHFANVPPTALVKITHSVFNVNDGMDGNKSREKKKLVSSKIASFQKFVPHDFDASDHGTSSFPVASVHRIGILDIRILNTDRHGGNLLVKKLDDGGVGRFGQVELIPIDHGLCLPETLEDPYFEWIHWPQASIPFSEEELDYIQSLDPVKDCEMLRRELPMIREACLRVLVLCTVFLKEAAVFGLCLAEIGEMMTREFRAGEEEPSELEMLCIEAKRLTTEQDVLSPKSDGEGETEFQFDIDYNELDSVYGSETETDEFFAKNPFSNGRSSLGELKESIAEEEEDDEEEAKLTLSLSKLSTSMKNNLSNTMGSGYLKPPKDNQTDKALVSHKSANVQLPLSVNFVKLADMKEVEWVVFLERFQELLYSAFAERKTMTLRNTQRLGTSCKF

SEQ ID NO: 39994 - protein, 603 aa, Arabidopsis thaliana
  peptide (1)..(603): Ceres Seq. ID no. 13494100
  misc_feature (148)..(410): Pfam Name: Phosphatidylinositol 3- and 4-kinase Pfam Description: Phosphatidylinositol 3- and 4-kinase
  misc_feature (98)..(410): Homolog of NCBI NO: 34904388 NR Description: unnamed protein product [Oryza sativa (japonica
  misc_feature (204)..(455): Homolog of NCBI NO: 34903186 NR Description: unnamed protein product [Oryza sativa (japonica
  misc_feature (86)..(459): Homolog of NCBI NO: 15228965 NR Description: phosphatidylinositol 3- and 4-kinase family
  misc_feature (88)..(591): Homolog of NCBI NO: 15226765 NR Description: phosphatidylinositol 3- and 4-kinase family
  misc_feature (88)..(591): Homolog of NCBI NO: 19310381 NR Description: At2g40850/T20B5.5 [Arabidopsis thaliana]
  misc_feature (1)..(603): Homolog of NCBI NO: 18395825 NR Description: phosphatidylinositol 3- and 4-kinase family
  misc_feature (508)..(603): Homolog of NCBI NO: 25363315 NR Description: hypothetical protein At2g03890 [imported] -
  misc_feature (1)..(506): Homolog of NCBI NO: 25363315 NR Description: hypothetical protein At2g03890 [imported] -
  misc_feature (508)..(603): Homolog of NCBI NO: 18395629 NR Description: phosphatidylinositol 3- and 4-kinase family
  misc_feature (1)..(506): Homolog of NCBI NO: 18395629 NR Description: phosphatidylinositol 3- and 4-kinase family
MEGKQYKHHLLQQQSTGRRRVFVQTDTGCVLGVELDRNDNVHTVKKRLQIAFNFPTEESSLTFGDMVLKNDLSAVRNDSPLLLKRNLMHRSSSTPCLSPTGNDLQRKDRSGPIEILSHSPCFLSLKQTANDIVKAMKMGVEPIPVNGGLGGAYYFRDEKGQSVAIVKPTDEEPFAPNNPKGFVGKALGQPGLKPSVRVGETGFREVAAYLLDYDHFANVPPTALVKITHSVFNVNDGMDGNKSREKKKLVSSKIASFQKFVPHDFDASDHGTSSFPVASVHRIGILDIRILNTDRHGGNLLVKKLDDGGVGRFGQVELIPIDHGLCLPETLEDPYFEWIHWPQASIPFSEEELDYIQSLDPVKDCEMLRRELPMIREACLRVLVLCTVFLKEAAVFGLCLAEIGEMMTREFRAGEEEPSELEMLCIEAKRLTTEQDVLSPKSDGEGETEFQFDIDYNELDSVYGSETETDEFFAKNPFSNGRSSLGELKESIAEEEEDDEEEAKLTLSLSKLSTSMKNNLSNTMGSGYLKPPKDNQTDKALVSHKSANVQLPLSVNFVKLADMKEVEWVVFLERFQELLYSAFAERKTMTLRNTQRLGTSCKF

SEQ ID NO: 39995 - DNA, 2117 bp, Arabidopsis thaliana
  misc_feature (1)..(2117): Ceres Seq. ID no. 13575052
  misc_feature: MA Experiment ID: 20000314 Result: Down-regulated in Transcription
  misc_feature: MA Experiment 20000314 PARAMETER Experiment Name: At_14day_Shoots-Roots_Sub_P Parameter: Age (day) Value: 14
  misc_feature: MA Experiment 20000314 PARAMETER Experiment Name: At_14day_Shoots-Roots_Sub_P Parameter: Organism Value: A. thaliana
  misc_feature: MA Experiment 20000314 PARAMETER Experiment Name: At_14day_Shoots-Roots_Sub_P Parameter: Plant Line Value: WS
  misc_feature: MA Experiment 20000314 PARAMETER Experiment Name: At_14day_Shoots-Roots_Sub_P Parameter: Tissue Value: Roots vs. Whole Plant
  misc_feature: MA Experiment ID: 20000315 Result: Down-regulated in Transcription
  misc_feature: MA Experiment 20000315 PARAMETER Experiment Name: At_14day_Shoots-Roots_Sub_P Parameter: Age (day) Value: 14
  misc_feature: MA Experiment 20000315 PARAMETER Experiment Name: At_14day_Shoots-Roots_Sub_P Parameter: Organism Value: A. thaliana
  misc_feature: MA Experiment 20000315 PARAMETER Experiment Name: At_14day_Shoots-Roots_Sub_P Parameter: Plant Line Value: WS
  misc_feature: MA Experiment 20000315 PARAMETER Experiment Name: At_14day_Shoots-Roots_Sub_P Parameter: Tissue Value: Shoots vs. Whole Plant
  misc_feature: MA Experiment ID: 20000327 Result: Up-regulated in Transcription
  misc_feature: MA Experiment 20000327 PARAMETER Experiment Name: At_42deg_Heat_Sub_P Parameter: Age (day) Value: 14
  misc_feature: MA Experiment 20000327 PARAMETER Experiment Name: At_42deg_Heat_Sub_P Parameter: Organism Value: A. thaliana
  misc_feature: MA Experiment 20000327 PARAMETER Experiment Name: At_42deg_Heat_Sub_P Parameter: Plant Line Value: WS
  misc_feature: MA Experiment 20000327 PARAMETER Experiment Name: At_42deg_Heat_Sub_P Parameter: Temperature (deg C) Value: 42 vs. 22
  misc_feature: MA Experiment 20000327 PARAMETER Experiment Name: At_42deg_Heat_Sub_P Parameter: Timepoint (hr) Value: 1
  misc_feature: MA Experiment 20000327 PARAMETER Experiment Name: At_42deg_Heat_Sub_P Parameter: Tissue Value: Aerial
  misc_feature: MA Experiment ID: 20000328 Result: Up-regulated in Transcription
  misc_feature: MA Experiment 20000328 PARAMETER Experiment Name: At_42deg_Heat_Sub_P Parameter: Age (day) Value: 14
  misc_feature: MA Experiment 20000328 PARAMETER Experiment Name: At_42deg_Heat_Sub_P Parameter: Organism Value: A. thaliana
  misc_feature: MA Experiment 20000328 PARAMETER Experiment Name: At_42deg_Heat_Sub_P Parameter: Plant Line Value: WS
  misc_feature: MA Experiment 20000328 PARAMETER Experiment Name: At_42deg_Heat_Sub_P Parameter: Temperature (deg C) Value: 42 vs. 22
  misc_feature: MA Experiment 20000328 PARAMETER Experiment Name: At_42deg_Heat_Sub_P Parameter: Timepoint (hr) Value: 6
  misc_feature: MA Experiment 20000328 PARAMETER Experiment Name: At_42deg_Heat_Sub_P Parameter: Tissue Value: Aerial
  misc_feature: MA Experiment ID: 20000329 Result: Up-regulated in Transcription
  misc_feature: MA Experiment 20000329 PARAMETER Experiment Name: At_4deg_Cold_Sub_P Parameter: Age (day) Value: 14
  misc_feature: MA Experiment 20000329 PARAMETER Experiment Name: At_4deg_Cold_Sub_P Parameter: Organism Value: A. thaliana
  misc_feature: MA Experiment 20000329 PARAMETER Experiment Name: At_4deg_Cold_Sub_P Parameter: Plant Line Value: WS
  misc_feature: MA Experiment 20000329 PARAMETER Experiment Name: At_4deg_Cold_Sub_P Parameter: Temperature (deg C) Value: 4 vs. 22
  misc_feature: MA Experiment 20000329 PARAMETER Experiment Name: At_4deg_Cold_Sub_P Parameter: Timepoint (hr) Value: 6
  misc_feature: MA Experiment 20000329 PARAMETER Experiment Name: At_4deg_Cold_Sub_P Parameter: Tissue Value: Aerial
  misc_feature: MA Experiment ID: 20000332 Result: Up-regulated in Transcription
  misc_feature: MA Experiment 20000332 PARAMETER Experiment Name: At_4deg_Cold_Sub_P Parameter: Age (day) Value: 14
  misc_feature: MA Experiment 20000332 PARAMETER Experiment Name: At_4deg_Cold_Sub_P Parameter: Organism Value: A. thaliana
  misc_feature: MA Experiment 20000332 PARAMETER Experiment Name: At_4deg_Cold_Sub_P Parameter: Plant Line Value: WS
  misc_feature: MA Experiment 20000332 PARAMETER Experiment Name: At_4deg_Cold_Sub_P Parameter: Temperature (deg C) Value: 4 vs. 22
  misc_feature: MA Experiment 20000332 PARAMETER Experiment Name: At_4deg_Cold_Sub_P Parameter: Timepoint (hr) Value: 2
  misc_feature: MA Experiment 20000332 PARAMETER Experiment Name: At_4deg_Cold_Sub_P Parameter: Tissue Value: Aerial
  misc_feature: MA Experiment ID: 20000440 Result: Down-regulated in Transcription
  misc_feature: MA Experiment 20000440 PARAMETER Experiment Name: At_Closed-Flower__Sub_P Parameter: Tissue Value: Closed Flower vs. Whole Plant
accgttgttttgcgtctataattaagtatcttccactaatctcatatttcaaactgtactttttcctcgagctctctccaatttcctcatagctctattgttcgaaaattctgaaacgaacgttaccactatggacactaagatcggatctatcgacgcgtgtaacccgaccaaccacgatatcggcggtcctccaaacggcggagtctccaccgttcaaaacacaagtccacttcactccaccaccgtcagcccctgcgacgcgactcttggccgttacctagcaagacggttagtcgaaatcggcgtcaccgatgtcttctccgttcctggtgatttcaacctgacgcttctcgatcacctaatcgccgaaccaaacctcaagctgatcggttgctgcaacgagcttaacgccggatacgctgctgacggttacgctagatctcgcggtgttggtgcgtgcgtcgttacgttcaccgtcggtggattgagtgttctgaatgcgatcgccggtgcttacagtgagaatctgcctctgatttgcatcgtcggtggtccaaactccaacgattacggtaccaataggattcttcatcatacaattggtttacctgatttcactcaagagcttaggtgttttcaagctgttacttgttttcaagctgtgattaataacttagaagaggctcatgaacttatcgatactgcgatttcaactgctttgaaagaaagcaaacctgtttatatcagtatcagctgtaatttaccggcgattcctcttccgacgtttagtcgtcatcctgttccgttcatgcttccgatgaaggttagcaatcagattggtttagatgcggcggtggaggcagctgctgagttcttgaacaaagctgtgaagccagttcttgttggtgggccgaaaatgcgggttgcgaaagccgcggatgcttttgttgagcttgctgatgcttctggctatggtcttgctgtgatgccttctgctaaaggacaagtacctgagcatcacaagcattttatagggacgtattggggagctgtgagtacagctttttgtgctgaaatcgttgaatctgcggatgcttatctgtttgcaggtccgattttcaacgattacagttctgttgggtattctctgcttctcaagaaggagaaggcaatcatcgttcagcctgatcgggttactatcggtaacggacctgcgtttggatgtgttcttatgaaggattttctaagcgagttggctaaacgaattaagcacaacaacacttcttatgagaattatcacaggatctatgtcccagaaggaaagcctttgagagataacccgaatgagtctttgagggttaatgtactgttccaacacattcagaatatgctctcttctgagtctgctgtgcttgctgagacaggagattcctggttcaactgtcagaagctgaagctccctgaaggatgcggttacgaattccaaatgcagtacggatcaattggctggtcagtgggtgctactctaggctatgctcaagccatgccaaacaggcgtgtcattgcttgtattggagatggtagtttccaggtaaccgcacaggatgtatctacgatgatacggtgtgggcaaaagaccataatcttcctcatcaacaacggaggctacaccattgaggtggaaattcacgatggtccttacaatgtcataaagaactggaactacacagcttttgttgaggccatacacaatggagaaggaaaatgctggactgccaaggtgagatgcgaggaggagttagtgaaagcaatcaacacggcaaccaatgaggaaaaagagagcttttgtttcattgaagtgatagtgcacaaagacgatacaagcaaggaacttttggagtggggctctagagtctctgctgctaatagtcgtcccccaaatccgcagtagagtatataaatgcactcaacttatatatatttcagatttggtagtgtcttcaccgttctatgtaaagtagtgtggatccttttacacccatctggatgggaaaaaaatgtgtgtccccttgaggatataaactgtttgagtgcctaaataagaacttgtttcc

SEQ ID NO: 39996 - protein, 607 aa, Arabidopsis thaliana
  peptide (1)..(607): Ceres Seq. ID no. 13575053
  misc_feature (33)..(607): Homolog of NCBI NO: 34898228 NR Description: putative pyruvate decarboxylase
  misc_feature (24)..(607): Homolog of NCBI NO: 34896032 NR Description: Similar to Zea mays mRNA for pyruvate
  misc_feature (1)..(607): Homolog of NCBI NO: 1616785 NR Description: pyruvate decarboxylase [Arabidopsis thaliana]
  misc_feature (38)..(607): Homolog of NCBI NO: 10732644 NR Description: pyruvate decarboxylase 1 [Vitis vinifera]
  misc_feature (13)..(607): Homolog of NCBI NO: 24745919 NR Description: pyruvate decarboxylase [Solanum tuberosum]
  misc_feature (1)..(607): Homolog of NCBI NO: 15240950 NR Description: pyruvate decarboxylase-related protein
  misc_feature (1)..(607): Homolog of NCBI NO: 15234062 NR Description: pyruvate decarboxylase-1 (Pdc1) [Arabidopsis
  misc_feature (1)..(607): Homolog of NCBI NO: 17225598 NR Description: pyruvate decarboxylase [Fragaria x ananassa]
  misc_feature (1)..(607): Homolog of NCBI NO: 10121330 NR Description: pyruvate decarboxylase [Fragaria x ananassa]
  misc_feature (1)..(607): Homolog of NCBI NO: 29373077 NR Description: pyruvate decarboxylase 1 [Lotus corniculatus]
MDTKIGSIDACNPTNHDIGGPPNGGVSTVQNTSPLHSTTVSPCDATLGRYLARRLVEIGVTDVFSVPGDFNLTLLDHLIAEPNLKLIGCCNELNAGYAADGYARSRGVGACVVTFTVGGLSVLNAIAGAYSENLPLICIVGGPNSNDYGTNRILHHTIGLPDFTQELRCFQAVTCFQAVINNLEEAHELIDTAISTALKESKPVYISISCNLPAIPLPTFSRHPVPFMLPMKVSNQIGLDAAVEAAAEFLNKAVKPVLVGGPKMRVAKAADAFVELADASGYGLAVMPSAKGQVPEHHKHFIGTYWGAVSTAFCAEIVESADAYLFAGPIFNDYSSVGYSLLLKKEKAIIVQPDRVTIGNGPAFGCVLMKDFLSELAKRIKHNNTSYENYHRIYVPEGKPLRDNPNESLRVNVLFQHIQNMLSSESAVLAETGDSWFNCQKLKLPEGCGYEFQMQYGSIGWSVGATLGYAQAMPNRRVIACIGDGSFQVTAQDVSTMIRCGQKTIIFLINNGGYTIEVEIHDGPYNVIKNWNYTAFVEAIHNGEGKCWTAKVRCEEELVKAINTATNEEKESFCFIEVIVHKDDTSKELLEWGSRVSAANSRPPNPQ

SEQ ID NO: 39997 - protein, 380 aa, Arabidopsis thaliana
  peptide (1)..(380): Ceres Seq. ID no. 13575054
  misc_feature (1)..(380): Homolog of NCBI NO: 34898228 NR Description: putative pyruvate decarboxylase
  misc_feature (1)..(380): Homolog of NCBI NO: 34896032 NR Description: Similar to Zea mays mRNA for pyruvate
  misc_feature (1)..(380): Homolog of NCBI NO: 1616785 NR Description: pyruvate decarboxylase [Arabidopsis thaliana]
  misc_feature (1)..(380): Homolog of NCBI NO: 10732644 NR Description: pyruvate decarboxylase 1 [Vitis vinifera]
  misc_feature (1)..(380): Homolog of NCBI NO: 24745919 NR Description: pyruvate decarboxylase [Solanum tuberosum]
  misc_feature (1)..(380): Homolog of NCBI NO: 15240950 NR Description: pyruvate decarboxylase-related protein
  misc_feature (1)..(380): Homolog of NCBI NO: 15234062 NR Description: pyruvate decarboxylase-1 (Pdc1) [Arabidopsis
  misc_feature (1)..(380): Homolog of NCBI NO: 17225598 NR Description: pyruvate decarboxylase [Fragaria x ananassa]
  misc_feature (1)..(380): Homolog of NCBI NO: 10121330 NR Description: pyruvate decarboxylase [Fragaria x ananassa]
  misc_feature (1)..(380): Homolog of NCBI NO: 29373077 NR Description: pyruvate decarboxylase 1 [Lotus corniculatus]
MLPMKVSNQIGLDAAVEAAAEFLNKAVKPVLVGGPKMRVAKAADAFVELADASGYGLAVMPSAKGQVPEHHKHFIGTYWGAVSTAFCAEIVESADAYLFAGPIFNDYSSVGYSLLLKKEKAIIVQPDRVTIGNGPAFGCVLMKDFLSELAKRIKHNNTSYENYHRIYVPEGKPLRDNPNESLRVNVLFQHIQNMLSSESAVLAETGDSWFNCQKLKLPEGCGYEFQMQYGSIGWSVGATLGYAQAMPNRRVIACIGDGSFQVTAQDVSTMIRCGQKTIIFLINNGGYTIEVEIHDGPYNVIKNWNYTAFVEAIHNGEGKCWTAKVRCEEELVKAINTATNEEKESFCFIEVIVHKDDTSKELLEWGSRVSAANSRPPNPQ

SEQ ID NO: 39998 - protein, 377 aa, Arabidopsis thaliana
  peptide (1)..(377): Ceres Seq. ID no. 13575055
  misc_feature (1)..(377): Homolog of NCBI NO: 34898228 NR Description: putative pyruvate decarboxylase
  misc_feature (1)..(377): Homolog of NCBI NO: 34896032 NR Description: Similar to Zea mays mRNA for pyruvate
  misc_feature (1)..(377): Homolog of NCBI NO: 1616785 NR Description: pyruvate decarboxylase [Arabidopsis thaliana]
  misc_feature (1)..(377): Homolog of NCBI NO: 10732644 NR Description: pyruvate decarboxylase 1 [Vitis vinifera]
  misc_feature (1)..(377): Homolog of NCBI NO: 24745919 NR Description: pyruvate decarboxylase [Solanum tuberosum]
  misc_feature (1)..(377): Homolog of NCBI NO: 15240950 NR Description: pyruvate decarboxylase-related protein
  misc_feature (1)..(377): Homolog of NCBI NO: 15234062 NR Description: pyruvate decarboxylase-1 (Pdc1) [Arabidopsis
  misc_feature (1)..(377): Homolog of NCBI NO: 17225598 NR Description: pyruvate decarboxylase [Fragaria x ananassa]
  misc_feature (1)..(377): Homolog of NCBI NO: 10121330 NR Description: pyruvate decarboxylase [Fragaria x ananassa]
  misc_feature (1)..(377): Homolog of NCBI NO: 29373077 NR Description: pyruvate decarboxylase 1 [Lotus corniculatus]
MKVSNQIGLDAAVEAAAEFLNKAVKPVLVGGPKMRVAKAADAFVELADASGYGLAVMPSAKGQVPEHHKHFIGTYWGAVSTAFCAEIVESADAYLFAGPIFNDYSSVGYSLLLKKEKAIIVQPDRVTIGNGPAFGCVLMKDFLSELAKRIKHNNTSYENYHRIYVPEGKPLRDNPNESLRVNVLFQHIQNMLSSESAVLAETGDSWFNCQKLKLPEGCGYEFQMQYGSIGWSVGATLGYAQAMPNRRVIACIGDGSFQVTAQDVSTMIRCGQKTIIFLINNGGYTIEVEIHDGPYNVIKNWNYTAFVEAIHNGEGKCWTAKVRCEEELVKAINTATNEEKESFCFIEVIVHKDDTSKELLEWGSRVSAANSRPPNPQ

SEQ ID NO: 39999 - DNA, 1563 bp, Arabidopsis thaliana
  misc_feature (1)..(1563): Ceres Seq. ID no. 13576556
  misc_feature: MA Experiment ID: 20000185 Result: Up-regulated in Transcription
  misc_feature: MA Experiment 20000185 PARAMETER Experiment Name: At_Roots__P Parameter: Age (day) Value: 7 vs. 21
  misc_feature: MA Experiment 20000185 PARAMETER Experiment Name: At_Roots__P Parameter: Organism Value: A. thaliana
  misc_feature: MA Experiment 20000185 PARAMETER Experiment Name: At_Roots__P Parameter: Tissue Value: Roots vs. Whole Plant
  misc_feature: MA Experiment ID: 20000227 Result: Up-regulated in Transcription
  misc_feature: MA Experiment 20000227 PARAMETER Experiment Name: At_Root-Tips-vs-Tops_P Parameter: Tissue Value: Root Tips vs. Root Tops
  misc_feature: MA Experiment ID: 20000234 Result: Up-regulated in Transcription
  misc_feature: MA Experiment 20000234 PARAMETER Experiment Name: At_Siliques_P Parameter: Age (day) Value: 21
  misc_feature: MA Experiment 20000234 PARAMETER Experiment Name: At_Siliques_P Parameter: Organism Value: A. thaliana
  misc_feature: MA Experiment 20000234 PARAMETER Experiment Name: At_Siliques_P Parameter: Plant Line Value: WS
  misc_feature: MA Experiment 20000234 PARAMETER Experiment Name: At_Siliques_P Parameter: Tissue Value: Less Than 5mm Siliques vs. Whole Plant
  misc_feature: MA Experiment ID: 20000235 Result: Up-regulated in Transcription
  misc_feature: MA Experiment 20000235 PARAMETER Experiment Name: At_Siliques_P Parameter: Age (day) Value: 21
  misc_feature: MA Experiment 20000235 PARAMETER Experiment Name: At_Siliques_P Parameter: Organism Value: A. thaliana
  misc_feature: MA Experiment 20000235 PARAMETER Experiment Name: At_Siliques_P Parameter: Plant Line Value: WS
  misc_feature: MA Experiment 20000235 PARAMETER Experiment Name: At_Siliques_P Parameter: Tissue Value: 5-10mm Siliques vs. Whole Plant
  misc_feature: MA Experiment ID: 20000264 Result: Up-regulated in Transcription
  misc_feature: MA Experiment 20000264 PARAMETER Experiment Name: At_Open_Flower_P Parameter: Age (day) Value: 21
  misc_feature: MA Experiment 20000264 PARAMETER Experiment Name: At_Open_Flower_P Parameter: Plant Line Value: WS
  misc_feature: MA Experiment 20000264 PARAMETER Experiment Name: At_Open_Flower_P Parameter: Tissue Value: Open Flower vs. Whole Plant
  misc_feature: MA Experiment ID: 20000439 Result: Up-regulated in Transcription
  misc_feature: MA Experiment 20000439 PARAMETER Experiment Name: At_Roots__P Parameter: Age (day) Value: 14 vs. 21
  misc_feature: MA Experiment 20000439 PARAMETER Experiment Name: At_Roots__P Parameter: Organism Value: A. thaliana
  misc_feature: MA Experiment 20000439 PARAMETER Experiment Name: At_Roots__P Parameter: Tissue Value: Roots vs. Whole Plant
  misc_feature: MA Experiment ID: 20000527 Result: Down-regulated in Transcription
  misc_feature: MA Experiment 20000527 PARAMETER Experiment Name: At_10percent_PEG_P Parameter: Age (day) Value: 20
  misc_feature: MA Experiment 20000527 PARAMETER Experiment Name: At_10percent_PEG_P Parameter: Organism Value: A. thaliana
  misc_feature: MA Experiment 20000527 PARAMETER Experiment Name: At_10percent_PEG_P Parameter: Plant Line Value: WS
  misc_feature: MA Experiment 20000527 PARAMETER Experiment Name: At_10percent_PEG_P Parameter: Timepoint (day) Value: 20
  misc_feature: MA Experiment 20000527 PARAMETER Experiment Name: At_10percent_PEG_P Parameter: Tissue Value: Whole Plant
  misc_feature: MA Experiment 20000527 PARAMETER Experiment Name: At_10percent_PEG_P Parameter: Treatment Value: 10percent PEG vs. No Treatment
  misc_feature: MA Experiment ID: 20000573 Result: Up-regulated in Transcription
  misc_feature: MA Experiment 20000573 PARAMETER Experiment Name: At_100uM_ABA_Mutants__P Parameter: Organism Value: A. thaliana
  misc_feature: MA Experiment 20000573 PARAMETER Experiment Name: At_100uM_ABA_Mutants__P Parameter: Plant Line Value: CS22 vs. Ler wt
  misc_feature: MA Experiment 20000573 PARAMETER Experiment Name: At_100uM_ABA_Mutants__P Parameter: Timepoint (hr) Value: N/A
  misc_feature: MA Experiment 20000573 PARAMETER Experiment Name: At_100uM_ABA_Mutants__P Parameter: Tissue Value: Whole Plant
  misc_feature: MA Experiment 20000573 PARAMETER Experiment Name: At_100uM_ABA_Mutants__P Parameter: Treatment Value: None
  misc_feature: MA Experiment ID: 20000574 Result: Up-regulated in Transcription
  misc_feature: MA Experiment 20000574 PARAMETER Experiment Name: At_100uM_ABA_Mutants__P Parameter: Organism Value: A. thaliana
  misc_feature: MA Experiment 20000574 PARAMETER Experiment Name: At_100uM_ABA_Mutants__P Parameter: Plant Line Value: CS23 vs. Ler wt
  misc_feature: MA Experiment 20000574 PARAMETER Experiment Name: At_100uM_ABA_Mutants__P Parameter: Timepoint (hr) Value: N/A
  misc_feature: MA Experiment 20000574 PARAMETER Experiment Name: At_100uM_ABA_Mutants__P Parameter: Tissue Value: Whole Plant
  misc_feature: MA Experiment 20000574 PARAMETER Experiment Name: At_100uM_ABA_Mutants__P Parameter: Treatment Value: None
  misc_feature: MA Experiment ID: 20001557 Result: Up-regulated in Transcription
  misc_feature: MA Experiment 20001557 PARAMETER Experiment Name: At_Drought_Soil_Dry_P Parameter: Age (day) Value: 27
  misc_feature: MA Experiment 20001557 PARAMETER Experiment Name: At_Drought_Soil_Dry_P Parameter: Organism Value: A. thaliana
  misc_feature: MA Experiment 20001557 PARAMETER Experiment Name: At_Drought_Soil_Dry_P Parameter: Plant Line Value: WS
  misc_feature: MA Experiment 20001557 PARAMETER Experiment Name: At_Drought_Soil_Dry_P Parameter: Post Timepoint (hr) Value: 3
  misc_feature: MA Experiment 20001557 PARAMETER Experiment Name: At_Drought_Soil_Dry_P Parameter: Post-Treatment Value: Re-Water vs. No Drought
  misc_feature: MA Experiment 20001557 PARAMETER Experiment Name: At_Drought_Soil_Dry_P Parameter: Timepoint (day) Value: 13
  misc_feature: MA Experiment 20001557 PARAMETER Experiment Name: At_Drought_Soil_Dry_P Parameter: Treatment Value: Drought vs. No Drought
  misc_feature: MA Experiment ID: 20001558 Result: Up-regulated in Transcription
  misc_feature: MA Experiment 20001558 PARAMETER Experiment Name: At_Drought_Soil_Dry_P Parameter: Age (day) Value: 27
  misc_feature: MA Experiment 20001558 PARAMETER Experiment Name: At_Drought_Soil_Dry_P Parameter: Organism Value: A. thaliana
  misc_feature: MA Experiment 20001558 PARAMETER Experiment Name: At_Drought_Soil_Dry_P Parameter: Plant Line Value: WS
  misc_feature: MA Experiment 20001558 PARAMETER Experiment Name: At_Drought_Soil_Dry_P Parameter: Post Timepoint (hr) Value: 6
  misc_feature: MA Experiment 20001558 PARAMETER Experiment Name: At_Drought_Soil_Dry_P Parameter: Post-Treatment Value: Re-Water vs. No Drought
  misc_feature: MA Experiment 20001558 PARAMETER Experiment Name: At_Drought_Soil_Dry_P Parameter: Timepoint (day) Value: 13
  misc_feature: MA Experiment 20001558 PARAMETER Experiment Name: At_Drought_Soil_Dry_P Parameter: Treatment Value: Drought vs. No Drought
  misc_feature: MA Experiment ID: 20001904 Result: Up-regulated in Transcription
  misc_feature: MA Experiment 20001904 PARAMETER Experiment Name: At_Drought_Reproduction_P Parameter: Age (day) Value: 37
  misc_feature: MA Experiment 20001904 PARAMETER Experiment Name: At_Drought_Reproduction_P Parameter: Organism Value: A. thaliana
  misc_feature: MA Experiment 20001904 PARAMETER Experiment Name: At_Drought_Reproduction_P Parameter: Plant Line Value: WS
  misc_feature: MA Experiment 20001904 PARAMETER Experiment Name: At_Drought_Reproduction_P Parameter: Timepoint (day) Value: 7
  misc_feature: MA Experiment 20001904 PARAMETER Experiment Name: At_Drought_Reproduction_P Parameter: Tissue Value: Rosettes
  misc_feature: MA Experiment 20001904 PARAMETER Experiment Name: At_Drought_Reproduction_P Parameter: Treatment Value: Drought vs. No Drought
  misc_feature: MA Experiment ID: 20001906 Result: Up-regulated in Transcription
  misc_feature: MA Experiment 20001906 PARAMETER Experiment Name: At_Drought_Reproduction_P Parameter: Age (day) Value: 35
  misc_feature: MA Experiment 20001906 PARAMETER Experiment Name: At_Drought_Reproduction_P Parameter: Organism Value: A. thaliana
  misc_feature: MA Experiment 20001906 PARAMETER Experiment Name: At_Drought_Reproduction_P Parameter: Plant Line Value: WS
  misc_feature: MA Experiment 20001906 PARAMETER Experiment Name: At_Drought_Reproduction_P Parameter: Timepoint (day) Value: 5
  misc_feature: MA Experiment 20001906 PARAMETER Experiment Name: At_Drought_Reproduction_P Parameter: Tissue Value: Siliques
  misc_feature: MA Experiment 20001906 PARAMETER Experiment Name: At_Drought_Reproduction_P Parameter: Treatment Value: Drought vs. No Drought
aacaaaactaagattgaataatcataaagaagaaaactgagaatgagaggtaattatctttctttgctagtagtgctcattgtcttggcctccaatgatgttcttgccaacaacaactcttcaacacctaaattaagaagaagtgattttcctgaagatttcatttttggatctgcaacatctgcttaccaggtcgaaggaggtgctcatgaagatggtagaggacctagtatctgggataccttctctgagaaatatccagagaagataaaggatggtagcaatgggtctgttgcagataactcttaccatctttacaaggaagatgtggcgttattgcatcaaattgggtttaatgcatacagattctcaatctcatggtcgaggatcttgcctcgtgggaatctaaaaggaggaatcaaccaggctggtattgactattacaacaacttgatcaatgaacttttgtccaaaggaattaagccttttgcaaccatgttccattgggacacaccacaagcccttgaagatgcttatggtggattccgtggtgccgagattgtgaacgatttccgcgattatgcggatatttgcttcaagaattttggagatagagtgaagcattggatgacattgaacgagccattgacagtggtgcaacaagggtatgttgcaggtgtaatggctccaggaagatgctccaaattcacaaaccctaattgcacagatggaaatggagccaccgagccttatatcgttggtcacaacctcatcctttctcacggagccgccgtccaagtctacagagaaaaatacaaggcttctcaacaaggtcaagttggtattgctttgaacgcgggttggaacttgccatatacagaatcaccgaaggatagattagctgcggcacgagccatggccttcacatttgactactttatggagccgcttgtgacgggtaaatacccggttgatatggtcaacaacgtaaaaggccgcttacctatattcactgcacaacaatctaagatgttgaaaggctcatatgatttcattggcatcaactattactcttctacttatgcaaaggatgttccctgctccaccaaagatgttactatgttctctgatccttgtgccagtgtcacaggtgaaagagatggagttcccattggtccaaaggctgcatcagattggcttttaatatatccaaagggaattcgtgatcttgtgctctatgcaaaatacaagtttaaggaccctgtcatgtacataactgaaaacgggagagatgaatttagtaccaataaaatcttccttaaagacggtgacaggatcgattactacgctcgacatctcgaaatggttcaagacgctatctctgttggagccaatgtgaagggatttttcgcatggtcgttgctagacaatttcgaatgggcaatgggatacacggtccggtttggactggtttatgtggatttcaaagacggatgtaagagatatcccaagaaatcagctgaatggttcagaaagttattgaatgaaaagaaaaacgattga

SEQ ID NO: 40000 - protein, 506 aa, Arabidopsis thaliana
  peptide (1)..(506): Ceres Seq. ID no. 13576557
  misc_feature (7)..(502): Homolog of NCBI NO: 7435445 NR Description: beta-glucosidase (EC 3.2.1.21) precursor isoform
  misc_feature (7)..(502): Homolog of NCBI NO: 16757966 NR Description: amygdalin hydrolase isoform AH I precursor
  misc_feature (7)..(500): Homolog of NCBI NO: 15617209 NR Description: putative prunasin hydrolase isoform PH-L1
  misc_feature (36)..(500): Homolog of NCBI NO: 1155255 NR Description: beta-glucosidase
  misc_feature (1)..(384): Homolog of NCBI NO: 25289508 NR Description: probable beta-glucosidase [imported] -
  misc_feature (1)..(500): Homolog of NCBI NO: 15232261 NR Description: glycosyl hydrolase family 1 [Arabidopsis
  misc_feature (1)..(506): Homolog of NCBI NO: 30682835 NR Description: glycosyl hydrolase family 1 [Arabidopsis thaliana]
  misc_feature (1)..(506): Homolog of NCBI NO: 15238331 NR Description: glycosyl hydrolase family 1 [Arabidopsis
  misc_feature (1)..(506): Homolog of NCBI NO: 15241543 NR Description: glycosyl hydrolase family 1 [Arabidopsis
  misc_feature (1)..(506): Homolog of NCBI NO: 15224879 NR Description: glycosyl hydrolase family 1 [Arabidopsis
MRGNYLSLLVVLIVLASNDVLANNNSSTPKLRRSDFPEDFIFGSATSAYQVEGGAHEDGRGPSIWDTFSEKYPEKIKDGSNGSVADNSYHLYKEDVALLHQIGFNAYRFSISWSRILPRGNLKGGINQAGIDYYNNLINELLSKGIKPFATMFHWDTPQALEDAYGGFRGAEIVNDFRDYADICFKNFGDRVKHWMTLNEPLTVVQQGYVAGVMAPGRCSKFTNPNCTDGNGATEPYIVGHNLILSHGAAVQVYREKYKASQQGQVGIALNAGWNLPYTESPKDRLAAARAMAFTFDYFMEPLVTGKYPVDMVNNVKGRLPIFTAQQSKMLKGSYDFIGINYYSSTYAKDVPCSTKDVTMFSDPCASVTGERDGVPIGPKAASDWLLIYPKGIRDLVLYAKYKFKDPVMYITENGRDEFSTNKIFLKDGDRIDYYARHLEMVQDAISVGANVKGFFAWSLLDNFEWAMGYTVRFGLVYVDFKDGCKRYPKKSAEWFRKLLNEKKND

SEQ ID NO: 40001 - protein, 355 aa, Arabidopsis thaliana
  peptide (1)..(355): Ceres Seq. ID no. 13576558
  misc_feature (1)..(351): Homolog of NCBI NO: 7435445 NR Description: beta-glucosidase (EC 3.2.1.21) precursor isoform
  misc_feature (1)..(351): Homolog of NCBI NO: 16757966 NR Description: amygdalin hydrolase isoform AH I precursor
  misc_feature (1)..(349): Homolog of NCBI NO: 15617209 NR Description: putative prunasin hydrolase isoform PH-L1
  misc_feature (1)..(349): Homolog of NCBI NO: 1155255 NR Description: beta-glucosidase
  misc_feature (1)..(233): Homolog of NCBI NO: 25289508 NR Description: probable beta-glucosidase [imported] -
  misc_feature (1)..(349): Homolog of NCBI NO: 15232261 NR Description: glycosyl hydrolase family 1 [Arabidopsis
  misc_feature (1)..(355): Homolog of NCBI NO: 30682835 NR Description: glycosyl hydrolase family 1 [Arabidopsis thaliana]
  misc_feature (1)..(355): Homolog of NCBI NO: 15238331 NR Description: glycosyl hydrolase family 1 [Arabidopsis
  misc_feature (1)..(355): Homolog of NCBI NO: 15241543 NR Description: glycosyl hydrolase family 1 [Arabidopsis
  misc_feature (1)..(355): Homolog of NCBI NO: 15224879 NR Description: glycosyl hydrolase family 1 [Arabidopsis
MFHWDTPQALEDAYGGFRGAEIVNDFRDYADICFKNFGDRVKHWMTLNEPLTVVQQGYVAGVMAPGRCSKFTNPNCTDGNGATEPYIVGHNLILSHGAAVQVYREKYKASQQGQVGIALNAGWNLPYTESPKDRLAAARAMAFTFDYFMEPLVTGKYPVDMVNNVKGRLPIFTAQQSKMLKGSYDFIGINYYSSTYAKDVPCSTKDVTMFSDPCASVTGERDGVPIGPKAASDWLLIYPKGIRDLVLYAKYKFKDPVMYITENGRDEFSTNKIFLKDGDRIDYYARHLEMVQDAISVGANVKGFFAWSLLDNFEWAMGYTVRFGLVYVDFKDGCKRYPKKSAEWFRKLLNEKKND

SEQ ID NO: 40002 - protein, 311 aa, Arabidopsis thaliana
  peptide (1)..(311): Ceres Seq. ID no. 13576559
  misc_feature (1)..(307): Homolog of NCBI NO: 7435445 NR Description: beta-glucosidase (EC 3.2.1.21) precursor isoform
  misc_feature (1)..(307): Homolog of NCBI NO: 16757966 NR Description: amygdalin hydrolase isoform AH I precursor
  misc_feature (1)..(305): Homolog of NCBI NO: 15617209 NR Description: putative prunasin hydrolase isoform PH-L1
  misc_feature (1)..(305): Homolog of NCBI NO: 1155255 NR Description: beta-glucosidase
  misc_feature (1)..(189): Homolog of NCBI NO: 25289508 NR Description: probable beta-glucosidase [imported] -
  misc_feature (1)..(305): Homolog of NCBI NO: 15232261 NR Description: glycosyl hydrolase family 1 [Arabidopsis
  misc_feature (1)..(311): Homolog of NCBI NO: 30682835 NR Description: glycosyl hydrolase family 1 [Arabidopsis thaliana]
  misc_feature (1)..(311): Homolog of NCBI NO: 15238331 NR Description: glycosyl hydrolase family 1 [Arabidopsis
  misc_feature (1)..(311): Homolog of NCBI NO: 15241543 NR Description: glycosyl hydrolase family 1 [Arabidopsis
  misc_feature (1)..(311): Homolog of NCBI NO: 15224879 NR Description: glycosyl hydrolase family 1 [Arabidopsis
MTLNEPLTVVQQGYVAGVMAPGRCSKFTNPNCTDGNGATEPYIVGHNLILSHGAAVQVYREKYKASQQGQVGIALNAGWNLPYTESPKDRLAAARAMAFTFDYFMEPLVTGKYPVDMVNNVKGRLPIFTAQQSKMLKGSYDFIGINYYSSTYAKDVPCSTKDVTMFSDPCASVTGERDGVPIGPKAASDWLLIYPKGIRDLVLYAKYKFKDPVMYITENGRDEFSTNKIFLKDGDRIDYYARHLEMVQDAISVGANVKGFFAWSLLDNFEWAMGYTVRFGLVYVDFKDGCKRYPKKSAEWFRKLLNEKKND

SEQ ID NO: 40003 - DNA, 1006 bp, Arabidopsis thaliana
  misc_feature (1)..(1006): Ceres Seq. ID no. 12371342
  misc_feature: MA Experiment ID: 108434 Result: Up-regulated in Transcription
  misc_feature: MA Experiment 108434 PARAMETER Experiment Name: At_Root_Tips_cDNA_P Parameter: Tissue Value: Root Tips
  misc_feature: MA Experiment ID: 108462 Result: Up-regulated in Transcription
  misc_feature: MA Experiment 108462 PARAMETER Experiment Name: At_Germinating_Seeds_cDNA_P Parameter: Age (day) Value: 2 vs. 0
  misc_feature: MA Experiment 108462 PARAMETER Experiment Name: At_Germinating_Seeds_cDNA_P Parameter: Tissue Value: Germinating Seeds
  misc_feature: MA Experiment ID: 108463 Result: Up-regulated in Transcription
  misc_feature: MA Experiment 108463 PARAMETER Experiment Name: At_Germinating_Seeds_cDNA_P Parameter: Age (day) Value: 3 vs. 0
  misc_feature: MA Experiment 108463 PARAMETER Experiment Name: At_Germinating_Seeds_cDNA_P Parameter: Tissue Value: Germinating Seeds
  misc_feature: MA Experiment ID: 108464 Result: Up-regulated in Transcription
  misc_feature: MA Experiment 108464 PARAMETER Experiment Name: At_Germinating_Seeds_cDNA_P Parameter: Age (day) Value: 4 vs. 0
  misc_feature: MA Experiment 108464 PARAMETER Experiment Name: At_Germinating_Seeds_cDNA_P Parameter: Tissue Value: Germinating Seeds
  misc_feature: MA Experiment ID: 108576 Result: Down-regulated in Transcription
  misc_feature: MA Experiment 108576 PARAMETER Experiment Name: At_42deg_Heat_cDNA_P Parameter: Temperature (deg C) Value: 42 vs. 22
  misc_feature: MA Experiment 108576 PARAMETER Experiment Name: At_42deg_Heat_cDNA_P Parameter: Timepoint (hr) Value: 1
  misc_feature: MA Experiment 108576 PARAMETER Experiment Name: At_42deg_Heat_cDNA_P Parameter: Tissue Value: Aerial
  misc_feature: MA Experiment ID: 20000179 Result: Up-regulated in Transcription
  misc_feature: MA Experiment 20000179 PARAMETER Experiment Name: At_Germinating_Seeds_P Parameter: Age (hr) Value: 6 vs. 0
  misc_feature: MA Experiment 20000179 PARAMETER Experiment Name: At_Germinating_Seeds_P Parameter: Tissue Value: Germinating Seeds
  misc_feature: MA Experiment ID: 20000180 Result: Up-regulated in Transcription
  misc_feature: MA Experiment 20000180 PARAMETER Experiment Name: At_Germinating_Seeds_P Parameter: Age (hr) Value: 24 vs. 0
  misc_feature: MA Experiment 20000180 PARAMETER Experiment Name: At_Germinating_Seeds_P Parameter: Tissue Value: Germinating Seeds
  misc_feature: MA Experiment ID: 20000184 Result: Up-regulated in Transcription
  misc_feature: MA Experiment 20000184 PARAMETER Experiment Name: At_Shoots__P Parameter: Age (day) Value: 7
  misc_feature: MA Experiment 20000184 PARAMETER Experiment Name: At_Shoots__P Parameter: Tissue Value: Shoots vs. Whole Plant
  misc_feature: MA Experiment ID: 20000234 Result: Up-regulated in Transcription
  misc_feature: MA Experiment 20000234 PARAMETER Experiment Name: At_Siliques_P Parameter: Age (day) Value: 21
  misc_feature: MA Experiment 20000234 PARAMETER Experiment Name: At_Siliques_P Parameter: Organism Value: A. thaliana
  misc_feature: MA Experiment 20000234 PARAMETER Experiment Name: At_Siliques_P Parameter: Plant Line Value: WS
  misc_feature: MA Experiment 20000234 PARAMETER Experiment Name: At_Siliques_P Parameter: Tissue Value: Less Than 5mm Siliques vs. Whole Plant
  misc_feature: MA Experiment ID: 20000235 Result: Up-regulated in Transcription
  misc_feature: MA Experiment 20000235 PARAMETER Experiment Name: At_Siliques_P Parameter: Age (day) Value: 21
  misc_feature: MA Experiment 20000235 PARAMETER Experiment Name: At_Siliques_P Parameter: Organism Value: A. thaliana
  misc_feature: MA Experiment 20000235 PARAMETER Experiment Name: At_Siliques_P Parameter: Plant Line Value: WS
  misc_feature: MA Experiment 20000235 PARAMETER Experiment Name: At_Siliques_P Parameter: Tissue Value: 5-10mm Siliques vs. Whole Plant
  misc_feature: MA Experiment ID: 20000495 Result: Up-regulated in Transcription
  misc_feature: MA Experiment 20000495 PARAMETER Experiment Name: At_Guard_Cells_P Parameter: Harvest Date Value: 8/2/2002
  misc_feature: MA Experiment 20000495 PARAMETER Experiment Name: At_Guard_Cells_P Parameter: Organism Value: A. thaliana
  misc_feature: MA Experiment 20000495 PARAMETER Experiment Name: At_Guard_Cells_P Parameter: Tissue Value: Guard Cells vs. Leaves
  misc_feature: MA Experiment ID: 20000794 Result: Down-regulated in Transcription
  misc_feature: MA Experiment 20000794 PARAMETER Experiment Name: At_Petals_P Parameter: Age (day) Value: 23-25 days
  misc_feature: MA Experiment 20000794 PARAMETER Experiment Name: At_Petals_P Parameter: Plant Line Value: WS
  misc_feature: MA Experiment 20000794 PARAMETER Experiment Name: At_Petals_P Parameter: Tissue Value: Petals vs. Whole plant
  misc_feature: MA Experiment ID: 20001248 Result: Up-regulated in Transcription
  misc_feature: MA Experiment 20001248 PARAMETER Experiment Name: At_Far-red-induction_P Parameter: Age (day) Value: 7
  misc_feature: MA Experiment 20001248 PARAMETER Experiment Name: At_Far-red-induction_P Parameter: Light Value: Far-red vs. White
  misc_feature: MA Experiment 20001248 PARAMETER Experiment Name: At_Far-red-induction_P Parameter: Organism Value: A. thaliana
  misc_feature: MA Experiment 20001248 PARAMETER Experiment Name: At_Far-red-induction_P Parameter: Plant Line Value: Columbia
  misc_feature: MA Experiment 20001248 PARAMETER Experiment Name: At_Far-red-induction_P Parameter: Timepoint (hr) Value: 4
  misc_feature: MA Experiment 20001248 PARAMETER Experiment Name: At_Far-red-induction_P Parameter: Tissue Value: Whole Plant
  misc_feature: MA Experiment ID: 20001557 Result: Up-regulated in Transcription
  misc_feature: MA Experiment 20001557 PARAMETER Experiment Name: At_Drought_Soil_Dry_P Parameter: Age (day) Value: 27
  misc_feature: MA Experiment 20001557 PARAMETER Experiment Name: At_Drought_Soil_Dry_P Parameter: Organism Value: A. thaliana
  misc_feature: MA Experiment 20001557 PARAMETER Experiment Name: At_Drought_Soil_Dry_P Parameter: Plant Line Value: WS
  misc_feature: MA Experiment 20001557 PARAMETER Experiment Name: At_Drought_Soil_Dry_P Parameter: Post Timepoint (hr) Value: 3
  misc_feature: MA Experiment 20001557 PARAMETER Experiment Name: At_Drought_Soil_Dry_P Parameter: Post-Treatment Value: Re-Water vs. No Drought
  misc_feature: MA Experiment 20001557 PARAMETER Experiment Name: At_Drought_Soil_Dry_P Parameter: Timepoint (day) Value: 13
  misc_feature: MA Experiment 20001557 PARAMETER Experiment Name: At_Drought_Soil_Dry_P Parameter: Treatment Value: Drought vs. No Drought
  misc_feature: MA Experiment ID: 20001560 Result: Up-regulated in Transcription
  misc_feature: MA Experiment 20001560 PARAMETER Experiment Name: At_Drought_Soil_Dry_P Parameter: Age (day) Value: 28
  misc_feature: MA Experiment 20001560 PARAMETER Experiment Name: At_Drought_Soil_Dry_P Parameter: Organism Value: A. thaliana
  misc_feature: MA Experiment 20001560 PARAMETER Experiment Name: At_Drought_Soil_Dry_P Parameter: Plant Line Value: WS
  misc_feature: MA Experiment 20001560 PARAMETER Experiment Name: At_Drought_Soil_Dry_P Parameter: Post Timepoint (hr) Value: None
  misc_feature: MA Experiment 20001560 PARAMETER Experiment Name: At_Drought_Soil_Dry_P Parameter: Post-Treatment Value: None
  misc_feature: MA Experiment 20001560 PARAMETER Experiment Name: At_Drought_Soil_Dry_P Parameter: Timepoint (day) Value: 14
  misc_feature: MA Experiment 20001560 PARAMETER Experiment Name: At_Drought_Soil_Dry_P Parameter: Treatment Value: Drought vs. No Drought
aagattccacaaaaactctgtattgtctctttctctctcactatctctctctcttttgtgagctcagatctgaccagagagaaagaaacaaccggagaagaagaagatgactgaccgagtcttcccagcttccaaaccaccaaccgccactaatggagctccaccagttggttccataccacctcctccagctccggcgactgtaaccagcaacggaacaacaaacggaatggctaatcagaaacctcaagtctacattccagctaaccgtccggtttaccgtccacagccttacagtcgccgtcatcaccaccaatctcgaccaagctgccgacgaatttgctgttgttgctgtttctggtcgattctgataattctgatcttagctctcatgactgcaatcgccgccaccgcgatgtacgtgatctaccaccctcgtccgccgtcgttctccgtcccgtcaataagaatcagccgcgtgaacctaacaacctcctctaattcctccgtctctcatctctcttccttcttcaacttcactctaatctcagagaatccaaaccaacacctctctttctcttacgatcctttcaccgtcatcgttaaattcagctaaatccggtacgatgctcggtaacggaactgttcctgctttcttcagcgataacggtaacaaaacttcgtttcacggcgtgatcgctacgtctacagcggcgcgtgagttagatccggatgaagctaagcatctgagatcagatctgacgcgcgcgcgtgtaggatatgagatcgagatgagaactaaagtgaagatgataatggggaagctgaagagtgaaggagtagagatcaaagtgacatgtgaaggatttgaaggaactataccaaaaggtaaaactccaattgtagctacttctaaaaaaactaagtgtaagtctgatcttagtgtcaaggtctggaaatggagtttctagagggaattttgataatttcacaattgaaattttct

SEQ ID NO: 40004 - protein, 169 aa, Arabidopsis thaliana
  peptide (1)..(169): Ceres Seq. ID no. 12371343
  misc_feature (7)..(160): Homolog of NCBI NO: 34909192 NR Description: P0425G02.19 [Oryza sativa (japonica
  misc_feature (20)..(169): Homolog of NCBI NO: 38344198 NR Description: OSJNBa0064G10.14 [Oryza sativa (japonica
  misc_feature (1)..(160): Homolog of NCBI NO: 18401317 NR Description: expressed protein
  misc_feature (1)..(159): Homolog of NCBI NO: 34914304 NR Description: B1151A10.19 [Oryza sativa (japonica
  misc_feature (7)..(164): Homolog of NCBI NO: 34903552 NR Description: P0001B06.28 [Oryza sativa (japonica
  misc_feature (26)..(160): Homolog of NCBI NO: 18394509 NR Description: expressed protein
  misc_feature (26)..(160): Homolog of NCBI NO: 11762174 NR Description: At1g17620 [Arabidopsis thaliana]
  misc_feature (1)..(166): Homolog of NCBI NO: 15239804 NR Description: putative protein
  misc_feature (1)..(166): Homolog of NCBI NO: 21536796 NR Description: unknown [Arabidopsis thaliana]
  misc_feature (7)..(160): Homolog of NCBI NO: 34909192 NR Description: P0425G02.19 [Oryza sativa (japonica
  misc_feature (20)..(169): Homolog of NCBI NO: 38344198 NR Description: OSJNBa0064G10.14 [Oryza sativa (japonica
  misc_feature (1)..(160): Homolog of NCBI NO: 18401317 NR Description: expressed protein
  misc_feature (1)..(159): Homolog of NCBI NO: 34914304 NR Description: B1151A10.19 [Oryza sativa (japonica
  misc_feature (7)..(164): Homolog of NCBI NO: 34903552 NR Description: P0001B06.28 [Oryza sativa (japonica
  misc_feature (26)..(160): Homolog of NCBI NO: 18394509 NR Description: expressed protein
  misc_feature (26)..(160): Homolog of NCBI NO: 11762174 NR Description: At1g17620 [Arabidopsis thaliana]
  misc_feature (1)..(166): Homolog of NCBI NO: 15239804 NR Description: putative protein
  misc_feature (1)..(166): Homolog of NCBI NO: 21536796 NR Description: unknown [Arabidopsis thaliana]
MTDRVFPASKPPTATNGAPPVGSIPPPPAPATVTSNGTTNGMANQKPQVYIPANRPVYRPQPYSRRHHHQSRPSCRRICCCCCFWSILIILILALMTAIAATAMYVIYHPRPPSFSVPSIRISRVNLTTSSNSSVSHLSSFFNFTLISENPNQHLSFSYDPFTVIVKFS

SEQ ID NO: 40005 - protein, 128 aa, Arabidopsis thaliana
  peptide (1)..(128): Ceres Seq. ID no. 12371344
  misc_feature (1)..(119): Homolog of NCBI NO: 34909192 NR Description: P0425G02.19 [Oryza sativa (japonica
  misc_feature (1)..(128): Homolog of NCBI NO: 38344198 NR Description: OSJNBa0064G10.14 [Oryza sativa (japonica
  misc_feature (1)..(119): Homolog of NCBI NO: 18401317 NR Description: expressed protein
  misc_feature (1)..(118): Homolog of NCBI NO: 34914304 NR Description: B1151A10.19 [Oryza sativa (japonica
  misc_feature (1)..(123): Homolog of NCBI NO: 34903552 NR Description: P0001B06.28 [Oryza sativa (japonica
  misc_feature (1)..(119): Homolog of NCBI NO: 18394509 NR Description: expressed protein
  misc_feature (1)..(119): Homolog of NCBI NO: 11762174 NR Description: At1g17620 [Arabidopsis thaliana]
  misc_feature (1)..(125): Homolog of NCBI NO: 15239804 NR Description: putative protein
  misc_feature (1)..(125): Homolog of NCBI NO: 21536796 NR Description: unknown [Arabidopsis thaliana]
  misc_feature (1)..(119): Homolog of NCBI NO: 34909192 NR Description: P0425G02.19 [Oryza sativa (japonica
  misc_feature (1)..(128): Homolog of NCBI NO: 38344198 NR Description: OSJNBa0064G10.14 [Oryza sativa (japonica
  misc_feature (1)..(119): Homolog of NCBI NO: 18401317 NR Description: expressed protein
  misc_feature (1)..(118): Homolog of NCBI NO: 34914304 NR Description: B1151A10.19 [Oryza sativa (japonica
  misc_feature (1)..(123): Homolog of NCBI NO: 34903552 NR Description: P0001B06.28 [Oryza sativa (japonica
  misc_feature (1)..(119): Homolog of NCBI NO: 18394509 NR Description: expressed protein
  misc_feature (1)..(119): Homolog of NCBI NO: 11762174 NR Description: At1g17620 [Arabidopsis thaliana]
  misc_feature (1)..(125): Homolog of NCBI NO: 15239804 NR Description: putative protein
  misc_feature (1)..(125): Homolog of NCBI NO: 21536796 NR Description: unknown [Arabidopsis thaliana]
MANQKPQVYIPANRPVYRPQPYSRRHHHQSRPSCRRICCCCCFWSILIILILALMTAIAATAMYVIYHPRPPSFSVPSIRISRVNLTTSSNSSVSHLSSFFNFTLISENPNQHLSFSYDPFTVIVKFS

SEQ ID NO: 40006 - protein, 114 aa, Arabidopsis thaliana
  peptide (1)..(114): Ceres Seq. ID no. 12371345
  misc_feature (1)..(114): Homolog of NCBI NO: 18394509 NR Description: expressed protein
  misc_feature (1)..(114): Homolog of NCBI NO: 11762174 NR Description: At1g17620 [Arabidopsis thaliana]
  misc_feature (1)..(114): Homolog of NCBI NO: 15239804 NR Description: putative protein
  misc_feature (1)..(114): Homolog of NCBI NO: 21536796 NR Description: unknown [Arabidopsis thaliana]
  misc_feature (1)..(114): Homolog of NCBI NO: 18394509 NR Description: expressed protein
  misc_feature (1)..(114): Homolog of NCBI NO: 11762174 NR Description: At1g17620 [Arabidopsis thaliana]
  misc_feature (1)..(114): Homolog of NCBI NO: 15239804 NR Description: putative protein
  misc_feature (1)..(114): Homolog of NCBI NO: 21536796 NR Description: unknown [Arabidopsis thaliana]
MLGNGTVPAFFSDNGNKTSFHGVIATSTAARELDPDEAKHLRSDLTRARVGYEIEMRTKVKMIMGKLKSEGVEIKVTCEGFEGTIPKGKTPIVATSKKTKCKSDLSVKVWKWSF

SEQ ID NO: 40007 - DNA, 3323 bp, Arabidopsis thaliana; identical to SEQ ID NO: 36082
  misc_feature (1)..(3323): Ceres Seq. ID no. 13488061
  misc_feature: MA Experiment ID: 108434 Result: Down-regulated in Transcription
  misc_feature: MA Experiment 108434 PARAMETER Experiment Name: At_Root_Tips_cDNA_P Parameter: Tissue Value: Root Tips
  misc_feature: MA Experiment ID: 108469 Result: Up-regulated in Transcription
  misc_feature: MA Experiment ID: 108561 Result: Up-regulated in Transcription
  misc_feature: MA Experiment 108561 PARAMETER Experiment Name: At_100uM_ABA_cDNA_P Parameter: Timepoint (hr) Value: 6
  misc_feature: MA Experiment 108561 PARAMETER Experiment Name: At_100uM_ABA_cDNA_P Parameter: Tissue Value: Aerial
  misc_feature: MA Experiment 108561 PARAMETER Experiment Name: At_100uM_ABA_cDNA_P Parameter: Treatment Value: 100uM ABA vs. No Treatment
  misc_feature: MA Experiment ID: 108569 Result: Up-regulated in Transcription
  misc_feature: MA Experiment 108569 PARAMETER Experiment Name: At_0.001%_MeJA__cDNA_P Parameter: Timepoint (hr) Value: 6
  misc_feature: MA Experiment 108569 PARAMETER Experiment Name: At_0.001%_MeJA__cDNA_P Parameter: Tissue Value: Aerial
  misc_feature: MA Experiment 108569 PARAMETER Experiment Name: At_0.001%_MeJA__cDNA_P Parameter: Treatment Value: 0.001% MeJA vs. No Treatment
  misc_feature: MA Experiment ID: 108572 Result: Up-regulated in Transcription
  misc_feature: MA Experiment 108572 PARAMETER Experiment Name: At_Drought_cDNA_P Parameter: Timepoint (hr) Value: 1
  misc_feature: MA Experiment 108572 PARAMETER Experiment Name: At_Drought_cDNA_P Parameter: Tissue Value: Aerial
  misc_feature: MA Experiment 108572 PARAMETER Experiment Name: At_Drought_cDNA_P Parameter: Treatment Value: Drought vs. No Drought
  misc_feature: MA Experiment ID: 108573 Result: Up-regulated in Transcription
  misc_feature: MA Experiment 108573 PARAMETER Experiment Name: At_Drought_cDNA_P Parameter: Timepoint (hr) Value: 6
  misc_feature: MA Experiment 108573 PARAMETER Experiment Name: At_Drought_cDNA_P Parameter: Tissue Value: Aerial
  misc_feature: MA Experiment 108573 PARAMETER Experiment Name: At_Drought_cDNA_P Parameter: Treatment Value: Drought vs. No Drought
  misc_feature: MA Experiment ID: 108574 Result: Up-regulated in Transcription
  misc_feature: MA Experiment 108574 PARAMETER Experiment Name: At_Wounding__cDNA_P Parameter: Timepoint (hr) Value: 1
  misc_feature: MA Experiment 108574 PARAMETER Experiment Name: At_Wounding__cDNA_P Parameter: Tissue Value: Aerial
  misc_feature: MA Experiment 108574 PARAMETER Experiment Name: At_Wounding__cDNA_P Parameter: Treatment Value: Wounding vs. No Wounding
  misc_feature: MA Experiment ID: 108667 Result: Up-regulated in Transcription
  misc_feature: MA Experiment 108667 PARAMETER Experiment Name: At_2mM_SA_cDNA_P Parameter: Plant Line Value: WS
  misc_feature: MA Experiment 108667 PARAMETER Experiment Name: At_2mM_SA_cDNA_P Parameter: Timepoint (hr) Value: 1
  misc_feature: MA Experiment 108667 PARAMETER Experiment Name: At_2mM_SA_cDNA_P Parameter: Treatment Value: 2mM SA vs. No Treatment
  misc_feature: MA Experiment ID: 108668 Result: Up-regulated in Transcription
  misc_feature: MA Experiment 108668 PARAMETER Experiment Name: At_2mM_SA_cDNA_P Parameter: Plant Line Value: WS
  misc_feature: MA Experiment 108668 PARAMETER Experiment Name: At_2mM_SA_cDNA_P Parameter: Timepoint (hr) Value: 6
  misc_feature: MA Experiment 108668 PARAMETER Experiment Name: At_2mM_SA_cDNA_P Parameter: Treatment Value: 2mM SA vs. No Treatment
  misc_feature: MA Experiment ID: 20000069 Result: Up-regulated in Transcription
  misc_feature: MA Experiment 20000069 PARAMETER Experiment Name: At_100uM_ABA_Mutants_cDNA_P Parameter: Plant Line Value: CS23
  misc_feature: MA Experiment 20000069 PARAMETER Experiment Name: At_100uM_ABA_Mutants_cDNA_P Parameter: Timepoint (hr) Value: 6
  misc_feature: MA Experiment 20000069 PARAMETER Experiment Name: At_100uM_ABA_Mutants_cDNA_P Parameter: Tissue Value: Aerial
  misc_feature: MA Experiment 20000069 PARAMETER Experiment Name: At_100uM_ABA_Mutants_cDNA_P Parameter: Treatment Value: 100uM ABA vs. No Treatment
  misc_feature: MA Experiment ID: 20000072 Result: Up-regulated in Transcription
  misc_feature: MA Experiment 20000072 PARAMETER Experiment Name: At_100uM_ABA_Mutants_cDNA_P Parameter: Plant Line Value: CS8105
  misc_feature: MA Experiment 20000072 PARAMETER Experiment Name: At_100uM_ABA_Mutants_cDNA_P Parameter: Timepoint (hr) Value: 6
  misc_feature: MA Experiment 20000072 PARAMETER Experiment Name: At_100uM_ABA_Mutants_cDNA_P Parameter: Tissue Value: Aerial
  misc_feature: MA Experiment 20000072 PARAMETER Experiment Name: At_100uM_ABA_Mutants_cDNA_P Parameter: Treatment Value: 100uM ABA vs. No Treatment
  misc_feature: MA Experiment ID: 20000086 Result: Up-regulated in Transcription
  misc_feature: MA Experiment 20000086 PARAMETER Experiment Name: At_100uM_ABA_Mutants_cDNA_P Parameter: Plant Line Value: CS22
  misc_feature: MA Experiment 20000086 PARAMETER Experiment Name: At_100uM_ABA_Mutants_cDNA_P Parameter: Timepoint (hr) Value: 6
  misc_feature: MA Experiment 20000086 PARAMETER Experiment Name: At_100uM_ABA_Mutants_cDNA_P Parameter: Tissue Value: Aerial
  misc_feature: MA Experiment 20000086 PARAMETER Experiment Name: At_100uM_ABA_Mutants_cDNA_P Parameter: Treatment Value: 100uM ABA vs. No Treatment
  misc_feature: MA Experiment ID: 20000087 Result: Up-regulated in Transcription
  misc_feature: MA Experiment 20000087 PARAMETER Experiment Name: At_100uM_ABA_Mutants_cDNA_P Parameter: Plant Line Value: WS
  misc_feature: MA Experiment 20000087 PARAMETER Experiment Name: At_100uM_ABA_Mutants_cDNA_P Parameter: Timepoint (hr) Value: 6
  misc_feature: MA Experiment 20000087 PARAMETER Experiment Name: At_100uM_ABA_Mutants_cDNA_P Parameter: Tissue Value: Aerial
  misc_feature: MA Experiment 20000087 PARAMETER Experiment Name: At_100uM_ABA_Mutants_cDNA_P Parameter: Treatment Value: 100uM ABA vs. No Treatment
  misc_feature: MA Experiment ID: 20000182 Result: Up-regulated in Transcription
  misc_feature: MA Experiment 20000182 PARAMETER Experiment Name: At_2mM_SA_P Parameter: Age (day) Value: 14
  misc_feature: MA Experiment 20000182 PARAMETER Experiment Name: At_2mM_SA_P Parameter: Organism Value: A. thaliana
  misc_feature: MA Experiment 20000182 PARAMETER Experiment Name: At_2mM_SA_P Parameter: Plant Line Value: WS
  misc_feature: MA Experiment 20000182 PARAMETER Experiment Name: At_2mM_SA_P Parameter: Timepoint (hr) Value: 6
  misc_feature: MA Experiment 20000182 PARAMETER Experiment Name: At_2mM_SA_P Parameter: Tissue Value: Aerial
  misc_feature: MA Experiment 20000182 PARAMETER Experiment Name: At_2mM_SA_P Parameter: Treatment Value: 2mM SA vs. No Treatment

SEQ ID NO: 40008 - protein, 440 aa, Arabidopsis thaliana; identical to SEQ ID NO: 36083
  peptide (1)..(440): Ceres Seq. ID no. 13488062
  misc_feature (45)..(424): Pfam Name: Peptidase family M20/M25/M40 Pfam Description: Peptidase family M20/M25/M40
  misc_feature (45)..(424): Pfam Name: Peptidase family M20/M25/M40 Pfam Description: Peptidase family M20/M25/M40
  misc_feature (51)..(423): Homolog of NCBI NO: 22977510 NR Description: hypothetical protein [Ralstonia metallidurans]
  misc_feature (46)..(422): Homolog of NCBI NO: 18976969 NR Description: iaa-amino acid hydrolase homolog 1 precursor
  misc_feature (9)..(425): Homolog of NCBI NO: 21741848 NR Description: OSJNBa0019D11.19 [Oryza sativa (japonica
  misc_feature (34)..(423): Homolog of NCBI NO: 15219390 NR Description: gr1 protein [Arabidopsis thaliana]
  misc_feature (34)..(423): Homolog of NCBI NO: 3559811 NR Description: gr1-protein [Arabidopsis thaliana]
  misc_feature (51)..(423): Homolog of NCBI NO: 22977510 NR Description: hypothetical protein [Ralstonia metallidurans]
  misc_feature (9)..(425): Homolog of NCBI NO: 21741848 NR Description: OSJNBa0019D11.19 [Oryza sativa (japonica
  misc_feature (34)..(423): Homolog of NCBI NO: 3559811 NR Description: gr1-protein [Arabidopsis thaliana]
  misc_feature (1)..(440): Homolog of NCBI NO: 15218027 NR Description: IAA-Ala hydrolase (IAR3) [Arabidopsis thaliana]
  misc_feature (1)..(440): Homolog of NCBI NO: 2181184 NR Description: JR3 protein [Arabidopsis thaliana]
  misc_feature (1)..(433): Homolog of NCBI NO: 15218029 NR Description: auxin conjugate hydrolase (ILL5); protein id:
  misc_feature (15)..(440): Homolog of NCBI NO: 27948556 NR Description: IAA-amino acid hydrolase [Oryza sativa (indica
  misc_feature (7)..(440): Homolog of NCBI NO: 902791 NR Description: ILL2
  misc_feature (34)..(423): Homolog of NCBI NO: 15219390 NR Description: gr1 protein [Arabidopsis thaliana]
  misc_feature (46)..(422): Homolog of NCBI NO: 18976969 NR Description: iaa-amino acid hydrolase homolog 1 precursor
  misc_feature (7)..(440): Homolog of NCBI NO: 902791 NR Description: ILL2
  misc_feature (15)..(440): Homolog of NCBI NO: 27948556 NR Description: IAA-amino acid hydrolase [Oryza sativa (indica
  misc_feature (1)..(433): Homolog of NCBI NO: 15218029 NR Description: auxin conjugate hydrolase (ILL5); protein id:
  misc_feature (1)..(440): Homolog of NCBI NO: 2181184 NR Description: JR3 protein [Arabidopsis thaliana]
  misc_feature (1)..(440): Homolog of NCBI NO: 15218027 NR Description: IAA-Ala hydrolase (IAR3) [Arabidopsis thaliana]

SEQ ID NO: 40009 - protein, 406 aa, Arabidopsis thaliana; identical to SEQ ID NO: 36084
  peptide (1)..(406): Ceres Seq. ID no. 13488063
  misc_feature (160)..(271): Pfam Name: Arabidopsis protein of unknown function, DUF266 Pfam Description: Arabidopsis protein of unknown function, DUF266
  misc_feature (160)..(271): Pfam Name: Arabidopsis protein of unknown function, DUF266 Pfam Description: Arabidopsis protein of unknown function, DUF266
  misc_feature (69)..(390): Homolog of NCBI NO: 15219555 NR Description: expressed protein [Arabidopsis thaliana]
  misc_feature (92)..(393): Homolog of NCBI NO: 34895612 NR Description: OSJNBa0083M16.18 [Oryza sativa (japonica
  misc_feature (85)..(393): Homolog of NCBI NO: 34895606 NR Description: OSJNBa0083M16.15 [Oryza sativa (japonica
  misc_feature (92)..(405): Homolog of NCBI NO: 34907318 NR Description: contains ESTs
  misc_feature (85)..(390): Homolog of NCBI NO: 15221386 NR Description: hypothetical protein [Arabidopsis thaliana]
  misc_feature (69)..(390): Homolog of NCBI NO: 15219555 NR Description: expressed protein [Arabidopsis thaliana]
  misc_feature (85)..(393): Homolog of NCBI NO: 34895606 NR Description: OSJNBa0083M16.15 [Oryza sativa (japonica
  misc_feature (85)..(390): Homolog of NCBI NO: 15221386 NR Description: hypothetical protein [Arabidopsis thaliana]
  misc_feature (8)..(406): Homolog of NCBI NO: 15218028 NR Description: hypothetical protein [Arabidopsis thaliana]
  misc_feature (6)..(390): Homolog of NCBI NO: 18402952 NR Description: expressed protein [Arabidopsis thaliana]
  misc_feature (8)..(390): Homolog of NCBI NO: 21554566 NR Description: unknown [Arabidopsis thaliana]
  misc_feature (6)..(354): Homolog of NCBI NO: 9280235 NR Description: gb|AAD40142.1~gene_id:MXL8.19~strong similarity
  misc_feature (84)..(390): Homolog of NCBI NO: 15218485 NR Description: expressed protein [Arabidopsis thaliana]
  misc_feature (92)..(405): Homolog of NCBI NO: 34907318 NR Description: contains ESTs
  misc_feature (92)..(393): Homolog of NCBI NO: 34895612 NR Description: OSJNBa0083M16.18 [Oryza sativa (japonica
  misc_feature (84)..(390): Homolog of NCBI NO: 15218485 NR Description: expressed protein [Arabidopsis thaliana]
  misc_feature (6)..(354): Homolog of NCBI NO: 9280235 NR Description: gb|AAD40142.1~gene_id:MXL8.19~strong similarity
  misc_feature (8)..(390): Homolog of NCBI NO: 21554566 NR Description: unknown [Arabidopsis thaliana]
  misc_feature (6)..(390): Homolog of NCBI NO: 18402952 NR Description: expressed protein [Arabidopsis thaliana]
  misc_feature (8)..(406): Homolog of NCBI NO: 15218028 NR Description: hypothetical protein [Arabidopsis thaliana]

SEQ ID NO: 40010 - protein, 403 aa, Arabidopsis thaliana; identical to SEQ ID NO: 36085
  peptide (1)..(403): Ceres Seq. ID no. 13488064
  misc_feature (157)..(268): Pfam Name: Arabidopsis protein of unknown function, DUF266 Pfam Description: Arabidopsis protein of unknown function, DUF266
  misc_feature (157)..(268): Pfam Name: Arabidopsis protein of unknown function, DUF266 Pfam Description: Arabidopsis protein of unknown function, DUF266
  misc_feature (66)..(387): Homolog of NCBI NO: 15219555 NR Description: expressed protein [Arabidopsis thaliana]
  misc_feature (89)..(390): Homolog of NCBI NO: 34895612 NR Description: OSJNBa0083M16.18 [Oryza sativa (japonica
  misc_feature (82)..(390): Homolog of NCBI NO: 34895606 NR Description: OSJNBa0083M16.15 [Oryza sativa (japonica
  misc_feature (89)..(402): Homolog of NCBI NO: 34907318 NR Description: contains ESTs
  misc_feature (82)..(387): Homolog of NCBI NO: 15221386 NR Description: hypothetical protein [Arabidopsis thaliana]
  misc_feature (66)..(387): Homolog of NCBI NO: 15219555 NR Description: expressed protein [Arabidopsis thaliana]
  misc_feature (82)..(390): Homolog of NCBI NO: 34895606 NR Description: OSJNBa0083M16.15 [Oryza sativa (japonica
  misc_feature (82)..(387): Homolog of NCBI NO: 15221386 NR Description: hypothetical protein [Arabidopsis thaliana]
  misc_feature (5)..(403): Homolog of NCBI NO: 15218028 NR Description: hypothetical protein [Arabidopsis thaliana]
  misc_feature (3)..(387): Homolog of NCBI NO: 18402952 NR Description: expressed protein [Arabidopsis thaliana]
  misc_feature (5)..(387): Homolog of NCBI NO: 21554566 NR Description: unknown [Arabidopsis thaliana]
  misc_feature (3)..(351): Homolog of NCBI NO: 9280235 NR Description: gb|AAD40142.1~gene_id:MXL8.19~strong similarity
  misc_feature (81)..(387): Homolog of NCBI NO: 15218485 NR Description: expressed protein [Arabidopsis thaliana]
  misc_feature (89)..(402): Homolog of NCBI NO: 34907318 NR Description: contains ESTs
  misc_feature (89)..(390): Homolog of NCBI NO: 34895612 NR Description: OSJNBa0083M16.18 [Oryza sativa (japonica
  misc_feature (81)..(387): Homolog of NCBI NO: 15218485 NR Description: expressed protein [Arabidopsis thaliana]
  misc_feature (3)..(351): Homolog of NCBI NO: 9280235 NR Description: gb|AAD40142.1~gene_id:MXL8.19~strong similarity
  misc_feature (5)..(387): Homolog of NCBI NO: 21554566 NR Description: unknown [Arabidopsis thaliana]
  misc_feature (3)..(387): Homolog of NCBI NO: 18402952 NR Description: expressed protein [Arabidopsis thaliana]
  misc_feature (5)..(403): Homolog of NCBI NO: 15218028 NR Description: hypothetical protein [Arabidopsis thaliana]

SEQ ID NO: 40011 - DNA, 1457 bp, Arabidopsis thaliana
  misc_feature (1)..(1457): Ceres Seq. ID no. 13575056
  misc_feature: MA Experiment ID: 20000184 Result: Down-regulated in Transcription
  misc_feature: MA Experiment 20000184 PARAMETER Experiment Name: At_Shoots__P Parameter: Age (day) Value: 7
  misc_feature: MA Experiment 20000184 PARAMETER Experiment Name: At_Shoots__P Parameter: Tissue Value: Shoots vs. Whole Plant
  misc_feature: MA Experiment ID: 20001911 Result: Up-regulated in Transcription
  misc_feature: MA Experiment 20001911 PARAMETER Experiment Name: At_Drought_Reproduction_P Parameter: Age (day) Value: 40
  misc_feature: MA Experiment 20001911 PARAMETER Experiment Name: At_Drought_Reproduction_P Parameter: Organism Value: A. thaliana
  misc_feature: MA Experiment 20001911 PARAMETER Experiment Name: At_Drought_Reproduction_P Parameter: Plant Line Value: WS
  misc_feature: MA Experiment 20001911 PARAMETER Experiment Name: At_Drought_Reproduction_P Parameter: Timepoint (day) Value: 10
  misc_feature: MA Experiment 20001911 PARAMETER Experiment Name: At_Drought_Reproduction_P Parameter: Tissue Value: Flowers
  misc_feature: MA Experiment 20001911 PARAMETER Experiment Name: At_Drought_Reproduction_P Parameter: Treatment Value: Drought vs. No Drought
ggcattgagctcgagagacagacacggaggatggcgaatcagagtacagagacgaatcaaccgtcgaatatgcagacttacggtgtaccgatttacgccgccgactggattccggaggtagatgtcagatccaaaatcataatggatccggagaaatctgaagatgatgatgagtcgtcttcttcttcttcttcttcccggagctgcatcgttttgtccggcggaggcggagagggacgaagtggaatctctaatgtcatattaatatgccgtgttgatctaaacaccaattctctctcggaacaacctctgggtaggcttgtggttggctctgatctgccttatcggatggctgttcatcctcgggaaggtggtcttatttgcgcgttgcctaacagttgcaaactgtttcattgggaagacattatgagccgagaggataatcaggctggtgagtcggaggaagtgattaaagagttaagagatgttggacaacagttggctctggcgtttaatccggaggggtctgttcttgctgctggtgcggaggatgggactttgagggtttttaaatggcctagcatgaatactttacttaatgagtcccaggctcattcttcagttaaatgccttactttcagcgaaagtggtcaatttcttgtatctcttggcggtccagtttgtcgagtttgggacgtgaatgcttctgctgctgttgccagtctatcaaaagagaaggacgagatgtttgcctcctgtagattctctgtagacagtgcaggcaatgaagttctttacattgctgcaaacactgaacgtggtgggagtattataacatgtgatacaaaattatggaaaagaaaatggtcgaagcctataaaaaagaactctatatcagcttttaatgtctcagctgatgggaagcttcttgcaataggaacccttgaaggagatgttttaatacttgaatcgacaagaatgcaaactatccaagtcgtcaagaaagcgcatcttggtttggtcacagcactgactttctctcctgattcaaggggattagtgtcggtatcttttgactcaagggcaaggctgaccatgattgaacaaaagggggacaaacctggagtaaggtggtggctactggttttattgatagtgttgctatacgtggttgcatactattatatgaaggcaaagggtatcataccttagaaaggcctttaagtgaccacacaggacgatacagcggaatggcttgtaaccaacatatcatacgattacgctttgagttagctttttatgtttgacatctaccagaaacttgcttgctttatatcaataaaacatgtaaactaacactaaaacagcaaaagttacaatttgtttcctctttttttttttgtagacatagtaaactagaaaactattatcatatgatggatcagtaagactctttc

SEQ ID NO: 40012 - protein, 403 aa, Arabidopsis thaliana
  peptide (1)..(403): Ceres Seq. ID no. 13575057
  misc_feature (169)..(394): Homolog of NCBI NO: 26450470 NR Description: unknown protein [Arabidopsis thaliana]
  misc_feature (79)..(394): Homolog of NCBI NO: 18409509 NR Description: transducin / WD-40 repeat protein family
  misc_feature (93)..(397): Homolog of NCBI NO: 34897162 NR Description: putative membrane protein
  misc_feature (79)..(394): Homolog of NCBI NO: 34394605 NR Description: transducin / WD-40 repeat protein-like
  misc_feature (18)..(373): Homolog of NCBI NO: 8777388 NR Description: protein transport protein SEC12p-like
  misc_feature (11)..(284): Homolog of NCBI NO: 17473926 NR Description: putative protein transport protein SEC12p
  misc_feature (18)..(402): Homolog of NCBI NO: 18423177 NR Description: St12p protein [Arabidopsis thaliana]
  misc_feature (11)..(377): Homolog of NCBI NO: 322598 NR Description: St12p protein - Arabidopsis thaliana
  misc_feature (11)..(403): Homolog of NCBI NO: 11358859 NR Description: St12p protein [imported] - Arabidopsis thaliana
  misc_feature (11)..(403): Homolog of NCBI NO: 15226281 NR Description: SEC12p protein / St12p protein [Arabidopsis
GIELERQTRRMANQSTETNQPSNMQTYGVPIYAADWIPEVDVRSKIIMDPEKSEDDDESSSSSSSSRSCIVLSGGGGEGRSGISNVILICRVDLNTNSLSEQPLGRLVVGSDLPYRMAVHPREGGLICALPNSCKLFHWEDIMSREDNQAGESEEVIKELRDVGQQLALAFNPEGSVLAAGAEDGTLRVFKWPSMNTLLNESQAHSSVKCLTFSESGQFLVSLGGPVCRVWDVNASAAVASLSKEKDEMFASCRFSVDSAGNEVLYIAANTERGGSIITCDTKLWKRKWSKPIKKNSISAFNVSADGKLLAIGTLEGDVLILESTRMQTIQVVKKAHLGLVTALTFSPDSRGLVSVSFDSRARLTMIEQKGDKPGVRWWLLVLLIVLLYVVAYYYMKAKGIIP

SEQ ID NO: 40013 - protein, 393 aa, Arabidopsis thaliana
  peptide (1)..(393): Ceres Seq. ID no. 13575058
  misc_feature (159)..(384): Homolog of NCBI NO: 26450470 NR Description: unknown protein [Arabidopsis thaliana]
  misc_feature (69)..(384): Homolog of NCBI NO: 18409509 NR Description: transducin / WD-40 repeat protein family
  misc_feature (83)..(387): Homolog of NCBI NO: 34897162 NR Description: putative membrane protein
  misc_feature (69)..(384): Homolog of NCBI NO: 34394605 NR Description: transducin / WD-40 repeat protein-like
  misc_feature (8)..(363): Homolog of NCBI NO: 8777388 NR Description: protein transport protein SEC12p-like
  misc_feature (1)..(274): Homolog of NCBI NO: 17473926 NR Description: putative protein transport protein SEC12p
  misc_feature (8)..(392): Homolog of NCBI NO: 18423177 NR Description: St12p protein [Arabidopsis thaliana]
  misc_feature (1)..(367): Homolog of NCBI NO: 322598 NR Description: St12p protein - Arabidopsis thaliana
  misc_feature (1)..(393): Homolog of NCBI NO: 11358859 NR Description: St12p protein [imported] - Arabidopsis thaliana
  misc_feature (1)..(393): Homolog of NCBI NO: 15226281 NR Description: SEC12p protein / St12p protein [Arabidopsis
MANQSTETNQPSNMQTYGVPIYAADWIPEVDVRSKIIMDPEKSEDDDESSSSSSSSRSCIVLSGGGGEGRSGISNVILICRVDLNTNSLSEQPLGRLVVGSDLPYRMAVHPREGGLICALPNSCKLFHWEDIMSREDNQAGESEEVIKELRDVGQQLALAFNPEGSVLAAGAEDGTLRVFKWPSMNTLLNESQAHSSVKCLTFSESGQFLVSLGGPVCRVWDVNASAAVASLSKEKDEMFASCRFSVDSAGNEVLYIAANTERGGSIITCDTKLWKRKWSKPIKKNSISAFNVSADGKLLAIGTLEGDVLILESTRMQTIQVVKKAHLGLVTALTFSPDSRGLVSVSFDSRARLTMIEQKGDKPGVRWWLLVLLIVLLYVVAYYYMKAKGIIP

SEQ ID NO: 40014 - protein, 380 aa, Arabidopsis thaliana
  peptide (1)..(380): Ceres Seq. ID no. 13575059
  misc_feature (146)..(371): Homolog of NCBI NO: 26450470 NR Description: unknown protein [Arabidopsis thaliana]
  misc_feature (56)..(371): Homolog of NCBI NO: 18409509 NR Description: transducin / WD-40 repeat protein family
  misc_feature (70)..(374): Homolog of NCBI NO: 34897162 NR Description: putative membrane protein
  misc_feature (56)..(371): Homolog of NCBI NO: 34394605 NR Description: transducin / WD-40 repeat protein-like
  misc_feature (1)..(350): Homolog of NCBI NO: 8777388 NR Description: protein transport protein SEC12p-like
  misc_feature (1)..(261): Homolog of NCBI NO: 17473926 NR Description: putative protein transport protein SEC12p
  misc_feature (1)..(379): Homolog of NCBI NO: 18423177 NR Description: St12p protein [Arabidopsis thaliana]
  misc_feature (1)..(354): Homolog of NCBI NO: 322598 NR Description: St12p protein - Arabidopsis thaliana
  misc_feature (1)..(380): Homolog of NCBI NO: 11358859 NR Description: St12p protein [imported] - Arabidopsis thaliana
  misc_feature (1)..(380): Homolog of NCBI NO: 15226281 NR Description: SEC12p protein / St12p protein [Arabidopsis
MQTYGVPIYAADWIPEVDVRSKIIMDPEKSEDDDESSSSSSSSRSCIVLSGGGGEGRSGISNVILICRVDLNTNSLSEQPLGRLVVGSDLPYRMAVHPREGGLICALPNSCKLFHWEDIMSREDNQAGESEEVIKELRDVGQQLALAFNPEGSVLAAGAEDGTLRVFKWPSMNTLLNESQAHSSVKCLTFSESGQFLVSLGGPVCRVWDVNASAAVASLSKEKDEMFASCRFSVDSAGNEVLYIAANTERGGSIITCDTKLWKRKWSKPIKKNSISAFNVSADGKLLAIGTLEGDVLILESTRMQTIQVVKKAHLGLVTALTFSPDSRGLVSVSFDSRARLTMIEQKGDKPGVRWWLLVLLIVLLYVVAYYYMKAKGIIP

SEQ ID NO: 40015 - DNA, 1597 bp, Arabidopsis thaliana
  misc_feature (1)..(1597): Ceres Seq. ID no. 12328282
  misc_feature: MA Experiment ID: 108463 Result: Down-regulated in Transcription
  misc_feature: MA Experiment 108463 PARAMETER Experiment Name: At_Germinating_Seeds_cDNA_P Parameter: Age (day) Value: 3 vs. 0
  misc_feature: MA Experiment 108463 PARAMETER Experiment Name: At_Germinating_Seeds_cDNA_P Parameter: Tissue Value: Germinating Seeds
  misc_feature: MA Experiment ID: 108464 Result: Down-regulated in Transcription
  misc_feature: MA Experiment 108464 PARAMETER Experiment Name: At_Germinating_Seeds_cDNA_P Parameter: Age (day) Value: 4 vs. 0
  misc_feature: MA Experiment 108464 PARAMETER Experiment Name: At_Germinating_Seeds_cDNA_P Parameter: Tissue Value: Germinating Seeds
  misc_feature: MA Experiment ID: 20000112 Result: Up-regulated in Transcription
  misc_feature: MA Experiment 20000112 PARAMETER Experiment Name: At_42deg_Heat_cDNA_P Parameter: Temperature (deg C) Value: 42 vs. 22
  misc_feature: MA Experiment 20000112 PARAMETER Experiment Name: At_42deg_Heat_cDNA_P Parameter: Timepoint (hr) Value: 2
  misc_feature: MA Experiment 20000112 PARAMETER Experiment Name: At_42deg_Heat_cDNA_P Parameter: Tissue Value: Aerial
  misc_feature: MA Experiment ID: 20000144 Result: Up-regulated in Transcription
  misc_feature: MA Experiment 20000144 PARAMETER Experiment Name: At_42deg_Heat_cDNA_P Parameter: Temperature (deg C) Value: 42 vs. 22
  misc_feature: MA Experiment 20000144 PARAMETER Experiment Name: At_42deg_Heat_cDNA_P Parameter: Timepoint (hr) Value: 1
  misc_feature: MA Experiment 20000144 PARAMETER Experiment Name: At_42deg_Heat_cDNA_P Parameter: Tissue Value: Aerial
  misc_feature: MA Experiment ID: 20000180 Result: Down-regulated in Transcription
  misc_feature: MA Experiment 20000180 PARAMETER Experiment Name: At_Germinating_Seeds_P Parameter: Age (hr) Value: 24 vs. 0
  misc_feature: MA Experiment 20000180 PARAMETER Experiment Name: At_Germinating_Seeds_P Parameter: Tissue Value: Germinating Seeds
  misc_feature: MA Experiment ID: 20000227 Result: Up-regulated in Transcription
  misc_feature: MA Experiment 20000227 PARAMETER Experiment Name: At_Root-Tips-vs-Tops_P Parameter: Tissue Value: Root Tips vs. Root Tops
  misc_feature: MA Experiment ID: 20000794 Result: Up-regulated in Transcription
  misc_feature: MA Experiment 20000794 PARAMETER Experiment Name: At_Petals_P Parameter: Age (day) Value: 23-25 days
  misc_feature: MA Experiment 20000794 PARAMETER Experiment Name: At_Petals_P Parameter: Plant Line Value: WS
  misc_feature: MA Experiment 20000794 PARAMETER Experiment Name: At_Petals_P Parameter: Tissue Value: Petals vs. Whole plant
aaaattctcgattttttttttcttctaaattctggagttttcttttccatatgtggcaaaatccgtgatcctcacgtttcaaaattacctaaaacccctaacaattctacaattcttcttctatgtcgattctatttagtaatctcgaagaatggttcgtggattgatgaaattcccaggaatctcaacgaagttattaaacataagcgttaattctctctgcaaatttcgaaacttggagagagcagaaacattactcatagacggaatcagattaggtgttcttcctgatgtgatcacttacaacactctaatcaaagggtacactcgtttcattggaatcgacgaagcttatgctgtaacacgtcgtatgagagaagctgggatcgaaccagatgttactacttacaattcattgatctcaggagctgctaaaaacttgatgttgaatcgtgtactccaactgttcgacgaaatgcttcactcaggtttgtctcctgatatgtggagttataatactttaatgtcttgttacttcaaattagggagacatggagaagcgtttaagattcttcatgaggatattcatttagctgggttggttcctgggattgatacttataacattctgcttgatgcgctttgtaaaagcggtcatacggataatgcgattgagttgtttaagcatctgaagagtcgggttaaacccgagcttatgacgtataatattctcatcaatggtctttgtaaatcgagaagggttggttctgtggattggatgatgagagagcttaagaaatcgggctatactccgaatgcggttacgtatacaacgatgcttaaaatgtattttaagactaagaggattgagaaaggtcttcagttgtttttgaagatgaagaaagaagggtatacgtttgacgggtttgcgaattgtgcggttgttagtgcgttgattaaaaccggaagagcagaggaggcgtatgagtgtatgcacgagcttgtgagaagtggtacaaggagtcaagacattgtttcgtacaatacattgttgaatttgtattttaaagatgggaacttggatgcagtagatgatctattggaggagattgagatgaaggggttgaaacctgatgactatactcatacgattatagtcaatggtttgttaaatataggcaatacgggaggagccgagaagcatttggcatgtatcggagagatggggatgcagccgagtgttgtcacttgtaactgtttgattgatgggttgtgcaaagcaggtcatgtagatcgtgcaatgaggttgtttgcgtcaatggaagttagagatgagttcacttacacttctgttgtgcataatctatgcaaagacggacggcttgtttgtgcttcgaagctgctcttgtcgtgttacaataaaggaatgaagattccgtcatcggctagacgagcagtgttgtccggcatacgggagacggtatcttaccaagcagcaaggaagacacatatcaaaatcaaagcagctattgagtgtaatacactaatgtacccttaagacattgaaaagtatctaatagaaaaattattgaattgc

SEQ ID NO: 40016 - protein, 468 aa, Arabidopsis thaliana
  peptide (1)..(468): Ceres Seq. ID no. 12328283
  misc_feature (119)..(153): Pfam Name: PPR repeat Pfam Description: PPR repeat
  misc_feature (1)..(440): Homolog of NCBI NO: 22531122 NR Description: putative membrane-associated salt-inducible
  misc_feature (1)..(440): Homolog of NCBI NO: 15221515 NR Description: putative membrane-associated salt-inducible
  misc_feature (1)..(440): Homolog of NCBI NO: 34896698 NR Description: putative pentatricopeptide repeat protein
  misc_feature (1)..(434): Homolog of NCBI NO: 15218325 NR Description: hypothetical protein; protein id: At1g09900.1
  misc_feature (1)..(181): Homolog of NCBI NO: 15236699 NR Description: putative protein; protein id: At4g17910.1
  misc_feature (52)..(460): Homolog of NCBI NO: 15236699 NR Description: putative protein; protein id: At4g17910.1
  misc_feature (1)..(181): Homolog of NCBI NO: 9758504 NR Description: gene_id:MZA15.9~pir||T05077~strong similarity to
  misc_feature (52)..(468): Homolog of NCBI NO: 9758504 NR Description: gene_id:MZA15.9~pir||T05077~strong similarity to
  misc_feature (6)..(468): Homolog of NCBI NO: 21618238 NR Description: unknown [Arabidopsis thaliana]
  misc_feature (1)..(468): Homolog of NCBI NO: 18422700 NR Description: putative protein
MVRGLMKFPGISTKLLNISVNSLCKFRNLERAETLLIDGIRLGVLPDVITYNTLIKGYTRFIGIDEAYAVTRRMREAGIEPDVTTYNSLISGAAKNLMLNRVLQLFDEMLHSGLSPDMWSYNTLMSCYFKLGRHGEAFKILHEDIHLAGLVPGIDTYNILLDALCKSGHTDNAIELFKHLKSRVKPELMTYNILINGLCKSRRVGSVDWMMRELKKSGYTPNAVTYTTMLKMYFKTKRIEKGLQLFLKMKKEGYTFDGFANCAVVSALIKTGRAEEAYECMHELVRSGTRSQDIVSYNTLLNLYFKDGNLDAVDDLLEEIEMKGLKPDDYTHTIIVNGLLNIGNTGGAEKHLACIGEMGMQPSVVTCNCLIDGLCKAGHVDRAMRLFASMEVRDEFTYTSVVHNLCKDGRLVCASKLLLSCYNKGMKIPSSARRAVLSGIRETVSYQAARKTHIKIKAAIECNTLMYP

SEQ ID NO: 40017 - protein, 463 aa, Arabidopsis thaliana
  peptide (1)..(463): Ceres Seq. ID no. 12328284
  misc_feature (114)..(148): Pfam Name: PPR repeat Pfam Description: PPR repeat
  misc_feature (1)..(435): Homolog of NCBI NO: 22531122 NR Description: putative membrane-associated salt-inducible
  misc_feature (1)..(435): Homolog of NCBI NO: 15221515 NR Description: putative membrane-associated salt-inducible
  misc_feature (1)..(435): Homolog of NCBI NO: 34896698 NR Description: putative pentatricopeptide repeat protein
  misc_feature (1)..(429): Homolog of NCBI NO: 15218325 NR Description: hypothetical protein; protein id: At1g09900.1
  misc_feature (1)..(176): Homolog of NCBI NO: 15236699 NR Description: putative protein; protein id: At4g17910.1
  misc_feature (47)..(455): Homolog of NCBI NO: 15236699 NR Description: putative protein; protein id: At4g17910.1
  misc_feature (1)..(176): Homolog of NCBI NO: 9758504 NR Description: gene_id:MZA15.9~pir||T05077~strong similarity to
  misc_feature (47)..(463): Homolog of NCBI NO: 9758504 NR Description: gene_id:MZA15.9~pir||T05077~strong similarity to
  misc_feature (1)..(463): Homolog of NCBI NO: 21618238 NR Description: unknown [Arabidopsis thaliana]
  misc_feature (1)..(463): Homolog of NCBI NO: 18422700 NR Description: putative protein
MKFPGISTKLLNISVNSLCKFRNLERAETLLIDGIRLGVLPDVITYNTLIKGYTRFIGIDEAYAVTRRMREAGIEPDVTTYNSLISGAAKNLMLNRVLQLFDEMLHSGLSPDMWSYNTLMSCYFKLGRHGEAFKILHEDIHLAGLVPGIDTYNILLDALCKSGHTDNAIELFKHLKSRVKPELMTYNILINGLCKSRRVGSVDWMMRELKKSGYTPNAVTYTTMLKMYFKTKRIEKGLQLFLKMKKEGYTFDGFANCAVVSALIKTGRAEEAYECMHELVRSGTRSQDIVSYNTLLNLYFKDGNLDAVDDLLEEIEMKGLKPDDYTHTIIVNGLLNIGNTGGAEKHLACIGEMGMQPSVVTCNCLIDGLCKAGHVDRAMRLFASMEVRDEFTYTSVVHNLCKDGRLVCASKLLLSCYNKGMKIPSSARRAVLSGIRETVSYQAARKTHIKIKAAIECNTLMYP

SEQ ID NO: 40018 - protein, 395 aa, Arabidopsis thaliana
  peptide (1)..(395): Ceres Seq. ID no. 12328285
  misc_feature (46)..(80): Pfam Name: PPR repeat Pfam Description: PPR repeat
  misc_feature (1)..(367): Homolog of NCBI NO: 22531122 NR Description: putative membrane-associated salt-inducible
  misc_feature (1)..(367): Homolog of NCBI NO: 15221515 NR Description: putative membrane-associated salt-inducible
  misc_feature (1)..(367): Homolog of NCBI NO: 34896698 NR Description: putative pentatricopeptide repeat protein
  misc_feature (1)..(361): Homolog of NCBI NO: 15218325 NR Description: hypothetical protein; protein id: At1g09900.1
  misc_feature (1)..(108): Homolog of NCBI NO: 15236699 NR Description: putative protein; protein id: At4g17910.1
  misc_feature (1)..(387): Homolog of NCBI NO: 15236699 NR Description: putative protein; protein id: At4g17910.1
  misc_feature (1)..(108): Homolog of NCBI NO: 9758504 NR Description: gene_id:MZA15.9~pir||T05077~strong similarity to
  misc_feature (1)..(395): Homolog of NCBI NO: 9758504 NR Description: gene_id:MZA15.9~pir||T05077~strong similarity to
  misc_feature (1)..(395): Homolog of NCBI NO: 21618238 NR Description: unknown [Arabidopsis thaliana]
  misc_feature (1)..(395): Homolog of NCBI NO: 18422700 NR Description: putative protein
MREAGIEPDVTTYNSLISGAAKNLMLNRVLQLFDEMLHSGLSPDMWSYNTLMSCYFKLGRHGEAFKILHEDIHLAGLVPGIDTYNILLDALCKSGHTDNAIELFKHLKSRVKPELMTYNILINGLCKSRRVGSVDWMMRELKKSGYTPNAVTYTTMLKMYFKTKRIEKGLQLFLKMKKEGYTFDGFANCAVVSALIKTGRAEEAYECMHELVRSGTRSQDIVSYNTLLNLYFKDGNLDAVDDLLEEIEMKGLKPDDYTHTIIVNGLLNIGNTGGAEKHLACIGEMGMQPSVVTCNCLIDGLCKAGHVDRAMRLFASMEVRDEFTYTSVVHNLCKDGRLVCASKLLLSCYNKGMKIPSSARRAVLSGIRETVSYQAARKTHIKIKAAIECNTLMYP

SEQ ID NO: 40019 - DNA, 1910 bp, Arabidopsis thaliana; identical to SEQ ID NO: 30306
  misc_feature (1)..(1910): Ceres Seq. ID no. 13509014
  misc_feature: MA Experiment ID: 108461 Result: Down-regulated in Transcription
  misc_feature: MA Experiment 108461 PARAMETER Experiment Name: At_Germinating_Seeds_cDNA_P Parameter: Age (day) Value: 1 vs. 0
  misc_feature: MA Experiment 108461 PARAMETER Experiment Name: At_Germinating_Seeds_cDNA_P Parameter: Tissue Value: Germinating Seeds
  misc_feature: MA Experiment ID: 108462 Result: Down-regulated in Transcription
  misc_feature: MA Experiment 108462 PARAMETER Experiment Name: At_Germinating_Seeds_cDNA_P Parameter: Age (day) Value: 2 vs. 0
  misc_feature: MA Experiment 108462 PARAMETER Experiment Name: At_Germinating_Seeds_cDNA_P Parameter: Tissue Value: Germinating Seeds
  misc_feature: MA Experiment ID: 108464 Result: Down-regulated in Transcription
  misc_feature: MA Experiment 108464 PARAMETER Experiment Name: At_Germinating_Seeds_cDNA_P Parameter: Age (day) Value: 4 vs. 0
  misc_feature: MA Experiment 108464 PARAMETER Experiment Name: At_Germinating_Seeds_cDNA_P Parameter: Tissue Value: Germinating Seeds
  misc_feature: MA Experiment ID: 20000089 Result: Down-regulated in Transcription
  misc_feature: MA Experiment ID: 20000171 Result: Down-regulated in Transcription
  misc_feature: MA Experiment 20000171 PARAMETER Experiment Name: At_42deg_Heat_P Parameter: Age (day) Value: 14
  misc_feature: MA Experiment 20000171 PARAMETER Experiment Name: At_42deg_Heat_P Parameter: Organism Value: A. thaliana
  misc_feature: MA Experiment 20000171 PARAMETER Experiment Name: At_42deg_Heat_P Parameter: Plant Line Value: WS
  misc_feature: MA Experiment 20000171 PARAMETER Experiment Name: At_42deg_Heat_P Parameter: Temperature (deg C) Value: 42 vs. 22
  misc_feature: MA Experiment 20000171 PARAMETER Experiment Name: At_42deg_Heat_P Parameter: Timepoint (hr) Value: 1
  misc_feature: MA Experiment 20000171 PARAMETER Experiment Name: At_42deg_Heat_P Parameter: Tissue Value: Aerial
  misc_feature: MA Experiment ID: 20000179 Result: Up-regulated in Transcription
  misc_feature: MA Experiment 20000179 PARAMETER Experiment Name: At_Germinating_Seeds_P Parameter: Age (hr) Value: 6 vs. 0
  misc_feature: MA Experiment 20000179 PARAMETER Experiment Name: At_Germinating_Seeds_P Parameter: Tissue Value: Germinating Seeds
  misc_feature: MA Experiment ID: 20000185 Result: Down-regulated in Transcription
  misc_feature: MA Experiment 20000185 PARAMETER Experiment Name: At_Roots__P Parameter: Age (day) Value: 7 vs. 21
  misc_feature: MA Experiment 20000185 PARAMETER Experiment Name: At_Roots__P Parameter: Organism Value: A. thaliana
  misc_feature: MA Experiment 20000185 PARAMETER Experiment Name: At_Roots__P Parameter: Tissue Value: Roots vs. Whole Plant
  misc_feature: MA Experiment ID: 20000227 Result: Down-regulated in Transcription
  misc_feature: MA Experiment 20000227 PARAMETER Experiment Name: At_Root-Tips-vs-Tops_P Parameter: Tissue Value: Root Tips vs. Root Tops
  misc_feature: MA Experiment ID: 20000437 Result: Down-regulated in Transcription
  misc_feature: MA Experiment 20000437 PARAMETER Experiment Name: At_Drought_P Parameter: Age (day) Value: 8
  misc_feature: MA Experiment 20000437 PARAMETER Experiment Name: At_Drought_P Parameter: Organism Value: A. thaliana
  misc_feature: MA Experiment 20000437 PARAMETER Experiment Name: At_Drought_P Parameter: Plant Line Value: WS
  misc_feature: MA Experiment 20000437 PARAMETER Experiment Name: At_Drought_P Parameter: Timepoint (hr) Value: 24
  misc_feature: MA Experiment 20000437 PARAMETER Experiment Name: At_Drought_P Parameter: Tissue Value: Whole Plant
  misc_feature: MA Experiment 20000437 PARAMETER Experiment Name: At_Drought_P Parameter: Treatment Value: Drought vs. No Drought
  misc_feature: MA Experiment ID: 20000439 Result: Down-regulated in Transcription
  misc_feature: MA Experiment 20000439 PARAMETER Experiment Name: At_Roots__P Parameter: Age (day) Value: 14 vs. 21
  misc_feature: MA Experiment 20000439 PARAMETER Experiment Name: At_Roots__P Parameter: Organism Value: A. thaliana
  misc_feature: MA Experiment 20000439 PARAMETER Experiment Name: At_Roots__P Parameter: Tissue Value: Roots vs. Whole Plant
  misc_feature: MA Experiment ID: 20000495 Result: Down-regulated in Transcription
  misc_feature: MA Experiment 20000495 PARAMETER Experiment Name: At_Guard_Cells_P Parameter: Harvest Date Value: 8/2/2002
  misc_feature: MA Experiment 20000495 PARAMETER Experiment Name: At_Guard_Cells_P Parameter: Organism Value: A. thaliana
  misc_feature: MA Experiment 20000495 PARAMETER Experiment Name: At_Guard_Cells_P Parameter: Tissue Value: Guard Cells vs. Leaves
  misc_feature: MA Experiment ID: 20000573 Result: Down-regulated in Transcription
  misc_feature: MA Experiment 20000573 PARAMETER Experiment Name: At_100uM_ABA_Mutants__P Parameter: Organism Value: A. thaliana
  misc_feature: MA Experiment 20000573 PARAMETER Experiment Name: At_100uM_ABA_Mutants__P Parameter: Plant Line Value: CS22 vs. Ler wt
  misc_feature: MA Experiment 20000573 PARAMETER Experiment Name: At_100uM_ABA_Mutants__P Parameter: Timepoint (hr) Value: N/A
  misc_feature: MA Experiment 20000573 PARAMETER Experiment Name: At_100uM_ABA_Mutants__P Parameter: Tissue Value: Whole Plant
  misc_feature: MA Experiment 20000573 PARAMETER Experiment Name: At_100uM_ABA_Mutants__P Parameter: Treatment Value: None
  misc_feature: MA Experiment ID: 20000574 Result: Down-regulated in Transcription
  misc_feature: MA Experiment 20000574 PARAMETER Experiment Name: At_100uM_ABA_Mutants__P Parameter: Organism Value: A. thaliana
  misc_feature: MA Experiment 20000574 PARAMETER Experiment Name: At_100uM_ABA_Mutants__P Parameter: Plant Line Value: CS23 vs. Ler wt
  misc_feature: MA Experiment 20000574 PARAMETER Experiment Name: At_100uM_ABA_Mutants__P Parameter: Timepoint (hr) Value: N/A
  misc_feature: MA Experiment 20000574 PARAMETER Experiment Name: At_100uM_ABA_Mutants__P Parameter: Tissue Value: Whole Plant
  misc_feature: MA Experiment 20000574 PARAMETER Experiment Name: At_100uM_ABA_Mutants__P Parameter: Treatment Value: None
  misc_feature: MA Experiment ID: 20001248 Result: Down-regulated in Transcription
  misc_feature: MA Experiment 20001248 PARAMETER Experiment Name: At_Far-red-induction_P Parameter: Age (day) Value: 7
  misc_feature: MA Experiment 20001248 PARAMETER Experiment Name: At_Far-red-induction_P Parameter: Light Value: Far-red vs. White
  misc_feature: MA Experiment 20001248 PARAMETER Experiment Name: At_Far-red-induction_P Parameter: Organism Value: A. thaliana
  misc_feature: MA Experiment 20001248 PARAMETER Experiment Name: At_Far-red-induction_P Parameter: Plant Line Value: Columbia
  misc_feature: MA Experiment 20001248 PARAMETER Experiment Name: At_Far-red-induction_P Parameter: Timepoint (hr) Value: 4
  misc_feature: MA Experiment 20001248 PARAMETER Experiment Name: At_Far-red-induction_P Parameter: Tissue Value: Whole Plant
  misc_feature: MA Experiment ID: 20001560 Result: Down-regulated in Transcription
  misc_feature: MA Experiment 20001560 PARAMETER Experiment Name: At_Drought_Soil_Dry_P Parameter: Age (day) Value: 28
  misc_feature: MA Experiment 20001560 PARAMETER Experiment Name: At_Drought_Soil_Dry_P Parameter: Organism Value: A. thaliana
  misc_feature: MA Experiment 20001560 PARAMETER Experiment Name: At_Drought_Soil_Dry_P Parameter: Plant Line Value: WS
  misc_feature: MA Experiment 20001560 PARAMETER Experiment Name: At_Drought_Soil_Dry_P Parameter: Post Timepoint (hr) Value: None
  misc_feature: MA Experiment 20001560 PARAMETER Experiment Name: At_Drought_Soil_Dry_P Parameter: Post-Treatment Value: None
  misc_feature: MA Experiment 20001560 PARAMETER Experiment Name: At_Drought_Soil_Dry_P Parameter: Timepoint (day) Value: 14
  misc_feature: MA Experiment 20001560 PARAMETER Experiment Name: At_Drought_Soil_Dry_P Parameter: Treatment Value: Drought vs. No Drought
  misc_feature: MA Experiment ID: 20001905 Result: Down-regulated in Transcription
  misc_feature: MA Experiment 20001905 PARAMETER Experiment Name: At_Drought_Reproduction_P Parameter: Age (day) Value: 40
  misc_feature: MA Experiment 20001905 PARAMETER Experiment Name: At_Drought_Reproduction_P Parameter: Organism Value: A. thaliana
  misc_feature: MA Experiment 20001905 PARAMETER Experiment Name: At_Drought_Reproduction_P Parameter: Plant Line Value: WS
  misc_feature: MA Experiment 20001905 PARAMETER Experiment Name: At_Drought_Reproduction_P Parameter: Timepoint (day) Value: 10
  misc_feature: MA Experiment 20001905 PARAMETER Experiment Name: At_Drought_Reproduction_P Parameter: Tissue Value: Rosettes
  misc_feature: MA Experiment 20001905 PARAMETER Experiment Name: At_Drought_Reproduction_P Parameter: Treatment Value: Drought vs. No Drought

SEQ ID NO: 40020 - protein, 510 aa, Arabidopsis thaliana; identical to SEQ ID NO: 30307
  peptide (1)..(510): Ceres Seq. ID no. 13509015
  misc_feature (120)..(508): Pfam Name: Eukaryotic aspartyl protease Pfam Description: Eukaryotic aspartyl protease
  misc_feature (120)..(508): Pfam Name: Eukaryotic aspartyl protease Pfam Description: Eukaryotic aspartyl protease
  misc_feature (120)..(508): Pfam Name: Eukaryotic aspartyl protease Pfam Description: Eukaryotic aspartyl protease
  misc_feature (120)..(508): Pfam Name: Eukaryotic aspartyl protease Pfam Description: Eukaryotic aspartyl protease
  misc_feature (86)..(510): Homolog of NCBI NO: 15290061 NR Description: nucleoid DNA-binding protein cnd41-like protein
  misc_feature (52)..(510): Homolog of NCBI NO: 15228618 NR Description: expressed protein [Arabidopsis thaliana]
  misc_feature (116)..(510): Homolog of NCBI NO: 15231010 NR Description: expressed protein [Arabidopsis thaliana]
  misc_feature (64)..(510): Homolog of NCBI NO: 21594980 NR Description: chloroplast nucleoid DNA binding protein,
  misc_feature (64)..(510): Homolog of NCBI NO: 15223368 NR Description: chloroplast nucleoid DNA binding protein -related
  misc_feature (86)..(510): Homolog of NCBI NO: 15290061 NR Description: nucleoid DNA-binding protein cnd41-like protein
  misc_feature (116)..(510): Homolog of NCBI NO: 15231010 NR Description: expressed protein [Arabidopsis thaliana]
  misc_feature (64)..(510): Homolog of NCBI NO: 15223368 NR Description: chloroplast nucleoid DNA binding protein -related
  misc_feature (64)..(510): Homolog of NCBI NO: 21594980 NR Description: chloroplast nucleoid DNA binding protein,
  misc_feature (116)..(510): Homolog of NCBI NO: 15231010 NR Description: expressed protein [Arabidopsis thaliana]
  misc_feature (52)..(510): Homolog of NCBI NO: 15228618 NR Description: expressed protein [Arabidopsis thaliana]
  misc_feature (86)..(510): Homolog of NCBI NO: 15290061 NR Description: nucleoid DNA-binding protein cnd41-like protein
  misc_feature (11)..(510): Homolog of NCBI NO: 15229656 NR Description: chloroplast nucleoid DNA-binding protein -related
  misc_feature (11)..(510): Homolog of NCBI NO: 19424106 NR Description: putative chloroplast nucleoid DNA-binding protein
  misc_feature (28)..(510): Homolog of NCBI NO: 15222611 NR Description: expressed protein [Arabidopsis thaliana]
  misc_feature (14)..(510): Homolog of NCBI NO: 34895664 NR Description: nucleoid DNA-binding protein cnd41-like protein
  misc_feature (53)..(510): Homolog of NCBI NO: 28392860 NR Description: unknown protein [Arabidopsis thaliana]
  misc_feature (11)..(510): Homolog of NCBI NO: 15229656 NR Description: chloroplast nucleoid DNA-binding protein -related
  misc_feature (11)..(510): Homolog of NCBI NO: 19424106 NR Description: putative chloroplast nucleoid DNA-binding protein
  misc_feature (28)..(510): Homolog of NCBI NO: 15222611 NR Description: expressed protein [Arabidopsis thaliana]
  misc_feature (14)..(510): Homolog of NCBI NO: 34895664 NR Description: nucleoid DNA-binding protein cnd41-like protein
  misc_feature (53)..(510): Homolog of NCBI NO: 28392860 NR Description: unknown protein [Arabidopsis thaliana]
  misc_feature (64)..(510): Homolog of NCBI NO: 15223368 NR Description: chloroplast nucleoid DNA binding protein -related
  misc_feature (64)..(510): Homolog of NCBI NO: 21594980 NR Description: chloroplast nucleoid DNA binding protein,
  misc_feature (116)..(510): Homolog of NCBI NO: 15231010 NR Description: expressed protein [Arabidopsis thaliana]
  misc_feature (52)..(510): Homolog of NCBI NO: 15228618 NR Description: expressed protein [Arabidopsis thaliana]
  misc_feature (86)..(510): Homolog of NCBI NO: 15290061 NR Description: nucleoid DNA-binding protein cnd41-like protein
  misc_feature (11)..(510): Homolog of NCBI NO: 15229656 NR Description: chloroplast nucleoid DNA-binding protein -related
  misc_feature (11)..(510): Homolog of NCBI NO: 19424106 NR Description: putative chloroplast nucleoid DNA-binding protein
  misc_feature (28)..(510): Homolog of NCBI NO: 15222611 NR Description: expressed protein [Arabidopsis thaliana]
  misc_feature (14)..(510): Homolog of NCBI NO: 34895664 NR Description: nucleoid DNA-binding protein cnd41-like protein
  misc_feature (53)..(510): Homolog of NCBI NO: 28392860 NR Description: unknown protein [Arabidopsis thaliana]
  misc_feature (64)..(510): Homolog of NCBI NO: 15223368 NR Description: chloroplast nucleoid DNA binding protein -related
  misc_feature (64)..(510): Homolog of NCBI NO: 21594980 NR Description: chloroplast nucleoid DNA binding protein,
  misc_feature (52)..(510): Homolog of NCBI NO: 15228618 NR Description: expressed protein [Arabidopsis thaliana]
  misc_feature (53)..(510): Homolog of NCBI NO: 28392860 NR Description: unknown protein [Arabidopsis thaliana]
  misc_feature (14)..(510): Homolog of NCBI NO: 34895664 NR Description: nucleoid DNA-binding protein cnd41-like protein
  misc_feature (28)..(510): Homolog of NCBI NO: 15222611 NR Description: expressed protein [Arabidopsis thaliana]
  misc_feature (11)..(510): Homolog of NCBI NO: 19424106 NR Description: putative chloroplast nucleoid DNA-binding protein
  misc_feature (11)..(510): Homolog of NCBI NO: 15229656 NR Description: chloroplast nucleoid DNA-binding protein -related

SEQ ID NO: 40021 - protein, 500 aa, Arabidopsis thaliana [sequence omitted]

SEQ ID NO: 40022 - protein, 326 aa, Arabidopsis thaliana; identical to SEQ ID NO: 30309
  peptide (1)..(326): Ceres Seq. ID no. 13509017
  misc_feature (1)..(324): Pfam Name: Eukaryotic aspartyl protease Pfam Description: Eukaryotic aspartyl protease
  misc_feature (1)..(324): Pfam Name: Eukaryotic aspartyl protease Pfam Description: Eukaryotic aspartyl protease
  misc_feature (1)..(324): Pfam Name: Eukaryotic aspartyl protease Pfam Description: Eukaryotic aspartyl protease
  misc_feature (1)..(324): Pfam Name: Eukaryotic aspartyl protease Pfam Description: Eukaryotic aspartyl protease
  misc_feature (1)..(326): Homolog of NCBI NO: 15290061 NR Description: nucleoid DNA-binding protein cnd41-like protein
  misc_feature (1)..(326): Homolog of NCBI NO: 15228618 NR Description: expressed protein [Arabidopsis thaliana]
  misc_feature (1)..(326): Homolog of NCBI NO: 15231010 NR Description: expressed protein [Arabidopsis thaliana]
  misc_feature (1)..(326): Homolog of NCBI NO: 21594980 NR Description: chloroplast nucleoid DNA binding protein,
  misc_feature (1)..(326): Homolog of NCBI NO: 15223368 NR Description: chloroplast nucleoid DNA binding protein -related
  misc_feature (1)..(326): Homolog of NCBI NO: 15290061 NR Description: nucleoid DNA-binding protein cnd41-like protein
  misc_feature (1)..(326): Homolog of NCBI NO: 15231010 NR Description: expressed protein [Arabidopsis thaliana]
  misc_feature (1)..(326): Homolog of NCBI NO: 15223368 NR Description: chloroplast nucleoid DNA binding protein -related
  misc_feature (1)..(326): Homolog of NCBI NO: 21594980 NR Description: chloroplast nucleoid DNA binding protein,
  misc_feature (1)..(326): Homolog of NCBI NO: 15231010 NR Description: expressed protein [Arabidopsis thaliana]
  misc_feature (1)..(326): Homolog of NCBI NO: 15228618 NR Description: expressed protein [Arabidopsis thaliana]
  misc_feature (1)..(326): Homolog of NCBI NO: 15290061 NR Description: nucleoid DNA-binding protein cnd41-like protein
  misc_feature (1)..(326): Homolog of NCBI NO: 15229656 NR Description: chloroplast nucleoid DNA-binding protein -related
  misc_feature (1)..(326): Homolog of NCBI NO: 19424106 NR Description: putative chloroplast nucleoid DNA-binding protein
  misc_feature (1)..(326): Homolog of NCBI NO: 15222611 NR Description: expressed protein [Arabidopsis thaliana]
  misc_feature (1)..(326): Homolog of NCBI NO: 34895664 NR Description: nucleoid DNA-binding protein cnd41-like protein
  misc_feature (1)..(326): Homolog of NCBI NO: 28392860 NR Description: unknown protein [Arabidopsis thaliana]
  misc_feature (1)..(326): Homolog of NCBI NO: 15229656 NR Description: chloroplast nucleoid DNA-binding protein -related
  misc_feature (1)..(326): Homolog of NCBI NO: 19424106 NR Description: putative chloroplast nucleoid DNA-binding protein
  misc_feature (1)..(326): Homolog of NCBI NO: 15222611 NR Description: expressed protein [Arabidopsis thaliana]
  misc_feature (1)..(326): Homolog of NCBI NO: 34895664 NR Description: nucleoid DNA-binding protein cnd41-like protein
  misc_feature (1)..(326): Homolog of NCBI NO: 28392860 NR Description: unknown protein [Arabidopsis thaliana]
  misc_feature (1)..(326): Homolog of NCBI NO: 15223368 NR Description: chloroplast nucleoid DNA binding protein -related
  misc_feature (1)..(326): Homolog of NCBI NO: 21594980 NR Description: chloroplast nucleoid DNA binding protein,
  misc_feature (1)..(326): Homolog of NCBI NO: 15231010 NR Description: expressed protein [Arabidopsis thaliana]
  misc_feature (1)..(326): Homolog of NCBI NO: 15228618 NR Description: expressed protein [Arabidopsis thaliana]
  misc_feature (1)..(326): Homolog of NCBI NO: 15290061 NR Description: nucleoid DNA-binding protein cnd41-like protein
  misc_feature (1)..(326): Homolog of NCBI NO: 15229656 NR Description: chloroplast nucleoid DNA-binding protein -related
  misc_feature (1)..(326): Homolog of NCBI NO: 19424106 NR Description: putative chloroplast nucleoid DNA-binding protein
  misc_feature (1)..(326): Homolog of NCBI NO: 15222611 NR Description: expressed protein [Arabidopsis thaliana]
  misc_feature (1)..(326): Homolog of NCBI NO: 34895664 NR Description: nucleoid DNA-binding protein cnd41-like protein
  misc_feature (1)..(326): Homolog of NCBI NO: 28392860 NR Description: unknown protein [Arabidopsis thaliana]
  misc_feature (1)..(326): Homolog of NCBI NO: 15223368 NR Description: chloroplast nucleoid DNA binding protein -related
  misc_feature (1)..(326): Homolog of NCBI NO: 21594980 NR Description: chloroplast nucleoid DNA binding protein,
  misc_feature (1)..(326): Homolog of NCBI NO: 15228618 NR Description: expressed protein [Arabidopsis thaliana]
  misc_feature (1)..(326): Homolog of NCBI NO: 28392860 NR Description: unknown protein [Arabidopsis thaliana]
  misc_feature (1)..(326): Homolog of NCBI NO: 34895664 NR Description: nucleoid DNA-binding protein cnd41-like protein
  misc_feature (1)..(326): Homolog of NCBI NO: 15222611 NR Description: expressed protein [Arabidopsis thaliana]
  misc_feature (1)..(326): Homolog of NCBI NO: 19424106 NR Description: putative chloroplast nucleoid DNA-binding protein
  misc_feature (1)..(326): Homolog of NCBI NO: 15229656 NR Description: chloroplast nucleoid DNA-binding protein -related

SEQ ID NO: 40023 - DNA, 1117 bp, Arabidopsis thaliana
  misc_feature (1)..(1117): Ceres Seq. ID no. 13489076
  misc_feature: MA Experiment ID: 108435 Result: Down-regulated in Transcription
  misc_feature: MA Experiment 108435 PARAMETER Experiment Name: At_stm_Mutants_cDNA_P Parameter: Plant Line Value: wt Landsburg vs stm
  misc_feature: MA Experiment 108435 PARAMETER Experiment Name: At_stm_Mutants_cDNA_P Parameter: Tissue Value: Shoot Apical Meristem Region
  misc_feature: MA Experiment ID: 108462 Result: Up-regulated in Transcription
  misc_feature: MA Experiment 108462 PARAMETER Experiment Name: At_Germinating_Seeds_cDNA_P Parameter: Age (day) Value: 2 vs. 0
  misc_feature: MA Experiment 108462 PARAMETER Experiment Name: At_Germinating_Seeds_cDNA_P Parameter: Tissue Value: Germinating Seeds
  misc_feature: MA Experiment ID: 108463 Result: Up-regulated in Transcription
  misc_feature: MA Experiment 108463 PARAMETER Experiment Name: At_Germinating_Seeds_cDNA_P Parameter: Age (day) Value: 3 vs. 0
  misc_feature: MA Experiment 108463 PARAMETER Experiment Name: At_Germinating_Seeds_cDNA_P Parameter: Tissue Value: Germinating Seeds
  misc_feature: MA Experiment ID: 108464 Result: Up-regulated in Transcription
  misc_feature: MA Experiment 108464 PARAMETER Experiment Name: At_Germinating_Seeds_cDNA_P Parameter: Age (day) Value: 4 vs. 0
  misc_feature: MA Experiment 108464 PARAMETER Experiment Name: At_Germinating_Seeds_cDNA_P Parameter: Tissue Value: Germinating Seeds
  misc_feature: MA Experiment ID: 108569 Result: Up-regulated in Transcription
  misc_feature: MA Experiment 108569 PARAMETER Experiment Name: At_0.001%_MeJA__cDNA_P Parameter: Timepoint (hr) Value: 6
  misc_feature: MA Experiment 108569 PARAMETER Experiment Name: At_0.001%_MeJA__cDNA_P Parameter: Tissue Value: Aerial
  misc_feature: MA Experiment 108569 PARAMETER Experiment Name: At_0.001%_MeJA__cDNA_P Parameter: Treatment Value: 0.001% MeJA vs. No Treatment
  misc_feature: MA Experiment ID: 108573 Result: Up-regulated in Transcription
  misc_feature: MA Experiment 108573 PARAMETER Experiment Name: At_Drought_cDNA_P Parameter: Timepoint (hr) Value: 6
  misc_feature: MA Experiment 108573 PARAMETER Experiment Name: At_Drought_cDNA_P Parameter: Tissue Value: Aerial
  misc_feature: MA Experiment 108573 PARAMETER Experiment Name: At_Drought_cDNA_P Parameter: Treatment Value: Drought vs. No Drought
  misc_feature: MA Experiment ID: 108595 Result: Down-regulated in Transcription
  misc_feature: MA Experiment 108595 PARAMETER Experiment Name: At_Ler-pi_Ovule_cDNA_P Parameter: Plant Line Value: null
  misc_feature: MA Experiment ID: 20000087 Result: Down-regulated in Transcription
  misc_feature: MA Experiment 20000087 PARAMETER Experiment Name: At_100uM_ABA_Mutants_cDNA_P Parameter: Plant Line Value: WS
  misc_feature: MA Experiment 20000087 PARAMETER Experiment Name: At_100uM_ABA_Mutants_cDNA_P Parameter: Timepoint (hr) Value: 6
  misc_feature: MA Experiment 20000087 PARAMETER Experiment Name: At_100uM_ABA_Mutants_cDNA_P Parameter: Tissue Value: Aerial
  misc_feature: MA Experiment 20000087 PARAMETER Experiment Name: At_100uM_ABA_Mutants_cDNA_P Parameter: Treatment Value: 100uM ABA vs. No Treatment
  misc_feature: MA Experiment ID: 20000089 Result: Down-regulated in Transcription
  misc_feature: MA Experiment ID: 20000224 Result: Up-regulated in Transcription
  misc_feature: MA Experiment ID: 20000438 Result: Up-regulated in Transcription
  misc_feature: MA Experiment 20000438 PARAMETER Experiment Name: At_Shoots__P Parameter: Age (day) Value: 14
  misc_feature: MA Experiment 20000438 PARAMETER Experiment Name: At_Shoots__P Parameter: Tissue Value: Shoots vs. Whole Plant
  misc_feature: MA Experiment ID: 20001248 Result: Down-regulated in Transcription
  misc_feature: MA Experiment 20001248 PARAMETER Experiment Name: At_Far-red-induction_P Parameter: Age (day) Value: 7
  misc_feature: MA Experiment 20001248 PARAMETER Experiment Name: At_Far-red-induction_P Parameter: Light Value: Far-red vs. White
  misc_feature: MA Experiment 20001248 PARAMETER Experiment Name: At_Far-red-induction_P Parameter: Organism Value: A. thaliana
  misc_feature: MA Experiment 20001248 PARAMETER Experiment Name: At_Far-red-induction_P Parameter: Plant Line Value: Columbia
  misc_feature: MA Experiment 20001248 PARAMETER Experiment Name: At_Far-red-induction_P Parameter: Timepoint (hr) Value: 4
  misc_feature: MA Experiment 20001248 PARAMETER Experiment Name: At_Far-red-induction_P Parameter: Tissue Value: Whole Plant
  misc_feature: MA Experiment ID: 20001557 Result: Down-regulated in Transcription
  misc_feature: MA Experiment 20001557 PARAMETER Experiment Name: At_Drought_Soil_Dry_P Parameter: Age (day) Value: 27
  misc_feature: MA Experiment 20001557 PARAMETER Experiment Name: At_Drought_Soil_Dry_P Parameter: Organism Value: A. thaliana
  misc_feature: MA Experiment 20001557 PARAMETER Experiment Name: At_Drought_Soil_Dry_P Parameter: Plant Line Value: WS
  misc_feature: MA Experiment 20001557 PARAMETER Experiment Name: At_Drought_Soil_Dry_P Parameter: Post Timepoint (hr) Value: 3
  misc_feature: MA Experiment 20001557 PARAMETER Experiment Name: At_Drought_Soil_Dry_P Parameter: Post-Treatment Value: Re-Water vs. No Drought
  misc_feature: MA Experiment 20001557 PARAMETER Experiment Name: At_Drought_Soil_Dry_P Parameter: Timepoint (day) Value: 13
  misc_feature: MA Experiment 20001557 PARAMETER Experiment Name: At_Drought_Soil_Dry_P Parameter: Treatment Value: Drought vs. No Drought
  misc_feature: MA Experiment ID: 20001558 Result: Down-regulated in Transcription
  misc_feature: MA Experiment 20001558 PARAMETER Experiment Name: At_Drought_Soil_Dry_P Parameter: Age (day) Value: 27
  misc_feature: MA Experiment 20001558 PARAMETER Experiment Name: At_Drought_Soil_Dry_P Parameter: Organism Value: A. thaliana
  misc_feature: MA Experiment 20001558 PARAMETER Experiment Name: At_Drought_Soil_Dry_P Parameter: Plant Line Value: WS
  misc_feature: MA Experiment 20001558 PARAMETER Experiment Name: At_Drought_Soil_Dry_P Parameter: Post Timepoint (hr) Value: 6
  misc_feature: MA Experiment 20001558 PARAMETER Experiment Name: At_Drought_Soil_Dry_P Parameter: Post-Treatment Value: Re-Water vs. No Drought
  misc_feature: MA Experiment 20001558 PARAMETER Experiment Name: At_Drought_Soil_Dry_P Parameter: Timepoint (day) Value: 13
  misc_feature: MA Experiment 20001558 PARAMETER Experiment Name: At_Drought_Soil_Dry_P Parameter: Treatment Value: Drought vs. No Drought
aaaactaatctgtatgatcgatcttgtgctgaagatatcgaaaagatgtcatctttgggtaggattttgtctgtttcctacccaccggatccgtacacttggcggttttcacagtataagctgtcttcttcactagggcgaaatcggagactcagatggcgattcacggcgttggatcctgaatcttcctcactcgactctgaatcctccgccgataaattcgcttccgggttttgtataatagaagggcctgaaacagtacaggactttgccaaaatgcaattacaagagattcaagataacattcgaagccgacgaaacaagatcttcttgcacatggaagaggtgcggaggctaagaatacaacaacggattaaaaacacagaacttggtatcattaacgaagaacaagaacatgaattacctaatttcccatcttttatcccattcttacctccattgactgctgccaatttgaaagtctattacgcaacttgtttctcactcatcgcggggattatcctattcggtggtctactagctcctactctagagctgaagttaggtataggaggtacatcgtatgcagatttcattcaaagccttcatctacctatgcaattgagtcaagtggacccgatagtagcgtcgttttctggaggagcggttggtgtgatttcggctttgatggtagtagaagttaacaacgtaaagcagcaagagcacaagagatgcaaatactgtctaggaactgggtatctagcatgtgctcgttgctctagcacaggtgctcttgttttaactgaaccagtctcagctattgctggtgggaatcattctctatcaccgcccaaaaccgaaagatgttcaaactgttcaggtgccggaaaggtgatgtgcccgacatgtctgtgcacaggaatggctatggccagtgagcatgatcctcgtatcgaccctttcgattgaattttgcaacacattctacttccttagaatctcattctgtcagtgtaactaaaaatggtatgtactgattaaataattagaaccgcatactttgatctgtatatacacacaattaaagttataatacaatgttagacatgtcttctcc

SEQ ID NO: 40024 - protein, 322 aa, Arabidopsis thaliana
  peptide (1)..(322): Ceres Seq. ID no. 13489077
  misc_feature (75)..(322): Homolog of NCBI NO: 30681288 NR Description: expressed protein [Arabidopsis thaliana]
  misc_feature (76)..(322): Homolog of NCBI NO: 8978349 NR Description: gene_id:K16F4.10~pir||T00468~similar to unknown
  misc_feature (70)..(322): Homolog of NCBI NO: 22326624 NR Description: expressed protein [Arabidopsis thaliana]
  misc_feature (16)..(322): Homolog of NCBI NO: 15240312 NR Description: expressed protein [Arabidopsis thaliana]
KTNLYDRSCAEDIEKMSSLGRILSVSYPPDPYTWRFSQYKLSSSLGRNRRLRWRFTALDPESSSLDSESSADKFASGFCIIEGPETVQDFAKMQLQEIQDNIRSRRNKIFLHMEEVRRLRIQQRIKNTELGIINEEQEHELPNFPSFIPFLPPLTAANLKVYYATCFSLIAGIILFGGLLAPTLELKLGIGGTSYADFIQSLHLPMQLSQVDPIVASFSGGAVGVISALMVVEVNNVKQQEHKRCKYCLGTGYLACARCSSTGALVLTEPVSAIAGGNHSLSPPKTERCSNCSGAGKVMCPTCLCTGMAMASEHDPRIDPFD

SEQ ID NO: 40025 - protein, 307 aa, Arabidopsis thaliana
  peptide (1)..(307): Ceres Seq. ID no. 13489078
  misc_feature (60)..(307): Homolog of NCBI NO: 30681288 NR Description: expressed protein [Arabidopsis thaliana]
  misc_feature (61)..(307): Homolog of NCBI NO: 8978349 NR Description: gene_id:K16F4.10~pir||T00468~similar to unknown
  misc_feature (55)..(307): Homolog of NCBI NO: 22326624 NR Description: expressed protein [Arabidopsis thaliana]
  misc_feature (1)..(307): Homolog of NCBI NO: 15240312 NR Description: expressed protein [Arabidopsis thaliana]
MSSLGRILSVSYPPDPYTWRFSQYKLSSSLGRNRRLRWRFTALDPESSSLDSESSADKFASGFCIIEGPETVQDFAKMQLQEIQDNIRSRRNKIFLHMEEVRRLRIQQRIKNTELGIINEEQEHELPNFPSFIPFLPPLTAANLKVYYATCFSLIAGIILFGGLLAPTLELKLGIGGTSYADFIQSLHLPMQLSQVDPIVASFSGGAVGVISALMVVEVNNVKQQEHKRCKYCLGTGYLACARCSSTGALVLTEPVSAIAGGNHSLSPPKTERCSNCSGAGKVMCPTCLCTGMAMASEHDPRIDPFD

SEQ ID NO: 40026 - protein, 230 aa, Arabidopsis thaliana
  peptide (1)..(230): Ceres Seq. ID no. 13489079
  misc_feature (1)..(230): Homolog of NCBI NO: 30681288 NR Description: expressed protein [Arabidopsis thaliana]
  misc_feature (1)..(230): Homolog of NCBI NO: 8978349 NR Description: gene_id:K16F4.10~pir||T00468~similar to unknown
  misc_feature (1)..(230): Homolog of NCBI NO: 22326624 NR Description: expressed protein [Arabidopsis thaliana]
  misc_feature (1)..(230): Homolog of NCBI NO: 15240312 NR Description: expressed protein [Arabidopsis thaliana]
MQLQEIQDNIRSRRNKIFLHMEEVRRLRIQQRIKNTELGIINEEQEHELPNFPSFIPFLPPLTAANLKVYYATCFSLIAGIILFGGLLAPTLELKLGIGGTSYADFIQSLHLPMQLSQVDPIVASFSGGAVGVISALMVVEVNNVKQQEHKRCKYCLGTGYLACARCSSTGALVLTEPVSAIAGGNHSLSPPKTERCSNCSGAGKVMCPTCLCTGMAMASEHDPRIDPFD

SEQ ID NO: 40027 - DNA, 1165 bp, Arabidopsis thaliana
  misc_feature (1)..(1165): Ceres Seq. ID no. 13496307
  misc_feature: MA Experiment ID: 108461 Result: Up-regulated in Transcription
  misc_feature: MA Experiment 108461 PARAMETER Experiment Name: At_Germinating_Seeds_cDNA_P Parameter: Age (day) Value: 1 vs. 0
  misc_feature: MA Experiment 108461 PARAMETER Experiment Name: At_Germinating_Seeds_cDNA_P Parameter: Tissue Value: Germinating Seeds
  misc_feature: MA Experiment ID: 108462 Result: Up-regulated in Transcription
  misc_feature: MA Experiment 108462 PARAMETER Experiment Name: At_Germinating_Seeds_cDNA_P Parameter: Age (day) Value: 2 vs. 0
  misc_feature: MA Experiment 108462 PARAMETER Experiment Name: At_Germinating_Seeds_cDNA_P Parameter: Tissue Value: Germinating Seeds
  misc_feature: MA Experiment ID: 20000111 Result: Down-regulated in Transcription
  misc_feature: MA Experiment 20000111 PARAMETER Experiment Name: At_42deg_Heat_cDNA_P Parameter: Temperature (deg C) Value: 42 vs. 22
  misc_feature: MA Experiment 20000111 PARAMETER Experiment Name: At_42deg_Heat_cDNA_P Parameter: Timepoint (hr) Value: 6
  misc_feature: MA Experiment 20000111 PARAMETER Experiment Name: At_42deg_Heat_cDNA_P Parameter: Tissue Value: Aerial
  misc_feature: MA Experiment ID: 20000113 Result: Down-regulated in Transcription
  misc_feature: MA Experiment 20000113 PARAMETER Experiment Name: At_42deg_Heat_cDNA_P Parameter: Temperature (deg C) Value: 42 vs. 22
  misc_feature: MA Experiment 20000113 PARAMETER Experiment Name: At_42deg_Heat_cDNA_P Parameter: Timepoint (hr) Value: 8
  misc_feature: MA Experiment 20000113 PARAMETER Experiment Name: At_42deg_Heat_cDNA_P Parameter: Tissue Value: Aerial
  misc_feature: MA Experiment ID: 20000179 Result: Up-regulated in Transcription
  misc_feature: MA Experiment 20000179 PARAMETER Experiment Name: At_Germinating_Seeds_P Parameter: Age (hr) Value: 6 vs. 0
  misc_feature: MA Experiment 20000179 PARAMETER Experiment Name: At_Germinating_Seeds_P Parameter: Tissue Value: Germinating Seeds
  misc_feature: MA Experiment ID: 20000180 Result: Up-regulated in Transcription
  misc_feature: MA Experiment 20000180 PARAMETER Experiment Name: At_Germinating_Seeds_P Parameter: Age (hr) Value: 24 vs. 0
  misc_feature: MA Experiment 20000180 PARAMETER Experiment Name: At_Germinating_Seeds_P Parameter: Tissue Value: Germinating Seeds
  misc_feature: MA Experiment ID: 20000227 Result: Up-regulated in Transcription
  misc_feature: MA Experiment 20000227 PARAMETER Experiment Name: At_Root-Tips-vs-Tops_P Parameter: Tissue Value: Root Tips vs. Root Tops
  misc_feature: MA Experiment ID: 20000235 Result: Up-regulated in Transcription
  misc_feature: MA Experiment 20000235 PARAMETER Experiment Name: At_Siliques_P Parameter: Age (day) Value: 21
  misc_feature: MA Experiment 20000235 PARAMETER Experiment Name: At_Siliques_P Parameter: Organism Value: A. thaliana
  misc_feature: MA Experiment 20000235 PARAMETER Experiment Name: At_Siliques_P Parameter: Plant Line Value: WS
  misc_feature: MA Experiment 20000235 PARAMETER Experiment Name: At_Siliques_P Parameter: Tissue Value: 5-10mm Siliques vs. Whole Plant
  misc_feature: MA Experiment ID: 20001560 Result: Up-regulated in Transcription
  misc_feature: MA Experiment 20001560 PARAMETER Experiment Name: At_Drought_Soil_Dry_P Parameter: Age (day) Value: 28
  misc_feature: MA Experiment 20001560 PARAMETER Experiment Name: At_Drought_Soil_Dry_P Parameter: Organism Value: A. thaliana
  misc_feature: MA Experiment 20001560 PARAMETER Experiment Name: At_Drought_Soil_Dry_P Parameter: Plant Line Value: WS
  misc_feature: MA Experiment 20001560 PARAMETER Experiment Name: At_Drought_Soil_Dry_P Parameter: Post Timepoint (hr) Value: None
  misc_feature: MA Experiment 20001560 PARAMETER Experiment Name: At_Drought_Soil_Dry_P Parameter: Post-Treatment Value: None
  misc_feature: MA Experiment 20001560 PARAMETER Experiment Name: At_Drought_Soil_Dry_P Parameter: Timepoint (day) Value: 14
  misc_feature: MA Experiment 20001560 PARAMETER Experiment Name: At_Drought_Soil_Dry_P Parameter: Treatment Value: Drought vs. No Drought
  misc_feature: MA Experiment ID: 20001911 Result: Down-regulated in Transcription
  misc_feature: MA Experiment 20001911 PARAMETER Experiment Name: At_Drought_Reproduction_P Parameter: Age (day) Value: 40
  misc_feature: MA Experiment 20001911 PARAMETER Experiment Name: At_Drought_Reproduction_P Parameter: Organism Value: A. thaliana
  misc_feature: MA Experiment 20001911 PARAMETER Experiment Name: At_Drought_Reproduction_P Parameter: Plant Line Value: WS
  misc_feature: MA Experiment 20001911 PARAMETER Experiment Name: At_Drought_Reproduction_P Parameter: Timepoint (day) Value: 10
  misc_feature: MA Experiment 20001911 PARAMETER Experiment Name: At_Drought_Reproduction_P Parameter: Tissue Value: Flowers
  misc_feature: MA Experiment 20001911 PARAMETER Experiment Name: At_Drought_Reproduction_P Parameter: Treatment Value: Drought vs. No Drought
atgacccatattctcttgactcgtgaggttaaatgtaaatcactttaaaatataaaaacgtaccttgtcagttttgagactcaaaaggacttgaaatattgaaatccctattctttacgcgtactcgagatttttcgctcttgagagaatcacttcgacaatgtcggtaacggctgctttcattgattcggatcaaactcagcacaacattcttatggattcccaatcaactgtctccggtgtgaaaactgtcaagattagcaatgtttcactaattgtttctaagaaagatgtcaaagagttcttttctttctctggtgacattcaatacgtcgagatgcgaagtgagacacaagagagtcaggtcgcatatgttacttttaaggattcacaaggagctgaaactgcaatgctcttaacgggagctgtcattgcagatcttcgtgttagtataactcctgctgttaactatcagctaccaccagaagcccttgcacttgactcggaacattcgtttaatggtttttctgtcaagaaagctgaagatgtggtgaacatcatggtgggaagaggttatgctcttggaaaagacgccatggagaaagccaaagcatttgatgacagacacaacttgatctcaaacgcttctgcaaccattgcatcgcttgacgataagatgggtctgagcgaaaagctaagcataggaacaactgtggttaatgagaagttgagagatatcgatgagcgatatcaggtgagggagataacgaaatctgctttagcagctgctgaagagacagcaatcagtgcaagaacggctttaatggcaaacccttatgtatcaagtggagcttcgtggttttcaaacgcgtttggcgcagtgacaaaggcggttaaagagaaagttgagaatggaggagaaggaagaaaggagatcatcacacttgatccctcttcacccaaagttcctgctgtagttcctgttaagctcggttgatgcagatctcatcaaaccaatcggatctcgactaaattctttgataggtttgttgttcatatatatgctttcgtatgctaaagagaagataaaaagacataaaccatgaaaggtgttgttacattcaaccagcatttgttcctctcttgaaagagattattaagattc

SEQ ID NO: 40028 - protein, 278 aa, Arabidopsis thaliana; identical to SEQ ID NO: 23413
  peptide (1)..(278): Ceres Seq. ID no. 13496308
  misc_feature (31)..(98): Pfam Name: RNA recognition motif. (a.k.a. RRM, RBD, or RNP domain) Pfam Description: RNA recognition motif. (a.k.a. RRM, RBD, or RNP
  misc_feature (30)..(247): Homolog of NCBI NO: 18414951 NR Description: RNA recognition motif (RRM)-containing protein
  misc_feature (28)..(263): Homolog of NCBI NO: 38344181 NR Description: OSJNBa0053K19.20 [Oryza sativa (japonica
  misc_feature (26)..(266): Homolog of NCBI NO: 38347069 NR Description: OSJNBa0006A01.10 [Oryza sativa (japonica
  misc_feature (28)..(260): Homolog of NCBI NO: 18071362 NR Description: putative splicing regulatory protein
  misc_feature (60)..(278): Homolog of NCBI NO: 25404689 NR Description: unknown protein, 64612-65506 [imported] -
  misc_feature (60)..(278): Homolog of NCBI NO: 30697600 NR Description: RNA recognition motif (RRM)-containing protein
  misc_feature (1)..(248): Homolog of NCBI NO: 26450623 NR Description: unknown protein [Arabidopsis thaliana]
  misc_feature (1)..(278): Homolog of NCBI NO: 30697595 NR Description: RNA recognition motif (RRM)-containing protein
  misc_feature (1)..(278): Homolog of NCBI NO: 30697598 NR Description: RNA recognition motif (RRM)-containing protein
  misc_feature (1)..(278): Homolog of NCBI NO: 18408904 NR Description: RNA recognition motif (RRM)-containing protein

SEQ ID NO: 40029 - protein, 260 aa, Arabidopsis thaliana; identical to SEQ ID NO: 23414
  peptide (1)..(260): Ceres Seq. ID no. 13496309
  misc_feature (13)..(80): Pfam Name: RNA recognition motif. (a.k.a. RRM, RBD, or RNP domain) Pfam Description: RNA recognition motif. (a.k.a. RRM, RBD, or RNP
  misc_feature (12)..(229): Homolog of NCBI NO: 18414951 NR Description: RNA recognition motif (RRM)-containing protein
  misc_feature (10)..(245): Homolog of NCBI NO: 38344181 NR Description: OSJNBa0053K19.20 [Oryza sativa (japonica
  misc_feature (8)..(248): Homolog of NCBI NO: 38347069 NR Description: OSJNBa0006A01.10 [Oryza sativa (japonica
  misc_feature (10)..(242): Homolog of NCBI NO: 18071362 NR Description: putative splicing regulatory protein
  misc_feature (42)..(260): Homolog of NCBI NO: 25404689 NR Description: unknown protein, 64612-65506 [imported] -
  misc_feature (42)..(260): Homolog of NCBI NO: 30697600 NR Description: RNA recognition motif (RRM)-containing protein
  misc_feature (1)..(230): Homolog of NCBI NO: 26450623 NR Description: unknown protein [Arabidopsis thaliana]
  misc_feature (1)..(260): Homolog of NCBI NO: 30697595 NR Description: RNA recognition motif (RRM)-containing protein
  misc_feature (1)..(260): Homolog of NCBI NO: 30697598 NR Description: RNA recognition motif (RRM)-containing protein
  misc_feature (1)..(260): Homolog of NCBI NO: 18408904 NR Description: RNA recognition motif (RRM)-containing protein

SEQ ID NO: 40030 - protein, 219 aa, Arabidopsis thaliana; identical to SEQ ID NO: 23415
  peptide (1)..(219): Ceres Seq. ID no. 13496310
  misc_feature (1)..(188): Homolog of NCBI NO: 18414951 NR Description: RNA recognition motif (RRM)-containing protein
  misc_feature (1)..(204): Homolog of NCBI NO: 38344181 NR Description: OSJNBa0053K19.20 [Oryza sativa (japonica
  misc_feature (1)..(207): Homolog of NCBI NO: 38347069 NR Description: OSJNBa0006A01.10 [Oryza sativa (japonica
  misc_feature (1)..(201): Homolog of NCBI NO: 18071362 NR Description: putative splicing regulatory protein
  misc_feature (1)..(219): Homolog of NCBI NO: 25404689 NR Description: unknown protein, 64612-65506 [imported] -
  misc_feature (1)..(219): Homolog of NCBI NO: 30697600 NR Description: RNA recognition motif (RRM)-containing protein
  misc_feature (1)..(189): Homolog of NCBI NO: 26450623 NR Description: unknown protein [Arabidopsis thaliana]
  misc_feature (1)..(219): Homolog of NCBI NO: 30697595 NR Description: RNA recognition motif (RRM)-containing protein
  misc_feature (1)..(219): Homolog of NCBI NO: 30697598 NR Description: RNA recognition motif (RRM)-containing protein
  misc_feature (1)..(219): Homolog of NCBI NO: 18408904 NR Description: RNA recognition motif (RRM)-containing protein

SEQ ID NO: 40031 - DNA, 1616 bp, Arabidopsis thaliana
  misc_feature (1)..(1616): Ceres Seq. ID no. 13489064
  misc_feature: MA Experiment ID: 108576 Result: Up-regulated in Transcription
  misc_feature: MA Experiment 108576 PARAMETER Experiment Name: At_42deg_Heat_cDNA_P Parameter: Temperature (deg C) Value: 42 vs. 22
  misc_feature: MA Experiment 108576 PARAMETER Experiment Name: At_42deg_Heat_cDNA_P Parameter: Timepoint (hr) Value: 1
  misc_feature: MA Experiment 108576 PARAMETER Experiment Name: At_42deg_Heat_cDNA_P Parameter: Tissue Value: Aerial
  misc_feature: MA Experiment ID: 108577 Result: Up-regulated in Transcription
  misc_feature: MA Experiment 108577 PARAMETER Experiment Name: At_42deg_Heat_cDNA_P Parameter: Temperature (deg C) Value: 42 vs. 22
  misc_feature: MA Experiment 108577 PARAMETER Experiment Name: At_42deg_Heat_cDNA_P Parameter: Timepoint (hr) Value: 6
  misc_feature: MA Experiment 108577 PARAMETER Experiment Name: At_42deg_Heat_cDNA_P Parameter: Tissue Value: Aerial
  misc_feature: MA Experiment ID: 20000093 Result: Up-regulated in Transcription
  misc_feature: MA Experiment 20000093 PARAMETER Experiment Name: At_42deg_Heat_cDNA_P Parameter: Temperature (deg C) Value: 42 vs. 22
  misc_feature: MA Experiment 20000093 PARAMETER Experiment Name: At_42deg_Heat_cDNA_P Parameter: Timepoint (hr) Value: 0.5
  misc_feature: MA Experiment 20000093 PARAMETER Experiment Name: At_42deg_Heat_cDNA_P Parameter: Tissue Value: Aerial
  misc_feature: MA Experiment ID: 20000111 Result: Up-regulated in Transcription
  misc_feature: MA Experiment 20000111 PARAMETER Experiment Name: At_42deg_Heat_cDNA_P Parameter: Temperature (deg C) Value: 42 vs. 22
  misc_feature: MA Experiment 20000111 PARAMETER Experiment Name: At_42deg_Heat_cDNA_P Parameter: Timepoint (hr) Value: 6
  misc_feature: MA Experiment 20000111 PARAMETER Experiment Name: At_42deg_Heat_cDNA_P Parameter: Tissue Value: Aerial
  misc_feature: MA Experiment ID: 20000112 Result: Up-regulated in Transcription
  misc_feature: MA Experiment 20000112 PARAMETER Experiment Name: At_42deg_Heat_cDNA_P Parameter: Temperature (deg C) Value: 42 vs. 22
  misc_feature: MA Experiment 20000112 PARAMETER Experiment Name: At_42deg_Heat_cDNA_P Parameter: Timepoint (hr) Value: 2
  misc_feature: MA Experiment 20000112 PARAMETER Experiment Name: At_42deg_Heat_cDNA_P Parameter: Tissue Value: Aerial
  misc_feature: MA Experiment ID: 20000144 Result: Up-regulated in Transcription
  misc_feature: MA Experiment 20000144 PARAMETER Experiment Name: At_42deg_Heat_cDNA_P Parameter: Temperature (deg C) Value: 42 vs. 22
  misc_feature: MA Experiment 20000144 PARAMETER Experiment Name: At_42deg_Heat_cDNA_P Parameter: Timepoint (hr) Value: 1
  misc_feature: MA Experiment 20000144 PARAMETER Experiment Name: At_42deg_Heat_cDNA_P Parameter: Tissue Value: Aerial
  misc_feature: MA Experiment ID: 20000171 Result: Up-regulated in Transcription
  misc_feature: MA Experiment 20000171 PARAMETER Experiment Name: At_42deg_Heat_P Parameter: Age (day) Value: 14
  misc_feature: MA Experiment 20000171 PARAMETER Experiment Name: At_42deg_Heat_P Parameter: Organism Value: A. thaliana
  misc_feature: MA Experiment 20000171 PARAMETER Experiment Name: At_42deg_Heat_P Parameter: Plant Line Value: WS
  misc_feature: MA Experiment 20000171 PARAMETER Experiment Name: At_42deg_Heat_P Parameter: Temperature (deg C) Value: 42 vs. 22
  misc_feature: MA Experiment 20000171 PARAMETER Experiment Name: At_42deg_Heat_P Parameter: Timepoint (hr) Value: 1
  misc_feature: MA Experiment 20000171 PARAMETER Experiment Name: At_42deg_Heat_P Parameter: Tissue Value: Aerial
  misc_feature: MA Experiment ID: 20000173 Result: Up-regulated in Transcription
  misc_feature: MA Experiment 20000173 PARAMETER Experiment Name: At_42deg_Heat_P Parameter: Age (day) Value: 14
  misc_feature: MA Experiment 20000173 PARAMETER Experiment Name: At_42deg_Heat_P Parameter: Organism Value: A. thaliana
  misc_feature: MA Experiment 20000173 PARAMETER Experiment Name: At_42deg_Heat_P Parameter: Plant Line Value: WS
  misc_feature: MA Experiment 20000173 PARAMETER Experiment Name: At_42deg_Heat_P Parameter: Temperature (deg C) Value: 42 vs. 22
  misc_feature: MA Experiment 20000173 PARAMETER Experiment Name: At_42deg_Heat_P Parameter: Timepoint (hr) Value: 6
  misc_feature: MA Experiment 20000173 PARAMETER Experiment Name: At_42deg_Heat_P Parameter: Tissue Value: Aerial
  misc_feature: MA Experiment ID: 20000286 Result: Up-regulated in Transcription
  misc_feature: MA Experiment 20000286 PARAMETER Experiment Name: At_Open_Flower_P Parameter: Age (day) Value: 21
  misc_feature: MA Experiment 20000286 PARAMETER Experiment Name: At_Open_Flower_P Parameter: Plant Line Value: WS
  misc_feature: MA Experiment 20000286 PARAMETER Experiment Name: At_Open_Flower_P Parameter: Tissue Value: Half Open vs. Whole Plant
  misc_feature: MA Experiment ID: 20000794 Result: Up-regulated in Transcription
  misc_feature: MA Experiment 20000794 PARAMETER Experiment Name: At_Petals_P Parameter: Age (day) Value: 23-25 days
  misc_feature: MA Experiment 20000794 PARAMETER Experiment Name: At_Petals_P Parameter: Plant Line Value: WS
  misc_feature: MA Experiment 20000794 PARAMETER Experiment Name: At_Petals_P Parameter: Tissue Value: Petals vs. Whole plant
aaggagaatcattttcgtcttctacttagttttcttcaactcgatttctctgctccatcttcttcctcgtcttctcattctctctcgctctggcacagtagaaactgagctcacgaaagcaggtagtcagtgtttttgtttcgaactcttccaacatgcagaaggaaattgctggtgatgctccatcagcaccaaccactcgtgttcggcatcggaagcgaaacagcgatgttggtgcaggggcaggcaaaccaaatggaaaccatttacttgtcaatgacagcaaaaaatacaaatcgtttctcattcgagcatactccactttctggatgataggtggttttgctcttatagtttacctgggtcatctctacattacagccatggtggttgttattcagatattcatggcacgagaactttttaatttgctgagaaaaactcatgaagataaacagctccctggttttagattactgaattggcacttcttttttacagcaatgctctttgtatatggtcgaatacttagtcaacggctagtcaacactgtgactccagacaaagtcctatatcgactggtcacaagcctcatcaaataccacatggcaatctgttactccttgtatatttctggctttgtttggtttattctcacgctgaaaaagaagatgtacaaatatcagtttagccaatatgcatggacacatatgatattaattgtggtgtttactcagtcctcattcactgtcgccaacatctttgaaggaatcttctggtttcttcttcctgcatcacttatcgtcatcaatgacatatttgcatatatctgtggtttcttctttggaagaacaccgttgatcaagttatcaccaaagaaaacatgggagggtttcattggagcttctattaccacagtgatttctgcattcctgcttgcaaatataatgggtcgtttcctgtggctgacatgtcccagagaggatctatcgacaggctggctcctctgtgaccctggtccactgttcaagcaagagacacatgctttaccaggatggatttctgattggctcccttggaaggaaatttcgattctaccagtccagtggcatgctctatgtcttggattgttcgcctctataatagctccttttggtggcttctttgccagtggtttcaaaagagcattcaaaatcaaggactttggtgatagtattcccggacatggcggaattacagatagaatggattgtcagatggtgatggctgtttttgcctatatatatcatcaatcgtttgttgtacctgaagtcctctctgtggataagctcttagaccagataatcacaagcctgacattggaagaacaacaagcgctactcgtgaagcttggccaaatgttgcaggaaaaggttattggatcttagatcatcacaacccgtcattgtataccatattactctgcttccgtgttacgtctgaaaattattcaaaagaaagagaaaagaaaaaaaaaagtagatttataagtttttttgtttttctcattgtggaattcctctgtatagtactggtacatgctttatgaaagaaaagaagctcactacaattctctt

SEQ ID NO: 40032 - protein, 423 aa, Arabidopsis thaliana
  peptide (1)..(423): Ceres Seq. ID no. 13489065
  misc_feature (43)..(421): Homolog of NCBI NO: 22035624 NR Description: phosphatidate cytidylyltransferase 1
  misc_feature (277)..(367): Homolog of NCBI NO: 37532798 NR Description: putative phosphatidate cytidylyltransferase
  misc_feature (4)..(132): Homolog of NCBI NO: 37532798 NR Description: putative phosphatidate cytidylyltransferase
  misc_feature (44)..(416): Homolog of NCBI NO: 40743157 NR Description: hypothetical protein AN5166.2 [Aspergillus
  misc_feature (10)..(422): Homolog of NCBI NO: 15236874 NR Description: phosphatidate cytidylyltransferase, putative
  misc_feature (4)..(416): Homolog of NCBI NO: 20303635 NR Description: putative CDP-diacylglycerol synthetase
  misc_feature (1)..(422): Homolog of NCBI NO: 3121837 NR Description: Phosphatidate cytidylyltransferase synthetase) (CDP-diglyceride pyrophosphorylase) synthase) (CDS) (CTP:phosphatidate cytidylyltransferase) (CDP-DAG
  misc_feature (1)..(420): Homolog of NCBI NO: 7484839 NR Description: CDP-diacylglycerol synthetase homolog F24O1.17 -
  misc_feature (1)..(420): Homolog of NCBI NO: 30696710 NR Description: phosphatidate cytidylyltransferase (CDS)
  misc_feature (1)..(423): Homolog of NCBI NO: 15235611 NR Description: phosphatidate cytidylyltransferase, putative
MQKEIAGDAPSAPTTRVRHRKRNSDVGAGAGKPNGNHLLVNDSKKYKSFLIRAYSTFWMIGGFALIVYLGHLYITAMVVVIQIFMARELFNLLRKTHEDKQLPGFRLLNWHFFFTAMLFVYGRILSQRLVNTVTPDKVLYRLVTSLIKYHMAICYSLYISGFVWFILTLKKKMYKYQFSQYAWTHMILIVVFTQSSFTVANIFEGIFWFLLPASLIVINDIFAYICGFFFGRTPLIKLSPKKTWEGFIGASITTVISAFLLANIMGRFLWLTCPREDLSTGWLLCDPGPLFKQETHALPGWISDWLPWKEISILPVQWHALCLGLFASIIAPFGGFFASGFKRAFKIKDFGDSIPGHGGITDRMDCQMVMAVFAYIYHQSFVVPEVLSVDKLLDQIITSLTLEEQQALLVKLGQMLQEKVIGS

SEQ ID NO: 40033 - protein, 365 aa, Arabidopsis thaliana
  peptide (1)..(365): Ceres Seq. ID no. 13489066
  misc_feature (1)..(363): Homolog of NCBI NO: 22035624 NR Description: phosphatidate cytidylyltransferase 1
  misc_feature (219)..(309): Homolog of NCBI NO: 37532798 NR Description: putative phosphatidate cytidylyltransferase
  misc_feature (1)..(74): Homolog of NCBI NO: 37532798 NR Description: putative phosphatidate cytidylyltransferase
  misc_feature (1)..(358): Homolog of NCBI NO: 40743157 NR Description: hypothetical protein AN5166.2 [Aspergillus
  misc_feature (1)..(364): Homolog of NCBI NO: 15236874 NR Description: phosphatidate cytidylyltransferase, putative
  misc_feature (1)..(358): Homolog of NCBI NO: 20303635 NR Description: putative CDP-diacylglycerol synthetase
  misc_feature (1)..(364): Homolog of NCBI NO: 3121837 NR Description: Phosphatidate cytidylyltransferase synthetase) (CDP-diglyceride pyrophosphorylase) synthase) (CDS) (CTP:phosphatidate cytidylyltransferase) (CDP-DAG
  misc_feature (1)..(362): Homolog of NCBI NO: 7484839 NR Description: CDP-diacylglycerol synthetase homolog F24O1.17 -
  misc_feature (1)..(362): Homolog of NCBI NO: 30696710 NR Description: phosphatidate cytidylyltransferase (CDS)
  misc_feature (1)..(365): Homolog of NCBI NO: 15235611 NR Description: phosphatidate cytidylyltransferase, putative
MIGGFALIVYLGHLYITAMVVVIQIFMARELFNLLRKTHEDKQLPGFRLLNWHFFFTAMLFVYGRILSQRLVNTVTPDKVLYRLVTSLIKYHMAICYSLYISGFVWFILTLKKKMYKYQFSQYAWTHMILIVVFTQSSFTVANIFEGIFWFLLPASLIVINDIFAYICGFFFGRTPLIKLSPKKTWEGFIGASITTVISAFLLANIMGRFLWLTCPREDLSTGWLLCDPGPLFKQETHALPGWISDWLPWKEISILPVQWHALCLGLFASIIAPFGGFFASGFKRAFKIKDFGDSIPGHGGITDRMDCQMVMAVFAYIYHQSFVVPEVLSVDKLLDQIITSLTLEEQQALLVKLGQMLQEKVIGS

SEQ ID NO: 40034 - protein, 347 aa, Arabidopsis thaliana
  peptide (1)..(347): Ceres Seq. ID no. 13489067
  misc_feature (1)..(345): Homolog of NCBI NO: 22035624 NR Description: phosphatidate cytidylyltransferase 1
  misc_feature (201)..(291): Homolog of NCBI NO: 37532798 NR Description: putative phosphatidate cytidylyltransferase
  misc_feature (1)..(56): Homolog of NCBI NO: 37532798 NR Description: putative phosphatidate cytidylyltransferase
  misc_feature (1)..(340): Homolog of NCBI NO: 40743157 NR Description: hypothetical protein AN5166.2 [Aspergillus
  misc_feature (1)..(346): Homolog of NCBI NO: 15236874 NR Description: phosphatidate cytidylyltransferase, putative
  misc_feature (1)..(340): Homolog of NCBI NO: 20303635 NR Description: putative CDP-diacylglycerol synthetase
  misc_feature (1)..(346): Homolog of NCBI NO: 3121837 NR Description: Phosphatidate cytidylyltransferase synthetase) (CDP-diglyceride pyrophosphorylase) synthase) (CDS) (CTP:phosphatidate cytidylyltransferase) (CDP-DAG
  misc_feature (1)..(344): Homolog of NCBI NO: 7484839 NR Description: CDP-diacylglycerol synthetase homolog F24O1.17 -
  misc_feature (1)..(344): Homolog of NCBI NO: 30696710 NR Description: phosphatidate cytidylyltransferase (CDS)
  misc_feature (1)..(347): Homolog of NCBI NO: 15235611 NR Description: phosphatidate cytidylyltransferase, putative
MVVVIQIFMARELFNLLRKTHEDKQLPGFRLLNWHFFFTAMLFVYGRILSQRLVNTVTPDKVLYRLVTSLIKYHMAICYSLYISGFVWFILTLKKKMYKYQFSQYAWTHMILIVVFTQSSFTVANIFEGIFWFLLPASLIVINDIFAYICGFFFGRTPLIKLSPKKTWEGFIGASITTVISAFLLANIMGRFLWLTCPREDLSTGWLLCDPGPLFKQETHALPGWISDWLPWKEISILPVQWHALCLGLFASIIAPFGGFFASGFKRAFKIKDFGDSIPGHGGITDRMDCQMVMAVFAYIYHQSFVVPEVLSVDKLLDQIITSLTLEEQQALLVKLGQMLQEKVIGS

SEQ ID NO: 40035 - DNA, 1265 bp, Arabidopsis thaliana
  misc_feature (1)..(1265): Ceres Seq. ID no. 13488746
  misc_feature: MA Experiment ID: 108435 Result: Up-regulated in Transcription
  misc_feature: MA Experiment 108435 PARAMETER Experiment Name: At_stm_Mutants_cDNA_P Parameter: Plant Line Value: wt Landsburg vs stm
  misc_feature: MA Experiment 108435 PARAMETER Experiment Name: At_stm_Mutants_cDNA_P Parameter: Tissue Value: Shoot Apical Meristem Region
  misc_feature: MA Experiment ID: 108577 Result: Down-regulated in Transcription
  misc_feature: MA Experiment 108577 PARAMETER Experiment Name: At_42deg_Heat_cDNA_P Parameter: Temperature (deg C) Value: 42 vs. 22
  misc_feature: MA Experiment 108577 PARAMETER Experiment Name: At_42deg_Heat_cDNA_P Parameter: Timepoint (hr) Value: 6
  misc_feature: MA Experiment 108577 PARAMETER Experiment Name: At_42deg_Heat_cDNA_P Parameter: Tissue Value: Aerial
  misc_feature: MA Experiment ID: 108585 Result: Up-regulated in Transcription
  misc_feature: MA Experiment 108585 PARAMETER Experiment Name: At_5mM_NaNP_cDNA_P Parameter: Timepoint (hr) Value: 6
  misc_feature: MA Experiment 108585 PARAMETER Experiment Name: At_5mM_NaNP_cDNA_P Parameter: Tissue Value: Aerial
  misc_feature: MA Experiment 108585 PARAMETER Experiment Name: At_5mM_NaNP_cDNA_P Parameter: Treatment Value: null
  misc_feature: MA Experiment ID: 108595 Result: Up-regulated in Transcription
  misc_feature: MA Experiment 108595 PARAMETER Experiment Name: At_Ler-pi_Ovule_cDNA_P Parameter: Plant Line Value: null
  misc_feature: MA Experiment ID: 108667 Result: Up-regulated in Transcription
  misc_feature: MA Experiment 108667 PARAMETER Experiment Name: At_2mM_SA_cDNA_P Parameter: Plant Line Value: WS
  misc_feature: MA Experiment 108667 PARAMETER Experiment Name: At_2mM_SA_cDNA_P Parameter: Timepoint (hr) Value: 1
  misc_feature: MA Experiment 108667 PARAMETER Experiment Name: At_2mM_SA_cDNA_P Parameter: Treatment Value: 2mM SA vs. No Treatment
  misc_feature: MA Experiment ID: 20000069 Result: Up-regulated in Transcription
  misc_feature: MA Experiment 20000069 PARAMETER Experiment Name: At_100uM_ABA_Mutants_cDNA_P Parameter: Plant Line Value: CS23
  misc_feature: MA Experiment 20000069 PARAMETER Experiment Name: At_100uM_ABA_Mutants_cDNA_P Parameter: Timepoint (hr) Value: 6
  misc_feature: MA Experiment 20000069 PARAMETER Experiment Name: At_100uM_ABA_Mutants_cDNA_P Parameter: Tissue Value: Aerial
  misc_feature: MA Experiment 20000069 PARAMETER Experiment Name: At_100uM_ABA_Mutants_cDNA_P Parameter: Treatment Value: 100uM ABA vs. No Treatment
  misc_feature: MA Experiment ID: 20000070 Result: Up-regulated in Transcription
  misc_feature: MA Experiment 20000070 PARAMETER Experiment Name: At_100uM_ABA_Mutants_cDNA_P Parameter: Plant Line Value: CS24
  misc_feature: MA Experiment 20000070 PARAMETER Experiment Name: At_100uM_ABA_Mutants_cDNA_P Parameter: Timepoint (hr) Value: 6
  misc_feature: MA Experiment 20000070 PARAMETER Experiment Name: At_100uM_ABA_Mutants_cDNA_P Parameter: Tissue Value: Aerial
  misc_feature: MA Experiment 20000070 PARAMETER Experiment Name: At_100uM_ABA_Mutants_cDNA_P Parameter: Treatment Value: 100uM ABA vs. No Treatment
  misc_feature: MA Experiment ID: 20000072 Result: Up-regulated in Transcription
  misc_feature: MA Experiment 20000072 PARAMETER Experiment Name: At_100uM_ABA_Mutants_cDNA_P Parameter: Plant Line Value: CS8105
  misc_feature: MA Experiment 20000072 PARAMETER Experiment Name: At_100uM_ABA_Mutants_cDNA_P Parameter: Timepoint (hr) Value: 6
  misc_feature: MA Experiment 20000072 PARAMETER Experiment Name: At_100uM_ABA_Mutants_cDNA_P Parameter: Tissue Value: Aerial
  misc_feature: MA Experiment 20000072 PARAMETER Experiment Name: At_100uM_ABA_Mutants_cDNA_P Parameter: Treatment Value: 100uM ABA vs. No Treatment
  misc_feature: MA Experiment ID: 20000088 Result: Up-regulated in Transcription
  misc_feature: MA Experiment 20000088 PARAMETER Experiment Name: At_100uM_ABA_Mutants_cDNA_P Parameter: Plant Line Value: Landsberg
  misc_feature: MA Experiment 20000088 PARAMETER Experiment Name: At_100uM_ABA_Mutants_cDNA_P Parameter: Timepoint (hr) Value: 6
  misc_feature: MA Experiment 20000088 PARAMETER Experiment Name: At_100uM_ABA_Mutants_cDNA_P Parameter: Tissue Value: Aerial
  misc_feature: MA Experiment 20000088 PARAMETER Experiment Name: At_100uM_ABA_Mutants_cDNA_P Parameter: Treatment Value: 100uM ABA vs. No Treatment
  misc_feature: MA Experiment ID: 20000111 Result: Down-regulated in Transcription
  misc_feature: MA Experiment 20000111 PARAMETER Experiment Name: At_42deg_Heat_cDNA_P Parameter: Temperature (deg C) Value: 42 vs. 22
  misc_feature: MA Experiment 20000111 PARAMETER Experiment Name: At_42deg_Heat_cDNA_P Parameter: Timepoint (hr) Value: 6
  misc_feature: MA Experiment 20000111 PARAMETER Experiment Name: At_42deg_Heat_cDNA_P Parameter: Tissue Value: Aerial
  misc_feature: MA Experiment ID: 20000117 Result: Up-regulated in Transcription
  misc_feature: MA Experiment 20000117 PARAMETER Experiment Name: At_100uM_ABA_Mutants_cDNA_P Parameter: Plant Line Value: Columbia
  misc_feature: MA Experiment 20000117 PARAMETER Experiment Name: At_100uM_ABA_Mutants_cDNA_P Parameter: Timepoint (hr) Value: 6
  misc_feature: MA Experiment 20000117 PARAMETER Experiment Name: At_100uM_ABA_Mutants_cDNA_P Parameter: Tissue Value: Aerial
  misc_feature: MA Experiment 20000117 PARAMETER Experiment Name: At_100uM_ABA_Mutants_cDNA_P Parameter: Treatment Value: 100uM ABA vs. No Treatment
  misc_feature: MA Experiment ID: 20000144 Result: Down-regulated in Transcription
  misc_feature: MA Experiment 20000144 PARAMETER Experiment Name: At_42deg_Heat_cDNA_P Parameter: Temperature (deg C) Value: 42 vs. 22
  misc_feature: MA Experiment 20000144 PARAMETER Experiment Name: At_42deg_Heat_cDNA_P Parameter: Timepoint (hr) Value: 1
  misc_feature: MA Experiment 20000144 PARAMETER Experiment Name: At_42deg_Heat_cDNA_P Parameter: Tissue Value: Aerial
  misc_feature: MA Experiment ID: 20000171 Result: Down-regulated in Transcription
  misc_feature: MA Experiment 20000171 PARAMETER Experiment Name: At_42deg_Heat_P Parameter: Age (day) Value: 14
  misc_feature: MA Experiment 20000171 PARAMETER Experiment Name: At_42deg_Heat_P Parameter: Organism Value: A. thaliana
  misc_feature: MA Experiment 20000171 PARAMETER Experiment Name: At_42deg_Heat_P Parameter: Plant Line Value: WS
  misc_feature: MA Experiment 20000171 PARAMETER Experiment Name: At_42deg_Heat_P Parameter: Temperature (deg C) Value: 42 vs. 22
  misc_feature: MA Experiment 20000171 PARAMETER Experiment Name: At_42deg_Heat_P Parameter: Timepoint (hr) Value: 1
  misc_feature: MA Experiment 20000171 PARAMETER Experiment Name: At_42deg_Heat_P Parameter: Tissue Value: Aerial
  misc_feature: MA Experiment ID: 20000173 Result: Down-regulated in Transcription
  misc_feature: MA Experiment 20000173 PARAMETER Experiment Name: At_42deg_Heat_P Parameter: Age (day) Value: 14
  misc_feature: MA Experiment 20000173 PARAMETER Experiment Name: At_42deg_Heat_P Parameter: Organism Value: A. thaliana
  misc_feature: MA Experiment 20000173 PARAMETER Experiment Name: At_42deg_Heat_P Parameter: Plant Line Value: WS
  misc_feature: MA Experiment 20000173 PARAMETER Experiment Name: At_42deg_Heat_P Parameter: Temperature (deg C) Value: 42 vs. 22
  misc_feature: MA Experiment 20000173 PARAMETER Experiment Name: At_42deg_Heat_P Parameter: Timepoint (hr) Value: 6
  misc_feature: MA Experiment 20000173 PARAMETER Experiment Name: At_42deg_Heat_P Parameter: Tissue Value: Aerial
  misc_feature: MA Experiment ID: 20000180 Result: Down-regulated in Transcription
  misc_feature: MA Experiment 20000180 PARAMETER Experiment Name: At_Germinating_Seeds_P Parameter: Age (hr) Value: 24 vs. 0
  misc_feature: MA Experiment 20000180 PARAMETER Experiment Name: At_Germinating_Seeds_P Parameter: Tissue Value: Germinating Seeds
  misc_feature: MA Experiment ID: 20000184 Result: Down-regulated in Transcription
  misc_feature: MA Experiment 20000184 PARAMETER Experiment Name: At_Shoots__P Parameter: Age (day) Value: 7
  misc_feature: MA Experiment 20000184 PARAMETER Experiment Name: At_Shoots__P Parameter: Tissue Value: Shoots vs. Whole Plant
  misc_feature: MA Experiment ID: 20000227 Result: Down-regulated in Transcription
  misc_feature: MA Experiment 20000227 PARAMETER Experiment Name: At_Root-Tips-vs-Tops_P Parameter: Tissue Value: Root Tips vs. Root Tops
  misc_feature: MA Experiment ID: 20000234 Result: Down-regulated in Transcription
  misc_feature: MA Experiment 20000234 PARAMETER Experiment Name: At_Siliques_P Parameter: Age (day) Value: 21
  misc_feature: MA Experiment 20000234 PARAMETER Experiment Name: At_Siliques_P Parameter: Organism Value: A. thaliana
  misc_feature: MA Experiment 20000234 PARAMETER Experiment Name: At_Siliques_P Parameter: Plant Line Value: WS
  misc_feature: MA Experiment 20000234 PARAMETER Experiment Name: At_Siliques_P Parameter: Tissue Value: Less Than 5mm Siliques vs. Whole Plant
  misc_feature: MA Experiment ID: 20000235 Result: Down-regulated in Transcription
  misc_feature: MA Experiment 20000235 PARAMETER Experiment Name: At_Siliques_P Parameter: Age (day) Value: 21
  misc_feature: MA Experiment 20000235 PARAMETER Experiment Name: At_Siliques_P Parameter: Organism Value: A. thaliana
  misc_feature: MA Experiment 20000235 PARAMETER Experiment Name: At_Siliques_P Parameter: Plant Line Value: WS
  misc_feature: MA Experiment 20000235 PARAMETER Experiment Name: At_Siliques_P Parameter: Tissue Value: 5-10mm Siliques vs. Whole Plant
  misc_feature: MA Experiment ID: 20000264 Result: Down-regulated in Transcription
  misc_feature: MA Experiment 20000264 PARAMETER Experiment Name: At_Open_Flower_P Parameter: Age (day) Value: 21
  misc_feature: MA Experiment 20000264 PARAMETER Experiment Name: At_Open_Flower_P Parameter: Plant Line Value: WS
  misc_feature: MA Experiment 20000264 PARAMETER Experiment Name: At_Open_Flower_P Parameter: Tissue Value: Open Flower vs. Whole Plant
  misc_feature: MA Experiment ID: 20000265 Result: Down-regulated in Transcription
  misc_feature: MA Experiment 20000265 PARAMETER Experiment Name: At_Open_Flower_P Parameter: Age (day) Value: 21
  misc_feature: MA Experiment 20000265 PARAMETER Experiment Name: At_Open_Flower_P Parameter: Plant Line Value: WS
  misc_feature: MA Experiment 20000265 PARAMETER Experiment Name: At_Open_Flower_P Parameter: Tissue Value: Closed Flower vs. Whole Plant
  misc_feature: MA Experiment ID: 20000286 Result: Down-regulated in Transcription
  misc_feature: MA Experiment 20000286 PARAMETER Experiment Name: At_Open_Flower_P Parameter: Age (day) Value: 21
  misc_feature: MA Experiment 20000286 PARAMETER Experiment Name: At_Open_Flower_P Parameter: Plant Line Value: WS
  misc_feature: MA Experiment 20000286 PARAMETER Experiment Name: At_Open_Flower_P Parameter: Tissue Value: Half Open vs. Whole Plant
  misc_feature: MA Experiment ID: 20000437 Result: Up-regulated in Transcription
  misc_feature: MA Experiment 20000437 PARAMETER Experiment Name: At_Drought_P Parameter: Age (day) Value: 8
  misc_feature: MA Experiment 20000437 PARAMETER Experiment Name: At_Drought_P Parameter: Organism Value: A. thaliana
  misc_feature: MA Experiment 20000437 PARAMETER Experiment Name: At_Drought_P Parameter: Plant Line Value: WS
  misc_feature: MA Experiment 20000437 PARAMETER Experiment Name: At_Drought_P Parameter: Timepoint (hr) Value: 24
  misc_feature: MA Experiment 20000437 PARAMETER Experiment Name: At_Drought_P Parameter: Tissue Value: Whole Plant
  misc_feature: MA Experiment 20000437 PARAMETER Experiment Name: At_Drought_P Parameter: Treatment Value: Drought vs. No Drought
  misc_feature: MA Experiment ID: 20000438 Result: Down-regulated in Transcription
  misc_feature: MA Experiment 20000438 PARAMETER Experiment Name: At_Shoots__P Parameter: Age (day) Value: 14
  misc_feature: MA Experiment 20000438 PARAMETER Experiment Name: At_Shoots__P Parameter: Tissue Value: Shoots vs. Whole Plant
  misc_feature: MA Experiment ID: 20000439 Result: Down-regulated in Transcription
  misc_feature: MA Experiment 20000439 PARAMETER Experiment Name: At_Roots__P Parameter: Age (day) Value: 14 vs. 21
  misc_feature: MA Experiment 20000439 PARAMETER Experiment Name: At_Roots__P Parameter: Organism Value: A. thaliana
  misc_feature: MA Experiment 20000439 PARAMETER Experiment Name: At_Roots__P Parameter: Tissue Value: Roots vs. Whole Plant
  misc_feature: MA Experiment ID: 20000441 Result: Up-regulated in Transcription
  misc_feature: MA Experiment 20000441 PARAMETER Experiment Name: At_1uM_BR-BRZ__P Parameter: Tissue Value: Shoot Apices
  misc_feature: MA Experiment 20000441 PARAMETER Experiment Name: At_1uM_BR-BRZ__P Parameter: Treatment Value: 1uM BR vs. No Treatment
  misc_feature: MA Experiment ID: 20000443 Result: Up-regulated in Transcription
  misc_feature: MA Experiment 20000443 PARAMETER Experiment Name: At_1uM_BR-BRZ__P Parameter: Tissue Value: Shoot Apices
  misc_feature: MA Experiment 20000443 PARAMETER Experiment Name: At_1uM_BR-BRZ__P Parameter: Treatment Value: 1uM BRZ vs. No Treatment
  misc_feature: MA Experiment ID: 20000452 Result: Up-regulated in Transcription
  misc_feature: MA Experiment 20000452 PARAMETER Experiment Name: At_CS6879_Shoots-Roots_P Parameter: Age (day) Value: 14
  misc_feature: MA Experiment 20000452 PARAMETER Experiment Name: At_CS6879_Shoots-Roots_P Parameter: Organism Value: A. thaliana
  misc_feature: MA Experiment 20000452 PARAMETER Experiment Name: At_CS6879_Shoots-Roots_P Parameter: Plant Line Value: CS6879 vs. WS
  misc_feature: MA Experiment 20000452 PARAMETER Experiment Name: At_CS6879_Shoots-Roots_P Parameter: Tissue Value: Shoots
  misc_feature: MA Experiment ID: 20000495 Result: Down-regulated in Transcription
  misc_feature: MA Experiment 20000495 PARAMETER Experiment Name: At_Guard_Cells_P Parameter: Harvest Date Value: 8/2/2002
  misc_feature: MA Experiment 20000495 PARAMETER Experiment Name: At_Guard_Cells_P Parameter: Organism Value: A. thaliana
  misc_feature: MA Experiment 20000495 PARAMETER Experiment Name: At_Guard_Cells_P Parameter: Tissue Value: Guard Cells vs. Leaves
  misc_feature: MA Experiment ID: 20000574 Result: Down-regulated in Transcription
  misc_feature: MA Experiment 20000574 PARAMETER Experiment Name: At_100uM_ABA_Mutants__P Parameter: Organism Value: A. thaliana
  misc_feature: MA Experiment 20000574 PARAMETER Experiment Name: At_100uM_ABA_Mutants__P Parameter: Plant Line Value: CS23 vs. Ler wt
  misc_feature: MA Experiment 20000574 PARAMETER Experiment Name: At_100uM_ABA_Mutants__P Parameter: Timepoint (hr) Value: N/A
  misc_feature: MA Experiment 20000574 PARAMETER Experiment Name: At_100uM_ABA_Mutants__P Parameter: Tissue Value: Whole Plant
  misc_feature: MA Experiment 20000574 PARAMETER Experiment Name: At_100uM_ABA_Mutants__P Parameter: Treatment Value: None
  misc_feature: MA Experiment ID: 20001248 Result: Up-regulated in Transcription
  misc_feature: MA Experiment 20001248 PARAMETER Experiment Name: At_Far-red-induction_P Parameter: Age (day) Value: 7
  misc_feature: MA Experiment 20001248 PARAMETER Experiment Name: At_Far-red-induction_P Parameter: Light Value: Far-red vs. White
  misc_feature: MA Experiment 20001248 PARAMETER Experiment Name: At_Far-red-induction_P Parameter: Organism Value: A. thaliana
  misc_feature: MA Experiment 20001248 PARAMETER Experiment Name: At_Far-red-induction_P Parameter: Plant Line Value: Columbia
  misc_feature: MA Experiment 20001248 PARAMETER Experiment Name: At_Far-red-induction_P Parameter: Timepoint (hr) Value: 4
  misc_feature: MA Experiment 20001248 PARAMETER Experiment Name: At_Far-red-induction_P Parameter: Tissue Value: Whole Plant
  misc_feature: MA Experiment ID: 20001911 Result: Up-regulated in Transcription
  misc_feature: MA Experiment 20001911 PARAMETER Experiment Name: At_Drought_Reproduction_P Parameter: Age (day) Value: 40
  misc_feature: MA Experiment 20001911 PARAMETER Experiment Name: At_Drought_Reproduction_P Parameter: Organism Value: A. thaliana
  misc_feature: MA Experiment 20001911 PARAMETER Experiment Name: At_Drought_Reproduction_P Parameter: Plant Line Value: WS
  misc_feature: MA Experiment 20001911 PARAMETER Experiment Name: At_Drought_Reproduction_P Parameter: Timepoint (day) Value: 10
  misc_feature: MA Experiment 20001911 PARAMETER Experiment Name: At_Drought_Reproduction_P Parameter: Tissue Value: Flowers
  misc_feature: MA Experiment 20001911 PARAMETER Experiment Name: At_Drought_Reproduction_P Parameter: Treatment Value: Drought vs. No Drought
attttaagataagaataaaactaaataaggaaaaagaaggataattaggtcatcttcaccttcctcgttgtctcctcacactgtaaaagacttgaagctcatataaaatctcaagcttctatctatttcttctttcatcatcatcatcatcactctctcttcttcttctctctattccatggctttagtacgtgaacgtcgtcagctaaatctccgtcttcctcttcctccaatctccgaccgccgcttctccacctcttcctcctcagccaccaccaccaccgtcgctggctgtaacggaatctccgcttgtgatctcgagaaactcaacgttctcggatgcggaaacggcgggattgtttacaaagtccgtcataaaaccacatcggagatctacgctttgaaaacagttaacggcgacatggatccgattttcacaagacagttgatgcgagagatggagattctccgccgtacagattcaccgtacgtcgttaagtgtcacggaatcttcgagaaacctgtcgtcggtgaagtatcgattctaatggagtatatggacggcggaaccctagaatcactacgcggcggtgtaacggagcaaaaactcgccggattcgctaaacagatcttaaaaggattaagctatttacacgctcttaagatcgttcatcgtgatatcaaaccggcgaatcttcttctcaattcgaaaaacgaagttaaaatcgctgatttcggagttagtaagatcttagtccgatcattagattcgtgtaattcgtatgttggtacttgtgcttatatgagtccggagaggtttgattcggaatcttccggtggaagctctgatatctacgccggagatatctggagtttcggattgatgatgcttgagcttctcgttggtcattttcctttgcttccgccgggacagagacctgattgggcgacgttgatgtgcgcggtgtgttttggagaaccgccgcgagcgccggaggggtgttctgaagagtttaggagcttcgttgagtgttgtctccgtaaagattcgagtaagcgatggacggcgccgcagcttcttgctcatccttttctccgggaagatctttgattcgattccttttgtaacagaatctggaatcttaaaagttggaatattagatttgaaattattttaatttttgtagagttttctggagatatttatgatcgtgatttttgtacatataatatactccagaatgttaggggaaaatcgttcttgt

SEQ ID NO: 40036 - protein, 310 aa, Arabidopsis thaliana; identical to SEQ ID NO: 27837
  peptide (1)..(310): Ceres Seq. ID no. 13488747
  misc_feature (47)..(306): Pfam Name: Protein kinase domain Pfam Description: Protein kinase domain
  misc_feature (10)..(306): Homolog of NCBI NO: 15217998 NR Description: mitogen-activated protein kinase kinase (MAPKK),
  misc_feature (1)..(306): Homolog of NCBI NO: 15528439 NR Description: MEK map kinase kinsae [Medicago sativa subsp. x
  misc_feature (10)..(309): Homolog of NCBI NO: 12484128 NR Description: mitogen-activated protein kinase 2 [Nicotiana
  misc_feature (1)..(306): Homolog of NCBI NO: 25287595 NR Description: mitogen-activated protein kinase kinase (EC
  misc_feature (1)..(306): Homolog of NCBI NO: 19698851 NR Description: MAP kinase kinase 5 [Arabidopsis thaliana]
  misc_feature (1)..(306): Homolog of NCBI NO: 15232491 NR Description: mitogen-activated protein kinase kinase (MAPKK),
  misc_feature (10)..(309): Homolog of NCBI NO: 33563103 NR Description: mitogen-activated protein kinase kinase [Solanum
  misc_feature (1)..(294): Homolog of NCBI NO: 15230671 NR Description: mitogen-activated protein kinase kinase (MAPKK),
  misc_feature (1)..(310): Homolog of NCBI NO: 15221060 NR Description: mitogen-activated protein kinase kinase (MAPKK),
  misc_feature (1)..(310): Homolog of NCBI NO: 15219482 NR Description: mitogen-activated protein kinase kinase (MAPKK),

SEQ ID NO: 40037 - protein, 229 aa, Arabidopsis thaliana; identical to SEQ ID NO: 27838
  peptide (1)..(229): Ceres Seq. ID no. 13488748
  misc_feature (1)..(225): Pfam Name: Protein kinase domain Pfam Description: Protein kinase domain
  misc_feature (1)..(225): Homolog of NCBI NO: 15217998 NR Description: mitogen-activated protein kinase kinase (MAPKK),
  misc_feature (1)..(225): Homolog of NCBI NO: 15528439 NR Description: MEK map kinase kinsae [Medicago sativa subsp. x
  misc_feature (1)..(228): Homolog of NCBI NO: 12484128 NR Description: mitogen-activated protein kinase 2 [Nicotiana
  misc_feature (1)..(225): Homolog of NCBI NO: 25287595 NR Description: mitogen-activated protein kinase kinase (EC
  misc_feature (1)..(225): Homolog of NCBI NO: 19698851 NR Description: MAP kinase kinase 5 [Arabidopsis thaliana]
  misc_feature (1)..(225): Homolog of NCBI NO: 15232491 NR Description: mitogen-activated protein kinase kinase (MAPKK),
  misc_feature (1)..(228): Homolog of NCBI NO: 33563103 NR Description: mitogen-activated protein kinase kinase [Solanum
  misc_feature (1)..(213): Homolog of NCBI NO: 15230671 NR Description: mitogen-activated protein kinase kinase (MAPKK),
  misc_feature (1)..(229): Homolog of NCBI NO: 15221060 NR Description: mitogen-activated protein kinase kinase (MAPKK),
  misc_feature (1)..(229): Homolog of NCBI NO: 15219482 NR Description: mitogen-activated protein kinase kinase (MAPKK),

SEQ ID NO: 40038 - protein, 220 aa, Arabidopsis thaliana
  peptide (1)..(220): Ceres Seq. ID no. 13488749
  misc_feature (1)..(216): Pfam Name: Protein kinase domain Pfam Description: Protein kinase domain
  misc_feature (1)..(216): Homolog of NCBI NO: 15217998 NR Description: mitogen-activated protein kinase kinase (MAPKK),
  misc_feature (1)..(216): Homolog of NCBI NO: 15528439 NR Description: MEK map kinase kinsae [Medicago sativa subsp. x
  misc_feature (1)..(219): Homolog of NCBI NO: 12484128 NR Description: mitogen-activated protein kinase 2 [Nicotiana
  misc_feature (1)..(216): Homolog of NCBI NO: 25287595 NR Description: mitogen-activated protein kinase kinase (EC
  misc_feature (1)..(216): Homolog of NCBI NO: 19698851 NR Description: MAP kinase kinase 5 [Arabidopsis thaliana]
  misc_feature (1)..(216): Homolog of NCBI NO: 15232491 NR Description: mitogen-activated protein kinase kinase (MAPKK),
  misc_feature (1)..(219): Homolog of NCBI NO: 33563103 NR Description: mitogen-activated protein kinase kinase [Solanum
  misc_feature (1)..(204): Homolog of NCBI NO: 15230671 NR Description: mitogen-activated protein kinase kinase (MAPKK),
  misc_feature (1)..(220): Homolog of NCBI NO: 15221060 NR Description: mitogen-activated protein kinase kinase (MAPKK),
  misc_feature (1)..(220): Homolog of NCBI NO: 15219482 NR Description: mitogen-activated protein kinase kinase (MAPKK),
MREMEILRRTDSPYVVKCHGIFEKPVVGEVSILMEYMDGGTLESLRGGVTEQKLAGFAKQILKGLSYLHALKIVHRDIKPANLLLNSKNEVKIADFGVSKILVRSLDSCNSYVGTCAYMSPERFDSESSGGSSDIYAGDIWSFGLMMLELLVGHFPLLPPGQRPDWATLMCAVCFGEPPRAPEGCSEEFRSFVECCLRKDSSKRWTAPQLLAHPFLREDL

SEQ ID NO: 40039 - DNA, 1521 bp, Arabidopsis thaliana
  misc_feature (1)..(1521): Ceres Seq. ID no. 13580369
  misc_feature: MA Experiment ID: 108462 Result: Down-regulated in Transcription
  misc_feature: MA Experiment 108462 PARAMETER Experiment Name: At_Germinating_Seeds_cDNA_P Parameter: Age (day) Value: 2 vs. 0
  misc_feature: MA Experiment 108462 PARAMETER Experiment Name: At_Germinating_Seeds_cDNA_P Parameter: Tissue Value: Germinating Seeds
  misc_feature: MA Experiment ID: 108463 Result: Down-regulated in Transcription
  misc_feature: MA Experiment 108463 PARAMETER Experiment Name: At_Germinating_Seeds_cDNA_P Parameter: Age (day) Value: 3 vs. 0
  misc_feature: MA Experiment 108463 PARAMETER Experiment Name: At_Germinating_Seeds_cDNA_P Parameter: Tissue Value: Germinating Seeds
  misc_feature: MA Experiment ID: 108464 Result: Down-regulated in Transcription
  misc_feature: MA Experiment 108464 PARAMETER Experiment Name: At_Germinating_Seeds_cDNA_P Parameter: Age (day) Value: 4 vs. 0
  misc_feature: MA Experiment 108464 PARAMETER Experiment Name: At_Germinating_Seeds_cDNA_P Parameter: Tissue Value: Germinating Seeds
  misc_feature: MA Experiment ID: 108579 Result: Up-regulated in Transcription
  misc_feature: MA Experiment 108579 PARAMETER Experiment Name: At_4deg_Cold_cDNA_P Parameter: Temperature (deg C) Value: 4 vs. 22
  misc_feature: MA Experiment 108579 PARAMETER Experiment Name: At_4deg_Cold_cDNA_P Parameter: Timepoint (hr) Value: 6
  misc_feature: MA Experiment 108579 PARAMETER Experiment Name: At_4deg_Cold_cDNA_P Parameter: Tissue Value: Aerial
  misc_feature: MA Experiment ID: 108585 Result: Up-regulated in Transcription
  misc_feature: MA Experiment 108585 PARAMETER Experiment Name: At_5mM_NaNP_cDNA_P Parameter: Timepoint (hr) Value: 6
  misc_feature: MA Experiment 108585 PARAMETER Experiment Name: At_5mM_NaNP_cDNA_P Parameter: Tissue Value: Aerial
  misc_feature: MA Experiment 108585 PARAMETER Experiment Name: At_5mM_NaNP_cDNA_P Parameter: Treatment Value: null
  misc_feature: MA Experiment ID: 108595 Result: Down-regulated in Transcription
  misc_feature: MA Experiment 108595 PARAMETER Experiment Name: At_Ler-pi_Ovule_cDNA_P Parameter: Plant Line Value: null
  misc_feature: MA Experiment ID: 20000069 Result: Up-regulated in Transcription
  misc_feature: MA Experiment 20000069 PARAMETER Experiment Name: At_100uM_ABA_Mutants_cDNA_P Parameter: Plant Line Value: CS23
  misc_feature: MA Experiment 20000069 PARAMETER Experiment Name: At_100uM_ABA_Mutants_cDNA_P Parameter: Timepoint (hr) Value: 6
  misc_feature: MA Experiment 20000069 PARAMETER Experiment Name: At_100uM_ABA_Mutants_cDNA_P Parameter: Tissue Value: Aerial
  misc_feature: MA Experiment 20000069 PARAMETER Experiment Name: At_100uM_ABA_Mutants_cDNA_P Parameter: Treatment Value: 100uM ABA vs. No Treatment
  misc_feature: MA Experiment ID: 20000070 Result: Up-regulated in Transcription
  misc_feature: MA Experiment 20000070 PARAMETER Experiment Name: At_100uM_ABA_Mutants_cDNA_P Parameter: Plant Line Value: CS24
  misc_feature: MA Experiment 20000070 PARAMETER Experiment Name: At_100uM_ABA_Mutants_cDNA_P Parameter: Timepoint (hr) Value: 6
  misc_feature: MA Experiment 20000070 PARAMETER Experiment Name: At_100uM_ABA_Mutants_cDNA_P Parameter: Tissue Value: Aerial
  misc_feature: MA Experiment 20000070 PARAMETER Experiment Name: At_100uM_ABA_Mutants_cDNA_P Parameter: Treatment Value: 100uM ABA vs. No Treatment
  misc_feature: MA Experiment ID: 20000086 Result: Up-regulated in Transcription
  misc_feature: MA Experiment 20000086 PARAMETER Experiment Name: At_100uM_ABA_Mutants_cDNA_P Parameter: Plant Line Value: CS22
  misc_feature: MA Experiment 20000086 PARAMETER Experiment Name: At_100uM_ABA_Mutants_cDNA_P Parameter: Timepoint (hr) Value: 6
  misc_feature: MA Experiment 20000086 PARAMETER Experiment Name: At_100uM_ABA_Mutants_cDNA_P Parameter: Tissue Value: Aerial
  misc_feature: MA Experiment 20000086 PARAMETER Experiment Name: At_100uM_ABA_Mutants_cDNA_P Parameter: Treatment Value: 100uM ABA vs. No Treatment
  misc_feature: MA Experiment ID: 20000227 Result: Up-regulated in Transcription
  misc_feature: MA Experiment 20000227 PARAMETER Experiment Name: At_Root-Tips-vs-Tops_P Parameter: Tissue Value: Root Tips vs. Root Tops
  misc_feature: MA Experiment ID: 20000234 Result: Up-regulated in Transcription
  misc_feature: MA Experiment 20000234 PARAMETER Experiment Name: At_Siliques_P Parameter: Age (day) Value: 21
  misc_feature: MA Experiment 20000234 PARAMETER Experiment Name: At_Siliques_P Parameter: Organism Value: A. thaliana
  misc_feature: MA Experiment 20000234 PARAMETER Experiment Name: At_Siliques_P Parameter: Plant Line Value: WS
  misc_feature: MA Experiment 20000234 PARAMETER Experiment Name: At_Siliques_P Parameter: Tissue Value: Less Than 5mm Siliques vs. Whole Plant
  misc_feature: MA Experiment ID: 20001451 Result: Down-regulated in Transcription
  misc_feature: MA Experiment 20001451 PARAMETER Experiment Name: At_Far-red-induction_P Parameter: Age (day) Value: 7
  misc_feature: MA Experiment 20001451 PARAMETER Experiment Name: At_Far-red-induction_P Parameter: Light Value: Far-red vs. White
  misc_feature: MA Experiment 20001451 PARAMETER Experiment Name: At_Far-red-induction_P Parameter: Organism Value: A. thaliana
  misc_feature: MA Experiment 20001451 PARAMETER Experiment Name: At_Far-red-induction_P Parameter: Plant Line Value: Columbia
  misc_feature: MA Experiment 20001451 PARAMETER Experiment Name: At_Far-red-induction_P Parameter: Timepoint (hr) Value: 24
  misc_feature: MA Experiment 20001451 PARAMETER Experiment Name: At_Far-red-induction_P Parameter: Tissue Value: Whole Plant
  misc_feature: MA Experiment ID: 20001557 Result: Up-regulated in Transcription
  misc_feature: MA Experiment 20001557 PARAMETER Experiment Name: At_Drought_Soil_Dry_P Parameter: Age (day) Value: 27
  misc_feature: MA Experiment 20001557 PARAMETER Experiment Name: At_Drought_Soil_Dry_P Parameter: Organism Value: A. thaliana
  misc_feature: MA Experiment 20001557 PARAMETER Experiment Name: At_Drought_Soil_Dry_P Parameter: Plant Line Value: WS
  misc_feature: MA Experiment 20001557 PARAMETER Experiment Name: At_Drought_Soil_Dry_P Parameter: Post Timepoint (hr) Value: 3
  misc_feature: MA Experiment 20001557 PARAMETER Experiment Name: At_Drought_Soil_Dry_P Parameter: Post-Treatment Value: Re-Water vs. No Drought
  misc_feature: MA Experiment 20001557 PARAMETER Experiment Name: At_Drought_Soil_Dry_P Parameter: Timepoint (day) Value: 13
  misc_feature: MA Experiment 20001557 PARAMETER Experiment Name: At_Drought_Soil_Dry_P Parameter: Treatment Value: Drought vs. No Drought
  misc_feature: MA Experiment ID: 20001558 Result: Up-regulated in Transcription
  misc_feature: MA Experiment 20001558 PARAMETER Experiment Name: At_Drought_Soil_Dry_P Parameter: Age (day) Value: 27
  misc_feature: MA Experiment 20001558 PARAMETER Experiment Name: At_Drought_Soil_Dry_P Parameter: Organism Value: A. thaliana
  misc_feature: MA Experiment 20001558 PARAMETER Experiment Name: At_Drought_Soil_Dry_P Parameter: Plant Line Value: WS
  misc_feature: MA Experiment 20001558 PARAMETER Experiment Name: At_Drought_Soil_Dry_P Parameter: Post Timepoint (hr) Value: 6
  misc_feature: MA Experiment 20001558 PARAMETER Experiment Name: At_Drought_Soil_Dry_P Parameter: Post-Treatment Value: Re-Water vs. No Drought
  misc_feature: MA Experiment 20001558 PARAMETER Experiment Name: At_Drought_Soil_Dry_P Parameter: Timepoint (day) Value: 13
  misc_feature: MA Experiment 20001558 PARAMETER Experiment Name: At_Drought_Soil_Dry_P Parameter: Treatment Value: Drought vs. No Drought
ccaaacaacaaaagcatcataagaagaagaagaaactaatcatttttctgattctcccacgaagatgaaccacctcgttcgtaaaagctccgtcggttactccgccttgaggtccgtttcgtacctccgtcaatctgccgttacctctccacctccgattttctccgccgccgcttcaaccgttcgccagttcacttccgccggctatccttccaacagttttcaattgacgccgccgacgaattggggaatccggatagttccggagaggaaggcgtttgtgattgagcgattcggtaaatacgctacgacgttgccgtcggggattcatttcctcattccgttcgtggatcgtattgcttatgttcattctctcaaggaagaagctatcccgattccgaatcagactgcgattactaaagacaacgttagtatccacatcgatggtgttctctacgttaagattgtggatcctaagttagcttcttatggcgttgagagtcctatctatgctgttgtacagctggctcagaccacaatgcgtagtgagcttggtaagatcactcttgataagacctttgaggaacgagacactctcaacgagaagatagtggaagccatcaatgttgctgcaaaagactggggtcttcagtgccttcgttatgagataagggatattatgccccctcatggagtgcgagctgctatggaaatgcaagctgaagctgagcgtaaaaagagagcccagattcttgagtctgaaggagaaaggcaatcccatatcaacattgctgatggtaagaaaagttctgtaatcttggcatctgaagcagcaaagatggaccaggtgaatcgagcacaaggtgaggcagaagcaatactagctagagcacaagcaactgcgaaaggcctggtcttgttatctcagtccctcaaggaaactgggggagtagaggcggcgagtttgagagttgcagagcaatacattacagccttcggtaacattgccaaggagggtacgataatgttgcttccaagtggtgcttcaaatcctgctagcatgattgctcaagctttaacaatgtacaaaagccttgtcatcaatggtccaagcaaagatcaccaagaaacacaagcacttgatgaaacagatttggaagagttggaagacatgggtgagaaacatatatcagaaggctctaataaccgatcaggctcaatatcatttgacacagagaaaccaggtcacaccggtgaaccacgattttctcttcagaaccgcaacaaggatccgcagtaggcagccgaaccggggatgagataaattctttgggcttgagaaaactggaaaccatttttcatctttcaaatatgaggcagtaaccatcttttccgtttgaatagctagaatatcatcactttgcatatagaaacgaatctgaacatctgttctccgataagaattttcctactggatttgttatgaacatggtccttgtgttcttattcacctttattccc

SEQ ID NO: 40040 - protein, 411 aa, Arabidopsis thaliana; identical to SEQ ID NO: 34823
  peptide (1)..(411): Ceres Seq. ID no. 13580370
  misc_feature (58)..(376): Homolog of NCBI NO: 12963591 NR Description: stomatin-like protein 2 [Mus musculus]
  misc_feature (58)..(373): Homolog of NCBI NO: 32766629 NR Description: Unknown (protein for MGC:63505) [Danio rerio]
  misc_feature (63)..(344): Homolog of NCBI NO: 15892375 NR Description: unknown [Rickettsia conorii]
  misc_feature (63)..(351): Homolog of NCBI NO: 15604196 NR Description: unknown [Rickettsia prowazekii]
  misc_feature (41)..(344): Homolog of NCBI NO: 23394406 NR Description: unknown [Phytophthora infestans]
  misc_feature (19)..(372): Homolog of NCBI NO: 7716464 NR Description: stomatin-like protein [Zea mays]
  misc_feature (1)..(350): Homolog of NCBI NO: 21554125 NR Description: stomatin-like protein [Arabidopsis thaliana]
  misc_feature (1)..(350): Homolog of NCBI NO: 15239547 NR Description: expressed protein [Arabidopsis thaliana]
  misc_feature (1)..(393): Homolog of NCBI NO: 7487517 NR Description: hypothetical protein T29A15.70 - Arabidopsis
  misc_feature (1)..(411): Homolog of NCBI NO: 18417021 NR Description: expressed protein [Arabidopsis thaliana]

SEQ ID NO: 40041 - protein, 253 aa, Arabidopsis thaliana; identical to SEQ ID NO: 34824
  peptide (1)..(253): Ceres Seq. ID no. 13580371
  misc_feature (1)..(218): Homolog of NCBI NO: 12963591 NR Description: stomatin-like protein 2 [Mus musculus]
  misc_feature (1)..(215): Homolog of NCBI NO: 32766629 NR Description: Unknown (protein for MGC:63505) [Danio rerio]
  misc_feature (1)..(186): Homolog of NCBI NO: 15892375 NR Description: unknown [Rickettsia conorii]
  misc_feature (1)..(193): Homolog of NCBI NO: 15604196 NR Description: unknown [Rickettsia prowazekii]
  misc_feature (1)..(186): Homolog of NCBI NO: 23394406 NR Description: unknown [Phytophthora infestans]
  misc_feature (1)..(214): Homolog of NCBI NO: 7716464 NR Description: stomatin-like protein [Zea mays]
  misc_feature (1)..(192): Homolog of NCBI NO: 21554125 NR Description: stomatin-like protein [Arabidopsis thaliana]
  misc_feature (1)..(192): Homolog of NCBI NO: 15239547 NR Description: expressed protein [Arabidopsis thaliana]
  misc_feature (1)..(235): Homolog of NCBI NO: 7487517 NR Description: hypothetical protein T29A15.70 - Arabidopsis
  misc_feature (1)..(253): Homolog of NCBI NO: 18417021 NR Description: expressed protein [Arabidopsis thaliana]

SEQ ID NO: 40042 - protein, 206 aa, Arabidopsis thaliana; identical to SEQ ID NO: 34825
  peptide (1)..(206): Ceres Seq. ID no. 13580372
  misc_feature (1)..(171): Homolog of NCBI NO: 12963591 NR Description: stomatin-like protein 2 [Mus musculus]
  misc_feature (1)..(168): Homolog of NCBI NO: 32766629 NR Description: Unknown (protein for MGC:63505) [Danio rerio]
  misc_feature (1)..(139): Homolog of NCBI NO: 15892375 NR Description: unknown [Rickettsia conorii]
  misc_feature (1)..(146): Homolog of NCBI NO: 15604196 NR Description: unknown [Rickettsia prowazekii]
  misc_feature (1)..(139): Homolog of NCBI NO: 23394406 NR Description: unknown [Phytophthora infestans]
  misc_feature (1)..(167): Homolog of NCBI NO: 7716464 NR Description: stomatin-like protein [Zea mays]
  misc_feature (1)..(145): Homolog of NCBI NO: 21554125 NR Description: stomatin-like protein [Arabidopsis thaliana]
  misc_feature (1)..(145): Homolog of NCBI NO: 15239547 NR Description: expressed protein [Arabidopsis thaliana]
  misc_feature (1)..(188): Homolog of NCBI NO: 7487517 NR Description: hypothetical protein T29A15.70 - Arabidopsis
  misc_feature (1)..(206): Homolog of NCBI NO: 18417021 NR Description: expressed protein [Arabidopsis thaliana]

SEQ ID NO: 40043 - DNA, 1285 bp, Arabidopsis thaliana
  misc_feature (1)..(1285): Ceres Seq. ID no. 12328796
  misc_feature: MA Experiment ID: 20000069 Result: Up-regulated in Transcription
  misc_feature: MA Experiment 20000069 PARAMETER Experiment Name: At_100uM_ABA_Mutants_cDNA_P Parameter: Plant Line Value: CS23
  misc_feature: MA Experiment 20000069 PARAMETER Experiment Name: At_100uM_ABA_Mutants_cDNA_P Parameter: Timepoint (hr) Value: 6
  misc_feature: MA Experiment 20000069 PARAMETER Experiment Name: At_100uM_ABA_Mutants_cDNA_P Parameter: Tissue Value: Aerial
  misc_feature: MA Experiment 20000069 PARAMETER Experiment Name: At_100uM_ABA_Mutants_cDNA_P Parameter: Treatment Value: 100uM ABA vs. No Treatment
  misc_feature: MA Experiment ID: 20000072 Result: Up-regulated in Transcription
  misc_feature: MA Experiment 20000072 PARAMETER Experiment Name: At_100uM_ABA_Mutants_cDNA_P Parameter: Plant Line Value: CS8105
  misc_feature: MA Experiment 20000072 PARAMETER Experiment Name: At_100uM_ABA_Mutants_cDNA_P Parameter: Timepoint (hr) Value: 6
  misc_feature: MA Experiment 20000072 PARAMETER Experiment Name: At_100uM_ABA_Mutants_cDNA_P Parameter: Tissue Value: Aerial
  misc_feature: MA Experiment 20000072 PARAMETER Experiment Name: At_100uM_ABA_Mutants_cDNA_P Parameter: Treatment Value: 100uM ABA vs. No Treatment
  misc_feature: MA Experiment ID: 20000113 Result: Up-regulated in Transcription
  misc_feature: MA Experiment 20000113 PARAMETER Experiment Name: At_42deg_Heat_cDNA_P Parameter: Temperature (deg C) Value: 42 vs. 22
  misc_feature: MA Experiment 20000113 PARAMETER Experiment Name: At_42deg_Heat_cDNA_P Parameter: Timepoint (hr) Value: 8
  misc_feature: MA Experiment 20000113 PARAMETER Experiment Name: At_42deg_Heat_cDNA_P Parameter: Tissue Value: Aerial
  misc_feature: MA Experiment ID: 20000213 Result: Up-regulated in Transcription
  misc_feature: MA Experiment 20000213 PARAMETER Experiment Name: At_4deg_Cold_P Parameter: Timepoint (hr) Value: 2
  misc_feature: MA Experiment ID: 20000264 Result: Up-regulated in Transcription
  misc_feature: MA Experiment 20000264 PARAMETER Experiment Name: At_Open_Flower_P Parameter: Age (day) Value: 21
  misc_feature: MA Experiment 20000264 PARAMETER Experiment Name: At_Open_Flower_P Parameter: Plant Line Value: WS
  misc_feature: MA Experiment 20000264 PARAMETER Experiment Name: At_Open_Flower_P Parameter: Tissue Value: Open Flower vs. Whole Plant
  misc_feature: MA Experiment ID: 20000441 Result: Up-regulated in Transcription
  misc_feature: MA Experiment 20000441 PARAMETER Experiment Name: At_1uM_BR-BRZ__P Parameter: Tissue Value: Shoot Apices
  misc_feature: MA Experiment 20000441 PARAMETER Experiment Name: At_1uM_BR-BRZ__P Parameter: Treatment Value: 1uM BR vs. No Treatment
  misc_feature: MA Experiment ID: 20000453 Result: Up-regulated in Transcription
  misc_feature: MA Experiment 20000453 PARAMETER Experiment Name: At_100uM_ABA_P Parameter: Age (day) Value: 15
  misc_feature: MA Experiment 20000453 PARAMETER Experiment Name: At_100uM_ABA_P Parameter: Organism Value: A. thaliana
  misc_feature: MA Experiment 20000453 PARAMETER Experiment Name: At_100uM_ABA_P Parameter: Plant Line Value: WS
  misc_feature: MA Experiment 20000453 PARAMETER Experiment Name: At_100uM_ABA_P Parameter: Timepoint (hr) Value: 24
  misc_feature: MA Experiment 20000453 PARAMETER Experiment Name: At_100uM_ABA_P Parameter: Tissue Value: Aerial
  misc_feature: MA Experiment 20000453 PARAMETER Experiment Name: At_100uM_ABA_P Parameter: Treatment Value: 100uM ABA vs. No Treatment
  misc_feature: MA Experiment ID: 20000794 Result: Up-regulated in Transcription
  misc_feature: MA Experiment 20000794 PARAMETER Experiment Name: At_Petals_P Parameter: Age (day) Value: 23-25 days
  misc_feature: MA Experiment 20000794 PARAMETER Experiment Name: At_Petals_P Parameter: Plant Line Value: WS
  misc_feature: MA Experiment 20000794 PARAMETER Experiment Name: At_Petals_P Parameter: Tissue Value: Petals vs. Whole plant
  misc_feature: MA Experiment ID: 20001247 Result: Down-regulated in Transcription
  misc_feature: MA Experiment 20001247 PARAMETER Experiment Name: At_Far-red-induction_P Parameter: Age (day) Value: 7
  misc_feature: MA Experiment 20001247 PARAMETER Experiment Name: At_Far-red-induction_P Parameter: Light Value: Far-red vs. White
  misc_feature: MA Experiment 20001247 PARAMETER Experiment Name: At_Far-red-induction_P Parameter: Organism Value: A. thaliana
  misc_feature: MA Experiment 20001247 PARAMETER Experiment Name: At_Far-red-induction_P Parameter: Plant Line Value: Columbia
  misc_feature: MA Experiment 20001247 PARAMETER Experiment Name: At_Far-red-induction_P Parameter: Timepoint (hr) Value: 1
  misc_feature: MA Experiment 20001247 PARAMETER Experiment Name: At_Far-red-induction_P Parameter: Tissue Value: Whole Plant
aaaatcaaagaagttgacaacaacaacaaaaaatccaaagagaaaacgtatgagttgcttaaaccataaacctcaagctcaaaattttatcaaccttataaagtttcgttttctcgagattttgaatcttttcagctaaaaaagatcacagctttttgcgttttctggatgagtttgagataagagaagatgaagattcagtgtaacgtttgtgaggcggcggaagcgacggttctatgttgcgccgacgaggctgctctttgttgggcttgcgatgagaaaattcacgccgctaataaactcgccggaaaacatcagagagtccctctctctgcctctgcctcttccatacccaaatgtgacatttgtcaggaagcatctggattcttcttttgtctgcaagatagagctttgctatgtaggaaatgtgatgttgcaatccacactgtgaatcctcatgtttcagctcaccagagatttcttctcactggaatcaaagttggtcttgaatctatagacactggtccttctactaaatcctcacctaccaatgatgataaaaccatggagaccaaaccttttgttcaatctatacctgagcctcaaaagatggccttcgatcatcatcatcaccagcagcagcaggaacagcaggaaggagttataccgggaactaaagtcaatgatcagacatcgacaaagcttcctctcgtaagtagcggatcaactactggaagcattcctcagtggcaaatagaggagattttcgggctaaccgactttgatcagagctatgaatacatggagaataatggatcatctaaggcggatactagtagacgaggagattcagacagttcttcgatgatgagatctgcagaagaagatggagaagataacaataactgcttgggaggtgagacatcatgggcggttccacagattcagtctccacctacagcgtctggtctaaactggcctaagcattttcaccaccactctgtgtttgttccggacataacttcttcaactccttataccggttcatccccgaatcaaagggttgggaaacggcggcgacggttctagcatttgtaattatcttttagccgcttgagaaaagagattggcagctttctcagtagatgtaagatcacataaatgatttggaaacttgtaatgtagtgatctgtgagagtcggtgttctttgttagctgaaaaaacaaaaagatgtttatttggttgaagattataaggggttaaattactaagttatcaatttgg

SEQ ID NO: 40044 - protein, 299 aa, Arabidopsis thaliana
  peptide (1)..(299): Ceres Seq. ID no. 12328797
  misc_feature (52)..(99): Pfam Name: B-box zinc finger Pfam Description: B-box zinc finger
  misc_feature (1)..(108): Homolog of NCBI NO: 30679541 NR Description: salt-tolerance protein [Arabidopsis thaliana]
  misc_feature (1)..(108): Homolog of NCBI NO: 15221367 NR Description: salt-tolerance protein
  misc_feature (1)..(150): Homolog of NCBI NO: 3618314 NR Description: zinc finger protein [Oryza sativa (japonica
  misc_feature (178)..(298): Homolog of NCBI NO: 34903708 NR Description: putative zinc-finger protein
  misc_feature (1)..(140): Homolog of NCBI NO: 34903708 NR Description: putative zinc-finger protein
  misc_feature (1)..(113): Homolog of NCBI NO: 7489603 NR Description: zinc-finger protein R2931 [imported] - rice
  misc_feature (172)..(299): Homolog of NCBI NO: 7489603 NR Description: zinc-finger protein R2931 [imported] - rice
  misc_feature (193)..(299): Homolog of NCBI NO: 17433085 NR Description: Zinc finger protein constans-like 7
  misc_feature (1)..(212): Homolog of NCBI NO: 17433085 NR Description: Zinc finger protein constans-like 7
  misc_feature (1)..(299): Homolog of NCBI NO: 18412037 NR Description: CONSTANS B-box zinc finger family protein
MKIQCNVCEAAEATVLCCADEAALCWACDEKIHAANKLAGKHQRVPLSASASSIPKCDICQEASGFFFCLQDRALLCRKCDVAIHTVNPHVSAHQRFLLTGIKVGLESIDTGPSTKSSPTNDDKTMETKPFVQSIPEPQKMAFDHHHHQQQQEQQEGVIPGTKVNDQTSTKLPLVSSGSTTGSIPQWQIEEIFGLTDFDQSYEYMENNGSSKADTSRRGDSDSSSMMRSAEEDGEDNNNCLGGETSWAVPQIQSPPTASGLNWPKHFHHHSVFVPDITSSTPYTGSSPNQRVGKRRRRF

SEQ ID NO: 40045 - protein, 174 aa, Arabidopsis thaliana; identical to SEQ ID NO: 22889
  peptide (1)..(174): Ceres Seq. ID no. 12328798
  misc_feature (1)..(133): Homolog of NCBI NO: 15222289 NR Description: CONSTANS B-box zinc finger family protein
  misc_feature (1)..(13): Homolog of NCBI NO: 25408150 NR Description: hypothetical protein At2g31380 [imported] -
  misc_feature (1)..(13): Homolog of NCBI NO: 18402646 NR Description: salt tolerance-like protein
  misc_feature (1)..(25): Homolog of NCBI NO: 3618314 NR Description: zinc finger protein [Oryza sativa (japonica
  misc_feature (53)..(173): Homolog of NCBI NO: 34903708 NR Description: putative zinc-finger protein
  misc_feature (1)..(15): Homolog of NCBI NO: 34903708 NR Description: putative zinc-finger protein
  misc_feature (47)..(174): Homolog of NCBI NO: 7489603 NR Description: zinc-finger protein R2931 [imported] - rice
  misc_feature (68)..(174): Homolog of NCBI NO: 17433085 NR Description: Zinc finger protein constans-like 7
  misc_feature (1)..(87): Homolog of NCBI NO: 17433085 NR Description: Zinc finger protein constans-like 7
  misc_feature (1)..(174): Homolog of NCBI NO: 18412037 NR Description: CONSTANS B-box zinc finger family protein

SEQ ID NO: 40046 - protein, 159 aa, Arabidopsis thaliana; identical to SEQ ID NO: 22890
  peptide (1)..(159): Ceres Seq. ID no. 12328799
  misc_feature (1)..(18): Homolog of NCBI NO: 22854952 NR Description: COL1 protein [Brassica nigra]
  misc_feature (1)..(118): Homolog of NCBI NO: 15222289 NR Description: CONSTANS B-box zinc finger family protein
  misc_feature (38)..(158): Homolog of NCBI NO: 34903708 NR Description: putative zinc-finger protein
  misc_feature (32)..(159): Homolog of NCBI NO: 7489603 NR Description: zinc-finger protein R2931 [imported] - rice
  misc_feature (53)..(159): Homolog of NCBI NO: 17433085 NR Description: Zinc finger protein constans-like 7
  misc_feature (1)..(72): Homolog of NCBI NO: 17433085 NR Description: Zinc finger protein constans-like 7
  misc_feature (1)..(159): Homolog of NCBI NO: 18412037 NR Description: CONSTANS B-box zinc finger family protein

SEQ ID NO: 40047 - DNA, 1801 bp, Arabidopsis thaliana
  misc_feature (1)..(1801): Ceres Seq. ID no. 12579671
  misc_feature: MA Experiment ID: 108434 Result: Down-regulated in Transcription
  misc_feature: MA Experiment 108434 PARAMETER Experiment Name: At_Root_Tips_cDNA_P Parameter: Tissue Value: Root Tips
  misc_feature: MA Experiment ID: 108573 Result: Up-regulated in Transcription
  misc_feature: MA Experiment 108573 PARAMETER Experiment Name: At_Drought_cDNA_P Parameter: Timepoint (hr) Value: 6
  misc_feature: MA Experiment 108573 PARAMETER Experiment Name: At_Drought_cDNA_P Parameter: Tissue Value: Aerial
  misc_feature: MA Experiment 108573 PARAMETER Experiment Name: At_Drought_cDNA_P Parameter: Treatment Value: Drought vs. No Drought
  misc_feature: MA Experiment ID: 108609 Result: Up-regulated in Transcription
  misc_feature: MA Experiment 108609 PARAMETER Experiment Name: At_100uM_ABA_cDNA_P Parameter: Timepoint (hr) Value: 24
  misc_feature: MA Experiment 108609 PARAMETER Experiment Name: At_100uM_ABA_cDNA_P Parameter: Tissue Value: Aerial
  misc_feature: MA Experiment 108609 PARAMETER Experiment Name: At_100uM_ABA_cDNA_P Parameter: Treatment Value: 100uM ABA vs. No Treatment
  misc_feature: MA Experiment ID: 20000070 Result: Up-regulated in Transcription
  misc_feature: MA Experiment 20000070 PARAMETER Experiment Name: At_100uM_ABA_Mutants_cDNA_P Parameter: Plant Line Value: CS24
  misc_feature: MA Experiment 20000070 PARAMETER Experiment Name: At_100uM_ABA_Mutants_cDNA_P Parameter: Timepoint (hr) Value: 6
  misc_feature: MA Experiment 20000070 PARAMETER Experiment Name: At_100uM_ABA_Mutants_cDNA_P Parameter: Tissue Value: Aerial
  misc_feature: MA Experiment 20000070 PARAMETER Experiment Name: At_100uM_ABA_Mutants_cDNA_P Parameter: Treatment Value: 100uM ABA vs. No Treatment
  misc_feature: MA Experiment ID: 20000071 Result: Up-regulated in Transcription
  misc_feature: MA Experiment 20000071 PARAMETER Experiment Name: At_100uM_ABA_Mutants_cDNA_P Parameter: Plant Line Value: CS8104
  misc_feature: MA Experiment 20000071 PARAMETER Experiment Name: At_100uM_ABA_Mutants_cDNA_P Parameter: Timepoint (hr) Value: 6
  misc_feature: MA Experiment 20000071 PARAMETER Experiment Name: At_100uM_ABA_Mutants_cDNA_P Parameter: Tissue Value: Aerial
  misc_feature: MA Experiment 20000071 PARAMETER Experiment Name: At_100uM_ABA_Mutants_cDNA_P Parameter: Treatment Value: 100uM ABA vs. No Treatment
  misc_feature: MA Experiment ID: 20000072 Result: Up-regulated in Transcription
  misc_feature: MA Experiment 20000072 PARAMETER Experiment Name: At_100uM_ABA_Mutants_cDNA_P Parameter: Plant Line Value: CS8105
  misc_feature: MA Experiment 20000072 PARAMETER Experiment Name: At_100uM_ABA_Mutants_cDNA_P Parameter: Timepoint (hr) Value: 6
  misc_feature: MA Experiment 20000072 PARAMETER Experiment Name: At_100uM_ABA_Mutants_cDNA_P Parameter: Tissue Value: Aerial
  misc_feature: MA Experiment 20000072 PARAMETER Experiment Name: At_100uM_ABA_Mutants_cDNA_P Parameter: Treatment Value: 100uM ABA vs. No Treatment
  misc_feature: MA Experiment ID: 20000086 Result: Up-regulated in Transcription
  misc_feature: MA Experiment 20000086 PARAMETER Experiment Name: At_100uM_ABA_Mutants_cDNA_P Parameter: Plant Line Value: CS22
  misc_feature: MA Experiment 20000086 PARAMETER Experiment Name: At_100uM_ABA_Mutants_cDNA_P Parameter: Timepoint (hr) Value: 6
  misc_feature: MA Experiment 20000086 PARAMETER Experiment Name: At_100uM_ABA_Mutants_cDNA_P Parameter: Tissue Value: Aerial
  misc_feature: MA Experiment 20000086 PARAMETER Experiment Name: At_100uM_ABA_Mutants_cDNA_P Parameter: Treatment Value: 100uM ABA vs. No Treatment
  misc_feature: MA Experiment ID: 20000088 Result: Up-regulated in Transcription
  misc_feature: MA Experiment 20000088 PARAMETER Experiment Name: At_100uM_ABA_Mutants_cDNA_P Parameter: Plant Line Value: Landsberg
  misc_feature: MA Experiment 20000088 PARAMETER Experiment Name: At_100uM_ABA_Mutants_cDNA_P Parameter: Timepoint (hr) Value: 6
  misc_feature: MA Experiment 20000088 PARAMETER Experiment Name: At_100uM_ABA_Mutants_cDNA_P Parameter: Tissue Value: Aerial
  misc_feature: MA Experiment 20000088 PARAMETER Experiment Name: At_100uM_ABA_Mutants_cDNA_P Parameter: Treatment Value: 100uM ABA vs. No Treatment
  misc_feature: MA Experiment ID: 20000111 Result: Down-regulated in Transcription
  misc_feature: MA Experiment 20000111 PARAMETER Experiment Name: At_42deg_Heat_cDNA_P Parameter: Temperature (deg C) Value: 42 vs. 22
  misc_feature: MA Experiment 20000111 PARAMETER Experiment Name: At_42deg_Heat_cDNA_P Parameter: Timepoint (hr) Value: 6
  misc_feature: MA Experiment 20000111 PARAMETER Experiment Name: At_42deg_Heat_cDNA_P Parameter: Tissue Value: Aerial
  misc_feature: MA Experiment ID: 20000113 Result: Down-regulated in Transcription
  misc_feature: MA Experiment 20000113 PARAMETER Experiment Name: At_42deg_Heat_cDNA_P Parameter: Temperature (deg C) Value: 42 vs. 22
  misc_feature: MA Experiment 20000113 PARAMETER Experiment Name: At_42deg_Heat_cDNA_P Parameter: Timepoint (hr) Value: 8
  misc_feature: MA Experiment 20000113 PARAMETER Experiment Name: At_42deg_Heat_cDNA_P Parameter: Tissue Value: Aerial
  misc_feature: MA Experiment ID: 20000117 Result: Up-regulated in Transcription
  misc_feature: MA Experiment 20000117 PARAMETER Experiment Name: At_100uM_ABA_Mutants_cDNA_P Parameter: Plant Line Value: Columbia
  misc_feature: MA Experiment 20000117 PARAMETER Experiment Name: At_100uM_ABA_Mutants_cDNA_P Parameter: Timepoint (hr) Value: 6
  misc_feature: MA Experiment 20000117 PARAMETER Experiment Name: At_100uM_ABA_Mutants_cDNA_P Parameter: Tissue Value: Aerial
  misc_feature: MA Experiment 20000117 PARAMETER Experiment Name: At_100uM_ABA_Mutants_cDNA_P Parameter: Treatment Value: 100uM ABA vs. No Treatment
  misc_feature: MA Experiment ID: 20000179 Result: Up-regulated in Transcription
  misc_feature: MA Experiment 20000179 PARAMETER Experiment Name: At_Germinating_Seeds_P Parameter: Age (hr) Value: 6 vs. 0
  misc_feature: MA Experiment 20000179 PARAMETER Experiment Name: At_Germinating_Seeds_P Parameter: Tissue Value: Germinating Seeds
  misc_feature: MA Experiment ID: 20000436 Result: Up-regulated in Transcription
  misc_feature: MA Experiment 20000436 PARAMETER Experiment Name: At_Drought_P Parameter: Age (day) Value: 7
  misc_feature: MA Experiment 20000436 PARAMETER Experiment Name: At_Drought_P Parameter: Organism Value: A. thaliana
  misc_feature: MA Experiment 20000436 PARAMETER Experiment Name: At_Drought_P Parameter: Plant Line Value: WS
  misc_feature: MA Experiment 20000436 PARAMETER Experiment Name: At_Drought_P Parameter: Timepoint (hr) Value: 12
  misc_feature: MA Experiment 20000436 PARAMETER Experiment Name: At_Drought_P Parameter: Tissue Value: Whole Plant
  misc_feature: MA Experiment 20000436 PARAMETER Experiment Name: At_Drought_P Parameter: Treatment Value: Drought vs. No Drought
  misc_feature: MA Experiment ID: 20000437 Result: Up-regulated in Transcription
  misc_feature: MA Experiment 20000437 PARAMETER Experiment Name: At_Drought_P Parameter: Age (day) Value: 8
  misc_feature: MA Experiment 20000437 PARAMETER Experiment Name: At_Drought_P Parameter: Organism Value: A. thaliana
  misc_feature: MA Experiment 20000437 PARAMETER Experiment Name: At_Drought_P Parameter: Plant Line Value: WS
  misc_feature: MA Experiment 20000437 PARAMETER Experiment Name: At_Drought_P Parameter: Timepoint (hr) Value: 24
  misc_feature: MA Experiment 20000437 PARAMETER Experiment Name: At_Drought_P Parameter: Tissue Value: Whole Plant
  misc_feature: MA Experiment 20000437 PARAMETER Experiment Name: At_Drought_P Parameter: Treatment Value: Drought vs. No Drought
  misc_feature: MA Experiment ID: 20000453 Result: Up-regulated in Transcription
  misc_feature: MA Experiment 20000453 PARAMETER Experiment Name: At_100uM_ABA_P Parameter: Age (day) Value: 15
  misc_feature: MA Experiment 20000453 PARAMETER Experiment Name: At_100uM_ABA_P Parameter: Organism Value: A. thaliana
  misc_feature: MA Experiment 20000453 PARAMETER Experiment Name: At_100uM_ABA_P Parameter: Plant Line Value: WS
  misc_feature: MA Experiment 20000453 PARAMETER Experiment Name: At_100uM_ABA_P Parameter: Timepoint (hr) Value: 24
  misc_feature: MA Experiment 20000453 PARAMETER Experiment Name: At_100uM_ABA_P Parameter: Tissue Value: Aerial
  misc_feature: MA Experiment 20000453 PARAMETER Experiment Name: At_100uM_ABA_P Parameter: Treatment Value: 100uM ABA vs. No Treatment
  misc_feature: MA Experiment ID: 20000794 Result: Up-regulated in Transcription
  misc_feature: MA Experiment 20000794 PARAMETER Experiment Name: At_Petals_P Parameter: Age (day) Value: 23-25 days
  misc_feature: MA Experiment 20000794 PARAMETER Experiment Name: At_Petals_P Parameter: Plant Line Value: WS
  misc_feature: MA Experiment 20000794 PARAMETER Experiment Name: At_Petals_P Parameter: Tissue Value: Petals vs. Whole plant
  misc_feature: MA Experiment ID: 20001560 Result: Down-regulated in Transcription
  misc_feature: MA Experiment 20001560 PARAMETER Experiment Name: At_Drought_Soil_Dry_P Parameter: Age (day) Value: 28
  misc_feature: MA Experiment 20001560 PARAMETER Experiment Name: At_Drought_Soil_Dry_P Parameter: Organism Value: A. thaliana
  misc_feature: MA Experiment 20001560 PARAMETER Experiment Name: At_Drought_Soil_Dry_P Parameter: Plant Line Value: WS
  misc_feature: MA Experiment 20001560 PARAMETER Experiment Name: At_Drought_Soil_Dry_P Parameter: Post Timepoint (hr) Value: None
  misc_feature: MA Experiment 20001560 PARAMETER Experiment Name: At_Drought_Soil_Dry_P Parameter: Post-Treatment Value: None
  misc_feature: MA Experiment 20001560 PARAMETER Experiment Name: At_Drought_Soil_Dry_P Parameter: Timepoint (day) Value: 14
  misc_feature: MA Experiment 20001560 PARAMETER Experiment Name: At_Drought_Soil_Dry_P Parameter: Treatment Value: Drought vs. No Drought
  misc_feature: MA Experiment ID: 20001905 Result: Down-regulated in Transcription
  misc_feature: MA Experiment 20001905 PARAMETER Experiment Name: At_Drought_Reproduction_P Parameter: Age (day) Value: 40
  misc_feature: MA Experiment 20001905 PARAMETER Experiment Name: At_Drought_Reproduction_P Parameter: Organism Value: A. thaliana
  misc_feature: MA Experiment 20001905 PARAMETER Experiment Name: At_Drought_Reproduction_P Parameter: Plant Line Value: WS
  misc_feature: MA Experiment 20001905 PARAMETER Experiment Name: At_Drought_Reproduction_P Parameter: Timepoint (day) Value: 10
  misc_feature: MA Experiment 20001905 PARAMETER Experiment Name: At_Drought_Reproduction_P Parameter: Tissue Value: Rosettes
  misc_feature: MA Experiment 20001905 PARAMETER Experiment Name: At_Drought_Reproduction_P Parameter: Treatment Value: Drought vs. No Drought
aaagctggattctaaggaaagttatcaaaagttttgagagctttggatagtgaagctcaaagaactaaacaatgggcttcagagtttgtgttattgtcgtcttcttgggttgtcttcttctagtccctgagaaaacaatggctcaagaaatgaaacgtgcatcgatcgttatccaaggagctcgacgagtttgtgagaccgatgagaactttgtctgtgcgacattggactggtggcctcatgacaagtgcaactatgaccaatgtccttggggttactcttcagttatcaatatggatttaacgcgtccccttcttactaaagctattaaagctttcaagccgttgaggataagaattggtggttcgctgcaagatcaagttatttacgacgtaggaaatctcaaaactccttgccgtccattccaaaaaatgaacagcggtttgtttggattctctaaaggatgcttgcacatgaaacgatgggacgagctcaacagtttcctaaccgcaaccggagcggtagtgacattcggtttaaacgctttgcgtgggagacacaaactccgcggaaaggcgtggggtggtgcatgggatcacataaacactcaagatttcttaaactacacagtctcgaagggttacgttattgattcttgggaattcggaaacgagctgagtggaagcggagttggtgcgagcgtgagcgcagagctttacgggaaagacttgattgtacttaaagatgtaatcaacaaagtttataaaaattcttggttacacaagcctatacttggctcctggagggttctatgaacaacaatggtacaccaaacttcttgaaatttccggtcctagtgttgtcgacgttgtgactcatcatatatacaatcttggttcaggaaatgatcccgcgctggtgaagaagataatggatccgagttatttaagccaggtatcaaaaacattcaaggacgtgaaccagacgattcaagaacatggaccgtgggcttctccttgggttggagaatctggtggagcttacaatagtggtggccgtcatgtttctgacacattcatagatagcttctggtatctagatcagcttggaatgtcagcgagacacaacactaaagtttactgcagacagactttggttggagggttttacggcttgctcgaaaagggaacgtttgttccaaatcctgattactatagcgcgctgctttggcatcgtttaatgggaaaaggggttcttgcggtgcagacagatggaccgccacagctacgggtttacgcacattgttcaaaaggaagagccggtgtgacattgctactgataaatctaagcaatcaatcggattttacggttagtgtcagcaatggcataaacgtggttttgaatgcggaatcaaggaagaagaagtcattgttggatactttaaaaagaccattttcttggattggaagcaaagcttctgatggatatttgaatagagaagagtatcatctgacaccagaaaacggtgtgttgcgcagcaaaacaatgttcttgaatggtaaatcgttaaaaccgacggcaacaggagatatcccgagccttgaaccggtcctccgtagtgtgaactctccgcttaatgtcttgccattgtcgatgtcgttcattgtgttacctaattttgatgcttctgcttgttcatgatgttaatggggtctctctttgcttattgggaaaaaataaataaaaataaagaatagttgtaatttttttggtaattgtatctaatgctggtgataaatgt

SEQ ID NO: 40048 - protein, 256 aa, Arabidopsis thaliana
  peptide (1)..(256): Ceres Seq. ID no. 12579672
  misc_feature (1)..(60): Pfam Name: Glycosyl hydrolase family 79, N-terminal domain Pfam Description: Glycosyl hydrolase family 79, N-terminal domain
  misc_feature (1)..(60): Pfam Name: Glycosyl hydrolase family 79, N-terminal domain Pfam Description: Glycosyl hydrolase family 79, N-terminal domain
  misc_feature (1)..(256): Homolog of NCBI NO: 10177640 NR Description: contains similarity to heparanase~gene_id:MGG23.2
  misc_feature (1)..(256): Homolog of NCBI NO: 30692670 NR Description: expressed protein [Arabidopsis thaliana]
  misc_feature (1)..(256): Homolog of NCBI NO: 24413987 NR Description: contains ESTs
  misc_feature (189)..(256): Homolog of NCBI NO: 34393590 NR Description: putative beta-glucuronidase precursor
  misc_feature (1)..(152): Homolog of NCBI NO: 34393590 NR Description: putative beta-glucuronidase precursor
  misc_feature (1)..(256): Homolog of NCBI NO: 10177640 NR Description: contains similarity to heparanase~gene_id:MGG23.2
  misc_feature (1)..(256): Homolog of NCBI NO: 24413987 NR Description: contains ESTs
  misc_feature (1)..(152): Homolog of NCBI NO: 34393590 NR Description: putative beta-glucuronidase precursor
  misc_feature (1)..(256): Homolog of NCBI NO: 10176717 NR Description: contains similarity to heparanase~gene_id:MXM12.7
  misc_feature (1)..(256): Homolog of NCBI NO: 15240869 NR Description: glycosyl hydrolase family 79
  misc_feature (1)..(256): Homolog of NCBI NO: 22327999 NR Description: glycosyl hydrolase family 79
  misc_feature (1)..(256): Homolog of NCBI NO: 9757846 NR Description: contains similarity to heparanase~gene_id:MFB13.2
  misc_feature (1)..(255): Homolog of NCBI NO: 38174813 NR Description: putative heparanase [Hordeum vulgare subsp.
  misc_feature (189)..(256): Homolog of NCBI NO: 34393590 NR Description: putative beta-glucuronidase precursor
  misc_feature (1)..(256): Homolog of NCBI NO: 30692670 NR Description: expressed protein [Arabidopsis thaliana]
  misc_feature (1)..(255): Homolog of NCBI NO: 38174813 NR Description: putative heparanase [Hordeum vulgare subsp.
  misc_feature (1)..(256): Homolog of NCBI NO: 9757846 NR Description: contains similarity to heparanase~gene_id:MFB13.2
  misc_feature (1)..(256): Homolog of NCBI NO: 22327999 NR Description: glycosyl hydrolase family 79
  misc_feature (1)..(256): Homolog of NCBI NO: 15240869 NR Description: glycosyl hydrolase family 79
  misc_feature (1)..(256): Homolog of NCBI NO: 10176717 NR Description: contains similarity to heparanase~gene_id:MXM12.7
MDPSYLSQVSKTFKDVNQTIQEHGPWASPWVGESGGAYNSGGRHVSDTFIDSFWYLDQLGMSARHNTKVYCRQTLVGGFYGLLEKGTFVPNPDYYSALLWHRLMGKGVLAVQTDGPPQLRVYAHCSKGRAGVTLLLINLSNQSDFTVSVSNGINVVLNAESRKKKSLLDTLKRPFSWIGSKASDGYLNREEYHLTPENGVLRSKTMFLNGKSLKPTATGDIPSLEPVLRSVNSPLNVLPLSMSFIVLPNFDASACS

SEQ ID NO: 40049 - protein, 247 aa, Arabidopsis thaliana
  peptide (1)..(247): Ceres Seq. ID no. 12579673
  misc_feature (27)..(241): Pfam Name: Glycosyl hydrolase family 79, N-terminal domain Pfam Description: Glycosyl hydrolase family 79, N-terminal domain
  misc_feature (27)..(241): Pfam Name: Glycosyl hydrolase family 79, N-terminal domain Pfam Description: Glycosyl hydrolase family 79, N-terminal domain
  misc_feature (1)..(233): Homolog of NCBI NO: 10177640 NR Description: contains similarity to heparanase~gene_id:MGG23.2
  misc_feature (1)..(233): Homolog of NCBI NO: 30692670 NR Description: expressed protein [Arabidopsis thaliana]
  misc_feature (11)..(75): Homolog of NCBI NO: 24413987 NR Description: contains ESTs
  misc_feature (76)..(241): Homolog of NCBI NO: 24413987 NR Description: contains ESTs
  misc_feature (7)..(231): Homolog of NCBI NO: 34393590 NR Description: putative beta-glucuronidase precursor
  misc_feature (1)..(233): Homolog of NCBI NO: 10177640 NR Description: contains similarity to heparanase~gene_id:MGG23.2
  misc_feature (11)..(75): Homolog of NCBI NO: 24413987 NR Description: contains ESTs
  misc_feature (7)..(231): Homolog of NCBI NO: 34393590 NR Description: putative beta-glucuronidase precursor
  misc_feature (1)..(241): Homolog of NCBI NO: 10176717 NR Description: contains similarity to heparanase~gene_id:MXM12.7
  misc_feature (23)..(241): Homolog of NCBI NO: 15240869 NR Description: glycosyl hydrolase family 79
  misc_feature (1)..(241): Homolog of NCBI NO: 22327999 NR Description: glycosyl hydrolase family 79
  misc_feature (27)..(241): Homolog of NCBI NO: 9757846 NR Description: contains similarity to heparanase~gene_id:MFB13.2
  misc_feature (4)..(241): Homolog of NCBI NO: 38174813 NR Description: putative heparanase [Hordeum vulgare subsp.
  misc_feature (76)..(241): Homolog of NCBI NO: 24413987 NR Description: contains ESTs
  misc_feature (1)..(233): Homolog of NCBI NO: 30692670 NR Description: expressed protein [Arabidopsis thaliana]
  misc_feature (4)..(241): Homolog of NCBI NO: 38174813 NR Description: putative heparanase [Hordeum vulgare subsp.
  misc_feature (27)..(241): Homolog of NCBI NO: 9757846 NR Description: contains similarity to heparanase~gene_id:MFB13.2
  misc_feature (1)..(241): Homolog of NCBI NO: 22327999 NR Description: glycosyl hydrolase family 79
  misc_feature (23)..(241): Homolog of NCBI NO: 15240869 NR Description: glycosyl hydrolase family 79
  misc_feature (1)..(241): Homolog of NCBI NO: 10176717 NR Description: contains similarity to heparanase~gene_id:MXM12.7
MGFRVCVIVVFLGCLLLVPEKTMAQEMKRASIVIQGARRVCETDENFVCATLDWWPHDKCNYDQCPWGYSSVINMDLTRPLLTKAIKAFKPLRIRIGGSLQDQVIYDVGNLKTPCRPFQKMNSGLFGFSKGCLHMKRWDELNSFLTATGAVVTFGLNALRGRHKLRGKAWGGAWDHINTQDFLNYTVSKGYVIDSWEFGNELSGSGVGASVSAELYGKDLIVLKDVINKVYKNSWLHKPILGSWRVL

SEQ ID NO: 40050 - protein, 225 aa, Arabidopsis thaliana
  peptide (1)..(225): Ceres Seq. ID no. 12579674
  misc_feature (5)..(219): Pfam Name: Glycosyl hydrolase family 79, N-terminal domain Pfam Description: Glycosyl hydrolase family 79, N-terminal domain
  misc_feature (5)..(219): Pfam Name: Glycosyl hydrolase family 79, N-terminal domain Pfam Description: Glycosyl hydrolase family 79, N-terminal domain
  misc_feature (1)..(211): Homolog of NCBI NO: 10177640 NR Description: contains similarity to heparanase~gene_id:MGG23.2
  misc_feature (1)..(211): Homolog of NCBI NO: 30692670 NR Description: expressed protein [Arabidopsis thaliana]
  misc_feature (1)..(53): Homolog of NCBI NO: 24413987 NR Description: contains ESTs
  misc_feature (54)..(219): Homolog of NCBI NO: 24413987 NR Description: contains ESTs
  misc_feature (1)..(209): Homolog of NCBI NO: 34393590 NR Description: putative beta-glucuronidase precursor
  misc_feature (1)..(211): Homolog of NCBI NO: 10177640 NR Description: contains similarity to heparanase~gene_id:MGG23.2
  misc_feature (1)..(53): Homolog of NCBI NO: 24413987 NR Description: contains ESTs
  misc_feature (1)..(209): Homolog of NCBI NO: 34393590 NR Description: putative beta-glucuronidase precursor
  misc_feature (1)..(219): Homolog of NCBI NO: 10176717 NR Description: contains similarity to heparanase~gene_id:MXM12.7
  misc_feature (1)..(219): Homolog of NCBI NO: 15240869 NR Description: glycosyl hydrolase family 79
  misc_feature (1)..(219): Homolog of NCBI NO: 22327999 NR Description: glycosyl hydrolase family 79
  misc_feature (5)..(219): Homolog of NCBI NO: 9757846 NR Description: contains similarity to heparanase~gene_id:MFB13.2
  misc_feature (1)..(219): Homolog of NCBI NO: 38174813 NR Description: putative heparanase [Hordeum vulgare subsp.
  misc_feature (54)..(219): Homolog of NCBI NO: 24413987 NR Description: contains ESTs
  misc_feature (1)..(211): Homolog of NCBI NO: 30692670 NR Description: expressed protein [Arabidopsis thaliana]
  misc_feature (1)..(219): Homolog of NCBI NO: 38174813 NR Description: putative heparanase [Hordeum vulgare subsp.
  misc_feature (5)..(219): Homolog of NCBI NO: 9757846 NR Description: contains similarity to heparanase~gene_id:MFB13.2
  misc_feature (1)..(219): Homolog of NCBI NO: 22327999 NR Description: glycosyl hydrolase family 79
  misc_feature (1)..(219): Homolog of NCBI NO: 15240869 NR Description: glycosyl hydrolase family 79
  misc_feature (1)..(219): Homolog of NCBI NO: 10176717 NR Description: contains similarity to heparanase~gene_id:MXM12.7
MAQEMKRASIVIQGARRVCETDENFVCATLDWWPHDKCNYDQCPWGYSSVINMDLTRPLLTKAIKAFKPLRIRIGGSLQDQVIYDVGNLKTPCRPFQKMNSGLFGFSKGCLHMKRWDELNSFLTATGAVVTFGLNALRGRHKLRGKAWGGAWDHINTQDFLNYTVSKGYVIDSWEFGNELSGSGVGASVSAELYGKDLIVLKDVINKVYKNSWLHKPILGSWRVL

SEQ ID NO: 40051 - DNA, 1253 bp, Arabidopsis thaliana
  misc_feature (1)..(1253): Ceres Seq. ID no. 12395394
  misc_feature: MA Experiment ID: 108434 Result: Up-regulated in Transcription
  misc_feature: MA Experiment 108434 PARAMETER Experiment Name: At_Root_Tips_cDNA_P Parameter: Tissue Value: Root Tips
  misc_feature: MA Experiment ID: 108461 Result: Up-regulated in Transcription
  misc_feature: MA Experiment 108461 PARAMETER Experiment Name: At_Germinating_Seeds_cDNA_P Parameter: Age (day) Value: 1 vs. 0
  misc_feature: MA Experiment 108461 PARAMETER Experiment Name: At_Germinating_Seeds_cDNA_P Parameter: Tissue Value: Germinating Seeds
  misc_feature: MA Experiment ID: 108462 Result: Up-regulated in Transcription
  misc_feature: MA Experiment 108462 PARAMETER Experiment Name: At_Germinating_Seeds_cDNA_P Parameter: Age (day) Value: 2 vs. 0
  misc_feature: MA Experiment 108462 PARAMETER Experiment Name: At_Germinating_Seeds_cDNA_P Parameter: Tissue Value: Germinating Seeds
  misc_feature: MA Experiment ID: 108668 Result: Up-regulated in Transcription
  misc_feature: MA Experiment 108668 PARAMETER Experiment Name: At_2mM_SA_cDNA_P Parameter: Plant Line Value: WS
  misc_feature: MA Experiment 108668 PARAMETER Experiment Name: At_2mM_SA_cDNA_P Parameter: Timepoint (hr) Value: 6
  misc_feature: MA Experiment 108668 PARAMETER Experiment Name: At_2mM_SA_cDNA_P Parameter: Treatment Value: 2mM SA vs. No Treatment
  misc_feature: MA Experiment ID: 20000113 Result: Down-regulated in Transcription
  misc_feature: MA Experiment 20000113 PARAMETER Experiment Name: At_42deg_Heat_cDNA_P Parameter: Temperature (deg C) Value: 42 vs. 22
  misc_feature: MA Experiment 20000113 PARAMETER Experiment Name: At_42deg_Heat_cDNA_P Parameter: Timepoint (hr) Value: 8
  misc_feature: MA Experiment 20000113 PARAMETER Experiment Name: At_42deg_Heat_cDNA_P Parameter: Tissue Value: Aerial
  misc_feature: MA Experiment ID: 20000179 Result: Up-regulated in Transcription
  misc_feature: MA Experiment 20000179 PARAMETER Experiment Name: At_Germinating_Seeds_P Parameter: Age (hr) Value: 6 vs. 0
  misc_feature: MA Experiment 20000179 PARAMETER Experiment Name: At_Germinating_Seeds_P Parameter: Tissue Value: Germinating Seeds
  misc_feature: MA Experiment ID: 20000182 Result: Up-regulated in Transcription
  misc_feature: MA Experiment 20000182 PARAMETER Experiment Name: At_2mM_SA_P Parameter: Age (day) Value: 14
  misc_feature: MA Experiment 20000182 PARAMETER Experiment Name: At_2mM_SA_P Parameter: Organism Value: A. thaliana
  misc_feature: MA Experiment 20000182 PARAMETER Experiment Name: At_2mM_SA_P Parameter: Plant Line Value: WS
  misc_feature: MA Experiment 20000182 PARAMETER Experiment Name: At_2mM_SA_P Parameter: Timepoint (hr) Value: 6
  misc_feature: MA Experiment 20000182 PARAMETER Experiment Name: At_2mM_SA_P Parameter: Tissue Value: Aerial
  misc_feature: MA Experiment 20000182 PARAMETER Experiment Name: At_2mM_SA_P Parameter: Treatment Value: 2mM SA vs. No Treatment
  misc_feature: MA Experiment ID: 20000235 Result: Down-regulated in Transcription
  misc_feature: MA Experiment 20000235 PARAMETER Experiment Name: At_Siliques_P Parameter: Age (day) Value: 21
  misc_feature: MA Experiment 20000235 PARAMETER Experiment Name: At_Siliques_P Parameter: Organism Value: A. thaliana
  misc_feature: MA Experiment 20000235 PARAMETER Experiment Name: At_Siliques_P Parameter: Plant Line Value: WS
  misc_feature: MA Experiment 20000235 PARAMETER Experiment Name: At_Siliques_P Parameter: Tissue Value: 5-10mm Siliques vs. Whole Plant
  misc_feature: MA Experiment ID: 20000437 Result: Up-regulated in Transcription
  misc_feature: MA Experiment 20000437 PARAMETER Experiment Name: At_Drought_P Parameter: Age (day) Value: 8
  misc_feature: MA Experiment 20000437 PARAMETER Experiment Name: At_Drought_P Parameter: Organism Value: A. thaliana
  misc_feature: MA Experiment 20000437 PARAMETER Experiment Name: At_Drought_P Parameter: Plant Line Value: WS
  misc_feature: MA Experiment 20000437 PARAMETER Experiment Name: At_Drought_P Parameter: Timepoint (hr) Value: 24
  misc_feature: MA Experiment 20000437 PARAMETER Experiment Name: At_Drought_P Parameter: Tissue Value: Whole Plant
  misc_feature: MA Experiment 20000437 PARAMETER Experiment Name: At_Drought_P Parameter: Treatment Value: Drought vs. No Drought
  misc_feature: MA Experiment ID: 20000794 Result: Down-regulated in Transcription
  misc_feature: MA Experiment 20000794 PARAMETER Experiment Name: At_Petals_P Parameter: Age (day) Value: 23-25 days
  misc_feature: MA Experiment 20000794 PARAMETER Experiment Name: At_Petals_P Parameter: Plant Line Value: WS
  misc_feature: MA Experiment 20000794 PARAMETER Experiment Name: At_Petals_P Parameter: Tissue Value: Petals vs. Whole plant
  misc_feature: MA Experiment ID: 20001905 Result: Up-regulated in Transcription
  misc_feature: MA Experiment 20001905 PARAMETER Experiment Name: At_Drought_Reproduction_P Parameter: Age (day) Value: 40
  misc_feature: MA Experiment 20001905 PARAMETER Experiment Name: At_Drought_Reproduction_P Parameter: Organism Value: A. thaliana
  misc_feature: MA Experiment 20001905 PARAMETER Experiment Name: At_Drought_Reproduction_P Parameter: Plant Line Value: WS
  misc_feature: MA Experiment 20001905 PARAMETER Experiment Name: At_Drought_Reproduction_P Parameter: Timepoint (day) Value: 10
  misc_feature: MA Experiment 20001905 PARAMETER Experiment Name: At_Drought_Reproduction_P Parameter: Tissue Value: Rosettes
  misc_feature: MA Experiment 20001905 PARAMETER Experiment Name: At_Drought_Reproduction_P Parameter: Treatment Value: Drought vs. No Drought
attatcactacccacatctgtcttaccttctccgatctctctctctatttgtccacctcacacacaaccctataaacaagacaagacctcgcaaagctcaaaccttttccttctttttttctatcaagttcctcacttctcggatccgggtcctaaatctgggtcaaccctttttacgatcatcggaaatggaccctccactagtgaacgattcctccttctctgcagctaatccttcttcttacactctctccgagatttggcctttccctgtaaacgacgccgttcgctctggtctccgtttagctgttaactccggtcgagtctttactcgctctgaacattccggcaataaagacgtctccgcggctgaggaatctacagtcaccgatctaactgctggctggggaagtagaaagactagagatttgaactctgaggatgattcttcaaagatggtttcttccagcagcagtggtaatgaattgaaagaatcaggggataagaaaagaaaactgtgtggatctgaaagtggaaatggagatggttcgatgagacctgaaggcgaaacaagttcgggtggtggtggaagcaaagcaacggaacagaagaacaaacctgagccaccaaaggattatattcatgtgagagcaagaagaggacaagctactgaccggcatagtttagcagagcgagctagaagagaaaagatcagtgagaagatgacagctcttcaagatataattccaggatgtaataagataatcggaaaagcccttgtgctcgatgagattatcaattatattcagtcattgcagcggcaagttgagtttctatcaatgaagctagaagttgttaactcgggtgcaagtactggtccgacaataggagtttttccttccggtgatctcgggactttaccgattgacgttcatcgaacaatatacgagcaacaagaagctaatgaaacccgagtatctcaaccggagtggctccatatgcaggttgatgggaactttaaccgaaccacataaaaaagagtctttctctgattgatggatgtgttttgtaggcagtaaaaatgaatgcaaccctttattttttatcctatgcgtgtgtatcattttgctgttatatcataagatagaatatgagagtgaccagagagattaacactttataaaacattgttgtattgtcctattatataacttgtaacaattgattcagtaacatatgttggtcttaaatcc

SEQ ID NO: 40052 - protein, 343 aa, Arabidopsis thaliana
  peptide (1)..(343): Ceres Seq. ID no. 12395395
  misc_feature (222)..(272): Pfam Name: Helix-loop-helix DNA-binding domain Pfam Description: Helix-loop-helix DNA-binding domain
  misc_feature (124)..(295): Homolog of NCBI NO: 29647487 NR Description: OJ1191_A10.7 [Oryza sativa (japonica
  misc_feature (50)..(286): Homolog of NCBI NO: 20127085 NR Description: putative bHLH transcription factor [Arabidopsis
  misc_feature (81)..(308): Homolog of NCBI NO: 30696324 NR Description: bHLH protein [Arabidopsis thaliana]
  misc_feature (81)..(308): Homolog of NCBI NO: 25453562 NR Description: helix-loop-helix protein homolog
  misc_feature (81)..(308): Homolog of NCBI NO: 25404871 NR Description: protein T30E16.21 [imported] - Arabidopsis
  misc_feature (81)..(343): Homolog of NCBI NO: 21592490 NR Description: unknown [Arabidopsis thaliana]
  misc_feature (81)..(343): Homolog of NCBI NO: 18406408 NR Description: bHLH protein; protein id: At1g59640.1, supported
  misc_feature (134)..(343): Homolog of NCBI NO: 29150361 NR Description: hypothetical protein [Oryza sativa (japonica
  misc_feature (71)..(343): Homolog of NCBI NO: 33339703 NR Description: MYC1 [Catharanthus roseus]
  misc_feature (63)..(343): Homolog of NCBI NO: 15241896 NR Description: putative protein
YHYPHLSYLLRSLSLFVHLTHNPINKTRPRKAQTFSFFFSIKFLTSRIRVLNLGQPFLRSSEMDPPLVNDSSFSAANPSSYTLSEIWPFPVNDAVRSGLRLAVNSGRVFTRSEHSGNKDVSAAEESTVTDLTAGWGSRKTRDLNSEDDSSKMVSSSSSGNELKESGDKKRKLCGSESGNGDGSMRPEGETSSGGGGSKATEQKNKPEPPKDYIHVRARRGQATDRHSLAERARREKISEKMTALQDIIPGCNKIIGKALVLDEIINYIQSLQRQVEFLSMKLEVVNSGASTGPTIGVFPSGDLGTLPIDVHRTIYEQQEANETRVSQPEWLHMQVDGNFNRTT

SEQ ID NO: 40053 - protein, 281 aa, Arabidopsis thaliana
  peptide (1)..(281): Ceres Seq. ID no. 12395396
  misc_feature (160)..(210): Pfam Name: Helix-loop-helix DNA-binding domain Pfam Description: Helix-loop-helix DNA-binding domain
  misc_feature (62)..(233): Homolog of NCBI NO: 29647487 NR Description: OJ1191_A10.7 [Oryza sativa (japonica
  misc_feature (1)..(224): Homolog of NCBI NO: 20127085 NR Description: putative bHLH transcription factor [Arabidopsis
  misc_feature (19)..(246): Homolog of NCBI NO: 30696324 NR Description: bHLH protein [Arabidopsis thaliana]
  misc_feature (19)..(246): Homolog of NCBI NO: 25453562 NR Description: helix-loop-helix protein homolog
  misc_feature (19)..(246): Homolog of NCBI NO: 25404871 NR Description: protein T30E16.21 [imported] - Arabidopsis
  misc_feature (19)..(281): Homolog of NCBI NO: 21592490 NR Description: unknown [Arabidopsis thaliana]
  misc_feature (19)..(281): Homolog of NCBI NO: 18406408 NR Description: bHLH protein; protein id: At1g59640.1, supported
  misc_feature (72)..(281): Homolog of NCBI NO: 29150361 NR Description: hypothetical protein [Oryza sativa (japonica
  misc_feature (9)..(281): Homolog of NCBI NO: 33339703 NR Description: MYC1 [Catharanthus roseus]
  misc_feature (1)..(281): Homolog of NCBI NO: 15241896 NR Description: putative protein
MDPPLVNDSSFSAANPSSYTLSEIWPFPVNDAVRSGLRLAVNSGRVFTRSEHSGNKDVSAAEESTVTDLTAGWGSRKTRDLNSEDDSSKMVSSSSSGNELKESGDKKRKLCGSESGNGDGSMRPEGETSSGGGGSKATEQKNKPEPPKDYIHVRARRGQATDRHSLAERARREKISEKMTALQDIIPGCNKIIGKALVLDEIINYIQSLQRQVEFLSMKLEVVNSGASTGPTIGVFPSGDLGTLPIDVHRTIYEQQEANETRVSQPEWLHMQVDGNFNRTT

SEQ ID NO: 40054 - protein, 192 aa, Arabidopsis thaliana
  peptide (1)..(192): Ceres Seq. ID no. 12395397
  misc_feature (71)..(121): Pfam Name: Helix-loop-helix DNA-binding domain Pfam Description: Helix-loop-helix DNA-binding domain
  misc_feature (1)..(144): Homolog of NCBI NO: 29647487 NR Description: OJ1191_A10.7 [Oryza sativa (japonica
  misc_feature (1)..(135): Homolog of NCBI NO: 20127085 NR Description: putative bHLH transcription factor [Arabidopsis
  misc_feature (1)..(157): Homolog of NCBI NO: 30696324 NR Description: bHLH protein [Arabidopsis thaliana]
  misc_feature (1)..(157): Homolog of NCBI NO: 25453562 NR Description: helix-loop-helix protein homolog
  misc_feature (1)..(157): Homolog of NCBI NO: 25404871 NR Description: protein T30E16.21 [imported] - Arabidopsis
  misc_feature (1)..(192): Homolog of NCBI NO: 21592490 NR Description: unknown [Arabidopsis thaliana]
  misc_feature (1)..(192): Homolog of NCBI NO: 18406408 NR Description: bHLH protein; protein id: At1g59640.1, supported
  misc_feature (1)..(192): Homolog of NCBI NO: 29150361 NR Description: hypothetical protein [Oryza sativa (japonica
  misc_feature (1)..(192): Homolog of NCBI NO: 33339703 NR Description: MYC1 [Catharanthus roseus]
  misc_feature (1)..(192): Homolog of NCBI NO: 15241896 NR Description: putative protein
MVSSSSSGNELKESGDKKRKLCGSESGNGDGSMRPEGETSSGGGGSKATEQKNKPEPPKDYIHVRARRGQATDRHSLAERARREKISEKMTALQDIIPGCNKIIGKALVLDEIINYIQSLQRQVEFLSMKLEVVNSGASTGPTIGVFPSGDLGTLPIDVHRTIYEQQEANETRVSQPEWLHMQVDGNFNRTT

SEQ ID NO: 40055 - DNA, 1209 bp, Arabidopsis thaliana; identical to SEQ ID NO: 23864
  misc_feature (1)..(1209): Ceres Seq. ID no. 12324683
  misc_feature: MA Experiment ID: 20000264 Result: Up-regulated in Transcription
  misc_feature: MA Experiment 20000264 PARAMETER Experiment Name: At_Open_Flower_P Parameter: Age (day) Value: 21
  misc_feature: MA Experiment 20000264 PARAMETER Experiment Name: At_Open_Flower_P Parameter: Plant Line Value: WS
  misc_feature: MA Experiment 20000264 PARAMETER Experiment Name: At_Open_Flower_P Parameter: Tissue Value: Open Flower vs. Whole Plant
  misc_feature: MA Experiment ID: 20000265 Result: Up-regulated in Transcription
  misc_feature: MA Experiment 20000265 PARAMETER Experiment Name: At_Open_Flower_P Parameter: Age (day) Value: 21
  misc_feature: MA Experiment 20000265 PARAMETER Experiment Name: At_Open_Flower_P Parameter: Plant Line Value: WS
  misc_feature: MA Experiment 20000265 PARAMETER Experiment Name: At_Open_Flower_P Parameter: Tissue Value: Closed Flower vs. Whole Plant
  misc_feature: MA Experiment ID: 20000286 Result: Up-regulated in Transcription
  misc_feature: MA Experiment 20000286 PARAMETER Experiment Name: At_Open_Flower_P Parameter: Age (day) Value: 21
  misc_feature: MA Experiment 20000286 PARAMETER Experiment Name: At_Open_Flower_P Parameter: Plant Line Value: WS
  misc_feature: MA Experiment 20000286 PARAMETER Experiment Name: At_Open_Flower_P Parameter: Tissue Value: Half Open vs. Whole Plant
  misc_feature: MA Experiment ID: 20000794 Result: Up-regulated in Transcription
  misc_feature: MA Experiment 20000794 PARAMETER Experiment Name: At_Petals_P Parameter: Age (day) Value: 23-25 days
  misc_feature: MA Experiment 20000794 PARAMETER Experiment Name: At_Petals_P Parameter: Plant Line Value: WS
  misc_feature: MA Experiment 20000794 PARAMETER Experiment Name: At_Petals_P Parameter: Tissue Value: Petals vs. Whole plant
  misc_feature: MA Experiment ID: 20001910 Result: Up-regulated in Transcription
  misc_feature: MA Experiment 20001910 PARAMETER Experiment Name: At_Drought_Reproduction_P Parameter: Age (day) Value: 37
  misc_feature: MA Experiment 20001910 PARAMETER Experiment Name: At_Drought_Reproduction_P Parameter: Organism Value: A. thaliana
  misc_feature: MA Experiment 20001910 PARAMETER Experiment Name: At_Drought_Reproduction_P Parameter: Plant Line Value: WS
  misc_feature: MA Experiment 20001910 PARAMETER Experiment Name: At_Drought_Reproduction_P Parameter: Timepoint (day) Value: 7
  misc_feature: MA Experiment 20001910 PARAMETER Experiment Name: At_Drought_Reproduction_P Parameter: Tissue Value: Flowers
  misc_feature: MA Experiment 20001910 PARAMETER Experiment Name: At_Drought_Reproduction_P Parameter: Treatment Value: Drought vs. No Drought
  misc_feature: MA Experiment ID: 20001911 Result: Up-regulated in Transcription
  misc_feature: MA Experiment 20001911 PARAMETER Experiment Name: At_Drought_Reproduction_P Parameter: Age (day) Value: 40
  misc_feature: MA Experiment 20001911 PARAMETER Experiment Name: At_Drought_Reproduction_P Parameter: Organism Value: A. thaliana
  misc_feature: MA Experiment 20001911 PARAMETER Experiment Name: At_Drought_Reproduction_P Parameter: Plant Line Value: WS
  misc_feature: MA Experiment 20001911 PARAMETER Experiment Name: At_Drought_Reproduction_P Parameter: Timepoint (day) Value: 10
  misc_feature: MA Experiment 20001911 PARAMETER Experiment Name: At_Drought_Reproduction_P Parameter: Tissue Value: Flowers
  misc_feature: MA Experiment 20001911 PARAMETER Experiment Name: At_Drought_Reproduction_P Parameter: Treatment Value: Drought vs. No Drought

SEQ ID NO: 40056 - protein, 308 aa, Arabidopsis thaliana; identical to SEQ ID NO: 23865
  peptide (1)..(308): Ceres Seq. ID no. 12324684
  misc_feature (73)..(249): Pfam Name: PAP2 superfamily Pfam Description: PAP2 superfamily
  misc_feature (73)..(249): Pfam Name: PAP2 superfamily Pfam Description: PAP2 superfamily
  misc_feature (1)..(278): Homolog of NCBI NO: 15724220 NR Description: At2g01180/F10A8.6 [Arabidopsis thaliana]
  misc_feature (1)..(278): Homolog of NCBI NO: 21554001 NR Description: putative phosphatidic acid phosphatase
  misc_feature (1)..(269): Homolog of NCBI NO: 38637527 NR Description: putative phosphatidic acid phosphatase beta
  misc_feature (3)..(297): Homolog of NCBI NO: 9621903 NR Description: phosphatidic acid phosphatase alpha [Vigna
  misc_feature (1)..(298): Homolog of NCBI NO: 38637528 NR Description: unknown protein [Oryza sativa (japonica
  misc_feature (1)..(278): Homolog of NCBI NO: 15724220 NR Description: At2g01180/F10A8.6 [Arabidopsis thaliana]
  misc_feature (1)..(269): Homolog of NCBI NO: 38637527 NR Description: putative phosphatidic acid phosphatase beta
  misc_feature (1)..(298): Homolog of NCBI NO: 38637528 NR Description: unknown protein [Oryza sativa (japonica
  misc_feature (1)..(308): Homolog of NCBI NO: 21593222 NR Description: diacylglycerol pyrophosphate phosphatase,
  misc_feature (1)..(308): Homolog of NCBI NO: 18401811 NR Description: diacylglycerol pyrophosphate phosphatase, putative
  misc_feature (1)..(308): Homolog of NCBI NO: 9279656 NR Description: phosphatidic acid phosphatase-like protein
  misc_feature (1)..(265): Homolog of NCBI NO: 15218051 NR Description: putative phosphatidic acid phosphatase
  misc_feature (1)..(269): Homolog of NCBI NO: 10673973 NR Description: phosphatidic acid phosphatase beta [Vigna
  misc_feature (3)..(297): Homolog of NCBI NO: 9621903 NR Description: phosphatidic acid phosphatase alpha [Vigna
  misc_feature (1)..(278): Homolog of NCBI NO: 21554001 NR Description: putative phosphatidic acid phosphatase
  misc_feature (1)..(269): Homolog of NCBI NO: 10673973 NR Description: phosphatidic acid phosphatase beta [Vigna
  misc_feature (1)..(265): Homolog of NCBI NO: 15218051 NR Description: putative phosphatidic acid phosphatase
  misc_feature (1)..(308): Homolog of NCBI NO: 9279656 NR Description: phosphatidic acid phosphatase-like protein
  misc_feature (1)..(308): Homolog of NCBI NO: 18401811 NR Description: diacylglycerol pyrophosphate phosphatase, putative
  misc_feature (1)..(308): Homolog of NCBI NO: 21593222 NR Description: diacylglycerol pyrophosphate phosphatase,

SEQ ID NO: 40057 - protein, 304 aa, Arabidopsis thaliana; identical to SEQ ID NO: 23866
  peptide (1)..(304): Ceres Seq. ID no. 12324685
  misc_feature (69)..(245): Pfam Name: PAP2 superfamily Pfam Description: PAP2 superfamily
  misc_feature (69)..(245): Pfam Name: PAP2 superfamily Pfam Description: PAP2 superfamily
  misc_feature (1)..(274): Homolog of NCBI NO: 15724220 NR Description: At2g01180/F10A8.6 [Arabidopsis thaliana]
  misc_feature (1)..(274): Homolog of NCBI NO: 21554001 NR Description: putative phosphatidic acid phosphatase
  misc_feature (1)..(265): Homolog of NCBI NO: 38637527 NR Description: putative phosphatidic acid phosphatase beta
  misc_feature (1)..(293): Homolog of NCBI NO: 9621903 NR Description: phosphatidic acid phosphatase alpha [Vigna
  misc_feature (1)..(294): Homolog of NCBI NO: 38637528 NR Description: unknown protein [Oryza sativa (japonica
  misc_feature (1)..(274): Homolog of NCBI NO: 21554001 NR Description: putative phosphatidic acid phosphatase
  misc_feature (1)..(293): Homolog of NCBI NO: 9621903 NR Description: phosphatidic acid phosphatase alpha [Vigna
  misc_feature (1)..(304): Homolog of NCBI NO: 21593222 NR Description: diacylglycerol pyrophosphate phosphatase,
  misc_feature (1)..(304): Homolog of NCBI NO: 18401811 NR Description: diacylglycerol pyrophosphate phosphatase, putative
  misc_feature (1)..(304): Homolog of NCBI NO: 9279656 NR Description: phosphatidic acid phosphatase-like protein
  misc_feature (1)..(261): Homolog of NCBI NO: 15218051 NR Description: putative phosphatidic acid phosphatase
  misc_feature (1)..(265): Homolog of NCBI NO: 10673973 NR Description: phosphatidic acid phosphatase beta [Vigna
  misc_feature (1)..(294): Homolog of NCBI NO: 38637528 NR Description: unknown protein [Oryza sativa (japonica
  misc_feature (1)..(265): Homolog of NCBI NO: 38637527 NR Description: putative phosphatidic acid phosphatase beta
  misc_feature (1)..(274): Homolog of NCBI NO: 15724220 NR Description: At2g01180/F10A8.6 [Arabidopsis thaliana]
  misc_feature (1)..(265): Homolog of NCBI NO: 10673973 NR Description: phosphatidic acid phosphatase beta [Vigna
  misc_feature (1)..(261): Homolog of NCBI NO: 15218051 NR Description: putative phosphatidic acid phosphatase
  misc_feature (1)..(304): Homolog of NCBI NO: 9279656 NR Description: phosphatidic acid phosphatase-like protein
  misc_feature (1)..(304): Homolog of NCBI NO: 18401811 NR Description: diacylglycerol pyrophosphate phosphatase, putative
  misc_feature (1)..(304): Homolog of NCBI NO: 21593222 NR Description: diacylglycerol pyrophosphate phosphatase,

SEQ ID NO: 40058 - protein, 256 aa, Arabidopsis thaliana; identical to SEQ ID NO: 23867
  peptide (1)..(256): Ceres Seq. ID no. 12324686
  misc_feature (21)..(197): Pfam Name: PAP2 superfamily Pfam Description: PAP2 superfamily
  misc_feature (21)..(197): Pfam Name: PAP2 superfamily Pfam Description: PAP2 superfamily
  misc_feature (1)..(226): Homolog of NCBI NO: 15724220 NR Description: At2g01180/F10A8.6 [Arabidopsis thaliana]
  misc_feature (1)..(226): Homolog of NCBI NO: 21554001 NR Description: putative phosphatidic acid phosphatase
  misc_feature (1)..(217): Homolog of NCBI NO: 38637527 NR Description: putative phosphatidic acid phosphatase beta
  misc_feature (1)..(245): Homolog of NCBI NO: 9621903 NR Description: phosphatidic acid phosphatase alpha [Vigna
  misc_feature (1)..(246): Homolog of NCBI NO: 38637528 NR Description: unknown protein [Oryza sativa (japonica
  misc_feature (1)..(226): Homolog of NCBI NO: 15724220 NR Description: At2g01180/F10A8.6 [Arabidopsis thaliana]
  misc_feature (1)..(217): Homolog of NCBI NO: 38637527 NR Description: putative phosphatidic acid phosphatase beta
  misc_feature (1)..(246): Homolog of NCBI NO: 38637528 NR Description: unknown protein [Oryza sativa (japonica
  misc_feature (1)..(256): Homolog of NCBI NO: 21593222 NR Description: diacylglycerol pyrophosphate phosphatase,
  misc_feature (1)..(256): Homolog of NCBI NO: 18401811 NR Description: diacylglycerol pyrophosphate phosphatase, putative
  misc_feature (1)..(256): Homolog of NCBI NO: 9279656 NR Description: phosphatidic acid phosphatase-like protein
  misc_feature (1)..(213): Homolog of NCBI NO: 15218051 NR Description: putative phosphatidic acid phosphatase
  misc_feature (1)..(217): Homolog of NCBI NO: 10673973 NR Description: phosphatidic acid phosphatase beta [Vigna
  misc_feature (1)..(245): Homolog of NCBI NO: 9621903 NR Description: phosphatidic acid phosphatase alpha [Vigna
  misc_feature (1)..(226): Homolog of NCBI NO: 21554001 NR Description: putative phosphatidic acid phosphatase
  misc_feature (1)..(217): Homolog of NCBI NO: 10673973 NR Description: phosphatidic acid phosphatase beta [Vigna
  misc_feature (1)..(213): Homolog of NCBI NO: 15218051 NR Description: putative phosphatidic acid phosphatase
  misc_feature (1)..(256): Homolog of NCBI NO: 9279656 NR Description: phosphatidic acid phosphatase-like protein
  misc_feature (1)..(256): Homolog of NCBI NO: 18401811 NR Description: diacylglycerol pyrophosphate phosphatase, putative
  misc_feature (1)..(256): Homolog of NCBI NO: 21593222 NR Description: diacylglycerol pyrophosphate phosphatase,

SEQ ID NO: 40059 - DNA, 1617 bp, Arabidopsis thaliana
  misc_feature (1)..(1617): Ceres Seq. ID no. 13494093
  misc_feature: MA Experiment ID: 108462 Result: Down-regulated in Transcription
  misc_feature: MA Experiment 108462 PARAMETER Experiment Name: At_Germinating_Seeds_cDNA_P Parameter: Age (day) Value: 2 vs. 0
  misc_feature: MA Experiment 108462 PARAMETER Experiment Name: At_Germinating_Seeds_cDNA_P Parameter: Tissue Value: Germinating Seeds
  misc_feature: MA Experiment ID: 108463 Result: Down-regulated in Transcription
  misc_feature: MA Experiment 108463 PARAMETER Experiment Name: At_Germinating_Seeds_cDNA_P Parameter: Age (day) Value: 3 vs. 0
  misc_feature: MA Experiment 108463 PARAMETER Experiment Name: At_Germinating_Seeds_cDNA_P Parameter: Tissue Value: Germinating Seeds
  misc_feature: MA Experiment ID: 108464 Result: Down-regulated in Transcription
  misc_feature: MA Experiment 108464 PARAMETER Experiment Name: At_Germinating_Seeds_cDNA_P Parameter: Age (day) Value: 4 vs. 0
  misc_feature: MA Experiment 108464 PARAMETER Experiment Name: At_Germinating_Seeds_cDNA_P Parameter: Tissue Value: Germinating Seeds
  misc_feature: MA Experiment ID: 20000307 Result: Down-regulated in Transcription
  misc_feature: MA Experiment 20000307 PARAMETER Experiment Name: At_Germinating_Seeds_Sub_P Parameter: Age (hr) Value: 24 vs. 0
  misc_feature: MA Experiment 20000307 PARAMETER Experiment Name: At_Germinating_Seeds_Sub_P Parameter: Organism Value: A. thaliana
  misc_feature: MA Experiment 20000307 PARAMETER Experiment Name: At_Germinating_Seeds_Sub_P Parameter: Plant Line Value: WS
  misc_feature: MA Experiment 20000307 PARAMETER Experiment Name: At_Germinating_Seeds_Sub_P Parameter: Tissue Value: Germinating Seeds
  misc_feature: MA Experiment ID: 20000328 Result: Down-regulated in Transcription
  misc_feature: MA Experiment 20000328 PARAMETER Experiment Name: At_42deg_Heat_Sub_P Parameter: Age (day) Value: 14
  misc_feature: MA Experiment 20000328 PARAMETER Experiment Name: At_42deg_Heat_Sub_P Parameter: Organism Value: A. thaliana
  misc_feature: MA Experiment 20000328 PARAMETER Experiment Name: At_42deg_Heat_Sub_P Parameter: Plant Line Value: WS
  misc_feature: MA Experiment 20000328 PARAMETER Experiment Name: At_42deg_Heat_Sub_P Parameter: Temperature (deg C) Value: 42 vs. 22
  misc_feature: MA Experiment 20000328 PARAMETER Experiment Name: At_42deg_Heat_Sub_P Parameter: Timepoint (hr) Value: 6
  misc_feature: MA Experiment 20000328 PARAMETER Experiment Name: At_42deg_Heat_Sub_P Parameter: Tissue Value: Aerial
ctagagttagaagtcgaaaaatctcgcttttagattcgttcaggcatttcgtcgagcaccttctctgcattactctcccctacttctctctattcattctttcaatgataagtcctaactaaactccgagagaacactaaaccctaaacccattttgcactctcaattacagatcatccacatttcgcgctttcgtcaaatctctttagatgttcgtcaaatcacaaagctttctcttttcggtgagtaagctgtttcaccagcatcaacaatggcgaggaatgggtgcaatgacaaaggtgagactgaagtgggtgaagaacaagaacctggatcacgtcattgatactgagaccgatctcaaagcagcttgtatcctcaaagacgccataaagcgatctcccactggtttcctcaccgcaaaatccgtcgccgattggcaaaaactccttggtctcaccgtccctgttctccgcttcttgcgcaggtatccgactctgtttcacgaatttcctcatgctcgttacgcaagcttaccatgtttcaagctaacggacacagcactaatgcttgactcacaagaagagattattcatcaaagccacgaggctgatacagtggagagactctgtagagttctgatgatgatgagatcaaaaactgtctctcttagatcactacattctctcaaattcgatctcggtttacccgataactacgaaaagacgctagtcatgaaataccctgatcatttctgcttcgtcaaggcttctaatggtaacccgtgtttaaagcttgtaaaatggcgtgatgagttcgcattctcggcgctgcagaagcgaaacgaggacaatgatgtttccggggaggagtctagataccgcgagttcaagagaggtcagtctacgttgacttttcctatgagtttccctagaggatatggagcacagaagaaggtcaaagcatggatggatgagtttcaaaaacttccctacatatctccttacgatgacccgagtaacattgatccggaaagcgatctcatggagaaacgagctgtggctgttttgcacgagctcttgagcttgactatccacaagaaaaccaagaggaactacttgagaagcatgagagcggagctcaacattccgcacaagttcactcgtctattcacgcgataccccggcattttctacctctcattgaagtgtaagacaacaactgtgatcctcaaagaagggtatcgccgaggaaaactagtggatccgcatcctctcactcgtcttcgagataagttttatcatgtgatgagaacagggtttctttatcgggcgagagggctaggcatggtctctaaagaggaacttttgcttgataggccagaggatgaccttgaggaagaaggctctgaagaagaagagattgtggaaggaagtgagcttgaagaagattctgaagctgaatagcaatagttgttgaatctaattgttgtatgttaattcacacagagcaacaatttatgtacctgcattttatctttttgaagtaacggaacggagtttaaacaatgtaagcacaaagtccttaaaatgatataaagagagattgtatttcacc

SEQ ID NO: 40060 - protein, 418 aa, Arabidopsis thaliana
  peptide (1)..(418): Ceres Seq. ID no. 13494094
  misc_feature (35)..(376): Pfam Name: Plant specific of unknown function (DUF860) Pfam Description: Plant specific of unknown function (DUF860)
  misc_feature (11)..(367): Homolog of NCBI NO: 15233788 NR Description: hypothetical protein [Arabidopsis thaliana]
  misc_feature (31)..(399): Homolog of NCBI NO: 15225035 NR Description: hypothetical protein [Arabidopsis thaliana]
  misc_feature (6)..(418): Homolog of NCBI NO: 3413424 NR Description: hypothetical protein [Arabidopsis thaliana]
  misc_feature (6)..(418): Homolog of NCBI NO: 15217597 NR Description: hypothetical protein [Arabidopsis thaliana]
  misc_feature (310)..(418): Homolog of NCBI NO: 38346162 NR Description: OSJNBa0079A21.9 [Oryza sativa (japonica
  misc_feature (28)..(214): Homolog of NCBI NO: 38346162 NR Description: OSJNBa0079A21.9 [Oryza sativa (japonica
  misc_feature (28)..(405): Homolog of NCBI NO: 15238875 NR Description: hypothetical protein [Arabidopsis thaliana]
  misc_feature (28)..(418): Homolog of NCBI NO: 21536812 NR Description: unknown [Arabidopsis thaliana]
  misc_feature (25)..(418): Homolog of NCBI NO: 11282335 NR Description: hypothetical protein F14P22.110 - Arabidopsis
  misc_feature (1)..(418): Homolog of NCBI NO: 18410975 NR Description: expressed protein [Arabidopsis thaliana]
MFVKSQSFLFSVSKLFHQHQQWRGMGAMTKVRLKWVKNKNLDHVIDTETDLKAACILKDAIKRSPTGFLTAKSVADWQKLLGLTVPVLRFLRRYPTLFHEFPHARYASLPCFKLTDTALMLDSQEEIIHQSHEADTVERLCRVLMMMRSKTVSLRSLHSLKFDLGLPDNYEKTLVMKYPDHFCFVKASNGNPCLKLVKWRDEFAFSALQKRNEDNDVSGEESRYREFKRGQSTLTFPMSFPRGYGAQKKVKAWMDEFQKLPYISPYDDPSNIDPESDLMEKRAVAVLHELLSLTIHKKTKRNYLRSMRAELNIPHKFTRLFTRYPGIFYLSLKCKTTTVILKEGYRRGKLVDPHPLTRLRDKFYHVMRTGFLYRARGLGMVSKEELLLDRPEDDLEEEGSEEEEIVEGSELEEDSEAE

SEQ ID NO: 40061 - protein, 394 aa, Arabidopsis thaliana
  peptide (1)..(394): Ceres Seq. ID no. 13494095
  misc_feature (11)..(352): Pfam Name: Plant specific of unknown function (DUF860) Pfam Description: Plant specific of unknown function (DUF860)
  misc_feature (1)..(343): Homolog of NCBI NO: 15233788 NR Description: hypothetical protein [Arabidopsis thaliana]
  misc_feature (7)..(375): Homolog of NCBI NO: 15225035 NR Description: hypothetical protein [Arabidopsis thaliana]
  misc_feature (1)..(394): Homolog of NCBI NO: 3413424 NR Description: hypothetical protein [Arabidopsis thaliana]
  misc_feature (1)..(394): Homolog of NCBI NO: 15217597 NR Description: hypothetical protein [Arabidopsis thaliana]
  misc_feature (286)..(394): Homolog of NCBI NO: 38346162 NR Description: OSJNBa0079A21.9 [Oryza sativa (japonica
  misc_feature (4)..(190): Homolog of NCBI NO: 38346162 NR Description: OSJNBa0079A21.9 [Oryza sativa (japonica
  misc_feature (4)..(381): Homolog of NCBI NO: 15238875 NR Description: hypothetical protein [Arabidopsis thaliana]
  misc_feature (4)..(394): Homolog of NCBI NO: 21536812 NR Description: unknown [Arabidopsis thaliana]
  misc_feature (1)..(394): Homolog of NCBI NO: 11282335 NR Description: hypothetical protein F14P22.110 - Arabidopsis
  misc_feature (1)..(394): Homolog of NCBI NO: 18410975 NR Description: expressed protein [Arabidopsis thaliana]
MGAMTKVRLKWVKNKNLDHVIDTETDLKAACILKDAIKRSPTGFLTAKSVADWQKLLGLTVPVLRFLRRYPTLFHEFPHARYASLPCFKLTDTALMLDSQEEIIHQSHEADTVERLCRVLMMMRSKTVSLRSLHSLKFDLGLPDNYEKTLVMKYPDHFCFVKASNGNPCLKLVKWRDEFAFSALQKRNEDNDVSGEESRYREFKRGQSTLTFPMSFPRGYGAQKKVKAWMDEFQKLPYISPYDDPSNIDPESDLMEKRAVAVLHELLSLTIHKKTKRNYLRSMRAELNIPHKFTRLFTRYPGIFYLSLKCKTTTVILKEGYRRGKLVDPHPLTRLRDKFYHVMRTGFLYRARGLGMVSKEELLLDRPEDDLEEEGSEEEEIVEGSELEEDSEAE

SEQ ID NO: 40062 - protein, 391 aa, Arabidopsis thaliana
  peptide (1)..(391): Ceres Seq. ID no. 13494096
  misc_feature (8)..(349): Pfam Name: Plant specific of unknown function (DUF860) Pfam Description: Plant specific of unknown function (DUF860)
  misc_feature (1)..(340): Homolog of NCBI NO: 15233788 NR Description: hypothetical protein [Arabidopsis thaliana]
  misc_feature (4)..(372): Homolog of NCBI NO: 15225035 NR Description: hypothetical protein [Arabidopsis thaliana]
  misc_feature (1)..(391): Homolog of NCBI NO: 3413424 NR Description: hypothetical protein [Arabidopsis thaliana]
  misc_feature (1)..(391): Homolog of NCBI NO: 15217597 NR Description: hypothetical protein [Arabidopsis thaliana]
  misc_feature (283)..(391): Homolog of NCBI NO: 38346162 NR Description: OSJNBa0079A21.9 [Oryza sativa (japonica
  misc_feature (1)..(187): Homolog of NCBI NO: 38346162 NR Description: OSJNBa0079A21.9 [Oryza sativa (japonica
  misc_feature (1)..(378): Homolog of NCBI NO: 15238875 NR Description: hypothetical protein [Arabidopsis thaliana]
  misc_feature (1)..(391): Homolog of NCBI NO: 21536812 NR Description: unknown [Arabidopsis thaliana]
  misc_feature (1)..(391): Homolog of NCBI NO: 11282335 NR Description: hypothetical protein F14P22.110 - Arabidopsis
  misc_feature (1)..(391): Homolog of NCBI NO: 18410975 NR Description: expressed protein [Arabidopsis thaliana]
MTKVRLKWVKNKNLDHVIDTETDLKAACILKDAIKRSPTGFLTAKSVADWQKLLGLTVPVLRFLRRYPTLFHEFPHARYASLPCFKLTDTALMLDSQEEIIHQSHEADTVERLCRVLMMMRSKTVSLRSLHSLKFDLGLPDNYEKTLVMKYPDHFCFVKASNGNPCLKLVKWRDEFAFSALQKRNEDNDVSGEESRYREFKRGQSTLTFPMSFPRGYGAQKKVKAWMDEFQKLPYISPYDDPSNIDPESDLMEKRAVAVLHELLSLTIHKKTKRNYLRSMRAELNIPHKFTRLFTRYPGIFYLSLKCKTTTVILKEGYRRGKLVDPHPLTRLRDKFYHVMRTGFLYRARGLGMVSKEELLLDRPEDDLEEEGSEEEEIVEGSELEEDSEAE

SEQ ID NO: 40063 - DNA, 2211 bp, Arabidopsis thaliana
  misc_feature (1)..(2211): Ceres Seq. ID no. 12348668
  misc_feature: MA Experiment ID: 108489 Result: Up-regulated in Transcription
  misc_feature: MA Experiment ID: 20000185 Result: Down-regulated in Transcription
  misc_feature: MA Experiment 20000185 PARAMETER Experiment Name: At_Roots__P Parameter: Age (day) Value: 7 vs. 21
  misc_feature: MA Experiment 20000185 PARAMETER Experiment Name: At_Roots__P Parameter: Organism Value: A. thaliana
  misc_feature: MA Experiment 20000185 PARAMETER Experiment Name: At_Roots__P Parameter: Tissue Value: Roots vs. Whole Plant
  misc_feature: MA Experiment ID: 20000234 Result: Up-regulated in Transcription
  misc_feature: MA Experiment 20000234 PARAMETER Experiment Name: At_Siliques_P Parameter: Age (day) Value: 21
  misc_feature: MA Experiment 20000234 PARAMETER Experiment Name: At_Siliques_P Parameter: Organism Value: A. thaliana
  misc_feature: MA Experiment 20000234 PARAMETER Experiment Name: At_Siliques_P Parameter: Plant Line Value: WS
  misc_feature: MA Experiment 20000234 PARAMETER Experiment Name: At_Siliques_P Parameter: Tissue Value: Less Than 5mm Siliques vs. Whole Plant
  misc_feature: MA Experiment ID: 20000235 Result: Up-regulated in Transcription
  misc_feature: MA Experiment 20000235 PARAMETER Experiment Name: At_Siliques_P Parameter: Age (day) Value: 21
  misc_feature: MA Experiment 20000235 PARAMETER Experiment Name: At_Siliques_P Parameter: Organism Value: A. thaliana
  misc_feature: MA Experiment 20000235 PARAMETER Experiment Name: At_Siliques_P Parameter: Plant Line Value: WS
  misc_feature: MA Experiment 20000235 PARAMETER Experiment Name: At_Siliques_P Parameter: Tissue Value: 5-10mm Siliques vs. Whole Plant
  misc_feature: MA Experiment ID: 20000264 Result: Up-regulated in Transcription
  misc_feature: MA Experiment 20000264 PARAMETER Experiment Name: At_Open_Flower_P Parameter: Age (day) Value: 21
  misc_feature: MA Experiment 20000264 PARAMETER Experiment Name: At_Open_Flower_P Parameter: Plant Line Value: WS
  misc_feature: MA Experiment 20000264 PARAMETER Experiment Name: At_Open_Flower_P Parameter: Tissue Value: Open Flower vs. Whole Plant
  misc_feature: MA Experiment ID: 20000265 Result: Up-regulated in Transcription
  misc_feature: MA Experiment 20000265 PARAMETER Experiment Name: At_Open_Flower_P Parameter: Age (day) Value: 21
  misc_feature: MA Experiment 20000265 PARAMETER Experiment Name: At_Open_Flower_P Parameter: Plant Line Value: WS
  misc_feature: MA Experiment 20000265 PARAMETER Experiment Name: At_Open_Flower_P Parameter: Tissue Value: Closed Flower vs. Whole Plant
  misc_feature: MA Experiment ID: 20000286 Result: Up-regulated in Transcription
  misc_feature: MA Experiment 20000286 PARAMETER Experiment Name: At_Open_Flower_P Parameter: Age (day) Value: 21
  misc_feature: MA Experiment 20000286 PARAMETER Experiment Name: At_Open_Flower_P Parameter: Plant Line Value: WS
  misc_feature: MA Experiment 20000286 PARAMETER Experiment Name: At_Open_Flower_P Parameter: Tissue Value: Half Open vs. Whole Plant
  misc_feature: MA Experiment ID: 20000438 Result: Down-regulated in Transcription
  misc_feature: MA Experiment 20000438 PARAMETER Experiment Name: At_Shoots__P Parameter: Age (day) Value: 14
  misc_feature: MA Experiment 20000438 PARAMETER Experiment Name: At_Shoots__P Parameter: Tissue Value: Shoots vs. Whole Plant
  misc_feature: MA Experiment ID: 20000439 Result: Down-regulated in Transcription
  misc_feature: MA Experiment 20000439 PARAMETER Experiment Name: At_Roots__P Parameter: Age (day) Value: 14 vs. 21
  misc_feature: MA Experiment 20000439 PARAMETER Experiment Name: At_Roots__P Parameter: Organism Value: A. thaliana
  misc_feature: MA Experiment 20000439 PARAMETER Experiment Name: At_Roots__P Parameter: Tissue Value: Roots vs. Whole Plant
  misc_feature: MA Experiment ID: 20001757 Result: Down-regulated in Transcription
  misc_feature: MA Experiment 20001757 PARAMETER Experiment Name: At_50mM_NH4NO3_L-to-H_P Parameter: Timepoint (hr) Value: 6
  misc_feature: MA Experiment 20001757 PARAMETER Experiment Name: At_50mM_NH4NO3_L-to-H_P Parameter: Tissue Value: Leaf
  misc_feature: MA Experiment 20001757 PARAMETER Experiment Name: At_50mM_NH4NO3_L-to-H_P Parameter: Treatment Value: 50mM NH4NO3 vs 100mM Mannitol
  misc_feature: MA Experiment ID: 20001768 Result: Up-regulated in Transcription
  misc_feature: MA Experiment 20001768 PARAMETER Experiment Name: At_Far-red-enriched-adult_P Parameter: Age (day) Value: 28
  misc_feature: MA Experiment 20001768 PARAMETER Experiment Name: At_Far-red-enriched-adult_P Parameter: Light Value: Far-red enriched vs. White
  misc_feature: MA Experiment 20001768 PARAMETER Experiment Name: At_Far-red-enriched-adult_P Parameter: Organism Value: A. thaliana
  misc_feature: MA Experiment 20001768 PARAMETER Experiment Name: At_Far-red-enriched-adult_P Parameter: Plant Line Value: Columbia
  misc_feature: MA Experiment 20001768 PARAMETER Experiment Name: At_Far-red-enriched-adult_P Parameter: Timepoint (hr) Value: 1
  misc_feature: MA Experiment 20001768 PARAMETER Experiment Name: At_Far-red-enriched-adult_P Parameter: Tissue Value: Aerial
  misc_feature: MA Experiment ID: 20001909 Result: Up-regulated in Transcription
  misc_feature: MA Experiment 20001909 PARAMETER Experiment Name: At_Drought_Reproduction_P Parameter: Age (day) Value: 35
  misc_feature: MA Experiment 20001909 PARAMETER Experiment Name: At_Drought_Reproduction_P Parameter: Organism Value: A. thaliana
  misc_feature: MA Experiment 20001909 PARAMETER Experiment Name: At_Drought_Reproduction_P Parameter: Plant Line Value: WS
  misc_feature: MA Experiment 20001909 PARAMETER Experiment Name: At_Drought_Reproduction_P Parameter: Timepoint (day) Value: 5
  misc_feature: MA Experiment 20001909 PARAMETER Experiment Name: At_Drought_Reproduction_P Parameter: Tissue Value: Flowers
  misc_feature: MA Experiment 20001909 PARAMETER Experiment Name: At_Drought_Reproduction_P Parameter: Treatment Value: Drought vs. No Drought
  misc_feature: MA Experiment ID: 20001910 Result: Up-regulated in Transcription
  misc_feature: MA Experiment 20001910 PARAMETER Experiment Name: At_Drought_Reproduction_P Parameter: Age (day) Value: 37
  misc_feature: MA Experiment 20001910 PARAMETER Experiment Name: At_Drought_Reproduction_P Parameter: Organism Value: A. thaliana
  misc_feature: MA Experiment 20001910 PARAMETER Experiment Name: At_Drought_Reproduction_P Parameter: Plant Line Value: WS
  misc_feature: MA Experiment 20001910 PARAMETER Experiment Name: At_Drought_Reproduction_P Parameter: Timepoint (day) Value: 7
  misc_feature: MA Experiment 20001910 PARAMETER Experiment Name: At_Drought_Reproduction_P Parameter: Tissue Value: Flowers
  misc_feature: MA Experiment 20001910 PARAMETER Experiment Name: At_Drought_Reproduction_P Parameter: Treatment Value: Drought vs. No Drought
accagccccattaataaaccaccgggctctgtttcaataaaaaaaatcccctccctctcatatttacctcccgaataaaaccggagggagagaaaaaacataaaaagcaaaaaaaaaggtaaaatcaaaaagggaaaaaatatataacaacaaaaaaaaaaagttagaaaaaatggcagtaggaaaggttgtggtatctgtggcatcactcctcctagtggtgggtgttgccataggagttatcacgttcgttaataaaggaggcggcgccaatggcgacagtaatggtcccataaactctcatcagaaagcggttcagacaatttgccagtcaaccacagaccaaggttcgtgcgcgaaaacactcgacccagtcaaaagtgatgatccaagcaagcttgtcaaagccttcctgatggctactaaagacgcgatcacaaaatcctcaaacttcacggcttcgaccgaaggaggtatgggtactaacatgaacgcgaccagcaaagccgttcttgattactgcaagagagtattgatgtacgctcttgaggatcttgagaccattgttgaagagatgggtgaggatcttcagcagagtggaactaagcttgaccagctcaaacaatggttaactggagttttcaactaccaaaccgattgtcttgacgacatcgaggaagttgagctaaagaagatcatgggtgaaggaatctctaactccaaggttttgaccagtaacgctatcgatatcttccattccgttgttaccgcgatggcccaaatgggtgtcaaagtcgacgatatgaagaacataaccatgggagccggagccggtggagctgcacgtcgccttcttgaagacaacgactctaagggactccccaaatggttttctggtaaagacaggaagcttatggctaaggccggacgtggcgctccagctggcggtgatgatggtatcggtgaaggcggtggtggtggcggtaagatcaaggcgactcatgtagtggctaaggatggaagtggacagtttaagaccatttctgaggcggttatggcttgcccggataaaaaccctggaaggtgcattatccatatcaaggctggtatctacaatgaacaagtcagaatccctaagaagaagaacaacattttcatgttcggtgatggtgctacacaaaccatcattacctttgacagaagtgttaaacttagcccaggaaccactacttcactcagtggcaccgttcaggtcgaatctgagggattcatggcgaaatggattgggtttaagaacactgctggtccattgggacaccaagcggtcgcactccgtgtgaacggagaccgtgcggtcatattcaactgtagattcgacggttaccaagacacactctacgtcaacaacggacgtcaattctacaggaacattgttgtatccggtacagtggatttcatcttcggaaaatccgcaactgtgatccaaaactctctcatcctcgtccgaaagggaagccccggacaatccaactacgttacggctgacggtaatgaaaagggtgcagcgatgaagatcggtatcgtcctccataactgccgtatcataccggacaaggagctcgaagctgacaagctaaccatcaaatcgtacctaggaaggccgtggaagaagtttgccacgactgtgattattggaactgagattggtgatttgattaaaccagaaggatggaccgaatggcaaggagaacaaaaccacaagactgctaaatacattgagttcaataaccgtggaccgggagctgccactactcagaggcctccttgggttaaggtggctaagtctgcggctgaggttgaaacttacaccgtggctaactgggttggtccagctaactggatccaagaagccaacgtgcccgtccaactaggattgtaagaggacaacacaaaaaagttaagaataaaacagtatgtgataatgttaaggtaacgatacgacgtcgtctctggggatcagaactcttttttggatactatatacaaagatagggttctagacgtgttgagatgatgtttgtataagattgctttcgtttcacgtgcaaaagaggaaaaaaaattgttttgttattttttttgtagtacaaataattaatttttttttatcacatgttgtatccttaagaaaattgatacacaaaatatttt

SEQ ID NO: 40064 - protein, 588 aa, Arabidopsis thaliana
  peptide (1)..(588): Ceres Seq. ID no. 12348669
  misc_feature (276)..(574): Pfam Name: Pectinesterase Pfam Description: Pectinesterase
  misc_feature (278)..(587): Homolog of NCBI NO: 21740906 NR Description: OSJNBa0036B21.20 [Oryza sativa (japonica
  misc_feature (1)..(252): Homolog of NCBI NO: 7488527 NR Description: pectin esterase homolog, pollen-specific - turnip
  misc_feature (3)..(470): Homolog of NCBI NO: 23197964 NR Description: putative pectinesterase [Arabidopsis thaliana]
  misc_feature (3)..(588): Homolog of NCBI NO: 25313439 NR Description: pectinesterase (EC 3.1.1.11) precursor,
  misc_feature (3)..(588): Homolog of NCBI NO: 15226482 NR Description: pectinesterase family
  misc_feature (3)..(588): Homolog of NCBI NO: 25313437 NR Description: pectinesterase (EC 3.1.1.11) [imported] -
  misc_feature (3)..(588): Homolog of NCBI NO: 15226490 NR Description: pectinesterase family
  misc_feature (14)..(588): Homolog of NCBI NO: 6093741 NR Description: Pectinesterase (Pectin methylesterase) (PE)
  misc_feature (1)..(588): Homolog of NCBI NO: 1172538 NR Description: Probable pectinesterase precursor (Pectin
  misc_feature (1)..(588): Homolog of NCBI NO: 15228697 NR Description: pollen-specific pectin esterase, putative
MAVGKVVVSVASLLLVVGVAIGVITFVNKGGGANGDSNGPINSHQKAVQTICQSTTDQGSCAKTLDPVKSDDPSKLVKAFLMATKDAITKSSNFTASTEGGMGTNMNATSKAVLDYCKRVLMYALEDLETIVEEMGEDLQQSGTKLDQLKQWLTGVFNYQTDCLDDIEEVELKKIMGEGISNSKVLTSNAIDIFHSVVTAMAQMGVKVDDMKNITMGAGAGGAARRLLEDNDSKGLPKWFSGKDRKLMAKAGRGAPAGGDDGIGEGGGGGGKIKATHVVAKDGSGQFKTISEAVMACPDKNPGRCIIHIKAGIYNEQVRIPKKKNNIFMFGDGATQTIITFDRSVKLSPGTTTSLSGTVQVESEGFMAKWIGFKNTAGPLGHQAVALRVNGDRAVIFNCRFDGYQDTLYVNNGRQFYRNIVVSGTVDFIFGKSATVIQNSLILVRKGSPGQSNYVTADGNEKGAAMKIGIVLHNCRIIPDKELEADKLTIKSYLGRPWKKFATTVIIGTEIGDLIKPEGWTEWQGEQNHKTAKYIEFNNRGPGAATTQRPPWVKVAKSAAEVETYTVANWVGPANWIQEANVPVQLGL

SEQ ID NO: 40065 - protein, 507 aa, Arabidopsis thaliana
  peptide (1)..(507): Ceres Seq. ID no. 12348670
  misc_feature (195)..(493): Pfam Name: Pectinesterase Pfam Description: Pectinesterase
  misc_feature (197)..(506): Homolog of NCBI NO: 21740906 NR Description: OSJNBa0036B21.20 [Oryza sativa (japonica
  misc_feature (1)..(171): Homolog of NCBI NO: 7488527 NR Description: pectin esterase homolog, pollen-specific - turnip
  misc_feature (1)..(389): Homolog of NCBI NO: 23197964 NR Description: putative pectinesterase [Arabidopsis thaliana]
  misc_feature (1)..(507): Homolog of NCBI NO: 25313439 NR Description: pectinesterase (EC 3.1.1.11) precursor,
  misc_feature (1)..(507): Homolog of NCBI NO: 15226482 NR Description: pectinesterase family
  misc_feature (1)..(507): Homolog of NCBI NO: 25313437 NR Description: pectinesterase (EC 3.1.1.11) [imported] -
  misc_feature (1)..(507): Homolog of NCBI NO: 15226490 NR Description: pectinesterase family
  misc_feature (1)..(507): Homolog of NCBI NO: 6093741 NR Description: Pectinesterase (Pectin methylesterase) (PE)
  misc_feature (1)..(507): Homolog of NCBI NO: 1172538 NR Description: Probable pectinesterase precursor (Pectin
  misc_feature (1)..(507): Homolog of NCBI NO: 15228697 NR Description: pollen-specific pectin esterase, putative
MATKDAITKSSNFTASTEGGMGTNMNATSKAVLDYCKRVLMYALEDLETIVEEMGEDLQQSGTKLDQLKQWLTGVFNYQTDCLDDIEEVELKKIMGEGISNSKVLTSNAIDIFHSVVTAMAQMGVKVDDMKNITMGAGAGGAARRLLEDNDSKGLPKWFSGKDRKLMAKAGRGAPAGGDDGIGEGGGGGGKIKATHVVAKDGSGQFKTISEAVMACPDKNPGRCIIHIKAGIYNEQVRIPKKKNNIFMFGDGATQTIITFDRSVKLSPGTTTSLSGTVQVESEGFMAKWIGFKNTAGPLGHQAVALRVNGDRAVIFNCRFDGYQDTLYVNNGRQFYRNIVVSGTVDFIFGKSATVIQNSLILVRKGSPGQSNYVTADGNEKGAAMKIGIVLHNCRIIPDKELEADKLTIKSYLGRPWKKFATTVIIGTEIGDLIKPEGWTEWQGEQNHKTAKYIEFNNRGPGAATTQRPPWVKVAKSAAEVETYTVANWVGPANWIQEANVPVQLGL

SEQ ID NO: 40066 - protein, 487 aa, Arabidopsis thaliana
  peptide (1)..(487): Ceres Seq. ID no. 12348671
  misc_feature (175)..(473): Pfam Name: Pectinesterase Pfam Description: Pectinesterase
  misc_feature (177)..(486): Homolog of NCBI NO: 21740906 NR Description: OSJNBa0036B21.20 [Oryza sativa (japonica
  misc_feature (1)..(151): Homolog of NCBI NO: 7488527 NR Description: pectin esterase homolog, pollen-specific - turnip
  misc_feature (1)..(369): Homolog of NCBI NO: 23197964 NR Description: putative pectinesterase [Arabidopsis thaliana]
  misc_feature (1)..(487): Homolog of NCBI NO: 25313439 NR Description: pectinesterase (EC 3.1.1.11) precursor,
  misc_feature (1)..(487): Homolog of NCBI NO: 15226482 NR Description: pectinesterase family
  misc_feature (1)..(487): Homolog of NCBI NO: 25313437 NR Description: pectinesterase (EC 3.1.1.11) [imported] -
  misc_feature (1)..(487): Homolog of NCBI NO: 15226490 NR Description: pectinesterase family
  misc_feature (1)..(487): Homolog of NCBI NO: 6093741 NR Description: Pectinesterase (Pectin methylesterase) (PE)
  misc_feature (1)..(487): Homolog of NCBI NO: 1172538 NR Description: Probable pectinesterase precursor (Pectin
  misc_feature (1)..(487): Homolog of NCBI NO: 15228697 NR Description: pollen-specific pectin esterase, putative
MGTNMNATSKAVLDYCKRVLMYALEDLETIVEEMGEDLQQSGTKLDQLKQWLTGVFNYQTDCLDDIEEVELKKIMGEGISNSKVLTSNAIDIFHSVVTAMAQMGVKVDDMKNITMGAGAGGAARRLLEDNDSKGLPKWFSGKDRKLMAKAGRGAPAGGDDGIGEGGGGGGKIKATHVVAKDGSGQFKTISEAVMACPDKNPGRCIIHIKAGIYNEQVRIPKKKNNIFMFGDGATQTIITFDRSVKLSPGTTTSLSGTVQVESEGFMAKWIGFKNTAGPLGHQAVALRVNGDRAVIFNCRFDGYQDTLYVNNGRQFYRNIVVSGTVDFIFGKSATVIQNSLILVRKGSPGQSNYVTADGNEKGAAMKIGIVLHNCRIIPDKELEADKLTIKSYLGRPWKKFATTVIIGTEIGDLIKPEGWTEWQGEQNHKTAKYIEFNNRGPGAATTQRPPWVKVAKSAAEVETYTVANWVGPANWIQEANVPVQLGL

SEQ ID NO: 40067 - DNA, 1891 bp, Arabidopsis thaliana
  misc_feature (1)..(1891): Ceres Seq. ID no. 13491514
  misc_feature: MA Experiment ID: 108461 Result: Up-regulated in Transcription
  misc_feature: MA Experiment 108461 PARAMETER Experiment Name: At_Germinating_Seeds_cDNA_P Parameter: Age (day) Value: 1 vs. 0
  misc_feature: MA Experiment 108461 PARAMETER Experiment Name: At_Germinating_Seeds_cDNA_P Parameter: Tissue Value: Germinating Seeds
  misc_feature: MA Experiment ID: 108462 Result: Up-regulated in Transcription
  misc_feature: MA Experiment 108462 PARAMETER Experiment Name: At_Germinating_Seeds_cDNA_P Parameter: Age (day) Value: 2 vs. 0
  misc_feature: MA Experiment 108462 PARAMETER Experiment Name: At_Germinating_Seeds_cDNA_P Parameter: Tissue Value: Germinating Seeds
  misc_feature: MA Experiment ID: 108463 Result: Up-regulated in Transcription
  misc_feature: MA Experiment 108463 PARAMETER Experiment Name: At_Germinating_Seeds_cDNA_P Parameter: Age (day) Value: 3 vs. 0
  misc_feature: MA Experiment 108463 PARAMETER Experiment Name: At_Germinating_Seeds_cDNA_P Parameter: Tissue Value: Germinating Seeds
  misc_feature: MA Experiment ID: 108464 Result: Up-regulated in Transcription
  misc_feature: MA Experiment 108464 PARAMETER Experiment Name: At_Germinating_Seeds_cDNA_P Parameter: Age (day) Value: 4 vs. 0
  misc_feature: MA Experiment 108464 PARAMETER Experiment Name: At_Germinating_Seeds_cDNA_P Parameter: Tissue Value: Germinating Seeds
  misc_feature: MA Experiment ID: 108577 Result: Down-regulated in Transcription
  misc_feature: MA Experiment 108577 PARAMETER Experiment Name: At_42deg_Heat_cDNA_P Parameter: Temperature (deg C) Value: 42 vs. 22
  misc_feature: MA Experiment 108577 PARAMETER Experiment Name: At_42deg_Heat_cDNA_P Parameter: Timepoint (hr) Value: 6
  misc_feature: MA Experiment 108577 PARAMETER Experiment Name: At_42deg_Heat_cDNA_P Parameter: Tissue Value: Aerial
  misc_feature: MA Experiment ID: 108595 Result: Down-regulated in Transcription
  misc_feature: MA Experiment 108595 PARAMETER Experiment Name: At_Ler-pi_Ovule_cDNA_P Parameter: Plant Line Value: null
  misc_feature: MA Experiment ID: 20000113 Result: Down-regulated in Transcription
  misc_feature: MA Experiment 20000113 PARAMETER Experiment Name: At_42deg_Heat_cDNA_P Parameter: Temperature (deg C) Value: 42 vs. 22
  misc_feature: MA Experiment 20000113 PARAMETER Experiment Name: At_42deg_Heat_cDNA_P Parameter: Timepoint (hr) Value: 8
  misc_feature: MA Experiment 20000113 PARAMETER Experiment Name: At_42deg_Heat_cDNA_P Parameter: Tissue Value: Aerial
  misc_feature: MA Experiment ID: 20000144 Result: Down-regulated in Transcription
  misc_feature: MA Experiment 20000144 PARAMETER Experiment Name: At_42deg_Heat_cDNA_P Parameter: Temperature (deg C) Value: 42 vs. 22
  misc_feature: MA Experiment 20000144 PARAMETER Experiment Name: At_42deg_Heat_cDNA_P Parameter: Timepoint (hr) Value: 1
  misc_feature: MA Experiment 20000144 PARAMETER Experiment Name: At_42deg_Heat_cDNA_P Parameter: Tissue Value: Aerial
  misc_feature: MA Experiment ID: 20000180 Result: Up-regulated in Transcription
  misc_feature: MA Experiment 20000180 PARAMETER Experiment Name: At_Germinating_Seeds_P Parameter: Age (hr) Value: 24 vs. 0
  misc_feature: MA Experiment 20000180 PARAMETER Experiment Name: At_Germinating_Seeds_P Parameter: Tissue Value: Germinating Seeds
  misc_feature: MA Experiment ID: 20000224 Result: Down-regulated in Transcription
aaaaaaaagcttccattgatttcgcatcagatcttgctctctcttctatctctgcgattcttctggatcttctcaaatccatgaaggaatcagatctaaccaccgaaccaatcgcacaaaatctaatcaagctaataagcaatgtctgtttctcagtcttcgttttcacagttctcatcttcacagtaatcgcagtaacttaccaaccaccagatccatggcttgaatctgctccagcactcaccaaactcctaaccgaaaccgaaaacgcaactttcaaaatcgacggttcgattctcaaaaccggcgaagatctcgcttcatctccgtcatcatcacctccgtcgaactccacagagcaagtcacggaggcgacgattgagaaatccgaggcgaaaatcggtaatatgactgtgaagaactctatagattgtgatgaggatttgaagattgtgaattgttctgatccgagagttttagttgctgttgagaggtttaatttgaaggtttttaaatctattgtgttcttagagtacgaaactccggttaacggatcgaaactagacgaatgcgatgtttcttggaggtttaggaataagaaggagaagtcatggaggagatacagagatttcaggaggtttaggtttggatttggtgagaattgtacttataaagtgtttcatactagtggttggcattctggtgttaatgctcgtaggcctaggattagtagaccgagctcgagtcgaggagctcgcggtggtgattcggagattaatgatacgattccgactcttggttcgcagacgagtttccggagagggaagtatttgtattattcgcggggtggtgattattgtaagggtatgaatcagtatatgtggagtttcttgtgtggtttaggtgaagcaatgtatttgaataggacttttgtgatggatttgagtttgtgtttgtcttcgagttatagttctaaggggaaagatgaggaaggtaaggattttcggtattattttgatttcgagcatcttaaggagacggcttcgattgttgaagagggtgagttcttgagagattggaagaaatggaatcggttgcataaacggaaagttcctgttaggaaggttaagacgcatagagtgtcgcctttgcagcttagtaaagataagagtacgattatatggaggcagtttgatactcctgagcctgaaaactattggtatagagtttgtgaagggcaagcatcgaagtatgttgagaggccgtggcatgcgttgtggaagtcgaagaggttgatgaatattgtctctgagattagtgggaaaatggactgggattttgatgctgttcatgtggttagaggcgagaaagcgaagaacaagaagctatggccacatttggatgcagacacatggcctgatgcgatattgaccaaacttaaaggattggttcaggtgtggaggaatttgtacgttgcaactaatgaaccgttttataattactttgacaagttgaggtctcagtacaaggttcacttgcttgatgactatagctacttgtggggaaataagagtgaatggtacaatgagactagtctcttgaacaatgggaaaccagttgagtttgatgggtacatgagagtagctgttgatacagaggtgttttatagaggaaagactcgcgtcgagacgttctataaccttaccacggactgcaaagacgggatcaatacatgctaaattgatcattcaggttgtgatatgttttcattgttttatttgtttgtgtatcaaattcagttatgcttgtgttgtttaccttgtgttctactagctattgaagagtgtacgtaacgtttacattttttgattcatatccttaattctgtaag

SEQ ID NO: 40068 - protein, 578 aa, Arabidopsis thaliana
  peptide (1)..(578): Ceres Seq. ID no. 13491515
  misc_feature (343)..(562): Homolog of NCBI NO: 34909040 NR Description: P0034E02.33 [Oryza sativa (japonica
  misc_feature (139)..(451): Homolog of NCBI NO: 34909040 NR Description: P0034E02.33 [Oryza sativa (japonica
  misc_feature (258)..(578): Homolog of NCBI NO: 37534994 NR Description: unknown protein [Oryza sativa (japonica
  misc_feature (35)..(578): Homolog of NCBI NO: 15235454 NR Description: expressed protein [Arabidopsis thaliana]
  misc_feature (35)..(578): Homolog of NCBI NO: 18395698 NR Description: expressed protein [Arabidopsis thaliana]
  misc_feature (28)..(578): Homolog of NCBI NO: 34913308 NR Description: P0519E12.32 [Oryza sativa (japonica
  misc_feature (27)..(578): Homolog of NCBI NO: 15236611 NR Description: expressed protein [Arabidopsis thaliana]
KKASIDFASDLALSSISAILLDLLKSMKESDLTTEPIAQNLIKLISNVCFSVFVFTVLIFTVIAVTYQPPDPWLESAPALTKLLTETENATFKIDGSILKTGEDLASSPSSSPPSNSTEQVTEATIEKSEAKIGNMTVKNSIDCDEDLKIVNCSDPRVLVAVERFNLKVFKSIVFLEYETPVNGSKLDECDVSWRFRNKKEKSWRRYRDFRRFRFGFGENCTYKVFHTSGWHSGVNARRPRISRPSSSRGARGGDSEINDTIPTLGSQTSFRRGKYLYYSRGGDYCKGMNQYMWSFLCGLGEAMYLNRTFVMDLSLCLSSSYSSKGKDEEGKDFRYYFDFEHLKETASIVEEGEFLRDWKKWNRLHKRKVPVRKVKTHRVSPLQLSKDKSTIIWRQFDTPEPENYWYRVCEGQASKYVERPWHALWKSKRLMNIVSEISGKMDWDFDAVHVVRGEKAKNKKLWPHLDADTWPDAILTKLKGLVQVWRNLYVATNEPFYNYFDKLRSQYKVHLLDDYSYLWGNKSEWYNETSLLNNGKPVEFDGYMRVAVDTEVFYRGKTRVETFYNLTTDCKDGINTC

SEQ ID NO: 40069 - protein, 552 aa, Arabidopsis thaliana; identical to SEQ ID NO: 23115
  peptide (1)..(552): Ceres Seq. ID no. 13491516
  misc_feature (317)..(536): Homolog of NCBI NO: 34909040 NR Description: P0034E02.33 [Oryza sativa (japonica
  misc_feature (113)..(425): Homolog of NCBI NO: 34909040 NR Description: P0034E02.33 [Oryza sativa (japonica
  misc_feature (232)..(552): Homolog of NCBI NO: 37534994 NR Description: unknown protein [Oryza sativa (japonica
  misc_feature (9)..(552): Homolog of NCBI NO: 15235454 NR Description: expressed protein [Arabidopsis thaliana]
  misc_feature (9)..(552): Homolog of NCBI NO: 18395698 NR Description: expressed protein [Arabidopsis thaliana]
  misc_feature (2)..(552): Homolog of NCBI NO: 34913308 NR Description: P0519E12.32 [Oryza sativa (japonica
  misc_feature (1)..(552): Homolog of NCBI NO: 15236611 NR Description: expressed protein [Arabidopsis thaliana]

SEQ ID NO: 40070 - protein, 443 aa, Arabidopsis thaliana; identical to SEQ ID NO: 23116
  peptide (1)..(443): Ceres Seq. ID no. 13491517
  misc_feature (208)..(427): Homolog of NCBI NO: 34909040 NR Description: P0034E02.33 [Oryza sativa (japonica
  misc_feature (4)..(316): Homolog of NCBI NO: 34909040 NR Description: P0034E02.33 [Oryza sativa (japonica
  misc_feature (123)..(443): Homolog of NCBI NO: 37534994 NR Description: unknown protein [Oryza sativa (japonica
  misc_feature (1)..(443): Homolog of NCBI NO: 15235454 NR Description: expressed protein [Arabidopsis thaliana]
  misc_feature (1)..(443): Homolog of NCBI NO: 18395698 NR Description: expressed protein [Arabidopsis thaliana]
  misc_feature (1)..(443): Homolog of NCBI NO: 34913308 NR Description: P0519E12.32 [Oryza sativa (japonica
  misc_feature (1)..(443): Homolog of NCBI NO: 15236611 NR Description: expressed protein [Arabidopsis thaliana]

SEQ ID NO: 40071 - DNA, 1325 bp, Arabidopsis thaliana
  misc_feature (1)..(1325): Ceres Seq. ID no. 12330843
  misc_feature: MA Experiment ID: 108434 Result: Up-regulated in Transcription
  misc_feature: MA Experiment 108434 PARAMETER Experiment Name: At_Root_Tips_cDNA_P Parameter: Tissue Value: Root Tips
  misc_feature: MA Experiment ID: 108461 Result: Down-regulated in Transcription
  misc_feature: MA Experiment 108461 PARAMETER Experiment Name: At_Germinating_Seeds_cDNA_P Parameter: Age (day) Value: 1 vs. 0
  misc_feature: MA Experiment 108461 PARAMETER Experiment Name: At_Germinating_Seeds_cDNA_P Parameter: Tissue Value: Germinating Seeds
  misc_feature: MA Experiment ID: 108462 Result: Down-regulated in Transcription
  misc_feature: MA Experiment 108462 PARAMETER Experiment Name: At_Germinating_Seeds_cDNA_P Parameter: Age (day) Value: 2 vs. 0
  misc_feature: MA Experiment 108462 PARAMETER Experiment Name: At_Germinating_Seeds_cDNA_P Parameter: Tissue Value: Germinating Seeds
  misc_feature: MA Experiment ID: 108463 Result: Down-regulated in Transcription
  misc_feature: MA Experiment 108463 PARAMETER Experiment Name: At_Germinating_Seeds_cDNA_P Parameter: Age (day) Value: 3 vs. 0
  misc_feature: MA Experiment 108463 PARAMETER Experiment Name: At_Germinating_Seeds_cDNA_P Parameter: Tissue Value: Germinating Seeds
  misc_feature: MA Experiment ID: 108464 Result: Down-regulated in Transcription
  misc_feature: MA Experiment 108464 PARAMETER Experiment Name: At_Germinating_Seeds_cDNA_P Parameter: Age (day) Value: 4 vs. 0
  misc_feature: MA Experiment 108464 PARAMETER Experiment Name: At_Germinating_Seeds_cDNA_P Parameter: Tissue Value: Germinating Seeds
  misc_feature: MA Experiment ID: 108561 Result: Down-regulated in Transcription
  misc_feature: MA Experiment 108561 PARAMETER Experiment Name: At_100uM_ABA_cDNA_P Parameter: Timepoint (hr) Value: 6
  misc_feature: MA Experiment 108561 PARAMETER Experiment Name: At_100uM_ABA_cDNA_P Parameter: Tissue Value: Aerial
  misc_feature: MA Experiment 108561 PARAMETER Experiment Name: At_100uM_ABA_cDNA_P Parameter: Treatment Value: 100uM ABA vs. No Treatment
  misc_feature: MA Experiment ID: 20000179 Result: Down-regulated in Transcription
  misc_feature: MA Experiment 20000179 PARAMETER Experiment Name: At_Germinating_Seeds_P Parameter: Age (hr) Value: 6 vs. 0
  misc_feature: MA Experiment 20000179 PARAMETER Experiment Name: At_Germinating_Seeds_P Parameter: Tissue Value: Germinating Seeds
  misc_feature: MA Experiment ID: 20000180 Result: Down-regulated in Transcription
  misc_feature: MA Experiment 20000180 PARAMETER Experiment Name: At_Germinating_Seeds_P Parameter: Age (hr) Value: 24 vs. 0
  misc_feature: MA Experiment 20000180 PARAMETER Experiment Name: At_Germinating_Seeds_P Parameter: Tissue Value: Germinating Seeds
  misc_feature: MA Experiment ID: 20000437 Result: Down-regulated in Transcription
  misc_feature: MA Experiment 20000437 PARAMETER Experiment Name: At_Drought_P Parameter: Age (day) Value: 8
  misc_feature: MA Experiment 20000437 PARAMETER Experiment Name: At_Drought_P Parameter: Organism Value: A. thaliana
  misc_feature: MA Experiment 20000437 PARAMETER Experiment Name: At_Drought_P Parameter: Plant Line Value: WS
  misc_feature: MA Experiment 20000437 PARAMETER Experiment Name: At_Drought_P Parameter: Timepoint (hr) Value: 24
  misc_feature: MA Experiment 20000437 PARAMETER Experiment Name: At_Drought_P Parameter: Tissue Value: Whole Plant
  misc_feature: MA Experiment 20000437 PARAMETER Experiment Name: At_Drought_P Parameter: Treatment Value: Drought vs. No Drought
ttttctcttcttcctcgactgctctgctctgctctattctctggattgagaatttggactgagaacgacgacaaatggggaaacgagagaaaaaacctaatcgacgtcgccacaaaggtgaatattcgaatgatgctgaagatttctacgatcaacacccgccggctgttgcctccgtcgacgaagaagatgaagaaaactctgacgaagaagaagaagaaaatgatggaaacgaatcatcggatttgccttcaaagtttctcctttaccaacaatccgttcagtcaccaaaaggagacataagttacttgcagaagttctttttaatgtatgttggtggaagacaacctttccatttccaagaagatttctgcggcactgctcttttaagtgcggagtggctgaagactgacactagacggactgctatagggcttgattttgatcttgaggcgttagaatggtgtatggataacaacattagtaaacttggttctgacgtgtattcaagaatgtcgcttttccatgggaatgttttaactcctcttgaggctaagcaagtgaaatctaaatcccatgagctgatacaaaatatcagcttggatgatggtgatgataatgaagatttggctgatccgagtgttgtcgaatctttagagaaagatggacctgattcgttgccaaagagggatattgtgtgtgcttttaattttagttgttgttgtctccacaaacgctcggagttggtttcttacttcaagaatgcacgtgacgctttgtctaagaaaggtggtatcttcgtgatggatttatatggaggtgcttctgctgagggacagttgaagcttcaacggaaattccctaatttcacgtatacatgggagcaggctgagtttgatattttaagccgcaagacaaggatcagtctgcactatcaccttcagaagcagaacagaaagattcgccatgctttttcatatagctggagactgtggtcattgccggagataaaggattgtatggaggaagctgggtttagctcagtccatttctggctcagagaaatgccggacgcttctgaaatgcgtagaacagatgggtttggtgctggacgtgatatcaagtacgaacaagtcaagagctttcaacagtgtgattcttggaatgcttacattgttgcggtcagcctctagttatgctttctatcttttgatcaaaagacactagccctttaactcagatcctttgtcgattttacatctagtatttatttctgacacgcactggtttagtttcatgatttcaatattatttttttgtcgtcc

SEQ ID NO: 40072 - protein, 372 aa, Arabidopsis thaliana
  peptide (1)..(372): Ceres Seq. ID no. 12330844
  misc_feature (1)..(371): Homolog of NCBI NO: 34908450 NR Description: P0683F02.16 [Oryza sativa (japonica
  misc_feature (1)..(372): Homolog of NCBI NO: 25370730 NR Description: hypothetical protein At2g27590 [imported] -
  misc_feature (1)..(372): Homolog of NCBI NO: 21536815 NR Description: unknown [Arabidopsis thaliana]
  misc_feature (1)..(372): Homolog of NCBI NO: 18401468 NR Description: expressed protein
MGKREKKPNRRRHKGEYSNDAEDFYDQHPPAVASVDEEDEENSDEEEEENDGNESSDLPSKFLLYQQSVQSPKGDISYLQKFFLMYVGGRQPFHFQEDFCGTALLSAEWLKTDTRRTAIGLDFDLEALEWCMDNNISKLGSDVYSRMSLFHGNVLTPLEAKQVKSKSHELIQNISLDDGDDNEDLADPSVVESLEKDGPDSLPKRDIVCAFNFSCCCLHKRSELVSYFKNARDALSKKGGIFVMDLYGGASAEGQLKLQRKFPNFTYTWEQAEFDILSRKTRISLHYHLQKQNRKIRHAFSYSWRLWSLPEIKDCMEEAGFSSVHFWLREMPDASEMRRTDGFGAGRDIKYEQVKSFQQCDSWNAYIVAVSL

SEQ ID NO: 40073 - protein, 288 aa, Arabidopsis thaliana
  peptide (1)..(288): Ceres Seq. ID no. 12330845
  misc_feature (1)..(287): Homolog of NCBI NO: 34908450 NR Description: P0683F02.16 [Oryza sativa (japonica
  misc_feature (1)..(288): Homolog of NCBI NO: 25370730 NR Description: hypothetical protein At2g27590 [imported] -
  misc_feature (1)..(288): Homolog of NCBI NO: 21536815 NR Description: unknown [Arabidopsis thaliana]
  misc_feature (1)..(288): Homolog of NCBI NO: 18401468 NR Description: expressed protein
MYVGGRQPFHFQEDFCGTALLSAEWLKTDTRRTAIGLDFDLEALEWCMDNNISKLGSDVYSRMSLFHGNVLTPLEAKQVKSKSHELIQNISLDDGDDNEDLADPSVVESLEKDGPDSLPKRDIVCAFNFSCCCLHKRSELVSYFKNARDALSKKGGIFVMDLYGGASAEGQLKLQRKFPNFTYTWEQAEFDILSRKTRISLHYHLQKQNRKIRHAFSYSWRLWSLPEIKDCMEEAGFSSVHFWLREMPDASEMRRTDGFGAGRDIKYEQVKSFQQCDSWNAYIVAVSL

SEQ ID NO: 40074 - protein, 241 aa, Arabidopsis thaliana
  peptide (1)..(241): Ceres Seq. ID no. 12330846
  misc_feature (1)..(240): Homolog of NCBI NO: 34908450 NR Description: P0683F02.16 [Oryza sativa (japonica
  misc_feature (1)..(241): Homolog of NCBI NO: 25370730 NR Description: hypothetical protein At2g27590 [imported] -
  misc_feature (1)..(241): Homolog of NCBI NO: 21536815 NR Description: unknown [Arabidopsis thaliana]
  misc_feature (1)..(241): Homolog of NCBI NO: 18401468 NR Description: expressed protein
MDNNISKLGSDVYSRMSLFHGNVLTPLEAKQVKSKSHELIQNISLDDGDDNEDLADPSVVESLEKDGPDSLPKRDIVCAFNFSCCCLHKRSELVSYFKNARDALSKKGGIFVMDLYGGASAEGQLKLQRKFPNFTYTWEQAEFDILSRKTRISLHYHLQKQNRKIRHAFSYSWRLWSLPEIKDCMEEAGFSSVHFWLREMPDASEMRRTDGFGAGRDIKYEQVKSFQQCDSWNAYIVAVSL

SEQ ID NO: 40075 - DNA, 730 bp, Arabidopsis thaliana
  misc_feature (1)..(730): Ceres Seq. ID no. 12325691
  misc_feature: MA Experiment ID: 108577 Result: Down-regulated in Transcription
  misc_feature: MA Experiment 108577 PARAMETER Experiment Name: At_42deg_Heat_cDNA_P Parameter: Temperature (deg C) Value: 42 vs. 22
  misc_feature: MA Experiment 108577 PARAMETER Experiment Name: At_42deg_Heat_cDNA_P Parameter: Timepoint (hr) Value: 6
  misc_feature: MA Experiment 108577 PARAMETER Experiment Name: At_42deg_Heat_cDNA_P Parameter: Tissue Value: Aerial
  misc_feature: MA Experiment ID: 20000111 Result: Down-regulated in Transcription
  misc_feature: MA Experiment 20000111 PARAMETER Experiment Name: At_42deg_Heat_cDNA_P Parameter: Temperature (deg C) Value: 42 vs. 22
  misc_feature: MA Experiment 20000111 PARAMETER Experiment Name: At_42deg_Heat_cDNA_P Parameter: Timepoint (hr) Value: 6
  misc_feature: MA Experiment 20000111 PARAMETER Experiment Name: At_42deg_Heat_cDNA_P Parameter: Tissue Value: Aerial
  misc_feature: MA Experiment ID: 20000306 Result: Up-regulated in Transcription
  misc_feature: MA Experiment 20000306 PARAMETER Experiment Name: At_Germinating_Seeds_Sub_P Parameter: Age (hr) Value: 6 vs. 0
  misc_feature: MA Experiment 20000306 PARAMETER Experiment Name: At_Germinating_Seeds_Sub_P Parameter: Organism Value: A. thaliana
  misc_feature: MA Experiment 20000306 PARAMETER Experiment Name: At_Germinating_Seeds_Sub_P Parameter: Plant Line Value: WS
  misc_feature: MA Experiment 20000306 PARAMETER Experiment Name: At_Germinating_Seeds_Sub_P Parameter: Tissue Value: Germinating Seeds
  misc_feature: MA Experiment ID: 20000315 Result: Down-regulated in Transcription
  misc_feature: MA Experiment 20000315 PARAMETER Experiment Name: At_14day_Shoots-Roots_Sub_P Parameter: Age (day) Value: 14
  misc_feature: MA Experiment 20000315 PARAMETER Experiment Name: At_14day_Shoots-Roots_Sub_P Parameter: Organism Value: A. thaliana
  misc_feature: MA Experiment 20000315 PARAMETER Experiment Name: At_14day_Shoots-Roots_Sub_P Parameter: Plant Line Value: WS
  misc_feature: MA Experiment 20000315 PARAMETER Experiment Name: At_14day_Shoots-Roots_Sub_P Parameter: Tissue Value: Shoots vs. Whole Plant
  misc_feature: MA Experiment ID: 20000328 Result: Down-regulated in Transcription
  misc_feature: MA Experiment 20000328 PARAMETER Experiment Name: At_42deg_Heat_Sub_P Parameter: Age (day) Value: 14
  misc_feature: MA Experiment 20000328 PARAMETER Experiment Name: At_42deg_Heat_Sub_P Parameter: Organism Value: A. thaliana
  misc_feature: MA Experiment 20000328 PARAMETER Experiment Name: At_42deg_Heat_Sub_P Parameter: Plant Line Value: WS
  misc_feature: MA Experiment 20000328 PARAMETER Experiment Name: At_42deg_Heat_Sub_P Parameter: Temperature (deg C) Value: 42 vs. 22
  misc_feature: MA Experiment 20000328 PARAMETER Experiment Name: At_42deg_Heat_Sub_P Parameter: Timepoint (hr) Value: 6
  misc_feature: MA Experiment 20000328 PARAMETER Experiment Name: At_42deg_Heat_Sub_P Parameter: Tissue Value: Aerial
  misc_feature: MA Experiment ID: 20000355 Result: Up-regulated in Transcription
  misc_feature: MA Experiment 20000355 PARAMETER Experiment Name: At_Siliques_Sub_P Parameter: Age (day) Value: 21
  misc_feature: MA Experiment 20000355 PARAMETER Experiment Name: At_Siliques_Sub_P Parameter: Organism Value: A. thaliana
  misc_feature: MA Experiment 20000355 PARAMETER Experiment Name: At_Siliques_Sub_P Parameter: Plant Line Value: WS
  misc_feature: MA Experiment 20000355 PARAMETER Experiment Name: At_Siliques_Sub_P Parameter: Tissue Value: Less Than 5mm Siliques vs. Whole Plant
  misc_feature: MA Experiment ID: 20000440 Result: Up-regulated in Transcription
  misc_feature: MA Experiment 20000440 PARAMETER Experiment Name: At_Closed-Flower__Sub_P Parameter: Tissue Value: Closed Flower vs. Whole Plant
aaacttcgaagattttgatattgtaacgatccgccatggaagagaagaagacagaatccgcgactaagaacgttaaaaaggttaacttgttagaccacatcgcaatcaaacacctccttgatgaatccgtctccgatatcgttacgagcagagggtacaaggaggatgtgagattaagcaacgtcaaatttctgttaggagggattataatcgtggttgctcttgttgctcaattctacaacaagaagtttcctgagaacagagactttttgatctgctgcatcggattgtatgtggtgttgactgcggtaatgcagctgattctgtacattaaggagaagaacgctatcttgttcacctatcctcttgagggatcattcaccagcactggtttggtggtatcttccaagttacctagattctctgatcagtacactctaaccatcgacagtgctgatccgcaatcaatctcagctgggaagtcggttcagttcaccaaaagtgtcactcaatggctcacaaaagatggagttcttgtcgagggtttattctggaaagatgttgaagccctagtcaaagagtacacagaagcaggagaaccaaagaagaagagatgatcatctataatgggaaaagtatgttggtccttattagttctaaatgttacattttttttatgactaaaatcgatggtgacttggtttaaaagacgacagagtttttgcctccc

SEQ ID NO: 40076 - protein, 193 aa, Arabidopsis thaliana
  peptide (1)..(193): Ceres Seq. ID no. 12325692
  misc_feature (1)..(180): Homolog of NCBI NO: 31240525 NR Description: ENSANGP00000021231 [Anopheles gambiae]
  misc_feature (15)..(192): Homolog of NCBI NO: 28195697 NR Description: signal peptidase 25 kDA subunit [Gasterosteus
  misc_feature (9)..(185): Homolog of NCBI NO: 38344552 NR Description: OSJNBa0027P08.20 [Oryza sativa (japonica
  misc_feature (1)..(44): Homolog of NCBI NO: 15233420 NR Description: hypothetical protein; protein id: At4g04200.1
  misc_feature (109)..(193): Homolog of NCBI NO: 15233420 NR Description: hypothetical protein; protein id: At4g04200.1
  misc_feature (1)..(107): Homolog of NCBI NO: 25408649 NR Description: hypothetical protein At2g39960 [imported] -
  misc_feature (1)..(193): Homolog of NCBI NO: 30688096 NR Description: expressed protein [Arabidopsis thaliana]
  misc_feature (1)..(193): Homolog of NCBI NO: 34365647 NR Description: At4g04200 [Arabidopsis thaliana]
MEEKKTESATKNVKKVNLLDHIAIKHLLDESVSDIVTSRGYKEDVRLSNVKFLLGGIIIVVALVAQFYNKKFPENRDFLICCIGLYVVLTAVMQLILYIKEKNAILFTYPLEGSFTSTGLVVSSKLPRFSDQYTLTIDSADPQSISAGKSVQFTKSVTQWLTKDGVLVEGLFWKDVEALVKEYTEAGEPKKKR

SEQ ID NO: 40077 - protein, 101 aa, Arabidopsis thaliana
  peptide (1)..(101): Ceres Seq. ID no. 12325693
  misc_feature (1)..(88): Homolog of NCBI NO: 31240525 NR Description: ENSANGP00000021231 [Anopheles gambiae]
  misc_feature (1)..(100): Homolog of NCBI NO: 28195697 NR Description: signal peptidase 25 kDA subunit [Gasterosteus
  misc_feature (1)..(93): Homolog of NCBI NO: 38344552 NR Description: OSJNBa0027P08.20 [Oryza sativa (japonica
  misc_feature (17)..(101): Homolog of NCBI NO: 15233420 NR Description: hypothetical protein; protein id: At4g04200.1
  misc_feature (1)..(15): Homolog of NCBI NO: 25408649 NR Description: hypothetical protein At2g39960 [imported] -
  misc_feature (1)..(101): Homolog of NCBI NO: 30688096 NR Description: expressed protein [Arabidopsis thaliana]
  misc_feature (1)..(101): Homolog of NCBI NO: 34365647 NR Description: At4g04200 [Arabidopsis thaliana]
MQLILYIKEKNAILFTYPLEGSFTSTGLVVSSKLPRFSDQYTLTIDSADPQSISAGKSVQFTKSVTQWLTKDGVLVEGLFWKDVEALVKEYTEAGEPKKKR

SEQ ID NO: 40078 - DNA, 6117 bp, Arabidopsis thaliana
  misc_feature (1)..(6117): Ceres Seq. ID no. 12639310
  misc_feature: MA Experiment ID: 108576 Result: Up-regulated in Transcription
  misc_feature: MA Experiment 108576 PARAMETER Experiment Name: At_42deg_Heat_cDNA_P Parameter: Temperature (deg C) Value: 42 vs. 22
  misc_feature: MA Experiment 108576 PARAMETER Experiment Name: At_42deg_Heat_cDNA_P Parameter: Timepoint (hr) Value: 1
  misc_feature: MA Experiment 108576 PARAMETER Experiment Name: At_42deg_Heat_cDNA_P Parameter: Tissue Value: Aerial
  misc_feature: MA Experiment ID: 108595 Result: Up-regulated in Transcription
  misc_feature: MA Experiment 108595 PARAMETER Experiment Name: At_Ler-pi_Ovule_cDNA_P Parameter: Plant Line Value: null
  misc_feature: MA Experiment ID: 20000171 Result: Down-regulated in Transcription
  misc_feature: MA Experiment 20000171 PARAMETER Experiment Name: At_42deg_Heat_P Parameter: Age (day) Value: 14
  misc_feature: MA Experiment 20000171 PARAMETER Experiment Name: At_42deg_Heat_P Parameter: Organism Value: A. thaliana
  misc_feature: MA Experiment 20000171 PARAMETER Experiment Name: At_42deg_Heat_P Parameter: Plant Line Value: WS
  misc_feature: MA Experiment 20000171 PARAMETER Experiment Name: At_42deg_Heat_P Parameter: Temperature (deg C) Value: 42 vs. 22
  misc_feature: MA Experiment 20000171 PARAMETER Experiment Name: At_42deg_Heat_P Parameter: Timepoint (hr) Value: 1
  misc_feature: MA Experiment 20000171 PARAMETER Experiment Name: At_42deg_Heat_P Parameter: Tissue Value: Aerial
  misc_feature: MA Experiment ID: 20000173 Result: Down-regulated in Transcription
  misc_feature: MA Experiment 20000173 PARAMETER Experiment Name: At_42deg_Heat_P Parameter: Age (day) Value: 14
  misc_feature: MA Experiment 20000173 PARAMETER Experiment Name: At_42deg_Heat_P Parameter: Organism Value: A. thaliana
  misc_feature: MA Experiment 20000173 PARAMETER Experiment Name: At_42deg_Heat_P Parameter: Plant Line Value: WS
  misc_feature: MA Experiment 20000173 PARAMETER Experiment Name: At_42deg_Heat_P Parameter: Temperature (deg C) Value: 42 vs. 22
  misc_feature: MA Experiment 20000173 PARAMETER Experiment Name: At_42deg_Heat_P Parameter: Timepoint (hr) Value: 6
  misc_feature: MA Experiment 20000173 PARAMETER Experiment Name: At_42deg_Heat_P Parameter: Tissue Value: Aerial
  misc_feature: MA Experiment ID: 20000182 Result: Up-regulated in Transcription
  misc_feature: MA Experiment 20000182 PARAMETER Experiment Name: At_2mM_SA_P Parameter: Age (day) Value: 14
  misc_feature: MA Experiment 20000182 PARAMETER Experiment Name: At_2mM_SA_P Parameter: Organism Value: A. thaliana
  misc_feature: MA Experiment 20000182 PARAMETER Experiment Name: At_2mM_SA_P Parameter: Plant Line Value: WS
  misc_feature: MA Experiment 20000182 PARAMETER Experiment Name: At_2mM_SA_P Parameter: Timepoint (hr) Value: 6
  misc_feature: MA Experiment 20000182 PARAMETER Experiment Name: At_2mM_SA_P Parameter: Tissue Value: Aerial
  misc_feature: MA Experiment 20000182 PARAMETER Experiment Name: At_2mM_SA_P Parameter: Treatment Value: 2mM SA vs. No Treatment
  misc_feature: MA Experiment ID: 20000184 Result: Down-regulated in Transcription
  misc_feature: MA Experiment 20000184 PARAMETER Experiment Name: At_Shoots__P Parameter: Age (day) Value: 7
  misc_feature: MA Experiment 20000184 PARAMETER Experiment Name: At_Shoots__P Parameter: Tissue Value: Shoots vs. Whole Plant
  misc_feature: MA Experiment ID: 20000234 Result: Down-regulated in Transcription
  misc_feature: MA Experiment 20000234 PARAMETER Experiment Name: At_Siliques_P Parameter: Age (day) Value: 21
  misc_feature: MA Experiment 20000234 PARAMETER Experiment Name: At_Siliques_P Parameter: Organism Value: A. thaliana
  misc_feature: MA Experiment 20000234 PARAMETER Experiment Name: At_Siliques_P Parameter: Plant Line Value: WS
  misc_feature: MA Experiment 20000234 PARAMETER Experiment Name: At_Siliques_P Parameter: Tissue Value: Less Than 5mm Siliques vs. Whole Plant
  misc_feature: MA Experiment ID: 20000235 Result: Down-regulated in Transcription
  misc_feature: MA Experiment 20000235 PARAMETER Experiment Name: At_Siliques_P Parameter: Age (day) Value: 21
  misc_feature: MA Experiment 20000235 PARAMETER Experiment Name: At_Siliques_P Parameter: Organism Value: A. thaliana
  misc_feature: MA Experiment 20000235 PARAMETER Experiment Name: At_Siliques_P Parameter: Plant Line Value: WS
  misc_feature: MA Experiment 20000235 PARAMETER Experiment Name: At_Siliques_P Parameter: Tissue Value: 5-10mm Siliques vs. Whole Plant
  misc_feature: MA Experiment ID: 20000264 Result: Down-regulated in Transcription
  misc_feature: MA Experiment 20000264 PARAMETER Experiment Name: At_Open_Flower_P Parameter: Age (day) Value: 21
  misc_feature: MA Experiment 20000264 PARAMETER Experiment Name: At_Open_Flower_P Parameter: Plant Line Value: WS
  misc_feature: MA Experiment 20000264 PARAMETER Experiment Name: At_Open_Flower_P Parameter: Tissue Value: Open Flower vs. Whole Plant
  misc_feature: MA Experiment ID: 20000265 Result: Down-regulated in Transcription
  misc_feature: MA Experiment 20000265 PARAMETER Experiment Name: At_Open_Flower_P Parameter: Age (day) Value: 21
  misc_feature: MA Experiment 20000265 PARAMETER Experiment Name: At_Open_Flower_P Parameter: Plant Line Value: WS
  misc_feature: MA Experiment 20000265 PARAMETER Experiment Name: At_Open_Flower_P Parameter: Tissue Value: Closed Flower vs. Whole Plant
  misc_feature: MA Experiment ID: 20000438 Result: Down-regulated in Transcription
  misc_feature: MA Experiment 20000438 PARAMETER Experiment Name: At_Shoots__P Parameter: Age (day) Value: 14
  misc_feature: MA Experiment 20000438 PARAMETER Experiment Name: At_Shoots__P Parameter: Tissue Value: Shoots vs. Whole Plant
  misc_feature: MA Experiment ID: 20000794 Result: Down-regulated in Transcription
  misc_feature: MA Experiment 20000794 PARAMETER Experiment Name: At_Petals_P Parameter: Age (day) Value: 23-25 days
  misc_feature: MA Experiment 20000794 PARAMETER Experiment Name: At_Petals_P Parameter: Plant Line Value: WS
  misc_feature: MA Experiment 20000794 PARAMETER Experiment Name: At_Petals_P Parameter: Tissue Value: Petals vs. Whole plant
  misc_feature: MA Experiment ID: 20001451 Result: Down-regulated in Transcription
  misc_feature: MA Experiment 20001451 PARAMETER Experiment Name: At_Far-red-induction_P Parameter: Age (day) Value: 7
  misc_feature: MA Experiment 20001451 PARAMETER Experiment Name: At_Far-red-induction_P Parameter: Light Value: Far-red vs. White
  misc_feature: MA Experiment 20001451 PARAMETER Experiment Name: At_Far-red-induction_P Parameter: Organism Value: A. thaliana
  misc_feature: MA Experiment 20001451 PARAMETER Experiment Name: At_Far-red-induction_P Parameter: Plant Line Value: Columbia
  misc_feature: MA Experiment 20001451 PARAMETER Experiment Name: At_Far-red-induction_P Parameter: Timepoint (hr) Value: 24
  misc_feature: MA Experiment 20001451 PARAMETER Experiment Name: At_Far-red-induction_P Parameter: Tissue Value: Whole Plant
cattcacgaaacagtgttctacggccaatttctctcgctcgctccacactcccaaaacaatattcttcttcttcgatttctcactctctgtttgtcgctaccgatcttatttcccgctatttttgttccggcgccgttctccttaaagtcgctattgtcttcgttgaaggtgatgagtatagttcaaaagcaagaagagatgaatggatgtggtctcaatgttgacaaagtagaagcctttacagtgtcacctcaggaaaaaggaaggaaaaacaagagaaagttagctgatccttctcaaccaaatgcttcttccctcactgaattccctccatatgagttaccttcgttgaaacctcagaaccatttgagcggaaatggatcggttggggaagtttctaatcagctgcaagttgaagtgtctgaatctgtcgaatgggatgacccatttgcctgtcatcttgaagaattgttgtcgtcaaatttgctcacgctcttccttgatacaatgaagcagcttattgatttaggctacaccgatgacgaagttctgaaagctgtatcacgctgtaggctgtactgtggaggcaataatcttttgtcaaacattgtcaataacaccttgagtgctctcaagactggagacgaaggtgctggttcaggagactatgtgtttgaggatttacaacagcttgtttcctatacgttggtagaaatgataagtcttattaaggaggtcaggccgtccctatcaacagttgaagctatgtggaggcttttgatgtgcgacttgaatgtcttgcaagcctttgaagctgaaggcgatggattggtgagttcaagtaaattatctgattcggaatctcttggtgctgaatctaatcctccaaaatctagtgacccagataacccaaagcctccccaatccgatcctcaaagcaatcggaatgagccactcaaatttggaaacttcccaaatacaccgaactccaaaaaaactcagtctagtggaacaacaccaggaaaagaagtatgctcgggtagcactgtttcttgtcaaggcatgagaagtacatcatttactctagtctctgatgaaaaattggtatcttgtcgaaaaggccgtactaaaaaagagatagcaatgcttcggcaaaaatcatgtgtggaaaaaattaggacttacagcaaaggcagtggctataaggcggcaaagtttgcatcagttggcagcttccttttagagaaaagagtcaaatcatcttctgaatttgtgccaagaaattcttcatcaaagataacagcagagattggagtgaaagtttcattagctgaggatagcggctgttttgtaagaaagaacagtaagttggattcacctgtggtagtggtagatgcaaagggctatataactgccttacctgctaggtcggtaaaatctgcttcaaaaaaaaagactggttctgagtctgtaactctgataccatcagcttcagaaaagaagtctgattcttcgataccatcaacttcagaaaagaagtctggttctgagtctgaagagaaggcatctgtgtctgcaaagctagcaccagattactatgctgggatcccatatgatgcagctctgggtatatatgttccccgggataagaaagatgaattgattctaaagcttgttcctcgagtgaatgatctgcagaatgaactgcaggtctggactgactgggctaatcagaaagtaaaagaggcaactggtagactacttaaggaccaaccagagcttaaggcactaaggaaagagagggaagaggcagaacagtataaaaaagagaagcagttattggaagaaaacactaggaaaaggctatctgagatggattttgcgttgaaaaatgcgaccagccagttggaaaaagcattcaatactgctcacaggctcgagctggaacaatctatactgaagaaagagatggaagctgctaagataaaagccgtcgagtctgctgagagctttagagaagcaaaagagagaggggaaagatcactgaaggatattcactcgtgggaagggcaaaaaattatgttgcaggaagagctcaagggtcaaagggaaaaggtgacagtgctacagaaagaagttaccaaagcaaaaaatcgccagaatcaaatcgaggctgctttgaagcaagaaagaacagccaaagggaaactcagtgctcaggcttcattgataaggaaagaaacaaaggaacttgaagcgcttggaaaagtggaagaagagcggatcaaagggaaagcagaaaccgacgtgaaatattacatagataacatcaagagacttgaaagagagatctcagagctgaaacttaaatcagactactcgagaatcattgcactgaagaaaggcagcagtgagtcaaaggcaacaaaaagagagagtcttgggatgccgaaagtgaaaagagaaagagaatgtgtgatgtgtttatctgaagagatgagtgtgattttcttgccttgtgctcaccaagttctttgctttaaatgcaatcagcttcacgagaaagaaggaatgatggattgtccgtcttgtcgtggaacaatccataggaggattcaagctcgtttcgctcgctccggcgtcggcgagatgaagcttcaggtccgagtcgtggaagcgaggaatctaccggctatggatctcaatgggtttagcgacccttacgttagattgcagctgggaaagcaaaggtcacggaccaaagtagtgaagaagaacttgaaccccaaatggactgaagatttcagttttggcgtcgacgatttgaacgacgaactcgtcgtctctgttcttgatgaagataaatacttcaacgatgacttcgttgggcaggttagagtttctgtttcccttgttttcgatgcagagaatcaatctcttggcactgtttggtatcctcttaatccaaagaagaaaggttccaaaaaggattgtggtgagatacttttgaagatatgtttcagtcagaagaactcggttcttgatttgacttctagtggggatcaaacctctgcttcgaggagtcctgacttgagactagaatcacctattgatccctctacttgtgcctctccttctagatcagatgatgcttcatctatcccccagacaacctttgcgggtcgattcactcagatttttcagaagaatgctatcaccgctacacctacacaatccagtagtaggagcattgatgcatctgacctatctgagatctccaaacctgtcttttcccttgagctgtctgaagatgaatcatcttctacttcctttgaggaattattgaaggcaatggagtcgaaagatcagggtagtgaacctcctagtaatctatcaggaggtgtcgttgtggaccagttatttatgatttccccatcagatcttaacattgtgcttttcgcatcggattcaagtttctatgcatcattgactgaactgcaagggaccacggaagttcaaattggaccatggaaagcagaaaatgatggcgagagtgttaagcgtgttgtaagttacctcaaggctgcaaccaaacttattaaggctgtcaaaggcacagaggagcagacatatctcaaagcggacggagaggtttacgcagttttagcaagtgttgccactccagatgtcccattcggaggtaccttcaaagttgaagtgctttactgcatctctcctgggcctgagctgccatctggtgagcagtgttcacgtttggtagtttcatggagattgaattttcttcagagcaccatgatgagaggtttgatagagaatggagctcgacaaggtctaaaagacaacttcgaacagtatgccaatttgttggctcaaagtgtaaagcctgtagattctaaggatattgggctgaacaaggagcaagctctctcttccttgcaagctgagcctcaatcagactggaaattggctgtacagtattttgccaatttcaccgtgttatccactttcttgattggtatttatgtatttgtccacattgtgtttgccatacccagtgcaatccaagggcttgagtttaatggccttgatttaccggattcaattggggagtttgttgttagtggggttctcgttcttcaatgtgaaagagtattgcaactgatttcccgtttcatgcaggcaagaaaacagaaaggcagtgatcatggcatcaaagcgcatggagatggttggttgctaactgttgctctaattgagggggtcgatctagcagctgtagatccaagcgggcattgtgatccgtatattgtatttacttccaatgggaagacaagaaccagctccatcaagttccagaaatctaatcctcagtggaacgaaatatttgaattcgatgcaatggctgatcctccttctgtactgaatgttgaagtttttgatttcgatggaccttttgacgaggctgtttcattggggcatgctgaagtcaactttgtgagatctaatatatctgatttagcggatgtttgggttccacttcaagggaaactagctcaggcttgtcaatccaaacttcacttgaggattttcttggatcatacaggaggtggagatgttgtcagagactatttaaataagatggagaaagaggtgggcaagaagtgttgttgcgcgttcttatctgctgaatggaaatttcagattaatgtgcggtctcctcaaacaaattcagcttttcagaagctctttggtctcccacaagaagaatttctaatcaatgactttacatgtcacttaaagcggaaaatgcctttgcagggtcgtcttttcctgtctgcaagaattgttggcttttatgcaagcatttttggtaacaaaacaaaattctttttcctgtgggaagatatagaggaaattcaagtgcttcctcccactcttgcctcaatggggagtcccattgtcgtcatgactctcagaccaaatagaggactggacgcgaggataggtgcaaagacacatgatgaggaaggcaggcttaagttccatttccactcatttgtgtctttcaatgtggcacaaaagacaataatggctctgtggaaagcaaaatctttgactccagagcagaaagtgcaagctgttgaagaggaatcagagcagaaactccaaagtgaagagagtggtctgttcttgggtgttgatgatgtgcgattctctgaggttttctctttgactctccctgtcccggtaagtttctttatggagttgtttggtggaggtgaagtggatcgtaaggctatggagagagcgggttgccagagctattcatgcagtccatgggagtcagagaaggatgatgtgtatgagaggcagacatactacagagataagcggatatcacgttacagaggagaagtaacaagtacacagcaaaagtccctagtgccagagaagaatgggtggcttgtcgaagaggtcatgaccctccatggagttccactgggtgactattttaatctccatctaagataccaaatggaagaatcaacttcaaaaccaaagacgacatatgtgcgagtatactttgggattgaatggctaaagagcactagacatcagaaaagggtgacgaaaaacatcctagtaaatctgcaagatcgtctgaagatgacatttggattcttggaaaaggaatatagcagcagacaacagcaacaacaagtaacataatatacatacatacatagcctttggtctaaaaatggagggctcgaagcaactcgttccagcttgaaaaacggaggtttgctcttgtatggatgcacacaagtagtcatgtgaagacgagagagtgtgaatggaggtttgctctgctagagcaactttgttgattctttatttttatctgcattcactgcttctttattgcatgatttgtctgtagtgaaaggagcagagttttgtgattatgataatatgctctgctactgcctaaaactcttatagaaactgatgatgctctctagcattcttataaaattgctagatgagagacattggttttgttgatgaaagaaactacttgttttagattt

SEQ ID NO: 40079 - protein, 1916 aa, Arabidopsis thaliana
  peptide (1)..(1916): Ceres Seq. ID no. 12639311
  misc_feature (1420)..(1502): Pfam Name: C2 domain Pfam Description: C2 domain
  misc_feature (1420)..(1502): Pfam Name: C2 domain Pfam Description: C2 domain
  misc_feature (438)..(873): Homolog of NCBI NO: 15223228 NR Description: unknown protein
  misc_feature (154)..(290): Homolog of NCBI NO: 30686389 NR Description: expressed protein [Arabidopsis thaliana]
  misc_feature (154)..(290): Homolog of NCBI NO: 25408371 NR Description: hypothetical protein At2g35330 [imported] -
  misc_feature (547)..(879): Homolog of NCBI NO: 30686389 NR Description: expressed protein [Arabidopsis thaliana]
  misc_feature (547)..(879): Homolog of NCBI NO: 25408371 NR Description: hypothetical protein At2g35330 [imported] -
  misc_feature (438)..(873): Homolog of NCBI NO: 15223228 NR Description: unknown protein
  misc_feature (154)..(290): Homolog of NCBI NO: 25408371 NR Description: hypothetical protein At2g35330 [imported] -
  misc_feature (547)..(879): Homolog of NCBI NO: 25408371 NR Description: hypothetical protein At2g35330 [imported] -
  misc_feature (884)..(1905): Homolog of NCBI NO: 15240629 NR Description: putative protein
  misc_feature (884)..(1896): Homolog of NCBI NO: 38344486 NR Description: OSJNBa0022H21.21 [Oryza sativa (japonica
  misc_feature (60)..(811): Homolog of NCBI NO: 15236231 NR Description: putative protein; protein id: At4g03000.1
  misc_feature (547)..(879): Homolog of NCBI NO: 22531056 NR Description: unknown protein [Arabidopsis thaliana]
  misc_feature (154)..(290): Homolog of NCBI NO: 22531056 NR Description: unknown protein [Arabidopsis thaliana]
  misc_feature (547)..(879): Homolog of NCBI NO: 30686389 NR Description: expressed protein [Arabidopsis thaliana]
  misc_feature (154)..(290): Homolog of NCBI NO: 30686389 NR Description: expressed protein [Arabidopsis thaliana]
  misc_feature (154)..(290): Homolog of NCBI NO: 22531056 NR Description: unknown protein [Arabidopsis thaliana]
  misc_feature (547)..(879): Homolog of NCBI NO: 22531056 NR Description: unknown protein [Arabidopsis thaliana]
  misc_feature (60)..(811): Homolog of NCBI NO: 15236231 NR Description: putative protein; protein id: At4g03000.1
  misc_feature (884)..(1896): Homolog of NCBI NO: 38344486 NR Description: OSJNBa0022H21.21 [Oryza sativa (japonica
  misc_feature (884)..(1905): Homolog of NCBI NO: 15240629 NR Description: putative protein
IHETVFYGQFLSLAPHSQNNILLLRFLTLCLSLPILFPAIFVPAPFSLKSLLSSLKVMSIVQKQEEMNGCGLNVDKVEAFTVSPQEKGRKNKRKLADPSQPNASSLTEFPPYELPSLKPQNHLSGNGSVGEVSNQLQVEVSESVEWDDPFACHLEELLSSNLLTLFLDTMKQLIDLGYTDDEVLKAVSRCRLYCGGNNLLSNIVNNTLSALKTGDEGAGSGDYVFEDLQQLVSYTLVEMISLIKEVRPSLSTVEAMWRLLMCDLNVLQAFEAEGDGLVSSSKLSDSESLGAESNPPKSSDPDNPKPPQSDPQSNRNEPLKFGNFPNTPNSKKTQSSGTTPGKEVCSGSTVSCQGMRSTSFTLVSDEKLVSCRKGRTKKEIAMLRQKSCVEKIRTYSKGSGYKAAKFASVGSFLLEKRVKSSSEFVPRNSSSKITAEIGVKVSLAEDSGCFVRKNSKLDSPVVVVDAKGYITALPARSVKSASKKKTGSESVTLIPSASEKKSDSSIPSTSEKKSGSESEEKASVSAKLAPDYYAGIPYDAALGIYVPRDKKDELILKLVPRVNDLQNELQVWTDWANQKVKEATGRLLKDQPELKALRKEREEAEQYKKEKQLLEENTRKRLSEMDFALKNATSQLEKAFNTAHRLELEQSILKKEMEAAKIKAVESAESFREAKERGERSLKDIHSWEGQKIMLQEELKGQREKVTVLQKEVTKAKNRQNQIEAALKQERTAKGKLSAQASLIRKETKELEALGKVEEERIKGKAETDVKYYIDNIKRLEREISELKLKSDYSRIIALKKGSSESKATKRESLGMPKVKRERECVMCLSEEMSVIFLPCAHQVLCFKCNQLHEKEGMMDCPSCRGTIHRRIQARFARSGVGEMKLQVRVVEARNLPAMDLNGFSDPYVRLQLGKQRSRTKVVKKNLNPKWTEDFSFGVDDLNDELVVSVLDEDKYFNDDFVGQVRVSVSLVFDAENQSLGTVWYPLNPKKKGSKKDCGEILLKICFSQKNSVLDLTSSGDQTSASRSPDLRLESPIDPSTCASPSRSDDASSIPQTTFAGRFTQIFQKNAITATPTQSSSRSIDASDLSEISKPVFSLELSEDESSSTSFEELLKAMESKDQGSEPPSNLSGGVVVDQLFMISPSDLNIVLFASDSSFYASLTELQGTTEVQIGPWKAENDGESVKRVVSYLKAATKLIKAVKGTEEQTYLKADGEVYAVLASVATPDVPFGGTFKVEVLYCISPGPELPSGEQCSRLVVSWRLNFLQSTMMRGLIENGARQGLKDNFEQYANLLAQSVKPVDSKDIGLNKEQALSSLQAEPQSDWKLAVQYFANFTVLSTFLIGIYVFVHIVFAIPSAIQGLEFNGLDLPDSIGEFVVSGVLVLQCERVLQLISRFMQARKQKGSDHGIKAHGDGWLLTVALIEGVDLAAVDPSGHCDPYIVFTSNGKTRTSSIKFQKSNPQWNEIFEFDAMADPPSVLNVEVFDFDGPFDEAVSLGHAEVNFVRSNISDLADVWVPLQGKLAQACQSKLHLRIFLDHTGGGDVVRDYLNKMEKEVGKKCCCAFLSAEWKFQINVRSPQTNSAFQKLFGLPQEEFLINDFTCHLKRKMPLQGRLFLSARIVGFYASIFGNKTKFFFLWEDIEEIQVLPPTLASMGSPIVVMTLRPNRGLDARIGAKTHDEEGRLKFHFHSFVSFNVAQKTIMALWKAKSLTPEQKVQAVEEESEQKLQSEESGLFLGVDDVRFSEVFSLTLPVPVSFFMELFGGGEVDRKAMERAGCQSYSCSPWESEKDDVYERQTYYRDKRISRYRGEVTSTQQKSLVPEKNGWLVEEVMTLHGVPLGDYFNLHLRYQMEESTSKPKTTYVRVYFGIEWLKSTRHQKRVTKNILVNLQDRLKMTFGFLEKEYSSRQQQQQVT

SEQ ID NO: 40080 - protein, 1859 aa, Arabidopsis thaliana
  peptide (1)..(1859): Ceres Seq. ID no. 12639312
  misc_feature (1363)..(1445): Pfam Name: C2 domain Pfam Description: C2 domain
  misc_feature (1363)..(1445): Pfam Name: C2 domain Pfam Description: C2 domain
  misc_feature (381)..(816): Homolog of NCBI NO: 15223228 NR Description: unknown protein
  misc_feature (97)..(233): Homolog of NCBI NO: 30686389 NR Description: expressed protein [Arabidopsis thaliana]
  misc_feature (97)..(233): Homolog of NCBI NO: 25408371 NR Description: hypothetical protein At2g35330 [imported] -
  misc_feature (490)..(822): Homolog of NCBI NO: 30686389 NR Description: expressed protein [Arabidopsis thaliana]
  misc_feature (490)..(822): Homolog of NCBI NO: 25408371 NR Description: hypothetical protein At2g35330 [imported] -
  misc_feature (381)..(816): Homolog of NCBI NO: 15223228 NR Description: unknown protein
  misc_feature (97)..(233): Homolog of NCBI NO: 25408371 NR Description: hypothetical protein At2g35330 [imported] -
  misc_feature (490)..(822): Homolog of NCBI NO: 25408371 NR Description: hypothetical protein At2g35330 [imported] -
  misc_feature (827)..(1848): Homolog of NCBI NO: 15240629 NR Description: putative protein
  misc_feature (827)..(1839): Homolog of NCBI NO: 38344486 NR Description: OSJNBa0022H21.21 [Oryza sativa (japonica
  misc_feature (3)..(754): Homolog of NCBI NO: 15236231 NR Description: putative protein; protein id: At4g03000.1
  misc_feature (490)..(822): Homolog of NCBI NO: 22531056 NR Description: unknown protein [Arabidopsis thaliana]
  misc_feature (97)..(233): Homolog of NCBI NO: 22531056 NR Description: unknown protein [Arabidopsis thaliana]
  misc_feature (490)..(822): Homolog of NCBI NO: 30686389 NR Description: expressed protein [Arabidopsis thaliana]
  misc_feature (97)..(233): Homolog of NCBI NO: 30686389 NR Description: expressed protein [Arabidopsis thaliana]
  misc_feature (97)..(233): Homolog of NCBI NO: 22531056 NR Description: unknown protein [Arabidopsis thaliana]
  misc_feature (490)..(822): Homolog of NCBI NO: 22531056 NR Description: unknown protein [Arabidopsis thaliana]
  misc_feature (3)..(754): Homolog of NCBI NO: 15236231 NR Description: putative protein; protein id: At4g03000.1
  misc_feature (827)..(1839): Homolog of NCBI NO: 38344486 NR Description: OSJNBa0022H21.21 [Oryza sativa (japonica
  misc_feature (827)..(1848): Homolog of NCBI NO: 15240629 NR Description: putative protein
MSIVQKQEEMNGCGLNVDKVEAFTVSPQEKGRKNKRKLADPSQPNASSLTEFPPYELPSLKPQNHLSGNGSVGEVSNQLQVEVSESVEWDDPFACHLEELLSSNLLTLFLDTMKQLIDLGYTDDEVLKAVSRCRLYCGGNNLLSNIVNNTLSALKTGDEGAGSGDYVFEDLQQLVSYTLVEMISLIKEVRPSLSTVEAMWRLLMCDLNVLQAFEAEGDGLVSSSKLSDSESLGAESNPPKSSDPDNPKPPQSDPQSNRNEPLKFGNFPNTPNSKKTQSSGTTPGKEVCSGSTVSCQGMRSTSFTLVSDEKLVSCRKGRTKKEIAMLRQKSCVEKIRTYSKGSGYKAAKFASVGSFLLEKRVKSSSEFVPRNSSSKITAEIGVKVSLAEDSGCFVRKNSKLDSPVVVVDAKGYITALPARSVKSASKKKTGSESVTLIPSASEKKSDSSIPSTSEKKSGSESEEKASVSAKLAPDYYAGIPYDAALGIYVPRDKKDELILKLVPRVNDLQNELQVWTDWANQKVKEATGRLLKDQPELKALRKEREEAEQYKKEKQLLEENTRKRLSEMDFALKNATSQLEKAFNTAHRLELEQSILKKEMEAAKIKAVESAESFREAKERGERSLKDIHSWEGQKIMLQEELKGQREKVTVLQKEVTKAKNRQNQIEAALKQERTAKGKLSAQASLIRKETKELEALGKVEEERIKGKAETDVKYYIDNIKRLEREISELKLKSDYSRIIALKKGSSESKATKRESLGMPKVKRERECVMCLSEEMSVIFLPCAHQVLCFKCNQLHEKEGMMDCPSCRGTIHRRIQARFARSGVGEMKLQVRVVEARNLPAMDLNGFSDPYVRLQLGKQRSRTKVVKKNLNPKWTEDFSFGVDDLNDELVVSVLDEDKYFNDDFVGQVRVSVSLVFDAENQSLGTVWYPLNPKKKGSKKDCGEILLKICFSQKNSVLDLTSSGDQTSASRSPDLRLESPIDPSTCASPSRSDDASSIPQTTFAGRFTQIFQKNAITATPTQSSSRSIDASDLSEISKPVFSLELSEDESSSTSFEELLKAMESKDQGSEPPSNLSGGVVVDQLFMISPSDLNIVLFASDSSFYASLTELQGTTEVQIGPWKAENDGESVKRVVSYLKAATKLIKAVKGTEEQTYLKADGEVYAVLASVATPDVPFGGTFKVEVLYCISPGPELPSGEQCSRLVVSWRLNFLQSTMMRGLIENGARQGLKDNFEQYANLLAQSVKPVDSKDIGLNKEQALSSLQAEPQSDWKLAVQYFANFTVLSTFLIGIYVFVHIVFAIPSAIQGLEFNGLDLPDSIGEFVVSGVLVLQCERVLQLISRFMQARKQKGSDHGIKAHGDGWLLTVALIEGVDLAAVDPSGHCDPYIVFTSNGKTRTSSIKFQKSNPQWNEIFEFDAMADPPSVLNVEVFDFDGPFDEAVSLGHAEVNFVRSNISDLADVWVPLQGKLAQACQSKLHLRIFLDHTGGGDVVRDYLNKMEKEVGKKCCCAFLSAEWKFQINVRSPQTNSAFQKLFGLPQEEFLINDFTCHLKRKMPLQGRLFLSARIVGFYASIFGNKTKFFFLWEDIEEIQVLPPTLASMGSPIVVMTLRPNRGLDARIGAKTHDEEGRLKFHFHSFVSFNVAQKTIMALWKAKSLTPEQKVQAVEEESEQKLQSEESGLFLGVDDVRFSEVFSLTLPVPVSFFMELFGGGEVDRKAMERAGCQSYSCSPWESEKDDVYERQTYYRDKRISRYRGEVTSTQQKSLVPEKNGWLVEEVMTLHGVPLGDYFNLHLRYQMEESTSKPKTTYVRVYFGIEWLKSTRHQKRVTKNILVNLQDRLKMTFGFLEKEYSSRQQQQQVT

SEQ ID NO: 40081 - protein, 1850 aa, Arabidopsis thaliana
  peptide (1)..(1850): Ceres Seq. ID no. 12639313
  misc_feature (1354)..(1436): Pfam Name: C2 domain Pfam Description: C2 domain
  misc_feature (1354)..(1436): Pfam Name: C2 domain Pfam Description: C2 domain
  misc_feature (372)..(807): Homolog of NCBI NO: 15223228 NR Description: unknown protein
  misc_feature (88)..(224): Homolog of NCBI NO: 30686389 NR Description: expressed protein [Arabidopsis thaliana]
  misc_feature (88)..(224): Homolog of NCBI NO: 25408371 NR Description: hypothetical protein At2g35330 [imported] -
  misc_feature (481)..(813): Homolog of NCBI NO: 30686389 NR Description: expressed protein [Arabidopsis thaliana]
  misc_feature (481)..(813): Homolog of NCBI NO: 25408371 NR Description: hypothetical protein At2g35330 [imported] -
  misc_feature (372)..(807): Homolog of NCBI NO: 15223228 NR Description: unknown protein
  misc_feature (88)..(224): Homolog of NCBI NO: 25408371 NR Description: hypothetical protein At2g35330 [imported] -
  misc_feature (481)..(813): Homolog of NCBI NO: 25408371 NR Description: hypothetical protein At2g35330 [imported] -
  misc_feature (818)..(1839): Homolog of NCBI NO: 15240629 NR Description: putative protein
  misc_feature (818)..(1830): Homolog of NCBI NO: 38344486 NR Description: OSJNBa0022H21.21 [Oryza sativa (japonica
  misc_feature (1)..(745): Homolog of NCBI NO: 15236231 NR Description: putative protein; protein id: At4g03000.1
  misc_feature (481)..(813): Homolog of NCBI NO: 22531056 NR Description: unknown protein [Arabidopsis thaliana]
  misc_feature (88)..(224): Homolog of NCBI NO: 22531056 NR Description: unknown protein [Arabidopsis thaliana]
  misc_feature (481)..(813): Homolog of NCBI NO: 30686389 NR Description: expressed protein [Arabidopsis thaliana]
  misc_feature (88)..(224): Homolog of NCBI NO: 30686389 NR Description: expressed protein [Arabidopsis thaliana]
  misc_feature (88)..(224): Homolog of NCBI NO: 22531056 NR Description: unknown protein [Arabidopsis thaliana]
  misc_feature (481)..(813): Homolog of NCBI NO: 22531056 NR Description: unknown protein [Arabidopsis thaliana]
  misc_feature (1)..(745): Homolog of NCBI NO: 15236231 NR Description: putative protein; protein id: At4g03000.1
  misc_feature (818)..(1830): Homolog of NCBI NO: 38344486 NR Description: OSJNBa0022H21.21 [Oryza sativa (japonica
  misc_feature (818)..(1839): Homolog of NCBI NO: 15240629 NR Description: putative protein
MNGCGLNVDKVEAFTVSPQEKGRKNKRKLADPSQPNASSLTEFPPYELPSLKPQNHLSGNGSVGEVSNQLQVEVSESVEWDDPFACHLEELLSSNLLTLFLDTMKQLIDLGYTDDEVLKAVSRCRLYCGGNNLLSNIVNNTLSALKTGDEGAGSGDYVFEDLQQLVSYTLVEMISLIKEVRPSLSTVEAMWRLLMCDLNVLQAFEAEGDGLVSSSKLSDSESLGAESNPPKSSDPDNPKPPQSDPQSNRNEPLKFGNFPNTPNSKKTQSSGTTPGKEVCSGSTVSCQGMRSTSFTLVSDEKLVSCRKGRTKKEIAMLRQKSCVEKIRTYSKGSGYKAAKFASVGSFLLEKRVKSSSEFVPRNSSSKITAEIGVKVSLAEDSGCFVRKNSKLDSPVVVVDAKGYITALPARSVKSASKKKTGSESVTLIPSASEKKSDSSIPSTSEKKSGSESEEKASVSAKLAPDYYAGIPYDAALGIYVPRDKKDELILKLVPRVNDLQNELQVWTDWANQKVKEATGRLLKDQPELKALRKEREEAEQYKKEKQLLEENTRKRLSEMDFALKNATSQLEKAFNTAHRLELEQSILKKEMEAAKIKAVESAESFREAKERGERSLKDIHSWEGQKIMLQEELKGQREKVTVLQKEVTKAKNRQNQIEAALKQERTAKGKLSAQASLIRKETKELEALGKVEEERIKGKAETDVKYYIDNIKRLEREISELKLKSDYSRIIALKKGSSESKATKRESLGMPKVKRERECVMCLSEEMSVIFLPCAHQVLCFKCNQLHEKEGMMDCPSCRGTIHRRIQARFARSGVGEMKLQVRVVEARNLPAMDLNGFSDPYVRLQLGKQRSRTKVVKKNLNPKWTEDFSFGVDDLNDELVVSVLDEDKYFNDDFVGQVRVSVSLVFDAENQSLGTVWYPLNPKKKGSKKDCGEILLKICFSQKNSVLDLTSSGDQTSASRSPDLRLESPIDPSTCASPSRSDDASSIPQTTFAGRFTQIFQKNAITATPTQSSSRSIDASDLSEISKPVFSLELSEDESSSTSFEELLKAMESKDQGSEPPSNLSGGVVVDQLFMISPSDLNIVLFASDSSFYASLTELQGTTEVQIGPWKAENDGESVKRVVSYLKAATKLIKAVKGTEEQTYLKADGEVYAVLASVATPDVPFGGTFKVEVLYCISPGPELPSGEQCSRLVVSWRLNFLQSTMMRGLIENGARQGLKDNFEQYANLLAQSVKPVDSKDIGLNKEQALSSLQAEPQSDWKLAVQYFANFTVLSTFLIGIYVFVHIVFAIPSAIQGLEFNGLDLPDSIGEFVVSGVLVLQCERVLQLISRFMQARKQKGSDHGIKAHGDGWLLTVALIEGVDLAAVDPSGHCDPYIVFTSNGKTRTSSIKFQKSNPQWNEIFEFDAMADPPSVLNVEVFDFDGPFDEAVSLGHAEVNFVRSNISDLADVWVPLQGKLAQACQSKLHLRIFLDHTGGGDVVRDYLNKMEKEVGKKCCCAFLSAEWKFQINVRSPQTNSAFQKLFGLPQEEFLINDFTCHLKRKMPLQGRLFLSARIVGFYASIFGNKTKFFFLWEDIEEIQVLPPTLASMGSPIVVMTLRPNRGLDARIGAKTHDEEGRLKFHFHSFVSFNVAQKTIMALWKAKSLTPEQKVQAVEEESEQKLQSEESGLFLGVDDVRFSEVFSLTLPVPVSFFMELFGGGEVDRKAMERAGCQSYSCSPWESEKDDVYERQTYYRDKRISRYRGEVTSTQQKSLVPEKNGWLVEEVMTLHGVPLGDYFNLHLRYQMEESTSKPKTTYVRVYFGIEWLKSTRHQKRVTKNILVNLQDRLKMTFGFLEKEYSSRQQQQQVT

SEQ ID NO: 40082 - DNA, 1329 bp, Arabidopsis thaliana
  misc_feature (1)..(1329): Ceres Seq. ID no. 12579722
  misc_feature: MA Experiment ID: 108433 Result: Up-regulated in Transcription
  misc_feature: MA Experiment 108433 PARAMETER Experiment Name: At_rhl_Mutant2_cDNA_P Parameter: Age (day) Value: 7
  misc_feature: MA Experiment 108433 PARAMETER Experiment Name: At_rhl_Mutant2_cDNA_P Parameter: Organism Value: A. thaliana
  misc_feature: MA Experiment 108433 PARAMETER Experiment Name: At_rhl_Mutant2_cDNA_P Parameter: Plant Line Value: rhl Mutant vs. wt landsburg
  misc_feature: MA Experiment 108433 PARAMETER Experiment Name: At_rhl_Mutant2_cDNA_P Parameter: Tissue Value: Roots
  misc_feature: MA Experiment ID: 108434 Result: Down-regulated in Transcription
  misc_feature: MA Experiment 108434 PARAMETER Experiment Name: At_Root_Tips_cDNA_P Parameter: Tissue Value: Root Tips
  misc_feature: MA Experiment ID: 108461 Result: Up-regulated in Transcription
  misc_feature: MA Experiment 108461 PARAMETER Experiment Name: At_Germinating_Seeds_cDNA_P Parameter: Age (day) Value: 1 vs. 0
  misc_feature: MA Experiment 108461 PARAMETER Experiment Name: At_Germinating_Seeds_cDNA_P Parameter: Tissue Value: Germinating Seeds
  misc_feature: MA Experiment ID: 108462 Result: Up-regulated in Transcription
  misc_feature: MA Experiment 108462 PARAMETER Experiment Name: At_Germinating_Seeds_cDNA_P Parameter: Age (day) Value: 2 vs. 0
  misc_feature: MA Experiment 108462 PARAMETER Experiment Name: At_Germinating_Seeds_cDNA_P Parameter: Tissue Value: Germinating Seeds
  misc_feature: MA Experiment ID: 108463 Result: Up-regulated in Transcription
  misc_feature: MA Experiment 108463 PARAMETER Experiment Name: At_Germinating_Seeds_cDNA_P Parameter: Age (day) Value: 3 vs. 0
  misc_feature: MA Experiment 108463 PARAMETER Experiment Name: At_Germinating_Seeds_cDNA_P Parameter: Tissue Value: Germinating Seeds
  misc_feature: MA Experiment ID: 108464 Result: Up-regulated in Transcription
  misc_feature: MA Experiment 108464 PARAMETER Experiment Name: At_Germinating_Seeds_cDNA_P Parameter: Age (day) Value: 4 vs. 0
  misc_feature: MA Experiment 108464 PARAMETER Experiment Name: At_Germinating_Seeds_cDNA_P Parameter: Tissue Value: Germinating Seeds
  misc_feature: MA Experiment ID: 108577 Result: Down-regulated in Transcription
  misc_feature: MA Experiment 108577 PARAMETER Experiment Name: At_42deg_Heat_cDNA_P Parameter: Temperature (deg C) Value: 42 vs. 22
  misc_feature: MA Experiment 108577 PARAMETER Experiment Name: At_42deg_Heat_cDNA_P Parameter: Timepoint (hr) Value: 6
  misc_feature: MA Experiment 108577 PARAMETER Experiment Name: At_42deg_Heat_cDNA_P Parameter: Tissue Value: Aerial
  misc_feature: MA Experiment ID: 108595 Result: Down-regulated in Transcription
  misc_feature: MA Experiment 108595 PARAMETER Experiment Name: At_Ler-pi_Ovule_cDNA_P Parameter: Plant Line Value: null
  misc_feature: MA Experiment ID: 20000111 Result: Down-regulated in Transcription
  misc_feature: MA Experiment 20000111 PARAMETER Experiment Name: At_42deg_Heat_cDNA_P Parameter: Temperature (deg C) Value: 42 vs. 22
  misc_feature: MA Experiment 20000111 PARAMETER Experiment Name: At_42deg_Heat_cDNA_P Parameter: Timepoint (hr) Value: 6
  misc_feature: MA Experiment 20000111 PARAMETER Experiment Name: At_42deg_Heat_cDNA_P Parameter: Tissue Value: Aerial
  misc_feature: MA Experiment ID: 20000112 Result: Down-regulated in Transcription
  misc_feature: MA Experiment 20000112 PARAMETER Experiment Name: At_42deg_Heat_cDNA_P Parameter: Temperature (deg C) Value: 42 vs. 22
  misc_feature: MA Experiment 20000112 PARAMETER Experiment Name: At_42deg_Heat_cDNA_P Parameter: Timepoint (hr) Value: 2
  misc_feature: MA Experiment 20000112 PARAMETER Experiment Name: At_42deg_Heat_cDNA_P Parameter: Tissue Value: Aerial
  misc_feature: MA Experiment ID: 20000113 Result: Down-regulated in Transcription
  misc_feature: MA Experiment 20000113 PARAMETER Experiment Name: At_42deg_Heat_cDNA_P Parameter: Temperature (deg C) Value: 42 vs. 22
  misc_feature: MA Experiment 20000113 PARAMETER Experiment Name: At_42deg_Heat_cDNA_P Parameter: Timepoint (hr) Value: 8
  misc_feature: MA Experiment 20000113 PARAMETER Experiment Name: At_42deg_Heat_cDNA_P Parameter: Tissue Value: Aerial
  misc_feature: MA Experiment ID: 20000144 Result: Down-regulated in Transcription
  misc_feature: MA Experiment 20000144 PARAMETER Experiment Name: At_42deg_Heat_cDNA_P Parameter: Temperature (deg C) Value: 42 vs. 22
  misc_feature: MA Experiment 20000144 PARAMETER Experiment Name: At_42deg_Heat_cDNA_P Parameter: Timepoint (hr) Value: 1
  misc_feature: MA Experiment 20000144 PARAMETER Experiment Name: At_42deg_Heat_cDNA_P Parameter: Tissue Value: Aerial
  misc_feature: MA Experiment ID: 20000173 Result: Down-regulated in Transcription
  misc_feature: MA Experiment 20000173 PARAMETER Experiment Name: At_42deg_Heat_P Parameter: Age (day) Value: 14
  misc_feature: MA Experiment 20000173 PARAMETER Experiment Name: At_42deg_Heat_P Parameter: Organism Value: A. thaliana
  misc_feature: MA Experiment 20000173 PARAMETER Experiment Name: At_42deg_Heat_P Parameter: Plant Line Value: WS
  misc_feature: MA Experiment 20000173 PARAMETER Experiment Name: At_42deg_Heat_P Parameter: Temperature (deg C) Value: 42 vs. 22
  misc_feature: MA Experiment 20000173 PARAMETER Experiment Name: At_42deg_Heat_P Parameter: Timepoint (hr) Value: 6
  misc_feature: MA Experiment 20000173 PARAMETER Experiment Name: At_42deg_Heat_P Parameter: Tissue Value: Aerial
  misc_feature: MA Experiment ID: 20000180 Result: Up-regulated in Transcription
  misc_feature: MA Experiment 20000180 PARAMETER Experiment Name: At_Germinating_Seeds_P Parameter: Age (hr) Value: 24 vs. 0
  misc_feature: MA Experiment 20000180 PARAMETER Experiment Name: At_Germinating_Seeds_P Parameter: Tissue Value: Germinating Seeds
  misc_feature: MA Experiment ID: 20000234 Result: Down-regulated in Transcription
  misc_feature: MA Experiment 20000234 PARAMETER Experiment Name: At_Siliques_P Parameter: Age (day) Value: 21
  misc_feature: MA Experiment 20000234 PARAMETER Experiment Name: At_Siliques_P Parameter: Organism Value: A. thaliana
  misc_feature: MA Experiment 20000234 PARAMETER Experiment Name: At_Siliques_P Parameter: Plant Line Value: WS
  misc_feature: MA Experiment 20000234 PARAMETER Experiment Name: At_Siliques_P Parameter: Tissue Value: Less Than 5mm Siliques vs. Whole Plant
  misc_feature: MA Experiment ID: 20000496 Result: Up-regulated in Transcription
  misc_feature: MA Experiment 20000496 PARAMETER Experiment Name: At_Guard_Cells_P Parameter: Harvest Date Value: 7/19/2002
  misc_feature: MA Experiment 20000496 PARAMETER Experiment Name: At_Guard_Cells_P Parameter: Organism Value: Canola
  misc_feature: MA Experiment 20000496 PARAMETER Experiment Name: At_Guard_Cells_P Parameter: Tissue Value: Guard Cells vs. Leaves
  misc_feature: MA Experiment ID: 20000527 Result: Down-regulated in Transcription
  misc_feature: MA Experiment 20000527 PARAMETER Experiment Name: At_10percent_PEG_P Parameter: Age (day) Value: 20
  misc_feature: MA Experiment 20000527 PARAMETER Experiment Name: At_10percent_PEG_P Parameter: Organism Value: A. thaliana
  misc_feature: MA Experiment 20000527 PARAMETER Experiment Name: At_10percent_PEG_P Parameter: Plant Line Value: WS
  misc_feature: MA Experiment 20000527 PARAMETER Experiment Name: At_10percent_PEG_P Parameter: Timepoint (day) Value: 20
  misc_feature: MA Experiment 20000527 PARAMETER Experiment Name: At_10percent_PEG_P Parameter: Tissue Value: Whole Plant
  misc_feature: MA Experiment 20000527 PARAMETER Experiment Name: At_10percent_PEG_P Parameter: Treatment Value: 10percent PEG vs. No Treatment
  misc_feature: MA Experiment ID: 20000794 Result: Up-regulated in Transcription
  misc_feature: MA Experiment 20000794 PARAMETER Experiment Name: At_Petals_P Parameter: Age (day) Value: 23-25 days
  misc_feature: MA Experiment 20000794 PARAMETER Experiment Name: At_Petals_P Parameter: Plant Line Value: WS
  misc_feature: MA Experiment 20000794 PARAMETER Experiment Name: At_Petals_P Parameter: Tissue Value: Petals vs. Whole plant
caaaataatccttttgctaaatgggatacaagtaagagtagtattgatgctccgcagctaatgggagcaaaagcgtttacttttgaggagctgaagaaatgcactgacaacttttcagaggcaaatgatgttggcggtggaggttacggcaaggtttatagagggattcttcctaatgggcaactcatagcaatcaaaagggctcaacaaggatctttgcaaggagggttggagttcaaaactgagattgagcttctctcaagggtccatcataagaatgttgtcagactcttgggcttctgctttgaccggaatgaacaaatgctcgtatatgagtacatttcaaacgggtctcttaaagacagtctgtcagggaagagtgggattcgattggattggaccagaaggcttaaaatagcacttggttcaggcaagggcttggcttatcttcatgaacttgctgatcctccaattatacatagagacatcaaatcaaataacatattacttgatgaaaatctaaccgcaaaggttgccgacttcggtctctccaaacttgtgggagaccctgagaaaactcatgtcacaacacaagtcaaaggaaccatgggctacttggatccagagtactacatgacgaatcaattaacggagaagagcgatgtgtatgggtttggtgtggttttactcgagctattaaccggtagaagtccgatagagagaggcaaatatgtggtgagagaggtgaagacaaagatgaataaatctcggagtttgtatgacctgcaggagttgttggacacaacgatcatagcaagcagtgggaatctaaaagggttcgagaagtatgtagacttggctttgagatgtgtggaggaggaaggagttaataggccatcaatgggtgaggttgtgaaagagattgagaacataatgcagcttgcgggattaaatcctaactcagattcagcaacgagttcaagaacgtatgaggacgcaatcaaaggatctggtgatccttatggcagtgaatcgtttcagtacagtgggaattttccagcttcaaagcttgagccccaatgattgattatgtttctttttgttattttgttatttcgtaagtgacttcatacttgaaatgccttgtgaatgtggagtagcatgattctgtttgatatgtggtcgctgattataaagcagatgaatgaagagccaaacgcagaatcaaaaaccaccagatctttggcaatgtcgacaccagttttcaaacataagaaaagtaatcaagctcaatgtatgatgaataattgaatatattaattcttgttg

SEQ ID NO: 40083 - protein, 360 aa, Arabidopsis thaliana
  peptide (1)..(360): Ceres Seq. ID no. 12579723
  misc_feature (38)..(238): Pfam Name: Protein kinase domain Pfam Description: Protein kinase domain
  misc_feature (24)..(357): Homolog of NCBI NO: 10177784 NR Description: receptor protein kinase-like protein [Arabidopsis
  misc_feature (24)..(357): Homolog of NCBI NO: 15240244 NR Description: leucine-rich repeat transmembrane protein kinase,
  misc_feature (10)..(329): Homolog of NCBI NO: 15222211 NR Description: leucine-rich repeat transmembrane protein kinase,
  misc_feature (8)..(360): Homolog of NCBI NO: 7715608 NR Description: F20B17.5 [Arabidopsis thaliana]
  misc_feature (3)..(360): Homolog of NCBI NO: 34909240 NR Description: putative receptor protein kinase
  misc_feature (2)..(360): Homolog of NCBI NO: 30699436 NR Description: leucine-rich repeat transmembrane protein kinase,
  misc_feature (1)..(360): Homolog of NCBI NO: 15240549 NR Description: leucine-rich repeat transmembrane protein kinase,
  misc_feature (1)..(356): Homolog of NCBI NO: 15240547 NR Description: leucine-rich repeat transmembrane protein kinase,
  misc_feature (1)..(360): Homolog of NCBI NO: 30695748 NR Description: receptor protein kinase-related [Arabidopsis
  misc_feature (1)..(339): Homolog of NCBI NO: 8978273 NR Description: receptor protein kinase-like [Arabidopsis
QNNPFAKWDTSKSSIDAPQLMGAKAFTFEELKKCTDNFSEANDVGGGGYGKVYRGILPNGQLIAIKRAQQGSLQGGLEFKTEIELLSRVHHKNVVRLLGFCFDRNEQMLVYEYISNGSLKDSLSGKSGIRLDWTRRLKIALGSGKGLAYLHELADPPIIHRDIKSNNILLDENLTAKVADFGLSKLVGDPEKTHVTTQVKGTMGYLDPEYYMTNQLTEKSDVYGFGVVLLELLTGRSPIERGKYVVREVKTKMNKSRSLYDLQELLDTTIIASSGNLKGFEKYVDLALRCVEEEGVNRPSMGEVVKEIENIMQLAGLNPNSDSATSSRTYEDAIKGSGDPYGSESFQYSGNFPASKLEPQ

SEQ ID NO: 40084 - protein, 340 aa, Arabidopsis thaliana
  peptide (1)..(340): Ceres Seq. ID no. 12579724
  misc_feature (18)..(218): Pfam Name: Protein kinase domain Pfam Description: Protein kinase domain
  misc_feature (4)..(337): Homolog of NCBI NO: 10177784 NR Description: receptor protein kinase-like protein [Arabidopsis
  misc_feature (4)..(337): Homolog of NCBI NO: 15240244 NR Description: leucine-rich repeat transmembrane protein kinase,
  misc_feature (1)..(309): Homolog of NCBI NO: 15222211 NR Description: leucine-rich repeat transmembrane protein kinase,
  misc_feature (1)..(340): Homolog of NCBI NO: 7715608 NR Description: F20B17.5 [Arabidopsis thaliana]
  misc_feature (1)..(340): Homolog of NCBI NO: 34909240 NR Description: putative receptor protein kinase
  misc_feature (1)..(340): Homolog of NCBI NO: 30699436 NR Description: leucine-rich repeat transmembrane protein kinase,
  misc_feature (1)..(340): Homolog of NCBI NO: 15240549 NR Description: leucine-rich repeat transmembrane protein kinase,
  misc_feature (1)..(336): Homolog of NCBI NO: 15240547 NR Description: leucine-rich repeat transmembrane protein kinase,
  misc_feature (1)..(340): Homolog of NCBI NO: 30695748 NR Description: receptor protein kinase-related [Arabidopsis
  misc_feature (1)..(319): Homolog of NCBI NO: 8978273 NR Description: receptor protein kinase-like [Arabidopsis
MGAKAFTFEELKKCTDNFSEANDVGGGGYGKVYRGILPNGQLIAIKRAQQGSLQGGLEFKTEIELLSRVHHKNVVRLLGFCFDRNEQMLVYEYISNGSLKDSLSGKSGIRLDWTRRLKIALGSGKGLAYLHELADPPIIHRDIKSNNILLDENLTAKVADFGLSKLVGDPEKTHVTTQVKGTMGYLDPEYYMTNQLTEKSDVYGFGVVLLELLTGRSPIERGKYVVREVKTKMNKSRSLYDLQELLDTTIIASSGNLKGFEKYVDLALRCVEEEGVNRPSMGEVVKEIENIMQLAGLNPNSDSATSSRTYEDAIKGSGDPYGSESFQYSGNFPASKLEPQ

SEQ ID NO: 40085 - protein, 253 aa, Arabidopsis thaliana
  peptide (1)..(253): Ceres Seq. ID no. 12579725
  misc_feature (1)..(131): Pfam Name: Protein kinase domain Pfam Description: Protein kinase domain
  misc_feature (1)..(250): Homolog of NCBI NO: 10177784 NR Description: receptor protein kinase-like protein [Arabidopsis
  misc_feature (1)..(250): Homolog of NCBI NO: 15240244 NR Description: leucine-rich repeat transmembrane protein kinase,
  misc_feature (1)..(222): Homolog of NCBI NO: 15222211 NR Description: leucine-rich repeat transmembrane protein kinase,
  misc_feature (1)..(253): Homolog of NCBI NO: 7715608 NR Description: F20B17.5 [Arabidopsis thaliana]
  misc_feature (1)..(253): Homolog of NCBI NO: 34909240 NR Description: putative receptor protein kinase
  misc_feature (1)..(253): Homolog of NCBI NO: 30699436 NR Description: leucine-rich repeat transmembrane protein kinase,
  misc_feature (1)..(253): Homolog of NCBI NO: 15240549 NR Description: leucine-rich repeat transmembrane protein kinase,
  misc_feature (1)..(249): Homolog of NCBI NO: 15240547 NR Description: leucine-rich repeat transmembrane protein kinase,
  misc_feature (1)..(253): Homolog of NCBI NO: 30695748 NR Description: receptor protein kinase-related [Arabidopsis
  misc_feature (1)..(232): Homolog of NCBI NO: 8978273 NR Description: receptor protein kinase-like [Arabidopsis
MLVYEYISNGSLKDSLSGKSGIRLDWTRRLKIALGSGKGLAYLHELADPPIIHRDIKSNNILLDENLTAKVADFGLSKLVGDPEKTHVTTQVKGTMGYLDPEYYMTNQLTEKSDVYGFGVVLLELLTGRSPIERGKYVVREVKTKMNKSRSLYDLQELLDTTIIASSGNLKGFEKYVDLALRCVEEEGVNRPSMGEVVKEIENIMQLAGLNPNSDSATSSRTYEDAIKGSGDPYGSESFQYSGNFPASKLEPQ
